United States Patent Application Publication US 2004/0214272 A1 - sequence listing, part 6

SEQ ID NO: 21863 - DNA, 472 bp, Zea mays
  Clone ID: MRT4577_119936C.1
acccacgcacccttttgtctctactatggatcttagctattacggtggagggcttcatttaaaaggggggtcgtttaatatataaatgcggaacactgcttaaatttcgttgtactgaccaactcaattttgctacaacacattggacaccatactggccctttgtatttgtgccattaaaactttatcatatctaatgcaactaggccattggtcacagctactgtttaaaaacaaaatccatatgattaataacatacgtggctatcttcaagatctaatggtttgcctcacagtaaaaagatggtagaatgctcttgaagaacatgggaaaacaatagcatctatgaagacttgaagataactgaatattttaccacgacaggcttcaactgatcgttcacaagtatctatgggaccaatttgatcccccagaaattccccacccataatttcttcacccatcttaacc

SEQ ID NO: 21864 - DNA, 825 bp, Zea mays
  unsure (1)..(825): unsure at all n locations
  Clone ID: MRT4577_119937C.1
gcatcccatcccatcccatcccatatgcgcgtatacctgctagctcctttcactttcccttccattccaattccgttttcttaatgcaaagcacgagcacggctgcgaccggcgaaagctagcagcagctccagctacaagaaccatctctttctctttccctttctgcgactccactcactcgttcaagatctagaggttcttcccgggcagccgtccatgccaagaatggctccgactcggccttgtctggcattggcgcggtgggtgctcctggcggcggtggcggcgaggctcgccggcgctgatgacccctaccgctacttcacctggattgtgacgtatggccccatcaacccgctcggcaccacccagcagggcatcctcatcaacgggcagttcccgggccctcgcatcgactgcgtcaccaacgacaacctcatcgtcaacgtcgtcaacaacctcgacgagccattcctcatcacatggaacgggatcaagcagcggaagaactcatggcaggacggcgtggcgggcaccaactgccccatcccgcccggtgccaactacacctacaagttccaggccaaggaccagatcggcaccttcacctacttcccctctgtcgcgctgcaccgcgccgccggagggttcggcgccctcagcgtttaccagcgacccgccatccccgtcccctacccggccccagccggcgacttcacacttctcgtcggtgactggtacctcgccggacacgaccagctccgccagacactcgactccggnngcgcgctccccgttccccggacgcgctgctcatcaacg

SEQ ID NO: 21865 - DNA, 2571 bp, Zea mays
  Clone ID: MRT4577_119938C.1
atgtctcaagacaagaaggttgttgctgagacgaagctaactgaagaggagaagctttttgagcagaagaaggctttgaatccttatatagctgggtttttggaatcaatggcaaaaacaaatacagagaagattaccaaggatatactggaaggcctttctgaagatactgctggcggagacaacaacgtccctgcccctgaagaaaatgaagttgtgatttaccgaagcttcttcaaagctgggcttcggtttccattgagcaggtttgtggtcgaagtgttgaaaatttaccagatcttccttcatcagataacccccgaagctgttattagaatgggaatttttgtctgggctgtgagaagccagggactggagccaagcgcgaaatgcttctgcggtatgcatgaacttacatatgagacgaaggccatgggcaaggaaaatatcacaataactttggctgttatggatttaccgcctgccccaacgcaagctacccggtatggggataagtttgatgaaccaaatgacgactggctgaaatgtaacgaagccacaagtgataaactgcttgggtcgtattccaaggcagaggataatgcgttgtccgcagccttcggaagtcgaggaaagaagagattgaaccgagtttttgacgctattggcttcgtttatcccgactaccgctacccgctgcgggggcaagggaaaaagaggaaagctactgctgtggccaagactgctgcttcggccactccagatgagcctgcgccgaagagcaaaaagttgaaagtccttacccaccggccacgttatattgaatcggccgtggtacctgagtttggcggggagacttcctcagctgctgaaccaaaggagcccattccttctacacagaaggctgaagattcggctataataccgaaggaaccttcagttgaacttgttgagatgaaggttgataaggctgataagccagaaactgaagaaacaacaaaagtgtcaaaggttttgagccctccagaaaaagccatagtaccaaaggttcaaatgggtactgccataactcctaggagaagaaggatggtgaatgtattagatgtactggagacaaccgactccataagactcactcccaaagaaaaggctgccgaaattgacagagctcaacccaaaattgatattatgcagaaagatgctgaagctacaataacccaggctgaaaccgaggcggggccctctgtgcctgctgagacgaagcctgacgcaaccgagcagggggctgaagaaacaattccatatactaatataacttttgagaaaagtgtggtcaaaggaaccaaatcccttactcccaaagctctctccaaaggttttgattatatcattcgacatgcttcaggaaagagattatccgaagaggaagtttttgaagctaagcactatgctcgggagctaaagtatccgaagggggccttggtgtttaacggtacggatgaggatgatttcttgtactacatcccagacaacaaagaattatccgtctgccgggagatgtctagaagtatgggttttccgaaactcgaagtcggcctttgtgccatgacgaaggacgatctcgcagatagtcttgcatacaacggtctgaagggcttaatacttagcaacgctctaagagcgcaaaagaatgctgaggacgagagctgcactattgctctcaacaaccttcgaacagaggttatcaggctaagaaacgaagccaaagaaaaagacaaaattttacttacattagcggataaagtaaaggaggatgaagctaacttcaaaactcaatccgaagcacaaaaaactgagattgaagaccttcagaaacagctgttcgaagctaaggaaaaatgtggtctcacagagaactatttacaaaaagcagttgatgaacttcgcgcatccaaggagagatgttttgaaaaatccgtggagtgcgtgaagaaaataaagaatagcttcaccaacgtgggcgcttattcaaacgaagataacttcatacgaggcgaccctgagggtgtcatcgagtggatcagcgaagaagccgcaacttttgaggaaatcttaagcgatcgtggagatgtctgtgcattctctggtgcgagaggagttgtagccgtcttggagaaggcgggatgcgatcatgttaaagccttggcccaggccgaagctgccttctccgtggatgacacgaaggacccctctgccgaatcaagctttctgggcggaaaatttttcactgatatttgggagaatggtggccgagaaatggcccatgaaataatgaaaaagagcgaaaaagatattcacgacgctcgagaagcagagaaaaaagctgagaaagccgcagaactcgagagacggatagctgagctatctcctccaccgaaaccgttcgacccactggccgacccagaaaagcggaaagcaatagaaatcataaatatggtcgaagctatcatcgacgaagttgttaccaaacttcttaacaaagttgcagaaaaagttctaaaggaagaatag

SEQ ID NO: 21866 - DNA, 867 bp, Zea mays
  Clone ID: MRT4577_119939C.1
gccagtcccagcccccggcttccattctaatccgccccctcccgagacgccaaagccccaaacccctcgccctcccaaaccctaaccctaaaacctccgccctcccgccgccgccgccgcccgattcccctccccagcctccgcatcccccgtccggcttgaacgatgtcgtccgacgaggaggtcagggaggagaaggagctcgacctctcctccaacgaggtcgtcaccaagtacaagaccgccgccgagatcatcaacaaggctctgaagttggtattgtcggagtgcaagccgaaagccaagattgttgacatttgtgagaagggtgacaatttcataacagagcaaactgggaatgtctacaagaacgtgaagaggaagattgaaaggggcattgctttcccgacatgtgtatctgtgaacaacacagtctgtcatttctccccactggcaactgacgattctgtactcgaagaaaatgacatggtgaagatcgatatggcttgccatattgatggttttattgctgtggtggctcatacacatgtcatcagagctgggccggttactggaagagcagctaatgttcttgctgctgcaaacacagcagcagaagttgcaatgaggcttgttagacctggcaagaagaataaggatgtcactgaagcaatccagaaagttgctgctgcttatgattgtaaaattgttgaaggagttcttagccatcagctgaaacaatttgtcatcgatggtaacaaagtggtacttagtgtttcaaacgctgatacaaaggtggatgatgctgaatttgaagaaatgtcgtaaagaaatgaagtgtatgcaattgatattgtcaccagcact

SEQ ID NO: 21867 - DNA, 259 bp, Zea mays
  Clone ID: MRT4577_11993C.1
tccactcttttgtacaagcgcggatggaagaagttctacgcgctctttcttgcagtatgcgtgtcacacatcgacggatggctcaagagatccaaacaccctattaacattataaaggttatgacttgctgtcacaagataggacattatgtacgttaacatcttttaaggttgacacatttagcaaaattatattcatgcacttttgttgttagcgccataaaactgtttctcctggtacgaagccatatatgtatta

SEQ ID NO: 21868 - DNA, 493 bp, Zea mays
  Clone ID: MRT4577_119940C.1
ggggcagggattattcaatatatatatttcccacaatctatcaaaaaaacctcacactaaaaaactctaaaatctaacctcgttaaaaacaaaaaattaagcctctaccaaaacacttttcaaaaacaaatctaaaagatcacgaaaaaaacaatctcaaagaccgacttttaaaaaaccctcccgcacaaccactctctcacccacccgtccaaaaactcttgttaccacccaaaaaaaacagaaccgcaccacgagaccaacaaaattcccctaaaggagactaaaaaaaacccgacgtaaaaacagccaaccctactcccccggggcaaaaagtaacccctctaactatccaaaaaccaaaaaatcagaaacatcaccggtaacccccgccctccatgaaggaaaaatacccaataaatgggatcacaaaacctctcccttccaagagaaaaaactttcctctcccttcaaaaaaaaaacttcccccccc

SEQ ID NO: 21869 - DNA, 203 bp, Zea mays
  Clone ID: MRT4577_119941C.1
cggggggtgtgcactcccccccggctatgagcagtgggcacggttccgtgcatttaagagcgaccggcgcggccgcatgccacgaccctacagacccaccatctgccgagacggtgggaggccatggcgataacctcaacgaccaagggacatcccgcgatcaggaccctcttcgagcgctctctcttgctgatgcattcgcg

SEQ ID NO: 21870 - DNA, 314 bp, Zea mays
  Clone ID: MRT4577_119942C.1
cccactcgtccgaaaaaaaaaaaaaaattaaataaaaatgaaaaaaacaaaaaaaatacgaaggaaaaactaaaaaaaaaagaagaactaaaagaatctaaaacgaaatatgggggggtcagattttgggccccacattggctatccctttcttggggggtaacctgtccttgcttaggtctccgtgccctgttggaatgtgcctactgttacgattctgtactcggaaaatccactggttgaccaccttctctctacttggaattaatgaaagtttagcctattctcactttagacattagtctcatgcctgt

SEQ ID NO: 21871 - DNA, 788 bp, Zea mays
  Clone ID: MRT4577_119943C.1
ttgggaccctcgaggccggccgggagctgtacctatcggccagtagtcgtcgcgtctgcaggcagatctgagttagccggcggatccgatccgtgcgcgtgctgctgtgtgtgtgtcggtggagatggccacagcttacgctcccatggcgagccaggtgatgaagagcagcctcgtcgtgcactcgaggccgaggggcctgtcaggcgctgctgcgctcacgaggcggcccggccggttcaccgtcaaggccatccagcccgagaaggcaacgtaccaggtggtgcagcccatcaacggcgacccgttcatcggcagcctggagacgccggtcacctccagcccgctcgtggcgtggtacctctccaacctcccggcaggaagaaggaggccgacaagctgcagaccgccgacggctgggccaagttcaccggggggttcttcttcggcggcatctccggcgtgctctgggcctactttctcctctacgtgctcgacctcccctacttcttcaagtagaaatcatcaaagatgcgtatatatatagctccggccgatcctcctctctagctgcatggtatgtaggtggtgtggtccttgtttcatttcactccagcggtgatcagcgccgtgtataaatgtaattcctctgctttgcacaaaaaaaaaaaaaaaaaaaaaaaaaaaaaaaaaaaaaaatccaccatcacacacagcaatccacacaagcacttcgacgtcacacgggcgctgcacacagacacaccaaacgtcggcaccaatggctt

SEQ ID NO: 21872 - DNA, 819 bp, Zea mays
  unsure (1)..(819): unsure at all n locations
  Clone ID: MRT4577_119944C.1
ccggccgggccgggatctagtacctaccggccagtagtcgtcgcgtctgcaggcagatctgagttagccggcggatccgatccgtgcgcgtgctgctgtgtgtgtgtcggtggagatggccggttcaccgtcaaggccatccagcccgagaaggcaacgtaccaggtggtgcagcccatcaacggcgacccgttcatcggcagcctggagacgccggtcacctccagctcgctcgtggcgtggtacctctccaacctcccggcctaccgcaccgccgtgagcccgctgctgcggggcgtcgaggtcggcctcgcgcacggctacctcctcgtggggcccttcgcgctcacgggcccgctccgcagcacgcccgtgcacggccaggccggcgcgctcggcgccgccggcctcgtcgccatcctcagcgtctgcctcaccatgtacggcgtcgcctccttcaacgagggggacccgtccacggcgcccacgctcacgctcaccggcaggaagaaggaggccgacaagctgcagaccgccgacggctgggccaagttcaccggggggttcttcttcggcggcatctccggcgtgctctgggcctactttctcctctacgtgctcgacctcccctacttcttcaagtagaaatcatcaaagatgcgtatatatatagctccggccgatcctcctctctagctgcatggtatgtnangtggtgtggtccttgtttcatttcactccagcggtgatcagcgccgtgtataaatgtaattcctctgcttttgcaaaaaaaaaaaaaaaaggccctagggccctcga

SEQ ID NO: 21873 - DNA, 538 bp, Zea mays
  unsure (1)..(538): unsure at all n locations
  Clone ID: MRT4577_119945C.1
ccagcaggncgactctagaaatttgtcgatgaaacgactccttggattgtcaatcaacgaacgacgaattgctgcaatttagaacatgatttgtaaggacatgattattttaaattattgtcattctaattgtatctatatctataatctataaatatattataagaaccactcactcttcaagcagtatatagtgtgatgatccgggttgaaatgaatagtgctgtggtccaaggtttccaagcaccctattgttataatagtatataattatataattattaataagagtaagaattaagtatatattgaaagatgttaggcacagaagaaattactgtgattatggttacaacacagcaaagttccaataattatgttcttgtcaactctagctaacgaccatcgtagagcatttctttgcaagaggtcagtccatacccccacgatgattagatcccacctattaaaaaccttaatcgtctgaataagacctaacaaatgcataatgctgttaaaaaagaatgtatatatgaaa

SEQ ID NO: 21874 - DNA, 974 bp, Zea mays
  Clone ID: MRT4577_119946C.1
ctggccgggaaaaaaaaaaaaaaaaaaaggagaccctcctcagccgctagtaccagtagtcgtcgcgtttgcagctaggcagatctgagttagccggcggatccgatccgtgcgcgtgcagtgtgtgtgtgtgtgtgtcggtggagatggccacagcttacgctcccatggcgagccaggtgatgaagagcagcctcgtcgtgcactcgaggccgaggggcctgtcaggcgctgctgcgctcacgaggcggcccggccggttcaccgtcaaggccatccagcccgagaaggcaacgtaccaggtggtgcagcccatcaacggcgaccccttcatcggcagcctggagacgccggtcacctcgagcccgctcgtggcgtggtacctctccaacctcccggcctaccgcaccgccgtgagcccgctgctgcggggcgtcgaggtcggcctcgcgcacggctacctcctcgtggggcccttcgcgctcacgggcccgctccgcagcacgcccgtgcacggccaggccggcgcgctcggcgccgccggcctcgtcgccatcctcagcgtctgcctcaccatgtacggcgtcgcctccttcaacgagggggacccgtccacggcgccctcgctcacgctcaccggcaggaagaaggaggccgacaagctgcagacctccgacggctgggccaagttcaccgggggattcttcttcggcggcatctccggcgtgctctgggcctactttctcctctacgtgctcgacctcccctacttcttcaagtagatatcatcaaagatgcgtatatatagctcctgccgatcctcctctctagctgcatggtatgtagagtcgtgtggtccttgtttcatttcactccagcggtgatcagcaccgtgtataaatgtaattcctctgctctgcacatggatggattgggatgtaacctgttcgattttttaccttgttggatgcatc

SEQ ID NO: 21875 - DNA, 238 bp, Zea mays
  Clone ID: MRT4577_119947C.1
aaccaaaaaaagcactaaattttccaaaacggttaccaaagtttaaaattacctggccgggaattacttattttaaaacacgaaggaaataccttattattattataagtaaaaaaacaggtccacaaatgcggggtacatgggcaagaaaagccaaacaattttttccctggggtggagcctgccttctacattacaaagggggcaacaaaaacaagtaacattttaaccctcctta

SEQ ID NO: 21876 - DNA, 1059 bp, Zea mays
  Clone ID: MRT4577_119948C.1
ccggccgggacatgcctgagccatatcacgcctgcaggccccatgcatccatgcgtgcacaggatttcctcctaaagatcgatcgcagactttacttaggccgtcacaagcaggagaccctcctcagctagtacctaccggccagtagtcgtcgcgtctgcaggcagatctgagttagccggcggatccgatccgtgcgcgtgctgctgtgtgtgtgtcggtggagatggccacagcttacgctcccatggcgagccaggtgatgaagagcagcctcgtcgtgcactcgaggccgaggggcctgtcaggcgctgctgcgctcacgaggcggcccggccggttcaccgtcaaggccatccagcccgagaaggcaacgtaccaggtggtgcagcccatcaacggcgacccgttcatcggcagcctggagacgccggtcacctccagcccgctcgtggcgtggtacctctccaacctcccggcctaccgcaccgccgtgagcccgctgctgcggggcgtcgaggtcggcctcgcgcacggctacctcctcgtggggcccttcgcgctcacgggcccgctccgcagcacgcccgtgcacggccaggccggcgcgctcggcgccgccggcctcgtcgccatcctcagcgtctgcctcaccatgtacggcgtcgcctccttcaacgagggggacccgtccacggcgcccacgctcacgctcaccggcaggaagaaggaggccgacaagctgcagacctccgacggctgggccaagttcaccgggggattcttcttcggcggcatctccggcgtgctctgggcctactttctcctctacgtgctcgacctcccctacttcttcaagtagatatcatcaaagatgcgtatatatagctcctgccgatcctcctctctagctgcatggtatgtagagtcgtgtggtccttgtttcatttcactccagcggtgatcagcaccgtgtataaatgtaattcctctgctctgcacatggatggattgggatgtaacctgtaaaaatttttaccatgttggatgcgtccttcc

SEQ ID NO: 21877 - DNA, 224 bp, Zea mays
  Clone ID: MRT4577_119949C.1
acatctgggaccagtgtagcgtcatccttggcgcgccgaatggcgcgcgcaccttcaagctgtctgaccctctctactacattggctaagcatcgatgccaacggcgcggtgcgtagcggctatacattaacccattcaaaaacccgttacacggttacagtgtctgtgctcaactactttttgtgtgtttcccctcactttttatcattatttattacataag

SEQ ID NO: 21878 - DNA, 625 bp, Zea mays
  Clone ID: MRT4577_11994C.1
cccctcgagttttttttttttttttttttttttagatgattgttgttactaagtttttttttcactgacgatcttcgtaactactgcactcctgtttaagtagtcaaaaactcaaaataacacataatatggcgctgtagagaatgggaaaaattacacaagccgtgtagccacttgattacaccggcacgaagatcacctccttgcccagcatgagaacgacgacggccggtgtgctggtgccgatggcgatgacaacgtaggccggccaccgtgacgcgggtgccacggtgatatagacggccgtcatgagcgagacgagcatggcgaggcaggcgatgacggtgagcctgtgaccccacaagagctggtcgaccttgaacctgacggggtcctgccaggcccagatgaaacagaagacgacgacgatggagctgcacatggcgacggtgttggagatgacgaagatctggaacgcgacgtggtggcccttaagggcgatgccgtcgctctggttatagccgccgggcatggtgaaggtggcggagaaggtgacggtggcgatgagggtggcgacaaggatgtaggtctcgacgatgcgctcgaagtacttgtcgtcgcccct

SEQ ID NO: 21879 - DNA, 131 bp, Zea mays
  Clone ID: MRT4577_119951C.1
aaaggaatgataataaagttacttgctttaaaaagaaccaaggaaaattcacaacatatgtgaaacacaaacagctgtgaattttccttggttctttttaaaggaatgataataaagttacttgctttagg

SEQ ID NO: 21880 - DNA, 420 bp, Zea mays
  Clone ID: MRT4577_119952C.1
gatgcatctaacaaggtaaagaggtttaacagagcctacatccggagtccatccatgtacgtgcagagcagaggaattacatttatacacggtgctgatcaccgctggagtgaaatgaaacaaggaccacaccacctacataccatgcatctagagaggaggatcggccggagctatatatacgcatcttcgatgatttctacttgaagaagtaggggaggtttagcacgtagaggagaaagtgggcccagagcacgccggatatgccgccgaagaagaatcccccggtgaacttggcccagccgtttgaggtctgcagattgacagactgcttcttcctgccggttagcgtgagcgagggcgcctgggacgggtccacgtcgataaaggaggcgacgccgcacatggtgaggcagacgc

SEQ ID NO: 21881 - DNA, 800 bp, Zea mays
  unsure (1)..(800): unsure at all n locations
  Clone ID: MRT4577_119953C.1
cgggactctattctacttactaccttggaacttttgtttgacttgaattcctaattccctaacccccccacccacatccgccaattcccctcctcccctactgtcccataaggatctgatttcttcgtttccccttccttttacgggatactatacaacaaccacacacctaaacacccaacctaccattgcatgatcgcgcgtctcccgcccgacatgggcgacaagaaccagaacgactactcggactctgagccgcacgagcgctcgaccatggcccagcaaaaagccatcaacaaaaagaagcaagagcgacgcgaagccggtctccaatccgcccgctcgcgctcctcatcgcgccgtgcccgccgcgcccgcctcgaggaagacaagaagaacggaaagtacatgcacacgacgccgctcgaggtgctcgaggaggccgatgcaaacggtgacctgcagaagatggcatgtttgagcgtatcgggcccgacagcacgtccatggatggtcctgttacgtatgcgcgtgcgatgcgtggtgagattcctatgcgtggcacgaatcccaatgagccgtttcgcatggagccggagaagggcgggagtgagttgaaggatcaggatggattgaagttgacgcttgaggcaaatctggagattgagattgagctcaaggcgagtattcggggggatttgacgttgagtttgtatgcttggaattcgagaaanctacaatcggcattcaatcagcgtttttggatttttttcttgagagccatattacttttctttttc

SEQ ID NO: 21882 - DNA, 553 bp, Zea mays
  Clone ID: MRT4577_119954C.1
ggccgcttttttttttttttttttcagagcagaggaattacatttatacacggtgctgatcaccgctggagtgaaatgaaacaaggaccacacgactctacataccatgcagctagagaggaggatcggcaggagctatatatacgcatctttgatgatatctacttggagaagtaggggaggtcgagcacgtagaggagaaagtaggcccagagcacgccggagataccaccgaagaagaaccctccggtgaacttggcccagccgtcggaggtctgcagcttgtcggcctccttcttccggccggtgagcgtgagcgtgggcatacttcctcctctacgtgctcgacctcccctactacttcaagtagaatacaaattcataaagatgcatatatataatatagctccgcctccgatcctcctctctgcgtgcaaaggtatgccatttcagcagtgacgagcatcgtggatacatgcaattcctctgcacatggatggattgggatgtaacttggaactgttaatttttttttactttgatttggatgcaa

SEQ ID NO: 21883 - DNA, 165 bp, Zea mays
  unsure (1)..(165): unsure at all n locations
  Clone ID: MRT4577_119955C.1
atctnanttaggggttaggttttttaaaccaacaagatttcctgttccataaaaataagtttaagcaaactacattactacgagtgcagaccaccacttttcttaatctagagagagagaataataaaacagttctttttttcttttggtgcttccacgacaaaa

SEQ ID NO: 21884 - DNA, 920 bp, Zea mays
  Clone ID: MRT4577_119956C.1
gcagcagagccgatcccgtgcgtgtgcgagtgtgagtgagatcgacaccactagctaggtcgagaccatggctacagcttacgctcccatggcgagccaggtgatgaagagcagcctgcagctgcactccaagccgaggggcttgtccggcgctgccctcaccaccaccaggcgtccccggttcaccgtcaaggccatccagcccgagaaggcgacgtaccaggtggtgcagccgatcaacggcgacccgttcatcggcagcctggagacgccggtgacctcgagcccgctggtggcgtggtacctctccaacctgccggcgtaccgcacggccgtgagcccgctgctgcggggcatcgaggtggggctggcgcacggctacctcctcgtggggccgttcgcgctcacgggcccgctccgcaacacgcccgtgcacggacaggcgggcgcgctcggcgccgcggggctcgtcgccatcctcagcgtctgcctcaccatgtacggcgtcgcgtccttcaacgagggggaaccctccacggcgcccacgctcacgcttacggggaggaagaaggaggccgacaagctgcagaccgccgacggatggtctaagttcaccggagggttcttcttcggcggcatctccggcgtgctctgggcttacttcctcctctacgtgctcgacctcccctactacttcaagtagaagttgattaataaagatccatatatatatatatatagctccgatgctgcgatgcatgcgatcctcctctctgcgtcggcggcatgcgtggttatgtaggtgatggggtccttgtttcacttcagcagtgatgagcaccgtgtataaatgtaattcctctgcacatggatggattgggatgtaacttgaaactgttaatttttttttacttggatgc

SEQ ID NO: 21885 - DNA, 896 bp, Zea mays
  unsure (1)..(896): unsure at all n locations
  Clone ID: MRT4577_119957C.1
gccggggacaacctccacctcgtcttcccctcctccgcgctcccgtcatctacacctctcgctcccacccacgagtcccaccggccaccgccaccaccaccagtctatcccctcgccatttgtttcctccccgtgcatgaaaccctaaaccaaaaccccacctccctccccgagccatcccctccagcgcggcgatggcaaaggcgctactttcctcctccctcctccccgcgctgcccggcgctgccggaggcagccggagcgctgcgcgaggccgatgctgctcccaccgctccggttgcggcgcggccggcgcgccgcctccgcttgcgaggtgagggcgggcctgcacgggctcgactccgtcggcgggccccaccttcaggccgcgctggagcgcgccgaggcggcgctatacacactcgctgacgccgcggtcgccgccgcgggcgcgggggccgacgcaggccaggctgcggcggtctaaaagaacagcggctggttcggcttcatctccgaggccctcgaggtcgtgctcaaggtgctcaaggatggtctttctgcagtccatgtgccatactcctacgggtctgccatcattctgctcactatcattgttaaggctgcgacattgcctctaaccaaaaagcaggtggaatcaactctggcaatgcagaatttacagccgcagattaaggcaatccagcagagatacgcaggcaaccaggaaaggatacagctagagactgctcggttatacnagcaagctggtgtaaaccctttagcaggatgttttccacgntagcaacaattcctgtatggattggtctttaccaggccctttcaatgtagcaaatgaggggctattgacagaaagatttttctggattcatcac

SEQ ID NO: 21886 - DNA, 917 bp, Zea mays
  Clone ID: MRT4577_119958C.1
gctagtaccagtagtcgtcgcgtttgcaggcagatctgagttagccggcggatccgatccgtgcgcgtgcagtgtgtgtgtgtgtcggtggagatggccacagcttacgctcccatggcgagccaggtgatgaagagcagcctcgtcgtgcactcgaggccgaggggcctgtcaggcgctgctgcgctcacgaggcggcccggccggttcaccgtcaaggccatccagcccgagaaggcaacgtaccaggtggtgcagcccatcaacggcgaccccttcatcggcagcctggagacgccggtcacctccagcccgctcgtggcgtggtacctctccaacctcccggcctaccgcaccgccgtgagcccgctgctgcggggcgtcgaggtcggcctcgcgcacggctacctcctcgtggggcccttcgcgctcacgggcccgctccgcagcacgcccgtgcacggccaggccggcgcgctcggcgccgccggcctcgtcgccatcctcagcgtctgcctcaccatgtacggcgtcgcctccttcaacgagggggacccgtccacggcgccctcgctcacgctcaccggcaggaagaaggaggccgacaagctgcagacctccgacggctgggccaagttcaccgggggattcttcttcggcggcatctccggcgtgctctgggcctactttctcctctacgtgctcgacctcccctacttcttcaagtagatatcatcgaagatgcgtatacatagctcctctctagctgcatggtatgtaggtggtgtggttcttgtttcatttcactccagcggtgatcagcaccgtgtataaatgtaattcctctgctctgcacatggatggattgggatgtaacctgttaaattttttaaaaaaaaaaaaaaaaaaggccccta

SEQ ID NO: 21887 - DNA, 379 bp, Zea mays
  Clone ID: MRT4577_119959C.1
gttgcgcggtttcctggaacatctccgaacgggtaacaattgggttaaaaatgctgaccaacatcctacaaatccggggacccatagttcatctgctcaaagaatgtttggggtgcctttgctgccagaccgggggtggtgccatagcaaaataggggtagaaactattccacctacttacacgctcacaaagcatattcggtaaagagtgtgggctggactgagttcagtgtacctaaaatggataaatcggtgccatttggggggacccgagcggcaataattggtgccatcagagcccctccgggagtatcattttttattaatataatcgtcagctccctgcttggtttgtcttatatatttatataaaaaataa

SEQ ID NO: 21888 - DNA, 523 bp, Zea mays
  Clone ID: MRT4577_11995C.1
gatcgaatgtcacatctttactatataatcggagttttgtacaaaataaataaataaatacattatatggagacaacggtccagcaacccaaagttgactgggagacaacgacctagacctctcacgaactcgtcacagcatcctccaagtgcctcatcctgtggtacctgttcttgacctgggacttgagattccaggtaccaggatgatcttcaggtaactcgtgtcctcacactcgagaagacgtcgatgcagccggtcgacgctgcagtgccgccataggattcccggtgaggattcggccaagcaccggcaagcaattcgtctcccccgccaacttccttgctctgctgaccacacgcacgatctgcacgacttggtgatctcgcccgattccccagcgatcgagaggctgggcgatggtgaacgtgaggcgtggtcgcagcggctctattctctctctcctactcgtcgctgtgcttcagcgtaatcatccatgcaaggttgcgctagctctcgtgc

SEQ ID NO: 21889 - DNA, 200 bp, Zea mays
  Clone ID: MRT4577_119960C.1
gccattcgttcgggcgccctccaacaccacactacgggcggggtgttttaagtgcgagccgtgcgcccagcgaagcagggggcgctctctcagcggcagatgcgtcagctatgcactggctcgcgggccattttggtgaaacagccgaaactgctccagctgaaggctgccattaagatcacgcggtgacaaacatggtc

SEQ ID NO: 21890 - DNA, 317 bp, Zea mays
  Clone ID: MRT4577_119961C.1
aacctgcagatggcgtcgctccacgtggaggcgttccgcatgacgctgcaccgttcaggcgacacgttcatcagcttcctatggtacgagcttgactacatcccaggccaagggccgcatgcgccgtgtcgaccgtgtctggcagatcggatatggcagcgggttcaagtgcaccagttgcagaatggaagaggctgcggagcatgaagaccgccaccaacgggccctgggacgactgcatacaccggtaccccgtcgacgtcccggaagtcgtcaagctttgacctacaggctacggctacgacgacaaagagcga

SEQ ID NO: 21891 - DNA, 480 bp, Zea mays
  Clone ID: MRT4577_119962C.1
aaagtaacccagtgtctaaaaaaaacagtaaaaatccccaaacaacaaacccggggcacacaaccaaaaaatttaaacaaatcgaagaaaacggccacaagacccggccgggggggccgttcaaaggggcaaatccggaaaaaacccaaacacggggggccgcccaagcaggcataaaaaggccccaatccccccaaagggggggcgaaaaaaaaggaacgggccggggataaacaacgccgggaggggaaaaacccgggggtaaccaaaggaaaccgcctggaaaaaaaaccccctttcaccagcgggggaaaaagcaaaaaggcccgcaccgagggccctccccaaagggggcccacccaaaagggcaaaggaaccccccctgaagcggcccataaagcgcgggggaggggggggtaacccccagggggaccgaaacactggccagcgcccaagggcccggtccttccgcttttttcc

SEQ ID NO: 21892 - DNA, 470 bp, Zea mays
  Clone ID: MRT4577_119963C.1
atgttgatgtgaaacaaaccctcctcccttctgtcctctcgcagaccatatgcgtggtacctaggcttttggactcgccgtatcgcctcctgaagcttctagacgttcgagcaggacgaggtgagggtccctgcggcctcgacgacggcgacgtatccgtggtgcccacctgggtggaacgtatcctgtagccagtgccatcatcgctcatcttatggtttcctccaaagcaaagcgcgcatcgcgactgctggctctgccatacataaggcactgccctctagaagctcgcatcatcggattcgatgattgcatgaacttgagcctcggatatgttgaagaaatgaatggtgacaagaacacctacgaatacactggtgcgtatactcctcgatggtgacaagtgtaatgttggaggatgcatcgcgaccagtcgaaggttattatcgacatgaacgatgttcgccgct

SEQ ID NO: 21893 - DNA, 763 bp, Zea mays
  unsure (1)..(763): unsure at all n locations
  Clone ID: MRT4577_119964C.1
cctcgaggccggccggacacttgcttccactgactgcttccaacatggcagacgcactcccctcgcccattccccagcccgaggcaactcacgccgcctcggtcttcactccagtcaaccttgtcctcctctcgctcttcggtgttctggtctacctccgtctcaagccctcgactccccagactcttccgcgggctccgcccccaaccgttttccgcacctttactccgccctcgctgtttccctataatggcctcaacaacatgccagtctacctagctgtccgcggacgtgtttttgacgtcacccctggtcgcaacttctacggccctggtggcccctacgcaaactttgctggcagggatgcctcgagaggcctggcgtgcggtagcttcgacgaggatatgctgaccaaggacttggacggccccctcgacactttggagggcttggatgatgagcagttggacgcactacgaggctgggaggagcgattcagtgaaaagtacttggttgtaggcaagctggtgcccgtaggccacccggaggctgaggaggccaaggcttaggcttaggcacttgtcaatgcgatacgacattccgtgctataacgggtggaaaaaacaggtaggacaatttaccgggctccgaggaaccctcaggtcatgacagttctgactcggnctgatcaagccaagtacatacagcaagtcatagactgctatcaaaccaaaatatagatttagaaagagttgctgttgct

SEQ ID NO: 21894 - DNA, 552 bp, Zea mays
  Clone ID: MRT4577_119965C.1
tttaaatattaatagagctcctgcagagatctggggggggggggggggggcgcgtcccggcggacgcgccggtcagcactaccgtgcctccatactgcgaccgcggttcattgggcacgacgacaaccgagcccagggtggagcacgacgagcccaacacactgcccagttgcttttagctgctagtgacggaccctcagagggggggagggatggtagctgcgcaccttacggcgggggataaagtaaacttagtagatcaggcttcgggagattaacatgataacaagtaagattgcgagtagaattgttatagaggtgttagagacggttactccttagagtctagataaaacaaatattgtgaagtaggtaggaagataaatgactagtttcgcttgtagtaagtagtactagaatagtagtaaatttactttgactaagtacgcttagtagtagtagtacgcaatggtcgttgtaagttgagacgtcaacgagtgaacttcccgtgcctctaagtacaggtagtagtagtagtagtcccagtggtgg

SEQ ID NO: 21895 - DNA, 377 bp, Zea mays
  Clone ID: MRT4577_119966C.1
gcttctgtagtaataacgtaatggagccaatggctagctacctatagctagttcactcgtttagcggagatgagtaacggagcgtcacccatcaccatgggtggcagtgcgagcaatgacctgaaagaaccattgaacaggaaaggaacaaaatctagggaaaaaggaagggcggggaaaaagggttaggtaaaattgcaatttctaatgatcactctatatctaatgtgtttttagtagagtcactacgatataatttactatcggttagtcaatcgtgcaatttgggatataactgtctgttcacaaagggggatgagtctgactttagaagaagtgatggttcactagctattaagggggcactacatgacaaa

SEQ ID NO: 21896 - DNA, 280 bp, Zea mays
  unsure (1)..(280): unsure at all n locations
  Clone ID: MRT4577_119967C.1
aaaagnacaagtntcctccactagctaagctagtcgctactcccaatctcaggagcggccgccgggctccaccgcggccaagaacagtgctactagccaagaaagctggggaacaggctgcttcctgggacgaggaacaggacgacaagggatctggagccggagcccccgatggcggtgacgggaacctcggtggcagccgcggcgacgatgggggggggggcggcggcaatcttcatcaccttcgtnatctgcttntacctgtgcctgtgcgcgaagc

SEQ ID NO: 21897 - DNA, 679 bp, Zea mays
  Clone ID: MRT4577_119968C.1
atttccgattagacagatgcggcgcacaattgtcataccatgatgtggagaagaaaacaacaaaagcctggcttggaatacacacgaagatccttcatttgggcacagtgattgaagatgggatggctgaagacttcgaaaggccaacaggttaatctcgctcttaagttcaagctatgcatactctatttgcacatgatagaagtgtttcttcaatctcctgtgaaccgtgtgtccctaactctctgcgcaactggcctgccatgcataaacagtgcatatgcacacgtccaaaaccttgtcgaggtatacatacaggtatacctgtagctaaaaaagatctgctaccgcaattgacactatgacatctatctcaccaaataccatacatgccttgcctatcaagatcttcatcttggatgatatcgaacgaactatatgcttactttttggaataaatagccttttctgcaacaatgatacactcgaatttattcagcgagctatttattccgaatcattttctcatgacagccgccttcttgatacaatgatgacgtgccaaaagcaaagtgatacggagggacttgcttacgatatctgcagtagacaacgatgtcatcaaatagaactgccgctggatgacatatataagtgatttcccagtacacacatgttt

SEQ ID NO: 21898 - DNA, 533 bp, Zea mays
  unsure (1)..(533): unsure at all n locations
  Clone ID: MRT4577_119969C.1
actatgtgcggaactctggattacctgccacctgaaatggtggagaaggcagaacatgattaccatgttgatatatggagccttggtgttctgtgctatgagttcctttacggggtcccacctttcgaagctaaggagcactcagaaacctacagaaggatagtgaaagtcgacttgaagttcccactgaaaccattcgtttcacctgccgcaaaggacttgatttctcagatgctggtcaagagctcggcgcagcggctgcctctccacaaggttcttgagcacccgtggatcgtccagaacgccgacccttccggcgtgtacagagaaggtagatccgtctaagcttctgttgcagtgtcgcccgccccaccccaaactgtatggattagcgaccctgttgaacaatcttcttacttgtctctctctatatatgaatatgaatgtacatgttctaagcctctctggctctctgaagatttttgtaatattcaatatgacagcccatatgagccttaaaaaaaaaaccnaac

SEQ ID NO: 21899 - DNA, 438 bp, Zea mays
  Clone ID: MRT4577_11996C.1
ggagggaaggccaaatttatttatttatatatgtcgccatggtcaagcatgcatctccatgtccatgtccatgcacgaagcttctctcgctagtcaccactgccacacagtgccactgttcacgcactctttgcctcgccctacggccgccgccgctgcagctgctagctacagtgtgcaacagtgcggtgtgcgtgcgtgcgtccgcgcgcgcgcgccgtttcagtttcctcccatggcgtccgccgacaactgtccgaggacgcgtggtcctcgacgacgacgaggaggagggccagcccggccgggccccaccgggcggcggcggctgcacctttcgcggccggaaaggaaagcggtgctgtggtgttgtagtagtagctagtagtgttactacccgacacactccccggattctccgccacgtggcgaggcatg

SEQ ID NO: 21900 - DNA, 325 bp, Zea mays
  Clone ID: MRT4577_119970C.1
acacattcgtgagggataagcggacctgaactagcagatcaagttcatagagacaaatcattcaaggcttgtgtagatccctgtgagaaacaagaatctgtggggcttaaactaaaagcaaggactgtttaatttaacccttatttctactgtgacatgactttgtttaggaattatgcaccgtacttctcacttaacttgagactgaattccgtacgatccagaattgatatagaactaattcttatacaatgagaactatgtcgctacactcagtcgcaatctctctgctgtctataactaaaagaggagcgctaccctttat

SEQ ID NO: 21901 - DNA, 1606 bp, Zea mays
  Clone ID: MRT4577_119973C.1
cctgccgggattgggcgtctggggctgtgcctgtgtggacagtggggctaggaagagacctctgcgctgcggctgcgcacccgccgtacgtgcacactagtactacaacgctacactgccagcgcaagttgcgcggctcccaataaagagctatacagctgctcatacatgtcctccgtcctccactgctcctcgcccccaagctccgattcacaccctgcgcatgaaaggctgcactcctttctagcccatttaaagctagctagctagggacacacagagcgggcggagaacagggagcgcgtggctcagtgcgagcgcgcggaggcaggcggagcagagcaagcagcggggagcagttctgcctgcgcagcccgatggtttgctccatcgtattggcggcggcggcggcggcgacattggcgtgtctgtccgctgcggccgccgccacgggcgagctcctcccctcgtcgtcggagacgcccctctccttcggggacggctacacgcagctgttcggcgactccaacctcgcgctccacggcgggggcaagagggtgcacatctccctcgacgagcggacaggcgccgggttcgcgtcgcaggccgcgtacctccacgggcacttcagcgcccgcgtcaagctgcccgccgaccacaccgccggcgtcgtcgtcgccttctacatgtccaacggggacgtgtacgagcggacgcacgacgagctggacttcgagttcctcgggaacgtgcgcggcaaggagtggcgcgtgcagaccaacgtgtacggcaacggcagcacggcggccggccgggaggagcgctacggcctctggttcgaccccaccgaggacttccaccgctacgccatccactggacccgcgacaggatcatattctacatcgacgacacgccgatcagggagatggtgcggacggagtccatgggcgcgcagttcccgtccaagcccatgtcgctgtacgccaccatctgggacggctccagctgggccacctcggggggccgctacaaggtggactacaagtacgcgccctacgtcgccgagttcgccgacctcgcgctccgcggctgcgcggccggccccgccgcggcgtgcgcgacgtctggcggcgacgacgacgcgtacggccacgctgctgccgcgatgccgcccgcgcggcgttcggcgatggaggcgttccgggcgcgctacatgacgtacggctactgctacgaccgcctccggtaccccgcgccgctgccggagtgcagcgtcggcgcggaggccgcggcgttcctcccgtcgggggacgcgcgggcggcgttgcataggcacggtaggcgcaaccggatgcgccgcggcgccgactttgccgtctgatccatcggcagcgctggtgtgtgtgtgcccgtgtcgagtgtcgactgtgatgtgatgtgatctgatatatgattagggttcttgattagcgctaccattgtagggtgacagtaaccggagttccacacttcaactgattataaacctcgtcgcctcgactcgcaccgctgctgaaaaaaaaaaaataaagcgtgcgtccgcccacgcgtccgcccacgcgtccg

SEQ ID NO: 21902 - DNA, 604 bp, Zea mays
  Clone ID: MRT4577_119974C.1
atcacatctcgctgcgactgactctcactcacataaataatacctgctgcggtgctggtcatgctcagcctagccggcatgatgtgaggcatcttacaaccggctcagccgctccgactgacctgcacgccaacaaggctcacatcatcgcactgctcccaacgttgacacagacgcgccccgattgatccgtcctttatcagctgaatcgccactatctggtctactgaagactcagcaatttataccgctgcctaagatcagacgatgccgacaggatccccatcatggagcttatcgaagcaaacatctacgaacacaaaagcctacatgaagaaaatctccgaatcatccacatgatggacagacaaagagtgcagatctcatcatctatttgtcctataactactcaagagaactcgctacatatatgatcattactagagaacgaacgagatctaccacaacctctataagacctacctggaccagagctatgccaatcgtaaccagatcgtctagagcaaatagccaagatacgattgcctttgctgcctccgctacatacagacacgtgaccacgactgtgcaacgatttgagatc

SEQ ID NO: 21903 - DNA, 283 bp, Zea mays
  Clone ID: MRT4577_119975C.1
cggttatggtgcttgcctggcaagaaagcaggcttgccttcatgaggttggcgttatcacggtcaacccatgtacctgcaaatcgagaagtcgtccctattgatggggcaagtgatccaagaacaagggttgctcttgcctttacactcggtccaaatcggatacctgtgacagagccagaggcacacttaatgatccatgcatgtgacaagctcctggaaatataacctatgctggaactgagtacagcatatgtaagatcgatcgatccaacgggggatta

SEQ ID NO: 21904 - DNA, 326 bp, Zea mays
  Clone ID: MRT4577_119976C.1
cctaatcaaacgcacacaggccaggggcatttttttggcgcacctgctcaactccaaccccgggaggctcggacggacgaacttgtgctgcgttacctgtccagctcctgctgctgctactgctggttgttgttctggccctgctgagaatcctccatggtacgacctgattgttgggataatagcacacgtcatgatcctggatgcatgagaacggttgcgaactgccatatgaggacgctccggtgaaatgacatcccctgcatgctatctcgagtttgtgtgccagatcgatcctgtagcttgctgcttagagaccagcttta

SEQ ID NO: 21905 - DNA, 595 bp, Zea mays
  Clone ID: MRT4577_119977C.1
ggagaaacaaaaggaattcagcccctgcgggtcggcaaaaccgactaattaacaaaacttgctgaacttgtcaaccgcaccccaacaaaacgatggaaatatctttagcgtttatctgccacaaggttagttccgccccaaaaaactttttgctgaaggttcattggaaaaaaccttttgaggccctatcatgaggggaaaagccgggcggccaaaaccgggcaaactttgaaccccaccttttttcaagcaacttaggtttaacaaaccctacctaaaaactgggggggaaatgtttttacaaaggggggccattatatcagcagggccattgggtccaggcccccactcactaaaatcctggggaaaatcgcaaccctggaaaaaagggtttttttaaaaaactgaaaagctcaatccctggttgaaagccacagtaaacagaaacggccggggaggggcccccctttttactcctgggccaactaaaaactggaaagaagggccaagcctttgtttccccctttgttctttaaaatgcactggggggagcggaatgtctcaggaaggacctcatggaacttctcgaggaaca

SEQ ID NO: 21906 - DNA, 307 bp, Zea mays
  Clone ID: MRT4577_119978C.1
tgtatgctcgcgtactgtagctagtaattcgcgtcgagtgattacggatggtggtgaattctcaggccctaaaaggctagatagggaagacagaacagtgaagtgtgagctctgtaattacaactggatcaagcctttgcttcggtagatcacagcagccatgcggctcggagaatgtgtttccctctagatcatccacatgcatcaaattaaccttcaaccaggtgccgcagattgcattagatggtgttggactgtggatggagagtaccagcaaaatcagcttatgatgcacaattcaagacat

SEQ ID NO: 21907 - DNA, 323 bp, Zea mays
  unsure (1)..(323): unsure at all n locations
  Clone ID: MRT4577_119979C.1
gttcnagatcgcgagcggccgctcggatctagaaccccaatcatcctgcccccaaactcccaccccgcagcatccccacgccgccgcacctcgtcgcgtgcgcgtcgtcaccggcgtgaagatggtcgggccaggcctctacaccgagatcggcgggaagaccagggatctgctgtacaaggactaccagactgaccacaagttgcagcctcactggctacacctccaatggcgtcgctgtaactgcttctagcacaaagaaagctgacctggtccttggcgagatccatcacagataaagaacaggacatgacatagatgtg

SEQ ID NO: 21908 - DNA, 1902 bp, Zea mays
  Clone ID: MRT4577_11997C.1
ggggactcccgttgcgcgggcgagcagcggaccattgattcgcacacgcatcctcagctcaggtagacgcggacctccaaaccaacccaagctagcgatccatctcagcaccagcgagcgagcctccttctccgcctccgcggttaccttcgctcctcgacctcgatcaatcaatcattcgtgggctagtggcccggccccggccctccttcgcgccgcgccaccttccatgctcgctcgcacatggccgctcacccctcgcgcacatgacacggcgtaggtagcagaccgatcaattcctctttcttacacggaatgctataaatacagagccgccggccaccagatgatgatgatgatgaatagaccgcaaccgcagcaagccggcccgctgcagctcctccgttcgctaggactaggagcaggcggaggcggaggcggccggcggggggccatgaagtcggccacgtcgctcctgctcggcgccgccctcgccaccgccttcttcctgctctacacctccctctgccgcgacctcggcagcgccgctgccgccgcgcccaggtcgggatcgccgccgccgccgccgacgccgcggcgggagcaggagaccggcgacacggccgccgctcggcaggaggccgccacgggagagggcggggaagaacgtgtggctgcgagcagcgacggcgaccgcagaggcgccggcgccaccgccgccacagcggaggagaatggtcagagcaaggaggaggagcagcggcggattgtgatgcctgccacgtcaacaacccacgaggccacctctcaccatagaccgcagccgaagcaacagaagaagaagaagagcccaccagcagcgtcccaggatctggcggacctgctccggcgagcggcgacggcggacaagacggtgctgatgacggcgatcaacgaggcgtgggcagcgccagggtcgttcctggacctgttcctggagagcttccgccagggcgaggacaccgcgggcctgccgcggcacctgctggtcgtggccatggacggcagggccctggagctgtgcaacgccgttcaccccttctgctacctgttccgcgtcgacggcatggacttcgccgcggagcagaagtacatggagggcgactaccttgagatgatgtggcgccggaaccggttccagcagagcgttgctggagctgggctacagcttcctcttcacggacgttgacatcctgttgttccggagcccgttcccgcgcctgcgccccaccgcgcaggtcacgcgtccggccgacttcttcgtcggcgacgccgactcgcccaacaactaccccaacggcggcctcctctacgtccgctcctcgcccgccacggtgggcttctaccgccactggcaggcgtcgcgcgcgcggttcccgggccaccacgagcagtacgtcttcgacaggatcgtcaaggaagggtacgccggcgcccgggtgcagttcctggacacggccgtcttcgggggcttctgccagcacggcgacgacctgggcagggtggccaccatgcacgccaactgctgcgtggggctggacaacaagctcttcgacctcaagaacgtgctacaggactggaagacctacagagcgcgcgccgccgctggcaacgcgcagggtttctcgtggcgggtgcccggaaaatgcatacactgactcagctggctccatccttgtctgaactctggaggggttgagctcatttttcgattgttcgccagatagtacaacttaacagctacatctcttttttttccctaatgtatacatacatatattgtttatatatatatatttgtaaagctttttatggaatgtagaaaaattattattaaaaaaaaaaaaaaaaagggcggaccga

SEQ ID NO: 21909 - DNA, 577 bp, Zea mays
  unsure (1)..(577): unsure at all n locations
  Clone ID: MRT4577_119980C.1
acataaatgtatagaagtgattaaaataaaaaaanattacacaagccaaccaaaaatccaactagacccaccaattcaccaaattgaccgggagggcggaataaccggctatggccggaccggggaagaaacagggaaaaacagcaaagtcgacgggagtacccagactaacgcaatccattgagagcctggctgagccccgcgcttacacatgaaataattgaacaatcgaacaattcagaatattacatgaactaaccggcccaacaggcgacacgaaagcagcagatcggtcgggacgaaccaatccacaaaatctggggagcgcttggggaataaactactgctaacctcgactctacccaattcttgggattgcttggggaagcacgaaccaacactaccttntattgaagcctggggaaagcgggctaggcggggagcgaagccgggttgacgtgtttnccaacccgaccggatccgaggagatatggggatcgaaaggcaaataaagcaaaaggacccgccgggccacgctgaatagcatacaattggacacgacggcttgcctgggtaa

SEQ ID NO: 21910 - DNA, 640 bp, Zea mays
  Clone ID: MRT4577_119981C.1
taggggccttttttttttttttttttctttttttttttttttttttttttttttttttttttttttttttttttttttttttttttttttttttttttggggaaaaaatggaccaccttttttcccttaccaaaaaaaaccaccaactggtaaaaaggggaaacataacaaaaaaaccccactttttacccgggccgcaggaaaacccaaaaacgggccaaaacccccaaaaaaaagggaaaataagctttccccgggggctttactaggggaaaaaaaaaagggaaagatggggagggacactttatcgaccccccccctcttggtttcacccaggggggccccaaagtgggggatttcaacccctggcccaaaagggtcggccccctccaaggtccaaaccaattttaacatgggggggaacccggtgcccaaaggggtgggggcctccccgcttaaacccgagggcaagaaaaaaatttccaaaaacaggatccccagaaccctggccggactggcatttttggccacccccggacccttggggaggtcctcccagaaaagggtccccgggggggacccccctggccttttggcccaaaaggaaccccccatggtccaaaccccccagggccggggc

SEQ ID NO: 21911 - DNA, 378 bp, Zea mays
  Clone ID: MRT4577_119982C.1
ttggaaccttggctgatttagtgcttgtagatgtaagaaaggacagtcggcctcgtctccgtttagttttttcgtggtaacggtcacagggtcacatagccattagacctattggcgcatgcggctaccgctatgtccagtgaacagtgccggtcgacggtcataggttctgagagagagtgcggcaactcttatagaacccctcgagccacggcccgctggcgctggctgccgtcgtcgaaaaggatcggaccgaaggcggcggcggggtcccggagtgcgcaagtcctggacccgcggccaaccggtcgcgaaacaaggagagaccgagagggatagaaagaggacgaccgcaagcttagtgactcactacacact

SEQ ID NO: 21912 - DNA, 201 bp, Zea mays
  Clone ID: MRT4577_119983C.1
gagacactatataagacctatgacgcacactgtcactcatacttaaaattcggatcgaggctgaagctgccactacctaaccaatctaatgtaacgtgagccttacacattcttgtgatctgttcgtaagatatcgaaattgattgaatggaattagggtttacataaaaaaaaaaaaaattaattaaaataggggcggcc

SEQ ID NO: 21913 - DNA, 172 bp, Zea mays
  Clone ID: MRT4577_119984C.1
agcagatcgctgccattctacttaacatattgacatgatctgcaacatacaccagcacatgactgccaactatagagcattataccagaagagcagctgcggctctcctcgcagtgacaaggtgtacctcggtgaatgcagcgtggacaaagatatgcatgccgcatagatt

SEQ ID NO: 21914 - DNA, 252 bp, Zea mays
  unsure (1)..(252): unsure at all n locations
  Clone ID: MRT4577_119985C.1
cccacacgtncgcggacacttgttttcctacgctttttcagactcttgttcctatgccctttcgtgagaactagatttatcgctcggtgatcattatgacacattggttggtacagcaatcaaacatgtgatattcctacatgcttgctttgcataatgcgtatatctactgttaaatatttatatataaccagtattacgtcaaactatacaactacacgagcagtccttctagaatatccaagctttaca

SEQ ID NO: 21915 - DNA, 3861 bp, Zea mays
  Clone ID: MRT4577_119986C.1
ctatcctgtacagatgttgagactggatcggaagtctaaaaagacactcgacggtaaccccttggtgaagatgtcagcgaactgcagcgtggtggggacgctgagaacccgaacgtcaccgacagcaacacgctcgcggacgaagtgcaggtcgatctccacgtgcttcgtgcgctgatgctgcacgggattggtggagagatagaccgcgctgacgttgtcgcagtagacgagggtggcgcgctgaaggggactgtggagctcgtggaggagctgtcgcagccaggaggcctctgccacgccgttggccacggcgcggtactcggcctcagcgctggagcgagagacgatgggctgccgtttggcggcccaagagacgaggttggtgcccaggaacacagcataaccggaggtggaccggcgcgtgtcgggacagccagcccagtcagcgtcggtgtagaccacgagctctgacgtcggggatggtcgaagaaggaggccgtagtcgagggagccgcggaggtagcgcaggatccacttgagagcggtgaggtggggctcccgcggagtgtgcatatgtaggcacacctgctggacggcgtaggcgatgtcgggctggcgctggtggaggaagagaccctgaggctgacgctcggcggtgatgccaaggaagtggtgtaggggccccaggtccttcatcgcgaactcccgctgaagggcgacgatcgtgcgctgtagaaggtcggtggtggatgccgtgagcacaatgtcgtcgacgtagagcaggaggtagacggtgtcgtcgccgcggcggtagatgaacagggacgtgtccgacttggcctcgacgaagccgatggaggccaggtaggaggcgaagcgactgtaccatgcccgtggcgcctgcttgaggccgtacagggatcggttcagccggcagaccagatccggacggtcagcgtcgacgaagccggtgggctggctacagtagacagtctccatcagagtgccatggaggaaggcattcttgacgtcgagctgatggatcgcccagtcgcgggagagggcgagggagaggacggcgcgaacagtggcgaacatcgggtggacgtgcccggggtcgcggtggatggcgaccaggtggtacacagacgactcggagcgggctgccggaacgtcgggagcggcgggtatggccggctcgcggcggtgataaacgacggcggggtcggcaaagcgggccgtgctcgtcgacgggcccgggtcggcaggcgccgaggcggcggcgtggctgcgacggtggtagacgagcgcggggtcggcggggccgcgcgtggcgcaggcggggtcattggggccgcgcgtggcgcaggcggggtcgtcgaggccgcgcgtggcgcaggcgtgttcgacggggccgcgcgtggcgcgagagtaggcgcgagccgcggcgtcgaggctgggagggggggagacctgatcggactcgaggagggagtcgagatcggcgggtggggaggggccagcaaggggaaacacgtcctcgtcaaagacgacgtgacgagagatgatgatgcggtgggaggcgaggtccagacaccgataccccttgtggtcagaggagtagccaaggaagaggcagcgggtggagcgaggagaaagcttatgaggggcagtagcagaagtgttagggtagcaggcacaaccgaacacgcgaaggtggtcgtaggtgggggctgtgccgtatagggcgaagtagggagtggggtggctcaccgccttggagggaagacggttgagaaggtgggtggcggtgtgcagggcctctgcccagtagatggcagggagagacgccagggcaggaggcagagacgcgccggaggtggatggccggagcgtgtagaggggccccgagctgtcacagcgggcgaggggagtcttggtggccagatctgaggtgacaggcagagtggaaccgttcccaacgacgatcgatgaaggatgagaggaattggggggatgggagcgggagagcgtgcctgtagtgggagtggtatggtaggaggcaccggagtcgatcacccagtcggaggaaggaggggtcatcgccatggtgctgaaagcggcggcgagggaggcgttgtcccagcctccagacagcggggaccaagtcgtcgtaggggtccccgaaggcaggaggtggggcggagccgtatgcgatgcaggcacgccgtagggaggcgtgggaggcacgccgtagggtggcgcggtcaggagggccggcgccgggggacgggaggcacgtggggcctggcccggccacatggcgatggtcccggtccaggggttataaagtgacggccacgcctggccgccaccccgaccggggggaccaccacgagaggagccgccacccccacggccgcccttgcgggaacgacggctgccgtcggaggcggacgcttgacgaggggccgcagggacggcaggtgtggggcgggtaggggccccggtcgacggagggcgaggggcctggccccctgaaggtgcctgaccaccgggaggagcgctgtagagcgccggagccggagcaggggcctcatacgccatggtgagctcctcgaggagcagctcgttccggacgtgatggaatgtgggaaagggaacggtcctcttgatgagagcctttaggtggccatagcgggggctgaggccatgtagaaggttcaacaccaaggtccgatcggcgacaggctcgccgaggtcacggagagagtccgccatgcccttcatctggcggcagtactcgtccacggagaggtcctcctgagagaacaggtggaactgggcgtcaaggtgcagggcgcgagcgtcccggttcccgaggaactggtcttcgagggcgagccacgcctgacggcccgtgtccgcctggtcgcggatgatgtcctggagctcgacggtgatggttccgtggagccaggagaggaccacagagtccatcagggaccaggcccgagacggcggtgtggcgacgtcgtcgaggacgtggtcgtcgagggcgtagcgccgcaaggtgagaaggacctgccccctccagcgagggtagtgagaggacgccgggtccaaaacgacggacacgagggaccagatgttctgtagtccggcggcctgggcatggagagcggcgatgtggtcagcctcgagtccacaggcgtgggtagcatctggggtgggcggtggtgtccccgagtcgaccggaggagggctgaggatgagacgctgcacagtggccatctgggcggtcagtgtggcggccagggcgcgctcctggtccagagcacgagacgcgacgcgctcgcgctcctgcgaggcggccagggccgcctggatggcggcgatggtggacggcagcgtggagtcggtggagggcggcggagaagcccaggtggcgtcggcgacgagcggccgagtgggggggaacctagggggcgggtgtccggtgagacgtgttggcgagggtagacaggtgaagacgccggcgcatgtcgggtagcccgggaggccaaatccggaggggccgaagtcggcagcacgcgtgctggccctggtgggagccccggcggcgttgtggtgctcgacggaggtggctgcggctgtcctgtgcacagcagcgaggtcggcagcacgcgtgctggccgcggtgggagccccggcggcgacgtggtgaccggcggcggcggccatgcctagccccgcggcgcccgcacccgacacagcaggggcggcgcccagccccgcggcggaggtcgtgcccagggccgctgcggcggggtggtcggacgggggcggaaaatccat

SEQ ID NO: 21916 - DNA, 1962 bp, Zea mays
  Clone ID: MRT4577_119987C.1
ctagcgctggtggaggaagagaccctgaggccggcgctcggcggtgatgccgaggaagtggtgtaggggccccaggtccttcatcgcgaactcccgctgaagggcgacgatcgtgcggtgtagaaggtcggcggtggatgccgtgagcacaatgtcgtcgacgtagagcaggaggtagacggtgtcatcgtcgcgccggtagatgaacagggacgtgtccgacttggcctcgacaaagccgatgaaggccaggtaggaggcaaagcgactgtaccatacccgtggcgcctgcttgaggccgtacagggaccgattcagccggcaaaccaaatccgaacggtcagtgttgacgaagccggtgggctggctgcagtagacagtctccgtcagagtgccatggaggaaggcattcttgacgtcgagctgatggatcgcagtggcgaacttgacgacggggctgaaggtctcgtcgtagtccactccggggcgctgggtgaagccccgaaggacccaacgggccttatagcggtcgagggagccgttcgaggtcagcttgtggcgaaatagccacttgccggtgaccacgttggtgcctggtggacgcggcaccaggtcccaggtgtggttggccaagagggccgcgtactcctcctccatagcacgacgccaatgtgggtcagcgagggcagtgcgaacggaggagggtaccggggaagcgtcgggtggagtgctggatgtagcagctgccaggagcagccggtcgacggggcagagaacgccagcggtgcgccgagtcaccatcgggtggacgtgcccggggtcgcggtggatggcaaccgggtggtaaacggacgactcggagcgaaccgccggaacgttgagagcggcgggtatggccggcggcgacgttgatagacgacggcggggtcggcgaagcgggccgcgctcgtcgataggcccgagtcggggggcgccgaggtagtggcgtggccgcggcgatggtagacgagtgtggggttggcgaagcgagccggggtcgacggggccgcgcgtggcgcaggcgtggtcgacggggccgcgcgtggcgcagacggggtcgacggggccgcgtgtggcgcaggcggggtcgacgaggccgcgcgtggcacaggcgtggtcgacggggccgcacgtggcgcaggcatgatcgacgtggccgcgcgtggcgcaggtggagtcgacggggtcacgcgtggcgcagaagaggtcgtgagcggtggcgtcgtggccgcacgaggagcaggtaacggcgcaagacggggcgccagaggtgggggaggaatcggatcggagaggagcggtagcggaagtgttagggtagcaggcacagccgaacaagcgaaggtggtcataggaaggggttgtgccgtatagggcgaagtggggggtagggtggcgcaccgccttcaagggaagacggttgaggaggtgggtggcagtgtgcagggcctctgcccagtagctggcagggagagacgcctggaagagaaggcagcggagcatattggtggtggtgcggatcatcttatcactgagatgatgcatggccaaaggcaatgtggtagtgtcgcagatcatcttcaccttctcaaagtgtgtctggagctggttcttaacgaggtcggcggcggcccgctcctccatggcgcgcagctgctcgacccgcacgagctgggcgcggcgcctatcgtagaagcggtaggcggcgtaccccaacccagcgacgcccagagtgacgaggatcttccggcgatgccgcgcccagaacccccttgccgaggccagcatggcggcggagattgaagtcgcgaggggaatccgggttggtgtgcctgcggtgctcgcgatcaagaaggcatggtggacggagttgggactggggagacaggagaacccggactccagagtccagacgacttgggg

SEQ ID NO: 21917 - DNA, 411 bp, Zea mays
  unsure (1)..(411): unsure at all n locations
  Clone ID: MRT4577_119988C.1
ggggcgggcgggggacaaggaattgctcttggagtctctctccccgctgccgccgccgccggacagtgcaccgacgatacgacctcctccttcctccgatctgggctttttaatccgcgggtcccgtacaagatgcttcccctctcgcgggtcgaaagcggcangggcacccaatgggcggggagctgaaaaatggggagacgtacaacgggcatgtgggcaatggcgacacgtggatgaacatccaccgtanggaggtgatttgcacctcaaaggatggggacaaggtttggaggatgccanagtgtgacgggggggggaacaccattaactatcttcgaggtcctgatgaggtgattgacaagggtcangaggaaacttccaaaagccgggcanataggaagccaccag

SEQ ID NO: 21918 - DNA, 288 bp, Zea mays
  Clone ID: MRT4577_119989C.1
aacaaaggggggatccttttaatttatgaaaagattggtaaaaaaccgtttcttttccacagccaccaccatgagcaaccggggtttttgatcggggcaaaacgcccaccacagacttcaaaccaaatactggggtttttaaatgtttcgacaagcctggggaaccaaaaacaaaaggagtgggggggttttttttcacgcttttttattgggcccctatggggcacgacgaggattcttatgcactattgggttggccagttttgttccaaaattttacgggctttg

SEQ ID NO: 21919 - DNA, 935 bp, Zea mays
  Clone ID: MRT4577_11998C.1
agcagtggtaacaacgcagagtactttttttttttttttttttttttttccttcatccgcgtaattttctattactttatttatatgaccatttacaacacctgcatcgtcatatttaatctatacaggatgtacaatgagcatttacaacacctgcacatagtttacaatcatcagctacacctttatcatctacgtacacaatagatcagatcatgaggattcctagttaccgaggatttatcaacgtaaacatctcctagatcacctaactttgccgtgaaaataccgataactgatagtctcctacagctctacggatcataatcagaatctctttggggagtcatatgggctttgtggtctgtggctgatgtcgcgccatggatctggaactgggtcgcttcctctcatctggttctgcatgtaactgactgtttgtgggccacagatcccgaggagaatgccagatgtgatggggaagcaacgcagctccagttcgattgcttcagctggcgtaacgggcttgagcatggagacaccgggagagacatgtttgctctcacatcaatatgcctgcttgaagttttgtggggtgaaacgcatgctgaggaagaccccgtaaaacctcgcgctcttatccctccaatgtcccgcagaggagcaacacttctcttcaatgaaggttctttgttggattattgcctgattgtcttgaacaaaaggatggcgcagcaactgagttgcagatgggcgctgcgccggatcacgttttaagcacaaactaaggaaatctttcccttctttagaaagtctctctgggatttctggcatatccttagtgtttactatcttaaacattgcgtgtacatgttcatactgatgccaaggattctcccagttcccattcccggccggcctcgagggtcccaatg

SEQ ID NO: 21920 - DNA, 325 bp, Zea mays
  unsure (1)..(325): unsure at all n locations
  Clone ID: MRT4577_119990C.1
tcgcgatctagaactaggactagttctagatcgcgatcggccgctcttgcggttcggagcatcagtncgcgtgcctgcgaggctttggccgatcaatagaagcagcataaccaccacagaacgcataaccatttccacaacggaacggaactgactgtgggaatgagctaaaaagagccgtaaaaccccaaagccatccatcgggttaattagttcctccagttcccctcgccggaatcgccgccgcgagaatatctggcactcccgccgtatccaccgtgaccacctccgtatcccctttcccggccaccgccggttcctccgt

SEQ ID NO: 21921 - DNA, 855 bp, Zea mays
  Clone ID: MRT4577_119991C.1
ccaacgcgcccgcccacgcgcccgattgctccgccccgttctcttctccttcactctcctggtttattcctccgtgccgatctcgtcttctccggcgggaccatggcgccgtcctcctcccgattcgacgatccggcggcggtgaggcgccccccgcagcatgaacggaagccgccgtatatgttgcttctcccgctcgtctacgcccccgtcctccccctcatcaggatcgggctgcggcacaatcccgtggtgagggaccgcctcttctacggcgtcctcgccggcgcattcgcccacggcgcctacctcatatcggaactgtatgatgtggagagcaaatgatggacatccctcgaaggatgaggggataagttttcaggtagcaaaatttgattccatcgggattccagattgttggatgagagctgacatggcaattcagactaactagtgtgctatgtacccttatgttttctttggtcttgctattatgtttggcaaaaggatggaatggttgagcaaataaagtaattccagattgagaaatatttccagcgacggtattccatttagcgcttgtttgggggagccgaaggattgggagaggattgaaagggttaatatcatccgaggatttgcctcctcaatcctgttcaatcctctagcttccaaacgagtccttacatgctcgtgttggctaattttgtaattttgattgtatccatgatatagtatactactccctccgtcctaaattaaaatgtcttttagataaaaaaaaaaaaaaaaaaaaatatgtaaaaaaaaaaaaaaaaaaaaaaaaaggaaaaaaaaaaaaaaaaaaggccccta

SEQ ID NO: 21922 - DNA, 1661 bp, Zea mays
  Clone ID: MRT4577_119992C.1
ctatcctgtacagatgttgagactggatcgaaagtctaagaatacactcgacggtagtcccttggtgaagatgtcggcgaactgcagcgtggtggggacgctgagaacccgaacgtcaccggcagcgacatgctcgcggacgaagtgtaggtcgatctctacgtgcttcgtgcgctgatgctgcacggggttggtggagaggtagaccgcactgacgttgtcgcagtagacgagagtggcgcgctgaagaggactgtggagctcgtggaggagctggcgcagccaggagacctctgccacaccgttggccacggcacggtactcggcctcaacgctggagcaagagacgacgggctgcctcttggcggcccaagagacgaggttggcgcccaggaacacggtgtagctggaggtggaccggcgcgtgtcgggacagccagcccagtcagcgtcggtgtagaccacgagctccgacgtcggggatgggcagagtaggaggccgtagtcgagggagccgcggaggtagcgcagaatccgcttgagcgcagtgagatgaggctcccgcgaagtgtgcatatgcaggcacacctgctggacggcgtaagcgatgtcgggcctggagaacgtgaggtactggagcgcgccggtgaggctccgatatgacgtcgcgtcagcgaccggaggcccgtcgtcctcagagagcttcgcgatgtcatcgacgtagagcaggaggtagacggtgtcgtcgccgcgccggtagatgaacaggggcgtgtccgacttggcctcaacgaagccgatggaggccaggtaggaggcgaagcgactgtaccaagcctgtggcgcctgcttgaggccgtacagggacctattcagccgacaaaccagatccggacggtcagcgtcgacgaagccggtgggctggctgcagtagacagtctccgtcagagtgccatggaggaaggcattcttgacatcgagctgatggatcgcccagtcgcgggagagggcgagggagaggacgacgcgaacagtggcgaacttgacgacagggctgaaggtctcgtcgtagtccactccggggcgctgggtgaagccccgaaggacccaacgggccttgtagcggtcgagggagccgttcgaggtcagcttgtggcgaaataaccacttgccggtgaccacgttggtgcctggtggacgcggcaccaggtcccaggtgtggttggccaagagggccgcgtactcctcctccatagcacgacgccaatgtgggtcggcgagggcagtgcgaacggaggagggcaccggggaagcgtcgggtggagtgctagacgtagcagctgccaggattagccggtcgatggggcggagaacgccagcagcgcgccgagtcaccattaagcaatgtcattgcccacattgcagaaactatttttctgaaacgtaagaaatcagagaaaagccacaagaacaataacattgttagaaatgcatatttataattagacaatgaatagacccagcaagtcatgcatagcgtagataatataagaaataccatactcataattttaatctccttccaagtttcaaacttctccactggtgtcaaagcagttgagtctaccttcccaaactgtaggcttgtcagtcaattttca

SEQ ID NO: 21923 - DNA, 394 bp, Zea mays
  Clone ID: MRT4577_119993C.1
caaaaaggggaaacagaaaacgggggtccttccccttaaccaaagtcccccccagggccggggaaaaaccggggggggacccccccggggttttaagcccccccccccttactaggccagaaaaacccccgggccccccaggggggaaacccccaaaggcaaccggggggcccaaaggaaaaaccggggggcaagcgggccaaaaagttcaaaaaaacgggggcccaaaacggggggcaaacccccagccgaaaaagtcccgggaaaaaaacctcccccccaaagggcacatggatcctcacaatgtcccccaaaaactggaaaaaccccaagaggggcccacggttcttttgccccccgggaacaaacctcagaaaaactttacccccccccc

SEQ ID NO: 21924 - DNA, 1425 bp, Zea mays
  unsure (1)..(1425): unsure at all n locations
  Clone ID: MRT4577_119994C.1
tcaacgcgtgtctggacaaccagcccagtcagcgtcggtgtagaccacgagttccgacgtcggggatggtcggagtaggagaccatagtcgagggagccacgaaggtagcgcaggatccgcttgagagcgatgagatgaggctcccgcggagtgtgcatatgcaggcacacctgctgggcggcataggcgatggcaggcctggagaaggtgaggtactggagcgcgccggtcaggctccggtaggacgtcgcatcggcgaccgagggcccgtcgtcctctgagagcttcgcttgagtgtcgacaggcgtggagcagggcttacagtcggacatgccaacctgctccagtatgtcgacggcgtactggcgctgatggaggaagagaccctggggccggcgctcggcggtgatgccgaggaagtggtggaggggccccaggtccttcatcgcgaactccagctgcagggcgacgatcgtgcgctgtagaaggtcggcagtggatgccgtgagcacaatgtcgtcgacgtagagcagaaggaagacggtgtcatcgccacgacggtagatgaagagggacgtgtccgacttggcctcggcgaagtcgatggaggccaagtaggaagcgaagtgactgtaccaggctcgcggcgcctgcttgaggccgtagagggagcagtttagctggcagactagatccggacgggcttcatcgacgaagctggtgggctggctacagtagacagtctctgtcagggtgctgtggaggaaggcattcttgacgttgagctgatggattgcctcagaggaatagccaaggaagaggcagcgggtggagcgaggagaaagcttatgaggggtagtagcggaagtgttagggtagcaggcacagccgaacacgcgaaggtggtcgtaggtgggggctgtgccgtacagggcgaagtagggagtagggtggctcatcgccttggagggaagacggttgagaaggtgtgtggcggtgtgcagggcctctgcccagtagctggcagggagagacgcctggaagagaaggcagcagatcatattggtggtggtgcgaatcatttatccatgagttatcttcagaaagggccatgaacatgtccaatatttgtaatactgtctgcaatacttggtccatgttcatacggtctttcagttgtttctctttaaggacttcagttgctgcacgttgcatttgcgctaggaatgcagtgattttgtcagtgacaagataatcagccattgcaagaaagctcctgtgtccattttcactaaaggtgtcagattctgcctgtaactgtgcaccatttgtacatttggtaaaatcctattacccttggccatcnaactntaacagcatcctccaggatagtgataagatctctggcattgttaattttcttg

SEQ ID NO: 21925 - DNA, 555 bp, Zea mays
  unsure (1)..(555): unsure at all n locations
  Clone ID: MRT4577_119995C.1
gagtaaaaaagcgacagcccgaatttgcattaacaagtacattacatacacgattcctcctctgctctccaaagttttccatggtatacatacaccttcccaagatccatgacggcggtcggacacctagcagttagacactcgaatcactcgagctgagcgtaccagaccccctggatcttgacatccttgggcgccttggccccgaggtcggtgtcggacggctgcacgctctcgaagacgccgatgagcgcggcgcggaggagcgtgcagtagggcgacgcggcgggctgcgcagatccggacgaggccgcggggccggcgtcgtgcgagtgcgaggacgaggcggcggaggagggcgagggggcgaggtcgaagagcgcgaggttggatccggtgcggctggggatgaagcggtcgctgtagacggtgcgcgaaatcttaacccgattcccttcgggtgacgcgcgtgatcgcgctatctgccgggtttcccccgtcccttaggatcggcttacccatgtgcaagtgccgtcacatgganaccttntcttc

SEQ ID NO: 21926 - DNA, 4251 bp, Zea mays
  Clone ID: MRT4577_119996C.1
atggacgccagcaccactgccgccaccggcaccatcgcccccgctgcgaccggcagcgagcccgcccatggagggggcccttacatcaccggcctcggaccgctccacgcctcctccccgctgcccctgcatcgcacctccccgccgggcttccccgccttcgcttcacccacctggagtcatcatgttgcaccctccaccatccccaccaccgaccccccgctcgtcagcaccctcgcctcgatccaggccgctgtgacagcctcgcgggagcgcgagcgcgctgcctccctcgccctggagcgtgagcgtgccctgggcgctgctctgaccacccagatggccaccacgcagcgtctcctcggccacccgactctcgccgatgcggagcccccagaggacccccacgcctctgacctcgacgccgacctcatcgctgctctccacgcccaagcagccggcctgcacaacatccgggccctcgtgtccgtggtgttggatccggcgtctccccactactcccgttggcgaggacaggtccttctcacactgcggcggttcgtcctcgacgaccacgtcctcatcgaccacgacactccgtcgcctcgctcctggtgcctcatggacagtgttgtcctctcgtggctccacggcaccatcaccgtcgagctgcaggacatcatccgcgaccaggcggacactgcgcgccaggcgtggctcgctctcgaggaccagttcctcgggaatcgagatgctcgggcactccacctcgacgcccagttccgcctgttctctcagggggacctctccgtgggcgaatactgccgccagatgaagggcctagctgactctctccgcgatctcggcgagcccgttgccgatcgcaccctggtgctgaacctcctgcgtggcctcagcccccgctacggccacctgaaggctctcatcaagaggagcgtgcccttccccaccttccacgccgtgcggaacgagcttctcctcgaggagcttaccatggcgaatgaggcacccactcctgcctcggccctctacagcgctcctaccagcggtccgccgccttcagggggccaggccacccgccctccgtcgaccggggctcccacccgcccaccacctgccgtcccggcggccccgcgtccgacttccacgactgacgggggtcgtcgctcccgcaagggcggccgtgggagcggcggctcctctcgtggtggtccctccgaccggggtggcggccccgcgtggccgccattctacaacccctggaccgggaccatcgccatgtggccgggccaggcaccgagtaccccccgtcctccgacgccagccctcctggctacacctcactacggcacacctccttatggtgttcccgtcgtgccccaggctccgcccgcgctcctggccccggggacccacacctcgacgccttggtccccgccggccggtggttgggacagcgcctccctcgctgcggcattcagcaccatggcgatgaccccaccctcctccgactgggtgatcgactccggtgcctcgtaccacaccactcccacggcaggcacgctctctcgctctcatccccccctcccctctcacccatcctcgatcgtcgttggaaacggttccactctgccagtcacctcagtaggtgcctcggttctccctgggccgttttacctcaacgatgttctcgtagctccccacatcacccacaatcttctttctgttcgtcgattcaccactgacaactcctgttccattgagtttgacccctctggtttttctgtgaaggatctggccaccaggacccttctcgcccgctgtgacagctcggggcctctctacacgctccagccctccaccgccggcgtgtctccacctcctgccctggtctccaccacctcctccaccacatggcatcgacgtctcggccatcctggacccgacgtcatgaccaagattaccagtagtctcgatctttcatgtagtaggggacattttgagggtctctgtcatgcttgtcagttaggccgacatactcgtctcccatttactacttcttcttctcgggctgagcaggcttttgatctggttcattgtgacctttggacctcccctgtactcagtctttctggttataaatattatctggtgattttggatgatttttcccattttctctggaccttcccgcttcggttgaagtcggacacattcaccaccctcacacacttcttcacctgggtatccactcagtttcatcgcccggtccgtgctctgcagtgtgacaatggccgcgagttcgataacaacgcctctcgctccttcttcctcactcatggcgtccagttgcgtctctcgtgcccctacacttctgcccagaacggccgagccgaacgcatgatccgcaccaccactaatatgctccgctgtctcctcttccaggcgtctctccctgccagctactgggcagaggccctgcatactgccacccacctcctcaaccgtcttccctcgaaggcgccgctcccgacgttccggtggctcactccgagtcatccgtataccacccggtcgccatccatcgcgaccccgggcacgtccaccccgatggtgactcgacgcgctgctggcgttctccgccccgtcgaccggctcatcctggtagccgctacgaccagcactccacccgacgcttccccggtaccctcctccgttcgcactgccctcgccgacccacactggcgtcgcgctatggaggaggcgtacgcgaccctcttggccaaccacacttgggacctggtgccgcgtccatcaggcaccaacgtggtcaccggcaagtggctttttcgccacaagctgacctcggacggctccctcgaccgctacaaggcctgttgggtccttcggggcttcacccagcgccccggagtggactacgacgagaccttcagccctgtcgtcaagttcgccactgttcgcgccgtcctctccctcgccctctcccgcgactgggcgatccatcagctcgatgtcaagaatgccttcctccatggcactctgacggagactgtctactgcagccagcccaccggcttcgtcgacgctgaccgtccggacctggtttgccggttgaaccgatccctgtacggcctcaagcaggcgccacgggcttggtacagccgcttcgcctcctacctggcctccgtcggcttcgtcgaggccaagtcggacacgtccctgttcatctaccggcgcggcgacgacaccgtctacctcctgctctacgtcgacgacattgtgctcacggcatccaccgccgacctccttcaccgcacgatcgtcgcccttcagcgggagttcgcgatgaaggacctggggcccctccaccacttcctcggcgtcaccgccgaacgtcggcctcagggtctcttcctccaccagcgccagtacgccatcgacatcctggagcgggctggcatgtctgactgcaagccctgctccacgcctgtcgacactcaggcgaagctctctgaggacgacgggcctccggtcgccgacgcgacgtcctaccggagcctcaccggcgcgctccagtacctcacgttctccaggcccgacatcgcttacgccgtccagcaggtgtgcctgcacatgcacactccgcgggagccccatctcactgcgctcaagcggattctacgctacctccgcggctccctcgactacggcctcctactccgcccatccccgacgtcggagctcgtggtctacaccgacgctgactgggctggctgtcccgacacgcgccggtccacctccggctacgccgtcttcctgggcgccaacctcgtctcttgggccgccaagaggcagcccgtcgtctctcgctccagcgctgaggccgagtaccgtgccgtggccaacggcgtggccgaggcctcctggctgcgccagctcctccacgagcttcacagtcccctccagcgcgccaccctcgtctactgcgacaacgtcagcgcggtctacctctccaccaaccccgtgcagcatcagcgcacgaagcatgtggagatcgacctgcacttcgtccgcgagcgtgtcgctgccggtgacgtccgcgttctcagcgtccccaccacgcttcagttcgccgacatcttcaccaaggggttaccgtcgagtgtctttttcgacttccgatccagtctcaacatctgtacaggatag

SEQ ID NO: 21927 - DNA, 4416 bp, Zea mays
  Clone ID: MRT4577_119997C.1
atggacgacagcaccactgccgccactggcactatcgcccccgctgcgatcggcagcgagcccgcccatggaggggccccttacatcatcggcctcggtccgctccacgcctcctccccgctgcccctgcatcgcacctccccgccgggcttccccgccttcgcttcacccacctggagtcatcgtgtcgcgccctccaccatccccaccaccgaccccccgctcgtcagcaccctcgcctcgatccaggccgctgtgatggcctcgcgggagcgcgagcgcgctgcctccctcgccctggagcgtgagcgtgccctgggcgctgctctggccacccagatggccaccacgcagcgtctcctcggccacccgactctcgccgatgcggagcccccagaggacccccacgcctctgacctcgacgccgacctcatcgctgctctccacgctcaagcagtcggcctgcacaacatccgggccctcgtgtccgtggtgttggatccggcgtctccccactactcccgttggcgaggacaggtccttctcacactgcggcggttcgtcctcgacgaccacgtcctcatcgaccatgacactccgtcgcctcgctcctggtgcctcatggacagtgttgtcctctcgtggctccacgacaccatcaccgtcgagctacaggacatcatccgcgaccaggcggacactgcgcgccaggcgtggctcgctctcgaggaccagttcttcgggaatcgagatgctcgggcactccacctcgacgcccagttccacctgttctctcaggagggcctctccgtgggcgaatactgccgccagatgaagggcctggctgactctctccgcgatctcggcgagcccgttgccgatcgcaccctggtgctgaacctcctgcgtggcctcagcccccgctacggccacctgaaggctctcatcaagaggagcgtgcccttccccaccttccacgtcgtgcggaacgagcttctcctcgaggagcttaccatggcgaatgaggcacccactcctgcctcggccctctacaccactcctaccagcggtccgccgccttcagggggccaggccacccgccctccgtcgacccgggctcccacccgccccccacctgccgtcccggcggcccctcgtccgacttccacgaccgacgggggtcgtcgctcccgcaagggcggccgtgggagcggcggctcctctcgtggtggtccctctggccggggtggcggccccgcgtggccgtcattctacaacccctggaccgggaccatcgccatgtggccgggccaggcaccgagtaccccccgtcctccggcgccagccctcctggctacacctcactacggtacacctccttatggtgttcccgtcgtgccccaggctccgcccgcgctcctgcccccggggacccacacctcgacgccttggtccccgccgaccggtggttgggacagcgcctccctcgctgcggcattcaacaccatgacgatgaccccaccctcctccgactgggtgatcgactccggtgcctcgtaccacaccactcccatggcaggcacgctctctcgctctcatccccccctcccctcttacccatcctcgatcgtcgttggaaacggttccactctaccagtcacctcagtaggtgcctcggttctccctgggccgttttacctcaacgatgttctcgtagctccccacatcactcacaaccttctttctgttcgtcgattcaccactgacaactcctgttccattgagtttgacccctctggtttttctgtgaaggatctggccaccaggacccttctcgcccgctgtgacagctcggggccactctacacgctccagccctccaccgccggcgtgtctccacctcctgccctggtctccaccacctcttccaccacatggcatcgacgtctcggccatcctggacccgacgtcatgaccaagattatcagtagtctagatctttcatgtagtaggggacattttgagggtctctgtcatgcttgtcagttaggccgacatactcgtctcccatttactacttcttcttctcgggctgagcaggcttttgacctggttcactgtgatctttggacctcccctgtactcagtctttctggctataaatactacttggtgattttggatgatttttcccattttctctggaccttcccgcttcgcttgaagtcggacacattcaccactctcacacacttcttcacctgggtatccactcagtttcgtcgcccggtccgtgctctgcagtgtgacaatggccgcgagttcgataacaacgcctctcgctctttcttcctcactcatggcgtccagttgcgtctctcatgcccctacacttctgcacaaaacggccgagccgaacgcatgatccgcaccaccactaatatgctccgctgcctcctcttccaggcgtctctccctgccagctactgggcagaggccctgcacactgccacccacctcctaaaccgtcttccctcgaaggcggttcgccaccctacccctcacttcgccctatacggcacacccccttcctatgaccaccttcgcgtgttcggttgtgcctgctatcctaacacttccgctaccgctccacataagctttctcctcgctccacccgctgtctattccttggctactcccctgaccataaggggtaccggtgtctggacctcacctcccaccgcatcatcatctctcgtcatgtcatctttgacgaagatgtgtttccccttgctggctccaccccacccaccgaccttgacttcctcctcgagtccgattcgattcctcccccacctccggctccccgtcttgcgccgttacctgctcctcgtgcggcccccaagacctcttccgcgccacgcgcggccccgtcgaccccgcctgcgccacgcgcggccccgtcgaccccgcctacaccacacgcggccccgtcgatcctgcctgcgccacgcgcggccccgccgacctcgcctgcgccacgcgtggccccgtcgatcctgcctgcgccacgcgcggccccgtcgactccagctcgattcgccaaccccgccctcgtctaccatcgccgcggccacgccaccacctcggcgccccccgactcgagcccgtccacgagcgcggcccgattcgccgaccccgccgtcgtctatcaccgccgtgagccggccccaccagccgctcccgacgtcccggcggttcactccgagtcgtctgtataccacccggtcgtcatccaccgcgaccccaggcacgtccacccgatggtgactcggcgcgctgctggcgttctccgccccgtcgaccgacttatcctggcagctgctacgactagcactccacccgacgcttccccggtaccctcctccgttcgcactgccctcaccgacccacattggcgtcgtgctatggaggaggagtacgcggccctcttggccaaccacacctgggacctggtgccgcgtccaccaggcaccaacgtggtcaccggcaagtggctatttcgccacaagctgacctcggacggctccctcgaccgctacaaggcccggtggatccttcggggcttcacccagcgccccggagtggacatcctggagcgggctggcatgtctgactgcaagccctgctccacgcctgtcgacactcaggcgaagctctctgaggacgacgggcctccggtcgccgacgcgacgtcctaccggagattcactggcgcgctccagtacctcacgttctccaggcccgacatcgcttacgctgtccagcaggtgtgcctgcacatgcacactccgcgggagccccatctcactgcgctcaagcggattcttcgctacctccgcggctccctcgactacggcctcctactccgcccatccccgacgtcggagctcgtggtctacaccgacgctgactgggctggctgtcccgacacgcgccggtccacctccggctacgccgtgttcctgggcgccaacctcgtctcttgggccgccaagaggcagcccgtcgtctctcgctccagcgctgaggccgagtaccacgccgtggccaacggtgtggccgaggcctcctggctgcgccagctcctccacgagctccacagtcctcttcagcgcgccacactcgtctactgcgacaacgtcagtgcggtctacctctccaccaaccccgtgcagcatcagcgcacgaagcacgtagagatcgaccttcacttcgtccgcgagcgtgtcgctgccggtgacgttcgggttctcagcgtccccaccacgctgcagttcgccgacatcttcaccaagggactgccgtcgagcgtatttctagactttcgatccagtctcaacatctgtacatga

SEQ ID NO: 21928 - DNA, 372 bp, Zea mays
  Clone ID: MRT4577_119998C.1
tttttgtaaacctgatgcaactgctcaatgctggtctcatgggttacgaaacatctgactatgcccgggacttcctatatcgctgcagcagatcgctaggcctgcattatgagtcaaaacgaggctacattggcatagactattttgggcgaacagtgttcctgaagatcctttccgtgggtgtccatattgttctgctggaattgtgcttaaaatcgactgctacaggtagcaaggtccaagaaattgaacaaaggaataaggacaggatactgctgttaggtgtagatgacatggacatccataaaaggataaggatgcaattgctagcactggagctttttctggacagaaaccctaagattagagaga

SEQ ID NO: 21929 - DNA, 2625 bp, Zea mays
  Clone ID: MRT4577_119999C.1
ctatcctgtacagatgttgagactggatcgaaagtctaaaaatacactcgacggtaaccccttggtgaaaatgtcggcgaactgcagcgtggtggggacgctgagaacccgaacgtcaccggcagcgacacgctcgcggacgaagtgcaggtcgatctccacgtgcttcgtgcgctgatgctgcacggggttggtggagaggtagaccgcgctgacgttgtcgcagtagacgagggtggcgcgctggaggggactgtggagctcgtggaggagttggcgcagccaggaggcctctgccacgccgttggccacggcacggtactcggcctcagcgctggagcgagagacgacgtgatgtcgcacgagctccgacgtcggggatggtcggagtaggaggccgtagtcgagggagccgcggaggtagcgcagaatccgcttgagcgcggtgagatggggctcccgcggagtgtgcatatgcaggcacacctgctggacgacgtatgcgatatcgggcctggagaaggtgaggtactggagcgcgccggccaggctccggtaggacgtcgcgtcggcgaccggaggcccgtcgtcctcagagagcttcgcctgagtgtcgacaggcgtggagcagggcttgcagtcagacatgccagcccgctccaggatgtcgatggcatactggcgctggtggaggaagagaccctgaggccgacgctcggcggtgatgccaaggaagtagtgtaggggccccaggtccttcatcgcgaactcccgctgaagggtgacgatcgtgcggtgtagaaggtcggcggtggatgtcgtgagtacaatgtcgtcgacgtagagcaggaggtagacagtgtcgtcgccgcgccgcagatccggacggtcagtgtcgacgaagccggtgggctggctgcagtagacagtctccgtcagagtgccatggaggaaggcattcttgacatcgagctgatggatcgcccagttgcgggagagggcgcgagagaggacggcgcgaacagtggcgaacttgacgacggggctgaaggtctcgtcgtagtccactccggggcgctgtgtgaagccccgaaggacccaacgggccttgtagcggtcgagggagccgtccgaggtcagcaggtcccaggtgtggttggccaagagggccgcgtactcctcctccatagcacgacgccaatgcgggtcgacgagggcagtgcgaacggaggagggcaccggggaagcgtcgggtggagtgctggaagtatcggctgccaggatcagccggtcgacggggcgaagaacgccagcggcgcgtcgagtcaccatcgggtggacgtgtccggggtcgcggtggatggcgaccgggtggtatacggacggctcggagcggaccgccggaacgtcgagagcggcaggtgtggccggctcgcggcagtgatagacgatggcggggtcggcgaagcgggtcgcgctcgtcgacgggcccgagtcggggggcgccgaggtagtggcgtggccgcggcggtggtagacgagcgtggggttggcgaagcgagccggggtcgacgggtccgcgcgtgacgcaagcgggatcgacggggccgcgcgtggcgcaggcgggatcgacggggccacgcgtggcgcaggcgtggtcgacggggttgcgcgtggcgcaggcaaggtcgacggggccgcgcgtgacgcagacatgatcgtcgtggccgcgcgtggcgcaggcggggtcgactgggccgcgcgtggtgcggaaatgggcgtgagctgtggcgtcgtggctgcacgaggaacaggtaacggcgcaagacggggcgccgggggtggggggggaaccgggtcggactcgaggagggagtcaagatcggtgggtggggtggagcctgcaaggggaaacacatcttcgtcgaagacgacgtgacgagagatgatgatgcggtgggaggtgaggtccaggcaccgataccccttgtggtcaggggagtagccgaggaagaggcagcgagtggagcgaggagaaagtttgttaggggcggtagcggaaatgttagggtagcaggcacagccgacacgcgcaggtggtggtaggaaggggttgtgccgtacagggcgaagtgaggtgtagggtggctcaccgcctactgaggtgaccgggagggtggaaccgttgccgacgacgatgaaggtaggatgtgaggggtggggtggatgacagtggagtaacgaactagtgatgggggtagtgtggaaggaggccccggagtcaaccacccaatcgatggtggttcggggaggtggaagtggcggaggtacggtgtgagcggagagggccaaagaaggtgccccaacagaggcactaggaagggagggagatgacacgggctcaaccgcgagggaggcgatcacagcacgtgggaagacaagcggtccaggcacgtgacggcccgcctgagggtggacctcgacgcagtcccgaagaatagggttccagactggatcgaaggacacgaacatgccccggatgagctggccgtcgtggaggaggacacgcacagtcacgagagcggcgggcgaggtaaagctcatgtatggcggggaggacgccat

SEQ ID NO: 21930 - DNA, 295 bp, Zea mays
  Clone ID: MRT4577_11999C.1
gctggaaaagcttcaggggacattgttctccacagaagacgagtcctctaagcctctggtacagaactatcgagagcttcagcctctcaatcagcgcatggtctttgcttgcttatcatccacgcaggatcctcgtataccacaggtgaaatgctgagtctaggtcgtaggaatcttggttggctgtctctgcctactcctggctgtttatctcattgctataaagattcggaagaagaggctggaaaatcgagagagtgtggtcttcagctcagcacaagccacgactgaggca

SEQ ID NO: 21931 - DNA, 656 bp, Zea mays
  Clone ID: MRT4577_1199C.1
gtgccgagctcaggggcgaggcacgcacgcagaggaggcctgcacctcagaggggtgggggaagatacccttcgggccactgcgcagcgacgcgattatcgtcgagccccctatcgcggggttaccggtgatctcgtccgctcccagccggatacctcgttccattcaaaggcgcccctggcgtgggtgtctaccgaaggcgatccatacttcattctcgacaacgtcaacgagcgagatgtctgggctgagttccaggcacaggaccatgtaagggcattggcctcttctttgctgaggttgcttgtcccttagcatgtggtgatgggagtttcgtttctttacatgatctcatgctgcggtctattgctaagtccatcttcccccgccgcgaacggggggtctgggaagcactgcagcgccaccgaaccatgttgcttcgatcgaacgagtagttggcctagagaagcgccgaagtggccaacctgacgtcccggtgcaagggactgaagggaggagggtgtagccgaccgcaaggaggcctgtcgactgagggctgaggtccttggtctgaaggcagaggcagaccaccgtgaggaagtgctacggtgggcgcaggagggcctcccagcggtgacggaggaacgtaactccct

SEQ ID NO: 21932 - DNA, 373 bp, Zea mays
  Clone ID: MRT4577_119C.1
tgtaagtaagcgtggatgcctccagcgctggagctcatgcactgcaaggccctttcgtgctccttaaggtgctttctcataaacagagcaggatgtcttaggagagcatgatcataaaccaatccttgagacttacgctaagtgttaataaaccaagcacgggcatgacttggtacatgatgatctcccggtggagcaaatatcttatggatactggcctgacatatatctcattttacctaaatagttactactgtatacatgacactatttggtccatgtcactcccttgtatgtaactacactttcatgtctgagtcagttatgaaaaactattggtctttatttataaacgtcttcactgtctttcttt

SEQ ID NO: 21933 - DNA, 250 bp, Zea mays
  Clone ID: MRT4577_11C.1
agaggaggcgatgcgaggcggaagtggggctccgcgtccgcgcttcgtcggttgtggtatgcctcgccatcgaggtcgcggccgtgctcgtctcggtgtcggcgcacagaagttcggggtgaactacgggcaggtcgcgaagaatctcccggacccgacgcaggtggcgacgcgcctccgaatcgggaacgtgaacaaggtgaagctctacgacgcggacccccggggtctgacggcgttcgcgaacacg

SEQ ID NO: 21934 - DNA, 378 bp, Zea mays
  Clone ID: MRT4577_120000C.1
ggggatcgctgaacactgggaccaaggacctctgaaaccctaaccaaataaacccaccgttcgaaatcccgaatggccaaaaccctactccgacccttcccgccgtcgacacgcccatgccgaccggcaccacctacctcctcgctccacctacgtccggcgtggaagtgatgagtagacgaccacgaactccaggtgcgcgggcgctaacgtcacaagttgcacactggctgaagcgacgccaatctatctgcgactacgatatcatagtaaaatgtgccagttcgagagagaaagcatctctctccgagctgcgatgcgcggagcggcagtggcactgggtctttagagggcactgataacatctgtaccttacac

SEQ ID NO: 21935 - DNA, 1809 bp, Zea mays
  Clone ID: MRT4577_120001C.1
gtaagaaacatgagattatttcagtcatccagttgcaataaatatcaccgagtttaatctgagacaagttccatatgaaagtgaaagcaaattactataagatacatcataagccaaggatgaattgccacgggcacaccggagcgcgccagtgatggtaccagcacagcacccccacagttgaggttgttcacctcaggacaggggtgtggtggcggacgccattgatggccatcttttcacctccattctccgcgtggaagttcatgctggggaggaatttattagcagatgcgaagctaacgtgctcttgatgagctagcgtgccactccagtttgaagcactcgagattgtagagctcgtcgaaggcgagtgagatgtgctgctttcagggcataggttcctgccaaaggccattttgctgaccccacctgttggagtctgaagtgaaggcagtgccttcagctgctgctcctggagctcctttttgttgaggaaacgcccccctggtccacggactcgcttcattgcatgacgatgccgagattcatggagatatggcatgcccgggaagaaaactttcatactgattgatataacccataaaaaatgtccaaactgtgtgtgtaaccgatggataaacagcgctgttcaaagataaccatacatggaagaaacaaagtttgcccaattaaagtgaaagcaaaattatatctagaaagtaaaataaagaatacaagtgcttactgtatccaacttaatttgcatgacaggaatatgctggctgatgctttcagaaaagaagcactatgttattcaatagctgaatgacataactgaatagaataatttcagtacgaaaagatcctagtgaggtagaagtgtagagccatagaataataagaggttgacacatgattatgccatgagacgaatcataacatgcaaagaagtttattggttctttcattatcaagggaaagcagtggagcagagaaagcatcctagaatggttgtttaggtaacaatgagtgatgtttaagcaaacaaaacataattgtaatctatatgtttgttcttaatgcaatgatacacaactctcctgtatattcgagagaaaaaaatctacacaaggaaaatggagaaaaagagtgatgtgttaaggtatgaaagtcactattatttcggtgaaatgattttttctacaaaaatactctcatctggtcagaagtagttgccacatttgacttcgcatggtctttgatgcaaatcattgaccactaatttcttctacaatatattcttgaattacttaaaatttatgagattcagccgattttttaatacaaatctatatataacttgcatgtttttaaatcaacaattaaacattattgatgtttgtagttttaaagatttaactaaattgtcctaaactatatgttttatgaccagagggagtattggacataacagtgggaaactagatgaaaagggatgtgtccgacttggcctcgacgaagccgatgtaggctaagtaggaggtgaagcgactgtaccatgcccgcggcgcctgcttgaggccgtatagggagcggttcagccgacagactagatccggacgagcgacgtcgacgaagccggtgggctggctgcagtagacaaaccccattagagtgtcatggaggaaggcattcttgacatcgagctgatggatcgcccagtcccaagagagggcaaggacgacgcgaacggtggcgaacttgacgacagggctgaaggtctcgtcgtagtccactccggggcgc

SEQ ID NO: 21936 - DNA, 1318 bp, Zea mays
  Clone ID: MRT4577_120002C.1
ctcgaggcggcactggcgcgcatctccgcggaagcgtgtggcggaagcgaaggtggcgagggggtcgtggataaggaggaccagaggtggagggaagcgctcgacaggaaccgagacatcgctgatgcactgaaaattcttccagcgaactctttatcctgtaagaaagttgagaggcgatcatgcatttccttggaggagttcatatgtaattactttttgcgcgacacccccgtcataattagtggcaccatcgaccattggcctgcaaggacaaaatggaaggacattgagtacctcaagaagattgctggagatcgtactgttcctgttgaagttggaaagaattacgtgtgtagtgagtggaagcaggagcttatcacattttctcagttcctggatagaatgtcgtcaactgtctgtccatcaaacttgacatatctggctcagcatccattgtttgagcagataaaagagctcagtgaagacataattgttcccgaatactgttacgctggtggaggtgaactccaatcacttaatgcttggtttggtccagaggggacagtgacaccattgcaccatgatccgcatcacaatatcttagctcaggtattgggcaggaagtatattagactctatcctgctttcatagctgaggacttgtatccacacacagagactatgctaagcaataccagtcaggtagatgttgacaatattgatttgaaggagtttccaagggttgaaaacctggaattcattgactgtatattggaggagggcgacctgctttacatccccccaaaatggtggcactacgtcagatctctctccaccagtttctcggttagcttttggtggcgtgcagcagttcaaccttcaggaggctcatagcgtcaatttcatgtctcccatattatcaaaaccagattgcagaaaaccaaagtaacctgacaggaccctttgtttcaggtgactccgcttttgaatggatgtacacacgtcatcaccaatgtccattgttagttttacttttaccacagtgattaaaatgttgaaattgcttatatgccgaccatcatgctatcatgtgattcttgaaagcagaggttgaaggatgtcttcactgctacaatgtcaaattcttgaaattgtaaaggtggacttactagctccgagaatttaatttagcttattctgtatctcactctgcttcggacctccggcttatgagttgtcactgctggaactcattttgtacatatatctgcagattatctagctggaagcgtgtccccttttgttggaaaatgtt

SEQ ID NO: 21937 - DNA, 1797 bp, Zea mays
  Clone ID: MRT4577_120003C.1
cctaaaaactaccccctgttatgcagagctagaccaactcatattcacgctcgcatccgtgtttaacataaactagtaccaatcaaaaacatccccaagatcatcatcaccaccatcatttccaagatcacgctcttcttccacattatccatctgttcgccatgctcttcttccacatcagccgcccatctgtacgtcatgctcttcgttcaaccaatttgaactattttcctcctcgtttaaatcatccagtacattctcatttccagggcctctttcacttgatgcaccatcttgtttttgtgtacttttaatatctggcagcacaacatcttcaatgttgagctgcttaattacctcctgagcgatgaactatagcatcatggactagcaatggattttttctctcctcagatttaaatttctgccgcacctgatggcgagtcttatcagggaataattgttgtatcattgcaaaatcgctaccaaattgtcgaagaccctcataaaacaagtcggtatctgattttgaccattttcctcgggctggtttgttcatgtagccatgtaggaatggtagttcaattttgttgcattttgtacatgctcctctgttatatcgttgtcaaagaacctagcttcctcatctctgtagcccaaatcatccatatcatctagttgaaagtttcttgtattagaggatggcccggatggaatcccttttggctgaaatcatcaagaaaatcattagaattagccaaaaaagcaaatataacaacaaaatgttggattgtgacaaaacctaaccctaaccagggttggagttgtattgatagattagagtacttgggcctggcccattacaaagggatagtctaacacccccgcagtcacaactctgtcctgtacagatgttgagactgaatcgaaattctaaaaatacactcgtcggtagcccctttgtgaagatgtcggcgaactggagcatggtggggacgctgagaacccgaacgtcaccggcagcgacacgctcgcggacgaagtgcaggtcgttctccacgtgcttcgtgcgctgatgctgcacgggattggtggagagatagaccgcgctgacgttgtcgtagtaaacgagggtggcgcgctgaaggggactgttgagctcatggaggagctggcgtagccaggaggcctctgccacgccgttggccacggcacggtactcggcctcagcgctggagcaggagacgacgggctgtcgcttggcagcccaagaaacaaggttggcgcccaggaacacggcgtagccggaggtggatcggcgcgtatcgggacagccagcccagtcagcgtcggtgtataccacgagctccaacatcggggatggtcggagtaggagaccgtggtcgagggagccgcggaggtagcgcagtatccgcttgagagcggtaaagtggggctcccgcagagtgtgcatatgcaggcacacctgctggacgacgtaggcgatgtctggcctgaagaaggtgaggtactggagggcgccggtcaggctgcggtaggatgtcgcgtcggcgaccggaggcccgtcgtcctcagagagcttagcctgagtgtcgacaggcgtggagcagggcttgcagtcagacatgtcagcccgctccaggatgtcgatggcgtactggcgctggtggaggaagagaccctgagggcggcgctcagcggtgatgccgaggaagtggtgaaggagccctaggtccttcatcgcgaactcccgctgaagggcgacgatcgtgcgc

SEQ ID NO: 21938 - DNA, 415 bp, Zea mays
  Clone ID: MRT4577_120004C.1
ttgcaagtgcgttcaagcttctatacataccggatgcactttgtagcacctgcaaatacaagaggtgtcagcagtggtaacaacgcagagtacgcgggaggagaatcaagaccatgacttgataagctctaagaaggcactgcccataatttcatctgcaaggggtacaacataaccattttatcccatacaatacaacacctgattagataatattagtgtgagtaaatatgtaccagctgcctgaaattgggacaaaggattggctgcagctcatggcatgtttaagaggaatcttatggaaatagcatgaaaacaaggttttattctattcatggggatttcgtaaatatctcattccaaaaaaaaaaaaaaaaaaaaaaaaaaaaaagtactctgcgttgttaccactgct

SEQ ID NO: 21939 - DNA, 500 bp, Zea mays
  unsure (1)..(500): unsure at all n locations
  Clone ID: MRT4577_120005C.1
atcacaacagtctaaatatccgaatttagacccactaacattgactgagacagtaactgaacaatcagagtctttatatactagaaaattgcagaaaataagagaataaagttataaaattcgtatgtccgatcagtggaaataggccacgctgttcatccaagacaaggcggcccatgaggcccaactaggagtgtccatatgaacaaacaggtagaggtagaaccctaactgttcatctcgtcctccttccccgatggcggccggcgcggccctgcagccagcgtgggcgcgcggccccggcgagcgcggcccggcgcaggcacagcagcctcgacgccgatcctctctggcgcgtggcgccgaccatggcccaacccgacgcggctgcggcggtccggtggcctggcccccacncctagcatggggcccggcgcgggtgtccggccacggcacgggcgcgtaggcgactggcccgtccctgacggggcgcgggcgca

SEQ ID NO: 21940 - DNA, 485 bp, Zea mays
  Clone ID: MRT4577_120006C.1
attaaaatgtttaggcctcattttattggtcggtgcttacacaaaagaaacgaactaaaaccccaaaggcaacaaaaaccgcagggcggggggaaaccccggaaccccggggacaggtggggggggaacaacccccgacatccccgtagtcccccgcgattgaccaaaagccaaacaccgggcggccgatttccaccccgaaaagggggagccggggggccccgttgaaacccgggaaaaagacggggccgggggcgaaagggcccccatagctccacgggatctaccaagtggcgaacgcccaatcgcgaatcccggccccggtgccgccggcaaccacgggcgtaaagcactggaacgacccgctgaaaatggaaccctccaacgaccacgcagggaaactggaagacccggcaggtccattcgtacctgaggaagtggccacaccacgcggtgtccccccggaaacttcggccaaaactcct

SEQ ID NO: 21941 - DNA, 260 bp, Zea mays
  unsure (1)..(260): unsure at all n locations
  Clone ID: MRT4577_120007C.1
accgnttctgaattcccgcggcgggccacncatccntttctanatcncnagcggtcncccttttttttttttttttttttttttttgagtnaggatgtacattangatgacctggaaaaaaaaccacatacaccatctattcccanaagcaaacaaaaaaaaaaaatgtggacccgtacaggaaaaaaatcccaattgttcaagggcaccccacaaaaattgttgttagctgttacatctcaccgagctcccctacccat

SEQ ID NO: 21942 - DNA, 130 bp, Zea mays
  Clone ID: MRT4577_120008C.1
cccatatagtcagaccccatcatcgcggattcagcgatcagtcgacccagacctcgtcacgaatgcaaagaaccacagcagcatggttatgcaggcatcttctccgattgtactgacagcggagatggga

SEQ ID NO: 21943 - DNA, 301 bp, Zea mays
  unsure (1)..(301): unsure at all n locations
  Clone ID: MRT4577_120009C.1
cannannaacggacgccagngcgcgaggggccatcaggaaaaacatgtgcagagacaaatttacagccacctgtttactccaagaggaagagaaacgagataggaaccgagggcgaagaaaaaacttgaatggtgtcgcgccgggtaccaaaaaagctatttagaagagagggatctgagcacactaattaccagagcggaagcaagaccgcgactggggaaacagcagcggaaaagaaggggttccaacaacaactacacatgaaaaaaagcaaaccgaaaaagcaatcgacaaaaagaa

SEQ ID NO: 21944 - DNA, 616 bp, Zea mays
  unsure (1)..(616): unsure at all n locations
  Clone ID: MRT4577_12000C.1
aattcggcacgagggtctctatataaggaggggcagggtgttagtaaagataagcaagaagaatagatctggtttactattatggcctcctacgggagggctgagtaccaggactatcttgcgagtgcatagcagttcacaacatgtagaagcatgtagctggctaagctcatcaaattatatttgtgctattttaactttttttactgttgttgccttgcacatatattctaaacttcaatgcctctgatagtggttaattggtgttctcaaagtcaatccgtataactttatgtggtctttcacttaagtacttgatgtaaaatgttggtagattgtctttctagcagatcaatttctaacatcagcttcctttctgccaacagaaccaacagtgcaactaataattagctcacatatcagtaagtccaaagccgaaaactacagagctcagattctgcaggcatttgagtccgttcttcgttctgctataatacttgaaattcgatatgaatcaaagaatgatgcaaaaccaggtcatactccatcaatgtttccttaccctgagaatgactcgacactgaaganggtcctttactaaacatagtccactctc

SEQ ID NO: 21945 - DNA, 308 bp, Zea mays
  Clone ID: MRT4577_120010C.1
gggcccccacattgcaatgcatgttacacacaaaaatggggataatccgagcaaggaaccattatgcaggggccacattgggggctagcaatgttttaaccccggaatctaactgatctgataaaaccaaaaaaatttggaacaacacactaaagccgttttaaggaaaattttaaacataaacctgcccggcccaacttgaaaaaacattggccaaagcatgccggtacaccattccactgttttggtaaaaaatatggatttgaaggccctgcccctaacttcggggaggccccgaaaggggggcc

SEQ ID NO: 21946 - DNA, 448 bp, Zea mays
  unsure (1)..(448): unsure at all n locations
  Clone ID: MRT4577_120011C.1
ctcgtggaattctctctccactgctcgccggaaaccaagaaatcgccaacccacgaatcttccctcacaaccagtncacaccgccgcgccaagtcccgatcttgccggncgagctgcactccggccgtccccagttccccgcctcgaccctcccgccaccaattcggacggctcgtccaccctggcagtatatccaccagcactagagtctaatcgtagcaactcagtcgctcacctgcagcaaatggaatcacgtgaaaacaacatgggctcgaatgatggaccaaacagtctttgctagcttgcctgcgaggcaacgcttacggtggacagatgagttcgcatgaacaatttgtcggaggctgttactcaacttggcggtcctgatagagcaactcctaaaggagttttgagaattatgggtacaccaggattaacaatataccat

SEQ ID NO: 21947 - DNA, 663 bp, Zea mays
  Clone ID: MRT4577_120012C.1
ctcgagttttttttttctttttttttttttttttttttttttttttttttttttttttttttttttttgaaccccaaaagccccccattttttttttcacaaaaaacatcccaattttaatttctttcacaacaggatcttttccagatggctggctagatcattcacaaaagcttcaaagaggaccagccccaaaagcccccaacattgttggaatctcagggaaagcaattttggggtgggtttggtaaaaaaaacccccttaaatcaaaggggggccctttaaaaaggggcccgggcctcctttggccaggaggggacctgaattaggggaaccccacccccggcaaaatctggaaactttttttcaaatcgagagggatagtgggcccggggcatgtcaaacctccccggtgccctgaacttaaatggaggaaggggccaagggtcctggtgccccctttgcccctttacaacaaaaccaacaacggccccgggggcctaaaaatttctgggccccaccacccaagggggtccaaaacattttcgccaaacgacaaggggggatatttttacccccccgtgggccccaggggtagagagaaaacccagagaggaccccccgccaaaaaaaaaaaaaatctatggggggttgggtccggg

SEQ ID NO: 21948 - DNA, 193 bp, Zea mays
  Clone ID: MRT4577_120013C.1
gccgtattatcctgttattccacccaatgtttacacaccccataaaaagaccacatttatatctcaaccagccaccaacaaacaccatttcccactaaaaattttaacagaccaccttttatctttcacacaaaaacatgcccaattatatagctatcaagattttaattgataccaacattcctctcaaact

SEQ ID NO: 21949 - DNA, 186 bp, Zea mays
  Clone ID: MRT4577_120014C.1
ttgctcattatcgacatcgagcgggcggtctagaggacccacgctgacgaccccgtgcgtgccagcctgtcgctgatgcataaggtgacctccatgcatttgaacgaccccctcatcacaacgtactcactgcgcgagccctgcggttactcaactaacaccacttgcgaggcagagctccttgcg

SEQ ID NO: 21950 - DNA, 281 bp, Zea mays
  Clone ID: MRT4577_120015C.1
cacatgcgttcggcccccgtgaatacacatgcagtccaactgcctagcgggcgagagtgtgcacatgagcacgagcagtgttgctctcgctcaccaacgtgtggatgaacatcgaccacacattatatgttgcacgtacgtgcattcgttgccgcatcgtgcgctaatatgacgcctggctcggaactacctcgatgttaattaattatacttacttaacaaacagcacaatagcgtagcacacctattgcaaatcaatggtggatattatccatatttaa

SEQ ID NO: 21951 - DNA, 1230 bp, Zea mays
  Clone ID: MRT4577_120016C.1
cattgggtacctcgaggccgggccgggatttccaccctcttgcctccccgtgactacctcgctgtcccctctcagtgtccaagcgacgacaccacgccgccgagatgtggatctcagattccgcctttgtggagccctcatcttcctccccatccgcctctgcctccccgccgccgagcccgccaccagcacgccttctccgccaacgcaaccgccgccgacgccgcagcagccggaaacagggcagtgccagcgccgtcgacggcgtcgccgaccccgaggcggaggacgtgtggcgtggggcgcagtgggaggcggcgtggccggcgcggcgggactcgaaacccgtcgtgctcgcgggcggagacgacgcggtggggcggtccaggagcctcacggacgacgacctcgaggagctcaagggatgcgccgacctgggcttcggcttcaactacgacgagatccccgagctccggagcaccctgccggcgctcgagctgtgctactccatgagccagcgcctccagctggacgacgagaagccgcagcagcacgaggccgccgcaccagatgccgccacgccgtcgccgcctgtcaccaactggaagatctccagccccggtgacagccctgacgaggtgaaggcgcggctcaagtactgggcgcaggcggtggcgtgcaccgtccgcctttgcagctgaacggcgccgatccatgcgcgccattcttcgccgtctggaagcacacaccataccggtatgccggccgccaccacacaagaaaccggatgaccagacctaatcgcgaacacgttgctgctgctgtaaagtgatccaggtgcaccgtttcagctgcgacggcgggcgttggcagctgccatgattgcagctgcagagtttggtggagcatcgttggtagtcgtgtagcagcacacataggggctgggtaaatgggttggttgcccaaccgacatgctgtgctctctgttccagctgagcaacctgcctttgcctgatgaaccaaccatccgagtgtgcagcagccatctccagcggaaataaactattgtaattgtactgctagcagtagtgatcaaaataatgtgcagagtaattagtactgcaagcaaatcggggaatcattgtgaatacataaatctgtggatctcattactatactgttatcttaatcattagctggtgtacctgctacctactgcagctgtttggt

SEQ ID NO: 21952 - DNA, 317 bp, Zea mays
  Clone ID: MRT4577_120017C.1
gcggacgtcgtcctctgcaacaccttcgaggacctcgagccggacatcttcggcgcccactccccggcggccgcctccatcctcccgatcggcccgctgcgcacctggcagcgccggacgagcgaggcaccggcggggcacttttggcgcgccgacgacgaggcctgcgcgtccttcctggacgcgcagccccgtgggtccgtgacgtacgtggcgttcgggagcctgacggtcatgagccccgcgcagctccaggagctcgcgctggccctgctggcctccgcccgccccttcctgtgggtgttccggccggggct

SEQ ID NO: 21953 - DNA, 600 bp, Zea mays
  Clone ID: MRT4577_120018C.1
cccaacatcctcccccaccctccagtaagcaagttccatctctctcttcctcacctcctcccccaccctccctgctcgagatggaccccgccgttgagcgcctcaagaccggcttcgagaagttcaagaccgaggtctacgaccagaagccggatctgttcgagcccctcaaggcccaccagtcacccaagtacatggtgttcgcgtgcgccgactcgcgtgtgtgcccctcagtgaccttgggcctggagcccggcgaggccttcaccgtccgcaacatcgccgccatggtcccatcctactgcaagaacaagcacacaggtgtcgggtcggccatcgagtatgccgtctgcgccctcaaggtcgagttcatcgtggtgatcggacacagccgctgcggtgggatcaaggccctcctcaacctcaaggacggcaccgatgacaccttccacttcgtggaggactgggtcaggatcgggtacccggccaggaagaaggtgaaggatgagtgctccgagatgccttttgaggagcagtgcggtgtcctggaaaaggaggccgtcaacgtgtccctccagaatctgagcacctacccgttcg

SEQ ID NO: 21954 - DNA, 126 bp, Zea mays
  Clone ID: MRT4577_120019C.1
cccacgcgtccgtctgtacagaatagtcatttgttgccaaaacgatcagtgttaccatgtgttcggcttgcttgtgtctatcctttcttgtgattgagttcgactttcagagtttgcaatgcgacg

SEQ ID NO: 21955 - DNA, 464 bp, Zea mays
  unsure (1)..(464): unsure at all n locations
  Clone ID: MRT4577_12001C.1
aggattcaaaatagaangaaacggaaagtcttgtctcatccacctcctcacgccggcagggcagagcagagcaggtgcagcggatcgacatcgacatcgacccatggattcttcggccctcagcaatccgcgtctcatggcgctcattgaggaggagaaaaaaagggccatggcgaacgagctggtggcgaagctgacgtttgtctgctgggacaagtgcgtgacggggagcgtggggagcagcctgagcaggagcgagacctcgtgcctgtccaactgcgcgaaacgcttcgccgaggtgaagatgatggccctgcagcgcttcaccactaccggccgcggctgaagtcccacacgcaggcatgtgagatggtagaaaactagaaagacatgtcaatgtatcctatgcatttttttttgtttaagacggtgttagaattaagttgattctgagatgttgatgc

SEQ ID NO: 21956 - DNA, 264 bp, Zea mays
  Clone ID: MRT4577_120020C.1
aaagtgatctttgcccacttcatcccttcacttctggagtgtatctttcactaatgggggctcatatttagggcctgagaaaaatagccactcttactcaaatataattaattagagcctcatctaatccttggactccttggagcccttcatacatactttccgggtggcctttattgtctataacttcttcacaacttgttcttttggcaactaagaattgggcaccacccttctattacattcttacccaacaagcctttt

SEQ ID NO: 21957 - DNA, 611 bp, Zea mays
  Clone ID: MRT4577_120021C.1
ccccctcgagtttttttttttttttttttttttttttttttttttttttttttttttttttttttttttttttttttttttttaacaaaaaaaaaaaagctaaggactttttttttaaaaaaaaattcaaacagccgccccggggggggggggaaaagggccaaatttttttttagggattataaaaccaaaccccttttttttttcactttaaaaactgggaatcgccccccgaagtcccggagtccccccaattttttttccttggaccgggacggggggaacataagggcaacacacatatttttggggagggccccaacggcccccgggggccgggggaatcaatgctttcgctgggttgggccccgccctgggggaaaacactttttgggggaccctctccacaacgtcaaggccgaaaatctctttgacaacgggcattgtccccggcccgtccatttggaaggggacgggggttttcggggggttggggctaaccaaaaactccttcctcgccgccctgggggcccccctaatggggcagggccccgggggtgaaaaaaccagggggggttcccccaaccttttgaaaaatagaacaccctttt

SEQ ID NO: 21958 - DNA, 435 bp, Zea mays
  Clone ID: MRT4577_120022C.1
aaggaactcaaatcatatactccaccaatgatgtacaaaggtctcatttcgacaaagtactgtacaaaagggtgtgaaaatactgaacaaaggatgcacagtgtaccaaattaagacaaagaggagctaaagctactaataaactgtctgtctgtggctcctgttctttatttatgatacaatcgccatatgccagaggctatttccttcctgatacgtttttagtaggagcaccaagtctgataagacacgactgatcttcagcgactcaaggtagccaggtaggtaaagagaaagtcatgcacctttcaaaccttcgaatcaacaacgacgcgagcatcccccgtcatgggcatggcgttggcctcctcgccgttagcatcttcttccaccgccagccgcggttgcggggccggggcaccccttcccccccct

SEQ ID NO: 21959 - DNA, 157 bp, Zea mays
  Clone ID: MRT4577_120023C.1
cccacgcgtccgctagttctagatcgcggttctgccgctctcgatctaacccacacgggcagagctcattatctactactgtgctaccaccttcaatacactaaaccttacttcatgttcctagtcctgcttaaggcccttgcctgttactagcacc

SEQ ID NO: 21960 - DNA, 534 bp, Zea mays
  Clone ID: MRT4577_120024C.1
attgccgtgcacactgcgtctccgctgcccatgcccgtacccgaccgtcgccgtggactgacgatgagtggagaggataaggctgctcgtccctgctcacctcactgagaggcctccttcgctcaatgtctcgatccctctcctctctgtgccggagaccgcatctgctcttccatggtgtgctcgcgaaatcagccctggagctcctgctgtgtcaatgaagttgttgagatcaccaaggctctcaatgtcaaatacgtagtttgacatgaagactgcactgattatagtggatcaaggccttcactcctgaggtggatacccccccaagtatggtgtcattccaaggactctacgcgaatactgtgacccgatgacatgggtagatactgatgctggtgcctgttgtgcctgcaacgtgcctgataggtagacaaagagttctgatgcccctgagtgatctagggggaagcgacgcttactcaatcagccatgtgtgctgtctgttctgaataccgtctctgccacgacatc

SEQ ID NO: 21961 - DNA, 255 bp, Zea mays
  Clone ID: MRT4577_120025C.1
taataaccgaatacccagaccaaatctctcgtcaccttcgccttcacatcgcatcatgagcattctaaacttctgggaccgaatacattttcagacactcaattccaagatccattgttagatcctaccatacttcttcttcttcttcttgctcatctgatctctttttatattcatcaacaattctatccaactaatcttttttattaatcatgctctacctctccaaacatactctcgcactctcgacacacc

SEQ ID NO: 21962 - DNA, 147 bp, Zea mays
  Clone ID: MRT4577_120026C.1
cgtcccgtcctgcatggggttgtaagctgtctctaaatttcacggcaactttaccacagagaaatcaaccatgcgcacaaagcatagcacggggtacacgcatgaactgctttgtgcgcatggatgatttctctgtggaaacttccc

SEQ ID NO: 21963 - DNA, 198 bp, Zea mays
  Clone ID: MRT4577_120027C.1
caactagcaacatagaaagcacaattgtgtaccaacaatggcagccaaaggatgttgcctcctaatgctcgtgggccttcctcaaagtcctgttccgccaccaattttccaccattcctaccagcttccatataccttcctttttaccccgtaccttttaccaaccgtgtgttttggatttgaaaacccaatttttta

SEQ ID NO: 21964 - DNA, 857 bp, Zea mays
  Clone ID: MRT4577_120028C.1
cccacgcgtccgcccacgcgtccgtgcgggccgggccacgccgactgctcggccatccagcctggcggcgcctgctaccagcagaacaacctgccggcgatcgcgtcctacgcctacaacgactactaccaggagatggccagcaccggcgccacctgctccttcaacggcaccgccaccaccaccaccaatgacccaagttcagggtcttgcgttttcgcgggaagctccacggcgggaagctcctccaactcgagcgtgccggtgggcgcaagcccgccgaccagcctctcccctccgacgggcttcgcacctccagtcggctccagccccccgtcgtcgtcgtcggagttcagccccccggcggtcggcaccgcccctttgtccggcttcaccccgccggacggaggcggcttcggcaccccgccgggttccttcaacggcaccgggacgttcgggccgagcggcacgctcagcccttacaacggcggggcccctgggctgtcgcgcgccggcttgagcttgacggctctgtccgccgctgcggtcgccgtgcttctcgcgtccattgatgcgatgtgaatcaaatcatcgatgcagagactagacatcccttttctctcgcgccgcaacatgttcttagttgttgatctactggtcatgtcatgtagatgtcaggtcagatttgtacgtattatttaggtgccgtgaatgtgaagcgaatgtctctgtatgcgtgtgcgttgggtgccgtagttctgatgagcgcatgtgaatatacgcttatatgtatgtatgacacgacacaaaacttcagtacagtgatggattatatatttaaaaaaaaaaaaaaagaa

SEQ ID NO: 21965 - DNA, 391 bp, Zea mays
  Clone ID: MRT4577_120029C.1
ccgggtccaaggaagagattaactgaggcaagcctttcctccgtaaatggggagaggctgctttgaacacatgacctagtgattgagtgagaccaaacataaaaaaaactcgacatgcgggggctatgacagcccctgggcatcaaattaagaaaaaggccttctcatgtaggtcgagacaaccgtcgaactcctgctccaccatacacagcggcaccgtagcccatgtgagaaacgactggtaccgggaacaggccttagacccgcaccaaaattcgctctcacgagaagtcgaatctagacgaatccagaaccaggacctgaacaatgctattcagacccacctaaccaactcagtagaggtcctttcacgagtgagacctaacataac

SEQ ID NO: 21966 - DNA, 279 bp, Zea mays
  Clone ID: MRT4577_12002C.1
tacgcctgctgtccggtcggttttccgggtcgaccacgcttcctggcggccgtgtcgccgcttgctagggttcatcagttcgacgagcggcggcgtgtgggccgtgcaggcagccatgtctttttgcgtatagggtactggttgcttttctctattggctggtccgctgggccaaaatttccatattccaatcaaggcagatggttcgtccatgattttttcggatgttcaggtttcttgtcgctctgtttacgtcgttaccgttgatcatcttcacag

SEQ ID NO: 21967 - DNA, 1245 bp, Zea mays
  Clone ID: MRT4577_120030C.1
tgtttttgctgttggagataacctcacatctcgctataagatcaatgcaaaaatgggagaaggtcagtttggatggccatgtcttctgaaataattgattaaactcgcgtttggcatgctgtgcaacacatgcagcaggttatgtttgtaacgaatgtgtctggaatacattaggtacctttggtcaggtgttggagtgttgggacaaggaaaggaaagaaatggtggctatcaaaatcattaggggcattaaaaagtacagggatgctgcaatgatcgaaattggcatgctcgagcagcttggtaaatatgatgaaagtagatctagttatgcacgaattgtgtctcatacacactgatttaaagcctgagaacattctccttgtttctccggagtacattaaagtgcctgattacaaagtttcatcccgatccccaaaggagggatcctattacaagcgggtgcccaagtctagtgctatcaaggtgattgattttggtagcactacctatgatcaacaggatcagagttatgttgtgtcgacgaggcattatcgggctccagaagttatactgggacttggatggagttacccatgtgatatctggagtgttggttgtattcttgttgagctttgcacgggtgaggcgatattccagactcacgaaaacttggaacatctggctatgatggagagggttcttggacctttgccataccatatgttcaagagggcagatcggcactctgacaaatacatcagaaaaggacgcctgaattggcctgagggttgcacttcgcgtgaaagcatgaaagctgtgatgaaattgtccaggcttcagaacctggtgatgcaaaatgtggatcaagctgcaggagatttcattgaccttttgcaagggctgctgaagtatgatccatcaagccgtttaacagcacgagaggccctgaggcatcccttctttacccaagggttttggcgaagatgatgatactccttgcattctaccttgtttgtctgacttgatgtcttgcatttgacagtctgtacttttcagtggtgtatgtaggcggtagatcaatctgtataaagccgttgtagagttgtttcagtcttgtttggaacgtcgtgcagattaagttgtagcataatggaagtcaaatggatgcatttgactttaaatcctgacttgtttgaatttggaatgtcaatggaaatctggtttgaggagaaagtgaacatc

SEQ ID NO: 21968 - DNA, 308 bp, Zea mays
  Clone ID: MRT4577_120031C.1
ccatccgatccccccttcgcaaccaaaaccccaactcgccccgcatcgatcgctttctattttgagtttttatcttctgtgaagattgtggctgaggatgtgcccgctgccgataaggcgcccgccgggaagaagccgaagcgacgaagcgggtccccgctggtaagtccgctgccaaggaatgcggcgatggcaagaggggcaagaagaagggcaagaagagcgtggagacctacaagatctacatcttcaaggtgctgaagcaggtgcacccggacattggcatctcctccaaggccatgtccatc

SEQ ID NO: 21969 - DNA, 435 bp, Zea mays
  Clone ID: MRT4577_120032C.1
ggactctggaatacaccaggtacctttggtcaggtgttggagtgttgggataaggaaagaaaagaaatggtggccataaagatcatcaggggcattaagaagtacagggatgctgcaatgatcgaaattggcatgcttgagaagcttggtaaatatggtgaaagcagatccaggtctcatcccaatccccaaaggaggggtcctattacaagcagttgcccaagtctagtgctatcaaggtgattgatttcggtagcactacttatgatcaacatgatcagagttatgtggtatcgacgaggcactatcgggctccagaagttatattgggacatggatggagttacccatgtgatatctggagtgttggttgtattcttgttgagctttgcacgggtgaggcgttattccagactcacgaaaacttggaacatc

SEQ ID NO: 21970 - DNA, 400 bp, Zea mays
  Clone ID: MRT4577_120033C.1
ctcatgctactcgtacatgtatttgcacatggaccgaagcataaaagacctgtgtgggaatgtgcgtagtgacattatacaacaaaagggttgttcagataggggattgatctacaatgagcatgatgaacccgttcataggaacctcttcattatgaatatgtatcagccctgcgacgttgtcgatgaatataacttaaataatggagagcatgggcatgccgattggcactttgaggctgtagacgtaggggacgggaaaaatctctatgatcttgttccttaaggacataactgttatattccgcatgtgagccgtactgattacctcgtactgggtatatcaaacgatggatatgggattgtaattactttacatggctatagtgatggtgatctt

SEQ ID NO: 21971 - DNA, 1040 bp, Zea mays
  unsure (1)..(1040): unsure at all n locations
  Clone ID: MRT4577_120034C.1
ggacaagaagttgtgaatgccatcagtgctgcagccttgggcctttcgtcgggctgtgtttcttctcaagtcaaacaagagcagcctcatgatggttcccctcctctgagagaagatgacagggatgggcattatgtttttgctgttggagataacctcacatctcgctataagatcaatgcaaaaatgggagaaggtacctttggtcaggtgttggagtgttgggacaaggaaaggaaagaaatggtggctatcaaaatcattaggggcattaaaaagtacagggatgctgcaatgatcgaaattggcatgctcgagcagcttggtaaatatgatgaaagtagatctaggtttcatcccgatccccaaaggagggatcctattacaagcgggtgcccaagtctagtgctatcaaggtgattgattttggtagcactacctatgatcaacaggatcagagttatgttgtgtcgacgaggcattatcgggctccagaagttatactgggacttggatggagttacccatgtgatatctggagtgttggttgtattcttgttgagctttgcacgggtgaggcgatattccagactcacgaaaacttggaacatctggctatgatggagagggttcttggacctttgccgtaccatatgttcaagagggcagatcggcactctgacaaatacatcagaaaaggacgcctgaattggcctgagggttgcacttcgcgtgaaagcatgaaagctgtgatgaaattgtccaggcttcagaatctggtgatgcaaaatgtggatcaggctgcaggagatttcattgaccttttgcaagggctgctgaagtatgatccatcaagccgtttaacagcacgagaggccctgaggcatcccttcttcacccaagggttttggcgaagatgatgatactccttgcattctacctttgtctgacttgatgtcttgcatttggcagtctgtacttttcnagtggtgtatgtaggcggtagatcaatctgtataaagccctagtagagttgtttc

SEQ ID NO: 21972 - DNA, 554 bp, Zea mays
  Clone ID: MRT4577_120035C.1
tgagagcgtctcgtgtgtctagggcctctgcctacgcacgctgagtgtgcgtgcacagtggcatcgactaccactcagacgccaggaggcaatagagccgtactgctgccacaacgggagcgaatgcagcctggcggacgcctgctgctccggactctactcctactggaacatcgagcaactgacaaccttcagcaagcggacagacccaatttctcaacctcggcgcacactgcgacccaggatgcgacaggtgcaccggccaaagcagcgacatccacacctgccacacgctgggcatcaaggagctactctacatcgggggagacagcggtagctgcggcctcttctacaccgacgacaccaacagcggggccgactacctgtgggacaacttgctgggcgggagaggatctgaccggcctctcggggcacgctggctcgacggcatctacttcgacattgagaacggacagccggagcactacaacgacctggtgaacgcgctcaagccaaggagagcgtgctgctgacggctagaccagcatgcccct

SEQ ID NO: 21973 - DNA, 696 bp, Zea mays
  Clone ID: MRT4577_120036C.1
ggaatacattaggtacctttggtcaggtgttggagtgttgggacaaggaaaggaaagaaatggtggctatcaaaatcattaggggcattaaaaagtacagggatgctgcaatgatcgaaattggcatgctcgagcagcttggtaaatatgatgaaagtagatctaggtttcatcccgatccccaaaggagggatcctattacaagcgggtgcccaagtctagtgctatcaaggtgattgattttggtagcactacctatgatcaacaggatcagagttatgttgtgtcgacgaggcattatcgggctccagaagttatactgggacttggatggagttacccatgtgatatctggagtgttggttgtattcttgttgagctttgcacgggtgaggcgatattccagactcacgaaaacttggaacatctggctatgatggagagggttcttggacctttgccataccatatgttcaagagggcagagtacgtttcatgcaattgtctcatatcatatgcttaagagggcagggttatctgaacatcagtgctgtgagatctggtcgatgtcttgtgcttattaatccttgtttgtagtcggcactctgacaaatacatcagaaaaggacgcctgaattggcctgagggttgcacttcgcgtgaaagcatgaaagctgtgatgaaattgtccaggct

SEQ ID NO: 21974 - DNA, 185 bp, Zea mays
  Clone ID: MRT4577_120037C.1
gctcggatttcggcttctaggccgacccgggtgatggtcttactgtcaacaagccagctcggaagcgtatactaattctgattctcccctgagccaaatcttggctgacaagtgcagcgtgaaccgactttaattggaagaccgagtgcacctggcggaggaacaaaggtttttttttttcacga

SEQ ID NO: 21975 - DNA, 1367 bp, Zea mays
  Clone ID: MRT4577_120038C.1
tctcgctataagatcaatgcaaaaatgggagaaggtcagtttggatggccatgtcttctgaaataattgattaaactcgcgtttggcatgctgtgcaacacatgcagcaggttatgtttgtaacgaatgtgtctggaatacattaggtacctttggtcaggtgttggagtgttgggacaaggaaaggaaagaaatggtggctatcaaaatcattaggggcattaaaaagtacagggatgctgcaatgatcgaaattggcatgctcgagcagcttggtaaatatgatgaaagtagatctagttgtgttcaaattcggaactggtttgactatcgtaaccatatctgtattgtctttgagaggcttggaccaagcttatatgattttctgcgggaaaacagttaccgctcattcccaattgccctagttcgggagattgccaaacaactgttggaatgtatagcatttatgcacgaattgtgtctcatacacactgatttaaagcctgagaacattctccttgtttctccggagtacattaaagtgcctgattacaaagtttcatcccgatccccaaaggagggatcctattacaagcgggtgcccaagtctagtgctatcaaggtgattgattttggtagcactacctatgatcaacaggatcagagttatgttgtgtcgacgaggcattatcgggctccagaagttatactgggacttggatggagttacccatgtgatatctggagtgttggttgtattcttgttgagctttgcacgggtgaggcgatattccagactcacgaaaacttggaacatctggctatgatggagagggttcttggacctttgccataccatatgttcaagagggcagatcggcactctgacaaatacatcagaaaaggacgcctgaattggcctgagggttgcacttcgcgtgaaagcatgaaagctgtgatgaaattgtccaggcttcagaacctggtgatgcaaaatgtggatcaagctgcaggagatttcattgaccttttgcaagggctgctgaagtatgatccatcaagccgtttaacagcacgagaggccctgaggcatcccttctttacccaagggttttggcgaagatgatgatactccttgcattctaccttgtttgtctgacttgatgtcttgcatttgacagtctgtacttttcagtggtgtatgtaggcggtagatcaatctgtataaagccgttgtagagttgtttcagtcttgtttggaacgtcgtgcagattaagttgtagcataatggaagtcaaatggatgcatttgactttaaatcctgacttgtttgaatttggaatgtcaatggaaatctggtttgagg

SEQ ID NO: 21976 - DNA, 460 bp, Zea mays
  unsure (1)..(460): unsure at all n locations
  Clone ID: MRT4577_120039C.1
atacaatctcgaggaagcggcgttaagcggagacacacattatcatgtgtggtatgtaccaataatatatgcatggacataataaagacctggcttaaatgataaaaaaataaaaaaagtgatagggtgtgacgattcaatgggacgaaggtcgagatatgctggggggggagggggttatattggtgggtcgttagtagtggattcgaggtggggagaaaggttgtagaaataatggtaatagttgtttcatgtgtgaaattgtaataaatttagaattaaataaaaaataatgagtgggaaaaataaagtgtaaagtntggggtgtttaatgagtgaggtaatttaaattaattgggttgaaataagtgnnngattttaaatttgaaaatttgttgggtaggttggattaataaattntgtaaatttggtggatgaggggtttggggattggaggtat

SEQ ID NO: 21977 - DNA, 615 bp, Zea mays
  Clone ID: MRT4577_12003C.1
ccggccgggaggtacctcgaggccggccggcatccacctcctcacgccggcagggcagagcagagcaggtgcagcggatcgacatcgacccatggattcttcggccctcagcaatccgcgtctcatggcgctcattgaggaggagaaaaaaagggccatggcgaacgagctggtggcgaagctgacgtttgtctgctgggacaagtgcgtgacggggagcgtggggagcagcctgagcaggagcgagacctcgtgcctgtccaactgcgcgaaacgcttcgccgaggtgaagatgatggccctgcagcgcttcaccactaccggccgcggctgaagtcccaacggccaaccacgcgcgcaaacgcaggcatctctctctctctctctctctgcccctgcgtggacggagcaatgtgtgtgtgtggtgtgtcctctggagtgtgccattgttggtgagatggtagaaaactagaaagacatgtcaatgtatcctatgcattttttttgtttaagacggtgttagaattaagttgattctgagatgttgatgcaagaagtggctgcggctcttcccttccagcagaaattaaagaaaaaaaataaaaaaaagcggcc

SEQ ID NO: 21978 - DNA, 849 bp, Zea mays
  Clone ID: MRT4577_120040C.1
cctcgaggccggccgggccgggatcggaatcaatcgtgtttctcgcctccacgccgagaccaatccagccaccgccaactctttgcctcgcctctccgattcgagggaacgatggagtgcgtcaccgatatgcccctcgcgacgctggacagccgaccgcgcaagcggcagcggctcgggtgggacgtcgttcccgccgagatgtatcaggttacgcggccgcggcttggttgggacgtcggccccgccgagatgaatcagtttgcactttgtggacaagaagttgtgaatgccttcagtgctgcagtgttgggcctatcttcaggttgtgtttcttctcaagtcaaccaagagcagcctcatgatggttcccctcctctgagagaagatgacaagaatggacattatgtttttgctgttggagataatctcacacctcgctataagatcaatgcaaaaatgggagaaggtacctttggtcaggtgttggagtgttgggataaggaaacaaaagaaatggtggccataaagatcatcaggggcattaagaagtacagggatgctgcaatgatcgaaattggcatgcttgagaagcttggtaaatatggtgaaagcagatccaggtctcatcccaatccccaaaggaggggtcctattacaagcagttgcccaagtctagtgctatcaaggtgattgatttcggtagcactacttatgatcaacatgatcagagttatgtggtatcgacgaggcactatcgggctccagaagttatattgggacatggatggagttacccatgtgatatctgggagtggtggttgtattcttgttgagctttgcacgggt

SEQ ID NO: 21979 - DNA, 209 bp, Zea mays
  Clone ID: MRT4577_120041C.1
aactctgatgcatcacaaaatgcatccagttcatccctggttttgtttaattcacatccccctcttaggggcgttattacttgttttatatttctctttacattaacgctggttcaacatcagagcttatttctgttgtttatatgcacttttagcgagtttaatctgataacttacctaagtccccaagacatgcggatctgctgctt

SEQ ID NO: 21980 - DNA, 791 bp, Zea mays
  Clone ID: MRT4577_120042C.1
ggtctttctattacccctcctgcactataatgcatatacattagttttgtgcattatctgtgctgcattgcagcctgtcattaatccattactcatgcttgtactccagggagtatctaacatcacgtgatgtttttgtatttaccctctctctgtaatgtgttgcagttatgcatgaattgcgcctcatacacactgatttaaagcctgagaacattctccttgtttctccggagtacattaaagtgcctgattacaaagtattgttcttttatatttaattcacctacccaagatttaccttgtgctatgcttgttcttttattgtgtattggtagcgggggtagaaaaatatggtactgatcctcttttttcatttgccaggtctcatcccaatccccaaaggaggggtcctattacaagcagttgcccaagtctagtgctatcaaggtgattgatttcggtagcactacttatgatcaacatgatcagagttatgtggtatcgacgaggcactatcgggctccagaagttatattgggacatggatggagttacccatgtgatatctggagtgttggttgtattcttgttgagctttgcacgggtgaggcgttattccagactcacgaaaacttggaacatctggctatgatggagagagttcttggacctttgccgtaccatatgcttaagatggcagatcggcactctgacaatacatcagaaaaggacgcctgaattggcctgagggttgcacctcgcgggagagcatgaaagctgtgatgaaa

SEQ ID NO: 21981 - DNA, 2281 bp, Zea mays
  Clone ID: MRT4577_120043C.1
ggccgggccgggtgcaccgccaactctttgcctcgcctctctctattcgagggaacgatggagtgcgtcaccgatatgcccctcgcgacgctggacagccgaccgcgcaagcggcagcggctcgggtgggacgtcgttcccgccgagatgtatcaggttacgcggccgcggcttggttgggacgtcggccccgccgagatgaatcagtttgcactttgtggacaagaagttgtgaatgccttcagtgctgcagtgttgggcctatcttcaggttgtgtttcttctcaagtcaaccaagagcagcctcatgatggttcccctcctctgagagaagatgacaagaatgggcattatgtttttgctgttggagataatctcacatctcgctataagatcaatgcaaaaatgggagaaggtcagtttggatgaccatgtattctgaaatagttgatttaactcgcattgggcatgccaatacattcagcaaattttgtctataactgaatgtgtctggactctggaatacaccaggtacctttggtcaggtgttggagtgttgggataaggaaacaaaagaaatggtggccataaagatcatcaggggcattaagaagtacagggatgctgcaatgatcgaaattggcatgcttgagaagcttggtaaatatggtgaaagcagatccaggtgagtttgctggttcagttagcacctatatgcgtgcttacgttcataagattgcttgtatataagctggtctattttgcagttgtgttcaaattcggaactggtttgactatcgtaaccatatctgtattgtaagtacattgttagattatgacaattatgcactgacccaaaaatataaccatatggtgcttaaacgttggtgaatttggattaatggtgagcaggtctttgagaggcttggaccaagcttatatgattttctgaggaaaaacaattaccgctcattcccaattgccctagttcgggagtttgccaaacaactgttggaatgtatagcatgtgtgtgcacagttctttctattacccctcctgcactataatgcatatacattagttttgtgcattatctgtgctgcattgcagcctgtcattaatccattactcatgcttgtactccagggagtatctaacatcatgtgatgtttttgtatttaccctctctctgtaatgtgttgcagttatgcatgaattgcgcctcatacacactgatttaaagcctgagaacattctccttgtttctccggagtacattaaagtgcctgattacaaagtatatcttgttcttttatatttaattcacctacccaagatttaccttgtgctatgcttgttcttttattgtgtattggtagcgggggtagaaaaatatggtactgatcctcttttttcatttgccaggtctcatcccaatccccaaaggaggggtcctattacaagcagttgcccaagtctagtgctatcaaggtgattgatttcggtagcactacttatgatcaacatgatcagagttatgtggtatcgacgaggcactatcgggctccagaagttatattgggtatctatcgtgtctattgaaaagcttttcctagttcagctcgatttggtgatattttatgattgtgtggatcttgttcaggacatggatggagttacccatgtgatatctggagtgttggttgtattcttgttgagctttgcacgggtgaggcgttattccagactcacgaaaacttggaacatctggctatgatggagagagttcttggacctttgccgtaccatatgcttaagagggcagatcggcactctgacaaatacatcagaaaaggacgcctgaattggcctgagggttgcacctcgcgggagagcatgaaagctgtgatgaaattgtccaggcttcagaatctggtgatgcaaaatgtggaccaggctgcgggagatttcattggtcttttgcaagggctcctgaagtatgacccagcaagccgtttaacagcacgagaagcactgaggcatcctttcttcaccgaagggtttgggcgaagaagatgatacgtccttgaagcagaccttgtttgtcctctgtctctgaccaaactgtatataaagctgaaatggagctgtttcaatcttgtttgaaacgtcgtgtaactatagttgtatcacaagggaagtcagacggatactttttactaatcctgacttgtttgagttttgcaagccaattcaatgaaagtttgggttgaacagaaa

SEQ ID NO: 21982 - DNA, 526 bp, Zea mays
  Clone ID: MRT4577_120044C.1
gcagctcgcgcagttcccacttcccacccaccaaaccaaactctcctccacaacctcccccgccgcccctcctcttctcggcttctcccctgccttgttcggccccaaaacggcaagagccgacgccagcaaaccctcgggttcgggagggaaggaaggcacgagcagcgcgcctgcctacccgcagctaaccccaaacagcaacgtcgtagccgacgagagcctccgccacctacccaccaactcccgcccgtcgcctccgcttgggttctcgtcgagcagttggtgggcacctaccgcatcgagccagagagagagagagagagtgagccactgagccagggcggcaagggggagatgaagaagctgtaccagggcggcaaggggcggcgggtgcacccggcgccggctgacgcatcggcagccgtggcgctgccggccgccgtgctggccctggcgtccgcgctgacggccgaggagcaggaggtgctggcctacctcctgtcctgcggcgggggcggggaac

SEQ ID NO: 21983 - DNA, 218 bp, Zea mays
  Clone ID: MRT4577_120045C.1
acaaaaaatatattacggttaagaaaaaaacatagggaaggcttaacatacattcatacactacacaccaattaaaaaaaacacatatacttccaccatgaatcaataccaaccattcgacacgtatacacacccataaaaaacatgcaccacaacattgttcatgcattcacaaacgactactacaacaaacataatattaatactaacacacacac

SEQ ID NO: 21984 - DNA, 1357 bp, Zea mays
  Clone ID: MRT4577_120046C.1
gggttttatgtttttgctgttggagataatctcacatctcgctataagatcaatgcaaaaatgggagaaggtacctttggtcaggtgttggagtgttgggataaggaaacaaaagaaatggtggccataaagatcatcaggggcattaagaagtacagggatgctgcaatgatcgaaattggcatgcttgagaagcttggtaaatatggtgaaagcagatccagttgtgttcaaattcggaactggtttgactatcgtaaccatatctgtattgtctttgagaggcttggaccaagcttatatgattttctgaggaaaaacaattaccgctcattcccaattgccctagttcgggagtttgccaaacaactgttggaatgtatagcatttatgcatgaattgcgcctcatacacactgatttaaagcctgagaacattctccttgtttctccggagtacattaaagtgcctgattacaaagtctcatcccaatccccaaaggaggggtcctattacaagcagttgcccaagtctagtgctatcaaggtgattgatttcggtagcactacttatgatcaacatgatcagagttatgtggtatcgacgaggcactatcgggctccagaagttatattgggacatggatggagttacccatgtgatatctggagtgttggttgtattcttgttgagctttgcacgggtgaggcgttattccagactcacgaaaacttggaacatctggctatgatggagagagttcttggacctttgccgtaccatatgcttaagagggcagagtatgttccataccaatgcaagtctgaacatcaatgctgtgaggtctggtcgatatcttgtgcttactaatccttgtttgtagtcggcactctgacaaatacatcagaaaaggacgcctgaattggcctgagggttgcacctcgcgggagagcatgaaagctgtgatgaaattgtccaggcttcagaatctggtgatgcaaaatgtggaccaggctgcgggagatttcattggtcttttgcaagggctcctgaagtatgacccagcaagccgtttaacagcacgagaggcactgaggcatcctttcttcaccgaagggtttgggcgaagaagatgatacgtccttgaagcagaccttgtttgtcctctgtctctgaccaaactgtatataaagctgaaatggagctgtttcaatcttgtttgaaacgtcgtgtaactatagttgtatcacaagggaagtcagacggatactttttactaatcctgacttgtttgagttttgcaagccaattcaataaaagtttgggttgaacaaaaaaaaaaaaaaaaaaaaaataa

SEQ ID NO: 21985 - DNA, 333 bp, Zea mays
  Clone ID: MRT4577_120047C.1
ccgatgactaagatcctcggtggggattctagaagacagagaactctgctactgtgggagtgagctcaagggatcaatggattctttacgcacattggcctaggttgagactgaccatggatcaacagttgcttgagacttcagtaactttgctacactgaggcagcttgctattgacaaggttcaaccggtggtgatatctttgaaacttggtactctcatccagtatctcagtggttcttcactgcgcatgctttcagtcggtgaagaatcatgtgaatacttcaggacgatggagtctatgtgcgcgtccgatctaactgatctgatagc

SEQ ID NO: 21986 - DNA, 242 bp, Zea mays
  Clone ID: MRT4577_120048C.1
aggagcctctatgctcacaagctcccatagcttggcctgttaccccatacctctcatcaattataggttgaataagtgaaaacccagctctataaccatataggctgcaacaagcaatcgcaacacgcaacatacctttatcgcccttgttgcttgaacaatcgccagccctatcttcggtgcagtcattggtacaaaccatcagggcacaacagctgcagcaactcgtgctacctctgatc

SEQ ID NO: 21987 - DNA, 231 bp, Zea mays
  Clone ID: MRT4577_120049C.1
aaggtttcaacattacagactaacatacctccagtaatggatggtgcaaggcaaattcattgtggatggaagagttgttaataaagttggaacacaagagtctgacaggtctaccgtctaaatcgaggctgaaatccacaactgtgacctaagcttgaggcaattatcacaggatgcgagattgattgcgatggaaagatagcccttgattcaggattatccacaggtggc

SEQ ID NO: 21988 - DNA, 610 bp, Zea mays
  Clone ID: MRT4577_12004C.1
gccggccgggccgggctcatccacctcctaacgccggcagagcacagcaggtgcagcggatcgacatcgacatcgacccatggattcttcggccctcagcaatccgcgtctcatggcgctcattgaggaggagaaaaaaagggccatggcgaacgagctggtggcgaagctgacgtttgtctgctgggacaagtgcgtgacggggagcgtggggagcagcctgagcaggagcgagacctcgtgcctgtccaactgcgcgaaacgcttcgccgaggtgaagatgatggccctgcagcgcttcaccactaccggacgcggctgaagtcccaaccaccacgcgcgcatctctctctctctgcctctgcgtggacggagcaatgtgtgtgtggtgtcctctggagtgtgccattgttggtgagatggtagaacatgtcaatgtatcctatgcttttttttttgtttaagacggtgttagaattaagttgattctgagatgttgatgcaagtttaaaaagaatgattagaaataaaaaaaaaaaaaaaaaaaaaaaaacaaaaaaaaaaaaaaaaaaggcccctattggcatgcaaggatggaatcctcagagct

SEQ ID NO: 21989 - DNA, 167 bp, Zea mays
  Clone ID: MRT4577_120050C.1
ccatggcatgcatccttcaggttcttagtgcatgcttgttgggaagaaatgaagatatgaacataaattgttcagtaggcatttgtggcccatgagacatttaaaacatgtgccctattacttgctagaggtaacatttaattcaaatggacagttttaatttgcat

SEQ ID NO: 21990 - DNA, 2361 bp, Zea mays
  Clone ID: MRT4577_120051C.1
ggccgcttttttttttttttttttggttttttttttttcttttttttaaacgaccacaagggatactaaatagaccaacacgatagtcgacagatgatacaccggcacaaaatttagttcagtatgcacagcagaagtttttcgacaagatgcctcgatgggacttgcgagagtttgatgttcatcgtgctcacaacataatccacaaagctgatttcagcaggagctacaaactacagaattagcatattaccaactgctttcagcacgatgcgcccccaaaatgaagtgtacaaataacctagcaccactcagtctccgtgaacaatgagatgattagacggtggttaccgagaaagcctccacttccagtatgcttttgaacccatatttctttaaacattctcttttttttctttttacagccttaaccgcgctgccctacgattaaacaccaaagttttcaaaaggtcttccaataacttcaaatgtgatgggattttgactaggtgtagacctatgaaatagccgagccaccaaatcaagattcataacaccacctcgtccagatagcattaagcctcattgtggaacgtcagaatctgagataacattccttgtggaaccacattcagaaggacacttatcatttgatgatagagaggagctaccacatgaaactttggaaactcccgctggagaagtctttgtattttccacagttgagatggatttattatgaggaatggctaccataacagatgtagcaagagatgatactttcccaacagggctgggggactcagatgatatgctttgagtatggccagggatagtagagggcctcacatgaactgaggtattctgatgcctataatggttatttgagccaggagatgctgtcaaccacataaatcgtagtgtgtgtcctttgcaagatttaccaccaataaatgctttctcagctgattgtcgtgttgtgtaagtcacacaagctgagcaactcagcgaaggttttagggttgcatcaaggttatgggcttcagtatcttccaggacaaccgacgaaagatccccaaatgatgagaaatggtctgccaagacagattcatttgcaatttcaggtggcaaaggtggaagaattctgaatgatgtggtccgattgtcaagcttaaacctattctgaggaggtgctggcagagtagtctgttttgtaaccaccactggtttctgcgtggatatcgcagcagacttttgagacaacaaggcaaactctccagaacttctcttttccaatgaaccagctgtctcctgtgacccttcaaccctcgtggacgctgcatcctttacttgtgatgcatcattagaagcaatttcttttccaccagtctctgcatgcttaactgaatttgctgaacctttttgttttgtaagtttctctaactgccggcggaactcatcacgcttctgagctaagatctcttgttttttacgtagttcttccaatagttctaggccttcttgcctttttggagcatggggtggtactgctttcgcactacttgctggcagcattctagaacttggtgtaccagaactcaacagttcagcagaagatccagagctgggccctggagctgttggttgaacattttccttgactctgttggggtaagaattagccggcgtagtagacaactgggaaggcttttgagagattctgccctctcccacatcaagaactctatctctgttggcccaccatagctttataaagcggtttcccataacagcatctggagcttttagggcagcttcagcttcttcccttctcgagaactggacaaaagctttttcactgttagatggaatataaatatctattacttgaccaaacttctgaaaatgcgatagaagggtctcacatctgttgctttcttggggaattccatttacatataatgtacgggatgctttctgagcagctcgattactttgccagcccacatctccatatattcttgaattgggttgaccattggtatccttagcagcagattttacttggcccgtgctgatagccatgtcatcataatcacttttttggtttccagtgatactcgttggtgtacttttagctgtgttattacctcctggttttctttttgatgttattcgcccccaaacagaagacttcaaactctgagaaccatcagaagccaaaacctggtttgaatgctcctgccccatttcatagccggatgattcagcattccacggtccaacatctttatttataaagccagtagatgatgcttctcggtgctcatgttccaaagacgcgatcaggattcgatcccg

SEQ ID NO: 21991 - DNA, 525 bp, Zea mays
  unsure (1)..(525): unsure at all n locations
  Clone ID: MRT4577_120052C.1
aggtcacaatgaaacgccgcccaggtgcgtcactccgtcctgcgccacatggctccggcggccgccaccatcgccgtcctcggcgacgacatcctacaggaggtcttcatcctcctcccgacccccgccgacctcctccgcgcggcgctcgcctgtcagcctttcctccgggtcgcccgcagcgcagccttcctccgccgcttccgccgccgccacccctcgacctgcccggtcatcctcggatgcctcctctaccgccccagcaagcgccgcggggccagcgccccttaccttctgcccgccgacctcctccgcgccacgcaccgcaccatcgagggaggagacttcgccctctccttcctcccccgccgcggncggccggatggcgccggcatcccgtggcggctcctggactgccgcaacggcagcctcctgttgcgtgacggggcttccggagaactcgccgtcgccgacccgttaacccggcgctgggtttcactccccgcgctccccggtgggcgccgc

SEQ ID NO: 21992 - DNA, 377 bp, Zea mays
  Clone ID: MRT4577_120053C.1
gacggagaatagatgcttggtctcattactaagactttctagcattagagaatggttggatgaagctacaagtcatgcagcgacgcagaggcaaacgctggaatgttttgtggggctgaacaatcacagacagttttgacagatgacaggatcgatgttttttttttaaattttgtgcagatgggataaacccttaccttaacaagcagcccgtaggctgcattacacagaactaccattcttctggtagaggctccttatgaactgtacaacaaccacagatgccacatagagatacagctgctgcctgtttctctaccccgccaccctcgctagttcactaccctagttctgagctcatttcttctacacacagc

SEQ ID NO: 21993 - DNA, 390 bp, Zea mays
  Clone ID: MRT4577_120054C.1
aagccaatcttataggagggtttatatgtgcattagccgccgcatatccacggactcggggtccactagggaggtaggagcctagtgaaatataccactttgaagatcttatacaacgtcaagccatcaatgttgccataaacatgctgatcacttttgcgattgctcaaaatttcctagtcatgcttcgccacttgaagataggccttttcttcttctttgctgcatttgtactcatcatgaccatcttcattgccaagttgctgcctgagacaaagaacatccccattgaagaaatgcatacagactggagatcacaattggtttaggtcaaaaatagtcccacatgctgatgatcatcccaagcctgatgctgcccaaagtttaaaa

SEQ ID NO: 21994 - DNA, 770 bp, Zea mays
  Clone ID: MRT4577_120055C.1
cggacgcgtgggattggtggcactaacatcagaaatgaggccaatcagcttctgaaaggggtcaatctcttagttgcaactccaggcaggcttctggatcatctgcgaaatactaaaagtttcaactacaaacggctacagtgccttataattgatgaagctgatcgcatacttgagcaaaattttgaagaggatatgaaacaaatatttaaacgactccctcaggataggcaaacagttcttttttctgccacacagaatcaaaaggttgttgaatttgcgaattttacgtttgggcaaaatgaagaaagacaaaagaaacttgtttatgttggagtcgatgattctaaattaaagcctactgttgagggcttgcagcagggttactgtgtcattcctagcgagaaaaggtttctggttctgtatgctttcctaagaaggatgcagcttaggaaggaggatctgaaggtcatggtgttcttttcatcctgtagctcagtcaagttccatgcagaatttctaaatttccttggggtagggtgttatgatatccatgggcaacagaagcagcagaagcgaactagtaccttcttccaatttttgaaggagaaaaatggcatcttattatgcacaaacgtggcagctcgtgggcttgatattcctgatgtggactatattgtgcaatttgatcctccagatgacccaaaggattacattcacagggttggtcgcactgcccgaggtgacaaaggcaaaggaagtgcattatt

SEQ ID NO: 21995 - DNA, 146 bp, Zea mays
  Clone ID: MRT4577_120056C.1
aagctgatgtaaacctagtaccctaccaaagcccattaccgtaccaactaggtgatactaaatatctttgcttacttatgctccttgtacttactactaagtactgttacctttccattttctcccaatgcccccaagatactata

SEQ ID NO: 21996 - DNA, 435 bp, Zea mays
  Clone ID: MRT4577_120057C.1
ggggggacgcgtccgcccacgcgtccgtgaacatgctgccacctaatcaaaaaatttcatgtgttaacatcatggggaaaaaaaaaaaaaagaaaggaaaaaaaaaaaaaaaaaaaaaaaaaaaaaaaaaaaaaaaaaaaaaaaaaaaaaaaaaaaaaaaaaaaaaaaaaaaaaaaaaaaaaagggggggggcgttttaaaggaccaaagctaacgtacgcgggcatgcaaggaaaaaactttttaaaaggggcaccaaaataaaataaacgggccggggtttaaaaacggcgggacgggaaaaacccgggggtaaccaaactaaatgggctgggagaaaatccccttttcgccagggggggaaaaaacaaaaaggcccgaaccgaacgcccttccaaaaagttgcccaacctaaatgggaaaggggaccccccc

SEQ ID NO: 21997 - DNA, 584 bp, Zea mays
  Clone ID: MRT4577_120058C.1
gtcccacgtcctgtccactggcgtgtacactggctcaggacaatgctactgcacatgtcaagggtggtgccatagtaagttgttatctatgacccaagctaattgcacccatgtttgatgatgacatcaataacgacaattacacctttgttgttaacattagttccaatactaactgcatcacaaactttcttaatgccattgataacgtcattcatgacaactacggcattattacagctttgattacaactgttcatgccatcactgctacacacaaaactttagacagaccctgaaccaatgactggacaggtagctggaatatcatctttaacatcattcctagtagcaccggtgctgccaaagctgttgctaaagttattgctaatctgaatggcaagctcactggtatgtcctctcgtgatcctactgtggatgacttggatgttgacctcaccaacagaatctacaatgaggacttctataaagatatcaaggaatgctattaagggtgctttcaagggtatcactcaagatatcataggatatctggaagatgatctattttttaccgacttcct

SEQ ID NO: 21998 - DNA, 774 bp, Zea mays
  Clone ID: MRT4577_120059C.1
gcccgctcgaggacggccggcgcggcgtaatctctcatcccatcacatctcagcgtcattcatttcatcaccgtgtgtgaaagaattgaacatggctatgagaggcaacaatgtcaagacctttgtgatgatgctcgtagttgtgggtgttgtggccatggagcaaacccagcaagtacaagcatcccactgttgttgtgatctcaaatcggtcgatacctattttacgtgccgccaaaaatctgatagcaccgtctcagattgttgcggtgcttctgctggctatatatcagacgccgctggatttgaatgcaagcccggttatatagatatagagacagcactgcaagccgtcaactactgcaagctggggtgcacagcttccttgtgcaacaaagtaactctatctgggaaagatgccacggaacgctgcactagtggatgccacgatctgtgcaccaagaacaatgccgaaattgcgcaagtcgtcatggcttaactagttatgccaaagagctgcatctgacaagcccgccaaggagtgtttatgttgccttcaataattggtgccaaatccaataaggatcatgagctgtatgatgcatcttcctgcaagatgtatagtgctcgatcatcatttcttgttaaatgtttcatgttgtatccttggcaaatggcatgatgacgccatgcttttagtgaaatcttgtttagtttgcaaattattatggtgctttgttctagcgagtcatacttgctttttgttcttccttc

SEQ ID NO: 21999 - DNA, 1818 bp, Zea mays
  Clone ID: MRT4577_12005C.1
ccggccggggcgctccggcctcactcttcgtctcttccagcccagcacgagagaaagcataggctgcgcggctctcctctgctttcgcgcaaccgagccggcaggaagcagtgaccgtcggggccccggcggccggctgccatggcgacggcagcggcggactgccgtacgcgaaccgtgctcaaggcggcgctgtcgaggaccaccgccgccttcctcttcgtctccgtcgtcgccgtcggggtggtcgtctcgggtcgctggatcaccgccacaaccgctggacgcctgaggcgccttcccaccaccgcggccattcccgccgccgccgccgtactccacccctccgaaacgcaacagttacaaccgccgcgcccgtactccactcctcccccttcccgaccaccgtctccctcctactccatctcctgccccagcctcaacctctccagtcccgccaaagcgcccaaaacctcacaaaccctcgcgcgcgcgctctcctctccctccatctgccccgcctcccccagcccgcccccgccctactccgccgcctcgctgtcctccaacacctcgtgcccgtcctacttccgcttcatccacgaggacctccgcccatggcgcgccgcgggcgggatcacgcgcgccatgctcgaccgcgccgcctcaccgccaccttccgcctcgtcgtgctcggcggcaacgcctacgtccagcggttccgcccggcgttccagacccgcgacctcttcaccatctggggcgtcctccagctgctccgtcgccaccccggccgcgtccccgatctcgacctcatgttcgacaccgtcgactggcccgtcgtccgctcccacctctaccgcgggaagaacgccgagatgttgccgccgctgttccgctactgcggggatgataaaacgctggatatcgtcttcccggattggtcattctggggatggccggagatcaacataaaaccatgggatgccttgaaggaggacttgaaggctggtaataacagagtgagatggatggatagagaaccttatgcttactggaaagggaatccatcagtttctgcgacacgtaaggaactggttaagtgtaacgtctctagtacgcatgattggaacgcaaggatttacgctcaggactggttcaaggagagcaaggcaggatataaggactcagatttgagtagtcagtgtgctcacaggtacaagatctatattgaaggatcaccgtggtctatcagtgagaaatatatactagcatgtgattcaatgactctgttggttacaccaagatactatgatttcttttcaaggtcacttatgccgattcagcattattggcctgttcgggatgacaataaatgtgcctccataaaatatgctgttgattggggcaactctcacaagcaattggtaacttgcatctatatatattttgtcatctacatttgtaggctttattccagtgctaaacattaggtttggaaataatagaaataagctatgcttgttactaactgaaatccagttgagatgtagcgtatggtctatggtgtgaacccaaggtgcctaatatttcttaggatatctatttctcattaaggcaacataattaaatcatcatctgttgatgttactgaaagagttcggtgcaaacaacttctgcccataatagcgtgcgttgacaaatcaacctgcatctgggatgttttgtcgaaacgtaaaaaaaaaaacaccatgatgcaaaacatggcagaacataaaatggaccaatcagatatattgctaatatttgagcatggga

SEQ ID NO: 22000 - DNA, 631 bp, Zea mays
  Clone ID: MRT4577_120060C.1
ttgggaccctcgaggccggccgggattgtctattgcacccccctccccgatatgctttcgccagggatggccacccgcgcctgccgaaggctcctctaccgacgcgccacaacggcctccctatcctggctcctcagatacggcactcgctctacgaaaacaatgatgtcgccaaccgtctcgctgtcagcgccgccgctcccacctgctgtcccactcccggatggcgcgcccccgccatcccagaatgctacgacttcacgcgcactgacgtcggcctcgaccatgcatccatggacgcctagatgacgccactgcacccctaataccactactgaggatcagtttcatcgcataagcacaaacacggtgcagattcattcaaaaatcaacaaatacttgactgctacttccaaaacctcaacgatgtccttgaaaaagaggaggaggcatgataaacatgacaacgtgtccccagattgctacatcacgcactgcagccatatcatggaggacacctacctaagctctacgggctcgatctagtattcaatatgctcacatgttcacaagaaaatgataaagacgacctatacggtgctgcagtcctgcgcaaataaaagactagtac

SEQ ID NO: 22001 - DNA, 1225 bp, Zea mays
  Clone ID: MRT4577_120061C.1
ctgaattcggctcgagctcgagccgttttcttgaaagtatcatttagccattaatgccatcgcttcataatttcttggaagtttcatggttctttacaaggttcccctgttacgcaactagtaaaaacatttcttttatgtgggtttagctttgggggtgttggtaaccaaggtgcggcactccggccgggtcctgattcttcaccgccacacaaacccctcgcttactgcacctttgcagccccgctctctcgatcgaatcccaaggaacgaagacgacgacgatggcgtcgtctgcctgcttgctccaagcttccacggccttcgctccacgcttctccctcccgtcccgaccccagcccccgctacacctgcgtctccgcggctcccccaaccgtcgccgtggcgtctcactcactgcttcctccgccgcgtccccagaagtcgagaaagagtcctcgccctcgtcctcgccgcaggaatctctgtctgctgtcgcggacagtgtgaaggtgctcaaggtggcagccaagacgaggaaagtacctgccccggaaattctctcggcgctgtccaagatcaagaaggcaaaactcgacacgtcggcattctttgagacactcggtggtaccgagtctccaggcaggacgtggatgcttatcttcactgcaaagggtcggctggagaaagggcagtatttcccagtgacagcagtccaacgcttcgatgctgcggggaaacgcatcgagaatggcatatatttgggccccatcgggtgcttgaccttcgaagggaggctgtcatggaaaaagaaaatactcgcgttcgtcttcgagcgggttcgcgtcaaggtcggaccgtttggtcccctggaaatcagcctcggaagcggtgacggtggtagggagcccagcacgaaggaccccttcttcgtttggttctacgttgacgaagagatcgctgttgcgcaaggcagaggcgggggcgtagcttactggtgccgatgtcagcgtgtcccctgaagatccagacatcctcatctcgcttcaatgatcactgtacaatatcaggataaatggataatgttgagtctctagtttgtagggttcatgttcatctttgtactatctgctttgtctccgaaaacgagaaaaaaaggcaattggaggtgtaaataatgaaatgctatttgttgataactaaaaaaaaaaaaaaaaaagcggcc

SEQ ID NO: 22002 - DNA, 150 bp, Zea mays
  Clone ID: MRT4577_120062C.1
gaactgacaatcaccattacaataaaggtacgctaggatacacaaacagatggaactacccgcatacatagaaggctaaaatggctacaccacacacattcactggaccataactaatgccgggtacgaagacgcactgtaacaaccgct

SEQ ID NO: 22003 - DNA, 436 bp, Zea mays
  Clone ID: MRT4577_120063C.1
gttttgcatgtgaaaggtctcgatggctaacaggtacatgcatagtcacaaaggagatcgctctttgcttgagacgcacttcaactgataggcagtgtttcccacaactctgatgcctaactctacatgtgtggtgatcagggaggccaaatcgcgacacgcacagcgctattggccactgggaattacaatgaagtcgctggctgaggtaacattgaaggcccagcaggcaagactgcaatcgagagagtatggacgaattacctttccaaacaagttactaaactcgatcatggtgccatttaacgcaggagcattgcgtgcgtgtcgcgtgagaactcgaactctcagaaatgtgtgatcggtacctgcgatctttcatgtattctatatgggtgagcaaccggctgcatgcttcattcggaattagttgagt

SEQ ID NO: 22004 - DNA, 675 bp, Zea mays
  unsure (1)..(675): unsure at all n locations
  Clone ID: MRT4577_120064C.1
cctggccgggatcagcctataccagcgacctaccatgccgaggcctaccctcgtgtgcagccccatatgcgagtccgagtctgtgaatattcagtttgatgccaaggggcgagaagaaggaggaaccatgagaaagttccaataggcttgatcatgatggctaagaaatggcaggcaacgggtgccatggataggaggcggcatcacggcgactctggccatatgacgcacgacggttcgtgcggcacgcatgctgccggggtccgccaggggccactgcttggagtactcctccgacgggacgaggctccaggtcctgatggcgcacctgaacacggactggttctgctagctactgaacctgtcgcgggaggagatactatctaccgattgcgactgaggtaggatcacgctgccctgcgacgcccgcttgatagagtgctcgatgtgattgctcaggcgagacacctccgaagagggagagagggccatcttgagctgcatgagcagaccctgccaccacantctaagggtgctaggggccaccgagagaaactcggtctccaaccagccatcttgagcatagctatgctctatgactaggtgcatgatgtacaatctgattgcagcgtggtgcgtatatggatccaatggagatacacctacccttgctaa

SEQ ID NO: 22005 - DNA, 229 bp, Zea mays
  Clone ID: MRT4577_120065C.1
agagaacacatgatatgtgcatgtatatgtgtaatcttatcatgcactcaatggttggaaaacgcactccagtgctaagaaaataaccagaagccaatatatcgattcttatatctcggtttatgttaccaactgaatatggtgtaatgcataactttttccagtaaataaactggttattttttgttcatttcaaaaaaaataaaacaaaaaatcaacattaatgagg

SEQ ID NO: 22006 - DNA, 166 bp, Zea mays
  Clone ID: MRT4577_120066C.1
ctttttctgttaatattaaaattagggtgtggaatcttttccaaaaccacttgcattttataattgatcacactcttgcaatgaaccatatgattttattctgctacaagataacttcacctactatccaaattctcaaaatcactttaaaaatcataccctatat

SEQ ID NO: 22007 - DNA, 370 bp, Zea mays
  Clone ID: MRT4577_120067C.1
ctcgagccgctcaatttcagagtgatagtttacctatcgggcccttggacgtatcctcttctttttcacttgcagatcttgtctgaacttcatcctttgtggtacttatatccttggttcttatgcacatttacttcctctcttacattcttgttcggtatcacctttagcccttgtaatattcatacccttaccttcatgcttactttgaacctccctttaaaagccttctttttgccatccttgttcgaggataatgtcttacctattttcccattgactgctcccccttctttgacgccttgcaagtttttgctaaaatacatactttattgtgtgtttggccattattaccttaacacttgtcatt

SEQ ID NO: 22008 - DNA, 692 bp, Zea mays
  unsure (1)..(692): unsure at all n locations
  Clone ID: MRT4577_120068C.1
ggttccgctcgttgcccccaccctgcgccgccgcagtccagcaaccccccaccccatatgcccccgccttggcagccctcaacctacgccgccggcacgatagtggcagcatccccctgccgctcctcctcaccggccggatttcacgcatccccttattccgatcccctttcttccgtttcagatgaagagaagaccattggagatacttcctcagctgcccctcctatctccctcgatgatgaatttccgaaggccaccgccatgggaccttatgcaagtgcaggctggtcggacctccccatagatctcctcatccggatactgcatctccttgagctccccgaggccctcgccttccatgctgtctgcccatcatggcgttctgcatctgtggctgcaggtggtgtcccacctcgccgcacaccgtggcttgtgtccttggcggaggagcctcttccggcaggggatcaacagcggcctgtgcgtcgtggattatgggatcctactgccacttctgagctccgcaacctcgtggatgctgagaaaactttccaggtcagctttccctggggccaggccgtggcctgctgcggcgcctcccatggctggttaatcatggcaaacgagctctcggatctcgtcctctataaccccttcaccacggngtcactctcgctcccgccaatcac

SEQ ID NO: 22009 - DNA, 627 bp, Zea mays
  Clone ID: MRT4577_120069C.1
cctcactccctcccgatgccttccacttccctcgccgtccccaccggcgccgtcgccggccccggctctcgcagctatcccttcatcagcaaccgatcagcctcaagcgccccgcgcctccgccgcgcgccccggctcgtcatggtctccgcctcggcgtctctcgaggccctcatctttgattgcgacggcgtcatactggagtcagagcacctccaccgccaggcctacaacgacgcgttcgcgaacttcggggtgcgctgcccgccgggctccgccgacctgctgtactgggacgaggccttctacgacaacctacagaaccgcatcggcggagggaagcccaagatgcggtggtactttggggaaaatgggtggccttcttcaaagatctttgagacaccaccttcgactgactctgataaggagaagctggttgatatagttcaggattggaaaacagagagatacaaagaaataataaaatctggaactgtgaagcctagacctggtgtcttgcagttgatggatgaagtaaaggatgcgggtatcaagcttgctgtttgctctgcagcaactaaaagttcagtcataatgtgccttgaaaaacctattggacttgagcga

SEQ ID NO: 22010 - DNA, 108 bp, Zea mays
  Clone ID: MRT4577_12006C.1
cgccaaccagtcaagttgtgttttggccagagatttagatatgtccaatttcctggctcatttcattgtgctctatgggtacgtataaaaagcaagaattctgtttcc

SEQ ID NO: 22011 - DNA, 515 bp, Zea mays
  Clone ID: MRT4577_120070C.1
ccggccggagctcctgttgagctactcttgcttgctcctttcttagcgcatagcccgaatctgcccgcgaccgccccaactttaccttgacgaactacctctcaacaacgtctcatgctctgcctatgagatgcgctgacgatcttctccacgcaaggctgtctctacttattgctgcacccaacggattggatcggctgcaccccgtcatgcctccttatcctgacggcctgcgcaacaggcctggtgggataccttaaagccgacctcaccacctctctccagaacctgcccgcctcctgcctagaacatgatacctctatcagactacccactcgtggacatagcttgcggatgggatcactgtacatacggcaacctcctcttcaatgccccccgactccactgatcacgctacgaggtctgctacctgcagctgatactctgcgcaccaagtcctttgtgactctgcgacatcgagatgggttacaccctcatggtggtccaccatccct

SEQ ID NO: 22012 - DNA, 1771 bp, Zea mays
  Clone ID: MRT4577_120071C.1
ggtgccgggctcgagtttttttttttcaaatgtatgaatctcaatatataaacatcaagcgaactagtatatataaatcatcattgttcactgctaggtagttcatccaccttgcgacactgccagcaaaagacactgccagcgctcctagtttctagccatcttcgctcggtcgtaatcatccctccacgctcgatacgcctccctgacttcgtccagctgcgaacccggtatgcccgagaacctgtccaggttctccagccactccttccacggcggcagagaggggtccaggaacttcgctacttctggcaggagcgctgccctgtagaactcctcgacccccttcctggttgcttccgacttgttcatggactggatcccggggcgaacgatcctccctcccttgctcttcgtgcagaaactgttgtccttgaggaccaggacctctgaaggggctatcggtagaacgattctggagaacttcgcgagggacagctctatgatgtctcttggtagtagcccacgcttcaccgccacggcggttccaaccattttccggatctgatgtagcatgaaagataccccgcatacggtcaactcaacgaactgaatccctgatgaagtttgcaactctccacaggaacaggtaatgatatctctgaaatgtgaagcgtttaatctatcgctttcgtcaggctcatgcagccacctagcttgaatctgcacccgatcctcagaaagcttcagaataccatccacacgagtgtcttctggtataccagagtcaaagattgatgaaatattcaagtcctcatcgtgatctggagaagtgctttcttcagaagagctttctgccatgcccgtgtcagaggacatggacttcaacgccgagcttgctcctttggcccttctgtgtcttcccgcaagaaccttcctatacttggcacgtgctgtgtaattatggaatggatggtttccctcaaaacctttcagtattttgttgaattctgacaagtgctcttgcatttcttcagagctatagccatctttaattccaataatttcagcaggaagaagatagaagtactcacgatataagcactccctccttacatcaaaactcctttgtgcaggcaatatactaaaaaccctcacattgtccggcaaatttgagttaatgaagctggcaagagcaataccatcaggatcatcctcccatgctctatcagggatttccatcttaagggaaatcattgtagccaatgagtgtacccctttatcagttcggctactcctctcccacccaatcttttgcagttttccataattactctcgagaatacccccggacttgaagatggcagattccaggactgactcaatggtcgaatccacgccaagctcttgctgcttttgaagccctcggtaatcagtgccgacgtagccgatgcggagcaccaccctcttcttgcgcgctgactcccacctcatcccgccgcctccatcattggcggacgtgacaggcggagacagggacggcgttggtttgagtctggcggatgcggaggaggaatagcagagagttgtacgcggaatgctagggaccgcgcgcttcgcgaggaatgcagaggatatagacctccggagaagacacgaagccgacgccgtggcggcggcggcggtggcggcggccatcgtcgagggaggcgatgtgaggaagagtggcccacttattagaaggttcggcccggccggcctcgaggtaccc

SEQ ID NO: 22013 - DNA, 515 bp, Zea mays
  Clone ID: MRT4577_120072C.1
ccggccgggggccggcgaagcaaacgaagtgggagagaatgtcgtggtgaccgccgcccgccggtgagtgccatccgtgcggccggtctgtggtcgacgtagagtcaggggtcatcgccggatctaggtgatgctagatgcggagttgcaggatccggagatcaatcgcgtcgtccctaacccccgctggtgtcggggatccaccgcggtgccgcatgaactcgtgggcaggaccaccgctaccaccctgtccgtgaggacacgtatcacctgaagagcaagttggtacctggaatctcaagtcccaggtcaagaacaggtaccgcaggatgaggcgtatggaggatgttgtggcgagttcgtgagagatctaggtcgtcgtctaccagtcaactttgggttgctggaccgttgtctccttataatgtaattatttacttattttgtatagaacttctattatatagtaaagatgtgacattcgatccgaataaaaaaaaacaaaaggagcggcc

SEQ ID NO: 22014 - DNA, 406 bp, Zea mays
  Clone ID: MRT4577_120073C.1
gcgtacagcactccacacaagcacttcgacgttacacgggcgctggacacagacacaccaagcgtcggcaccaatggcttactaccacgaggtggactactgctcggaggaggtgaggtcggcggccccggacggcttgcgccgccacgtcggtggcattcagcatcacatgcgcaaggagaagatccaggaggtcgacactgtcggacgctgcctcgccaaccaccagcaacaacatggtcaccacagcagccactgctttgtggctcgcgagactcactgtgaggaggacatcatcacctgcaccggccaggtccacgatcgcacggagagcttcctagtcagggctaactgagcagcccggacggtcggaatctacgcgcgttcgtgcctgcctgcgtgcctt

SEQ ID NO: 22015 - DNA, 156 bp, Zea mays
  Clone ID: MRT4577_120074C.1
atgccaaacgaagctgcttctgggtccagccagcatggtttagtttacctgaagtacaccttcagactactgttatccctcgcgaaagcatggaaagaaaagaaaggctactgcttcggctatctctaccacgccgaagggcttaatcctaagtaa

SEQ ID NO: 22016 - DNA, 460 bp, Zea mays
  Clone ID: MRT4577_120075C.1
ccggccgggatcatcacacatcaatccaatcctcactcacaaacactttctaacaaaccaacccccatacaaccaaccactatcacaatggagtccctcaagcaaggcgtcaactacgtcgctgagaccgttcagcaggccgcctctggtgcttccaaggagaccaacaagcaggtcgccaaggacagcaatgcccccatcggcacccgtgcctccgctgccaaggacgccctgtccgacaaggccgacgagaagacccatgagggtaaggccagcgtccacaaggaggccatctaagtttgtcttaatcgaagaacgacatgatacagaaatcaccttctgaagacatggatcgcaacggcgttgaaagggaatagcgttgggactacataggctgtatacacctacacctaatacaaacagtcaaataccgaaaaaaaaaaaaaaaaaacccgcggcc

SEQ ID NO: 22017 - DNA, 208 bp, Zea mays
  unsure (1)..(208): unsure at all n locations
  Clone ID: MRT4577_120076C.1
atgacatgcttgaaaacagtatgatgaaattggttggnagggaggatggggatgaagatggatttcgactgtggcagagtttaacccggcagacagannncacngcncnnnngngntctantatgaaggatctangaaatgtaagaggtagcgcacaaaagaaaattgaaaaattgaggcagctattatcnggagttttcagtganct

SEQ ID NO: 22018 - DNA, 903 bp, Zea mays
  Clone ID: MRT4577_120077C.1
agccaatacctaactgtattgcccatctagtagaacctaactgtaacttgtcctcttaattaatactagcaattagcaaacatgtctgtacgttgcgatcggagaaaaagaactatcaaatatttaggagaacaatgacacgagtgatacatagcattatttatgtttcaccatttatggaatttaaagactaattcgttttgtgatgaccatgatatccattataaaaattaatgttgtgaacattatgataatggcgtgtttgttttcaattaaaatcggatctgctggcctccaagtctccaactggaagaagagagaagatcccaccaaacatcttacggtactgatgattggactagcactcatgtttttttttttcttatttttgagtaaaatgcaggaacagtcattaaacgaacttgtgtcatttggattctaaaacttacaaaaccaggaatggctcatgttacttgattagttcgtgcaaaaccgtctaaaatcaggttttatcaaaccagatgtcgactcgatgtgccaattttgtttttagttttttttttggctgagaaaacagattcgttttttaaaattttgaaaacctgtacaccaagttttctaaaaaaaacgaattttaccgagacagttgctcggctaggattcacgaaaactacgttttgaatttgaacttataaaccggttagaaaatttgaaatccgccgaaaatcgtctggtttttcgttttcgttggttagcgggaaattgaattgaaacggttttgttagcccgtagcttgattccgacaaactttaaagcagcatgtttacgtctcgaatcagagaggcaaggtagtttgtcgctaccatggcgcgttctcggtccaccgatggatttcgcaggaag

SEQ ID NO: 22019 - DNA, 171 bp, Zea mays
  Clone ID: MRT4577_120078C.1
catgccctaggaccagggtgtacttcacgctgtctcacaggacctcgaactgggcctacgatccctgcacctgaagacgaaccggtatcaggatgtggtcacaaggaggagcctctatacgaggccgacgtcgctcggaggcgcgcctatgttgtcaactgccgaggcacc

SEQ ID NO: 22020 - DNA, 427 bp, Zea mays
  Clone ID: MRT4577_120079C.1
accacggtcgagggacttggtaatagaccagacgcatgatggcgccgtcattccattagaatagggttctctttcgctcatgactcgtggcacgagacatagagactggttcagcttggacaatttatttcgagaacaatatatggatatgatcccttccctgattagaatctgatcctactttaattgggatttgcccctcctttgcccataactatcactataagtcgcctagcttaggacactattgcgttcaagctgaatcatcgtgatcattattgtgaaagaatcactacatcatacagtgaagacatgtgatataataccgatcctactttaaataatctagatccagtgctatagcgcaaggtcttccgagtgtataacaaatcttgatagcgcgttcaatagatttactatagacgaa

SEQ ID NO: 22021 - DNA, 230 bp, Zea mays
  unsure (1)..(230): unsure at all n locations
  Clone ID: MRT4577_12007C.1
ggagcgaatccaaacctccctcctctacccgttcctctcctgccttctcgggatctgcccgcccgccttgtgtgatcttgccggctcggcggccgcttttagagctggggctgcacnacaccatnatcccctcctcgtataggctggtatagagggacctgtgaacaaagttagtcaccaacaaagttaaatggggaggccagagctgcccaactttttctttttttacc

SEQ ID NO: 22022 - DNA, 455 bp, Zea mays
  Clone ID: MRT4577_120080C.1
cccacgtttgcggccgcgatgagatccaggagagcggaccactgatccaccacgacatcctgctccaccgagccatggccgacctctaagtactgcagtacgcgccgcgcacaccccgatccaatgatgaagctcgtcagatgtcgcaggcgcttccagaccacgcacgccgatctacatatatggaaggttagcgttgcgccgacacacgccaccccgttgtggaggcacgcaccgctacttcaagctcatggaccaccatgaatccgtcaaggcgagccctgaggtccgacgcgaacctgcgagatcagcgcctctggatgggggtgacctcacgggcgctctgatgttgctgggctctaacggcggcggccacgtgcagagctactgcacggtcgttcagctcttcgggggaaaagtggtcgttggaggctgccaagagagcgcatgcctta

SEQ ID NO: 22023 - DNA, 243 bp, Zea mays
  Clone ID: MRT4577_120081C.1
cccacgcgtgctcactaactatgtagttcctactaactcaaacctacttagggacaccggggtttcatacactcacgccatccattaattagatacattcatctatctacaattcatataatcacctcactctcactactacttgctcttcatggttccttacatcacacactctcagccccttttccaagactcgtctttcctgcagcgacttgccgtaccgcatctcgactactactgcat

SEQ ID NO: 22024 - DNA, 333 bp, Zea mays
  Clone ID: MRT4577_120082C.1
cctcgaggccggccgggccgagatcgtctcgcccgccaggagaagacccggcggtgctgcttccgcgcccacagaatgtcgggtgtccagaagactcctaagaccatgcgtatttccacgttttcagagaaattcaagagaacgcgggctgtctgcactcactacaggggcaggataatgctgattaacctggacatgaacaagtacaacacacccatatacagatttgttgtgcgatttaccaacgatgacatcactgcccaaatcatatctgctagtatagcgggagatatgggtcttgcttctgcctactctcatgagttgccacgatat

SEQ ID NO: 22025 - DNA, 158 bp, Zea mays
  Clone ID: MRT4577_120083C.1
gcgggtcgacgcaagactctaaaatcgagtcgtattacccagcagctgcatcgatggcacctaatgcggagaagaagccggctgcgaataagccatcgacggacgagcccgctgacgcgaaggccccggcagggaagaagcccaaggcggaggagcgc

SEQ ID NO: 22026 - DNA, 245 bp, Zea mays
  Clone ID: MRT4577_120084C.1
gacccagcgtgcgggtttaataggttggttaaataattatttttatattggatgatggggggggtgggggggaaaaaacacagggcgtggtccatgtctctggtcttggggagtgggtgtgagcctctgagatccttggaaggtcattgattgcatgggtcaagagggagatttgaaacctgtgtatccacttccaacttgttttccacaaatctttttagtttgggagcctgtgaataatctat

SEQ ID NO: 22027 - DNA, 319 bp, Zea mays
  unsure (1)..(319): unsure at all n locations
  Clone ID: MRT4577_120085C.1
cagttatcttcttagaagatgtacatgcacgctcaacagaaatccattgtcggacaggagcggcttcatgcatgagctgctccggggtgggtgtcacgactacacangagtaacagccgaggagaatcagtgaccactattccaccgcaggacgctcccacataacatggttggtaagcgctactacctgagaatgtacgtcaccggaaacactgatcatacattgactggctatttatctaatcctgcagcgagtgttgatgctctgtgaatgctgcgaaccctgggtggtttttatggggctcctctgctatctttt

SEQ ID NO: 22028 - DNA, 2376 bp, Zea mays
  Clone ID: MRT4577_120086C.1
atggggacctcgcggccgggccgggagctacaaataaaaattcgtggggcggccaaaccctaaaacgccccacagcgcaagcgaccagatcctcctccctctgcttcctggcctcctctctgcctccccacgccgatctcgagcacctggggagactgcgagacgtgcgcctgatttttctcatcgcagcagccctcaagttccccacctcttttttcttgcagctttcaattaatctggttatttagctacatctttattttactttcattttgcctttaatctgtttagttccattgcatcttctgcggttgcggttagtatttctgtttcttgctccttgtttcttgttctttttcttctaaccatggacgcaggaacctactccatctcatcagagaagagccacacggcggcagctgcgcggccccctcttcaggaggccggcactcggccctacatgccgtcgctgagcacaggatcgcgcaacccgtcggccaagtgctacggcgataggttcatcccggacaggtcggcgatggatatggacatggcgcactacctgctcacggagcccaggagggacaaggagaacgcggtggcagcgtccccatccaaggaggcgtaccggaggctgctcgccaagaagttgctcaacaaccggacacgcatccttgccttcaggaacaagccgcctgtgtctgagaacgtctcggcagccatcgcagcttcctcccaccatgccaagctggtcaagcagcgtcgacatattccccagtctgcagagaggactctggacgcaccagagcttgttgacgactactacctcaacctgctcgactgggggagcaacaacgtgctatccattgctctgggcgacacggtatacctgtgggatgcctccagtggatccacgtctgagcttgtgaccattcacgaggacagtggtcccattaccagcgttagctgggctcctgatggtcggcacatggccgtcgggctcaactcgtctgacgtccagctctgggacaccagctccaaccgactgttgagaactctcagaggtgtgcatgaggcaagggtaggctcgctggcatggaacaacagcatcctcaccactggcagtatggatggcaagatcgtgaacaacgacgtgagaattaggaaccatgttgtacagacatacgaggggcacagccaggaggtgtgtgggctcaagtggtctggatcagggcagcagctggctagtgggggtaatgacaaccttctgcacatttgggatgtgtcgatggcatcccccatgtcaaccgctggccgcaaccagtggctgcacaggctcgaggaccacatgtccgctgtgaaggcactcgcgtggtgtcctttccagagcaacttgctggcaactggtggtggcggcagtgatagatgcatcaagttctggaacacacacactggagcatgtctgaactctgttaacactggatcacaggtctgtgcccttctatggaacaaaaatgagagagagctgctgagctcacacggattcacacagaaccaactaaccttgtggaagtacccatcaatggtaaagatggctgaactcagtggccatacctctcgtgtccttttcatggctcagagccctgatggttgcacagtagcatcagccgctgcggatgagacccttcgcttctggaacgtatttggagaccctgaagtggccaagcctgcagccaaggcttcccacactgggatgttcaacagcttcaaccatattcgataggaacaagtcatgagaacgatcccttctgttggaaatggccgtgcatcatatgtgaggtctattcctattgatgagatctatccacattgagtaagcacacaacatcagcgagcattgccatcatatgcatcattcagcaatgctaatcagaaatccaggatcagggccgtaaaagggttggactatgtatctgcaacatcgcaagcaacagggaggctgtctcttcagaaattttcaagaggacgtgtcagtaacatactcaggaggccgtctcttcattcaaagagtatcttttacacgacttcttgagtataaaaaactcatttgtacaatcctacctgtctattgaattgtctttagaaaaaaaaagactttattgtatgtactttttttttatcttttatgcctgaagaactgttttccccttttcttttagaagtaggagccggtaaagctactctttcaatttgtcacaagcattatttatttttataatttgtcctctgtttccttgatttttgtcctctgtttcattgatttcaaaaaaaaaaaaaaaaaaaaaaaaaaaaaaaaaaaatggtatgttttagaaa

SEQ ID NO: 22029 - DNA, 409 bp, Zea mays
  Clone ID: MRT4577_120087C.1
agcccacgcgtccggtgctatccattgctctgggcgacacggtatacctgtgggatgcctccagtggatccacgtctgagcttgtgaccattcacgaggacagtggtcccatcaccagcgtcaactgggctccagatggccaccatatcgctattgggctcaactcatccgatatccagctctgggacaccagctccaaccgactggtatgtgcactctcctgcttcaaccagaaatgcatgcacgctctgtcattgaatttaggttgttttttgcctgcagttgagaactctcagaggtgtgcatgaggaaagagttggctcactggcatggaacaacaacatcctcaccactggcagtatggatggcaagatcgtgaacaacgacgtgagaattaggaaccatgttg

SEQ ID NO: 22030 - DNA, 291 bp, Zea mays
  unsure (1)..(291): unsure at all n locations
  Clone ID: MRT4577_120088C.1
cagcagangcaancggancaaccaacangcagggagacacacgnacgnacangagcacaaagacngacgccaaaatgcagagagaagangaaacngaagaacncngnnncncncncncncacacacaccacacaanaccnangnanggcagccagcncggccncgcnaaaaaaagggcaaccaccaccacaagcnaganaganaanaancaaanccaaggncgncgancgangngaacagcagnngcaggggncgcacnngcaggngccaccgcagcngcagccgngggcg

SEQ ID NO: 22031 - DNA, 787 bp, Zea mays
  Clone ID: MRT4577_120089C.1
gctgttctcacacggattcacacagaaccaactaaccttgtggaagtacccatcaatggtaaagatggctgaactcagtggccatacctctcgtgtccttttcatggctcagagccctgatggttgcacagtagcatcagccgctgcggatgagacccttcgcttctggaacgtatttggagaccctgaagtggccaagcctgcagccaaggcttcccacactgggatgttcaacagcttcaaccatattcgataggaacaagtcatgagaacgatcccttctgttggaaatggtcgtgcatcatatgtgaagtctattcctattgatgagatctatccacattgagtaagcacacaacatcagcgagcattgccatcatatgcatcattcagcgatgctaatcagaaatccaggatcagggccgtaaaagggttggactatatgtatctgcaacatcgcaagcaacagggaggctgtctcttcagaaattttcaagaggacgtgtcagtaacatactcaggaggccgtctcttcattcaaagagtatcttttacacgacttcttgagtataaaaaactcatttgtacaatcctacctgtctattgaattgtctttagaaaaaaaagtctttattgtatgtacttttttttttatcttttatgcctgaagaactgttttccccttttcttttagaagtaggagccggtaaagctactctttcaatttgtcacaagcattatttatttttataatttgtcctctgtttcattgaaaaaaaaaaaaaaa

SEQ ID NO: 22032 - DNA, 700 bp, Zea mays
  unsure (1)..(700): unsure at all n locations
  Clone ID: MRT4577_12008C.1
gtaccgcctgcaggtaccggtccggaattcccgggtcgacccacgcgtccgggcaaatcccagttcctgccggccaagcgggcccgacgcggtgacgcaggcggcccgcggcagctggagcccggcctgcagggcatcctcatcacctgcaacatgaacgagcgcaagtgcgtggaggaggcctacagcctgctcaacgagtacggcgacgacatgtacgggccggaaaagtttatagacaaggaccagcagccctctggaagtgagggagaagacgatgatgcagaggctgccttgaagaaagaagttggtgacattaaggcttctacagagaagaggctgagaagattccagtcagtggagagtggagcgaataatgtagtcttcatcaggacgcttgggatagaacctgagaaattagtgcatcatattctccaggatatgtacaaaaccaagaaaaagaagacaagggttattctacgaatgctgcccatctcaggcacatgtaaagcttttttagaagatatgaaaaaatatgcagaaacatttctggaaccctggtttaaagccccaaacaaagggacatttcagattgtatacaaatctcgaacaatagccatataatagaggaagaattattaaagagttggcagaaatagtgggcagcctcaattcagaaacanaagtggatctcactaat

SEQ ID NO: 22033 - DNA, 577 bp, Zea mays
  Clone ID: MRT4577_120090C.1
ctcatcacttattggccttgtatttatccttttgctaggtcacaaatatcacagacagatcgcaatccacagaccttctccctaccgatggccatgaattgctaccacatatgtgacttgagtgatattgacatgactcagagcatatacttagatctggcagataatctctggaccactggcatcaccttaattgtaaactatgatagcatttgtattttcgattcgaatggtacacgagctcttttcaccttgtaaaattactatattaccccacggtgaatctacagcacccactactgatataaatactatctgatgctataactttactaacaaccacgtaatattgatatgcgggactcattaccaaaagatcgtgctattaacgataaatgtattaatccaacctcacttctttcacctatgatcatcctataagatcccaccttccactatcacttagataccgactctccggaccttattgagcggatgaatgtaggatatgctgttcatgtttcgttggaccgcctagtagaccctatacgcgatcctgcatcttgaattatactcc

SEQ ID NO: 22034 - DNA, 547 bp, Zea mays
  Clone ID: MRT4577_120091C.1
ggccgcgctctgcagccaccggagttcccgtcgtcgttcccgagcctggagagcagcagcgtgtgctaccccggacccgccatgctgggcaacggcgccgccggcaggggcatgggcgcgctctcggctatggagctgctcaggagcaccggctgctacgtccccctgcagcacgttcagctagggatgcccgccgagtacgcagcacccgcgggattcacgcttggcgagttccgcattcccccgccgccgcagtctcagagtgtgctcgggttctcgctggacacgcacggcacggggggttacagcgccggcgggttgcaggagagcgcggtgggcaggatgctcttccccttcgaggacttgaagccggcggtgagcgcagctggcggcggtgcaagcaatgacggagctgatcatcgtcaagacgaccacaggaaagatcaagctgcaggcgacggcagcagcgtcaccggtggccacgagactccaggcgggttctggagcaatagcttgatcggaaatggcagcagcaatggtggtggag

SEQ ID NO: 22035 - DNA, 303 bp, Zea mays
  Clone ID: MRT4577_120092C.1
aaaccacttaaaaccttggaaaaaacaaggaaaatataaacccaaaagagagggggcttctaaaaaagggccccccatcaaaaaaagagggggggacaaaaaaaattacccattctgggaagggacaccaccaaaggggaaacaaaaaaaaccccacactaaaaagggacacgcgggtaatcgagaccaccacgggacaaaaaaaaacaaaaaaagggccatgcccgccaaggggtgggcggcttttacttgaaaacttttaaccccgggggggtacccttaaggatcacgggaacttaattt

SEQ ID NO: 22036 - DNA, 208 bp, Zea mays
  Clone ID: MRT4577_120093C.1
attcggctcgagacaacagatggctccttaacatttgtgggacccatctgatggttcggtgatgtataccattgagggacgcaggcaccttgctgggggacgcctgatgacacacaggagatcctccggcaatccaagtataggaaccgtcttcacaacattgcgctattctgccgatggaagctctatcttagctggaggaaacacc

SEQ ID NO: 22037 - DNA, 388 bp, Zea mays
  Clone ID: MRT4577_120094C.1
cagactgatgcgtgaatactgatcaaagggggctggaactcgagaacaatgagtggtgtgagtatgatcagttcagagttaggcaattcagttagtgcaaggatatttcaaattagttacccgacctctttttttattgcatattgatatctagaataagatcgatccaaatcacttgaatgctaattttgtcaaaagtatccttgtgtgcttaatttaaccaaactttgctaccttccgtcattacatgtatttatcagaattcgcaatttcgtcctattttgtaatatggtgaactgacctgactgtttgcttatttgcttgcttggtcccacctttttccctcaaaaaaaaagagactttttgctcatgagctttgagattgcca

SEQ ID NO: 22038 - DNA, 188 bp, Zea mays
  Clone ID: MRT4577_120095C.1
acagccgtcgttcttttttttttttttttttaaaaaactaaggcttattatacggtagcactttgttttataatacataacagttgcacggagcacgcccccctggtgggggaggatataacgggggtaccggttttaggtagaaaacaaagcaaattgtgaggtttttaaacacttcaaacctgggc

SEQ ID NO: 22039 - DNA, 708 bp, Zea mays
  unsure (1)..(708): unsure at all n locations
  Clone ID: MRT4577_120096C.1
tggcagtaacctgnagttgtttgacccattcacaccagnagagtggggaagccgcgtgcccgtaaaacagcgagaagtccattccagcytacactacgagaagttgtttggctaacaatattgctaagtgaccyataattaatttggagtggatgcsgtaagtcacttcaccttgttatgattttcagctcttcttgatgctggagcygcacaagattatagttgagcttcgctagttccagtaccagttcattagcttcagtctgtttcccatactcagckatacgcgatttggctccataaatccttacgcttctaggaagggggatctcaagcgcacgckttatttcactggctaatgatgcbtccatgtaggtgtagggtgcbaatgatttcaaacatttggaggtgaaggaagcagcctcatcaagtatcgtctctccatgtgtccygagacaggcagcattgtaaaggttcagtagatcccttggattgttcgctgcaaaacccccctgttcgtctctgaacttggcgaagacgacatctgatgagactctgtatccatgatttcggagaagatagaaccacatagccaccgtctgaagatcacagccactgacatcgacgttatgaatttgggtcaccaagtcattgatytcgtcttcgaaaagatagtccagacagaggcgctccaaggcatcaacgagg

SEQ ID NO: 22040 - DNA, 343 bp, Zea mays
  Clone ID: MRT4577_120097C.1
cccacgcgtccgtccacgcgtccgcggacgcgagtgcggtcccgccatccaaccagaggggaagttgagcacacgagcataggtagaagagagcagacgatgatggctcgtacgaagcacaccgcccggaagtccacggtaggcaaggcccccagcatgcagctcgccaccaaggcggcgaggaagtctgcgccgacgaccggcggcgtgaataagccccacaggttcaagcccggaacagtgtcgctgcgcgagatcctcatgtaccagaagagcacggtgctgctgatccggaagctgcccttgcagcgcctggtgcgcgagatcgcgcatgacttcaaga

SEQ ID NO: 22041 - DNA, 2716 bp, Zea mays
  Clone ID: MRT4577_120098C.1
tgtgtcctcacaactgtggttgatgacttcttcgatgttggtggatcaaaagaagaattagaaaacctgatagccttaatgttcttattatgcctgcgacgaatcttccacgactggtgtcctgattgctatctgattcctttcttccaacagcgtatgccgagaggcggttggttgcagaaaacacaagcctgccaaacatgcataaggaagaacttgagactataataaggaatcagctccggaagccccagttgccaccttcttcatacgacacagcgtgggtttctatggtgccagtgcggggctctcatcagactccccgcttcccacagtgtgttgagtggatattgcagaatcagcaggatgatggatcttggggtgtcagccaatctgactcatcggtcagcaaggatgttctcctatccacgttggcatgtgttcttgcgttgaagagatggaatgttggcagagagaacatttggagaggactgcatttcatcgggaggaatttctctgttgctatggaccagcagttcacttctcctataggtttcaacatcacctttcctggtttgcttaacctcggcattgatatgggtttagaatttcctgtaagacaaactgatgtctgtggcattcttcaccgccgggagatggaattgaaaaggctggctgtggatagttcttttggaagaaaagcatatatggcttttatcccagaaggattcggaaatatgctggactgggatcaagttatgaagtttcagaggaagaatggatcattgttcagcactccttccacaactgctgttgcattaatccacaaatacaacgaccaagcccttcaatacctaaatttgcttgtcagtgaatttggcagtgcagtaccagcaatgtatccttcaatggtacattgtcagctttcaatggtggacgcgcttgaaaaaatgggaatttctcagcgctttgtcagtgaaatagaaagcatcctggacatggcatacaattgctggttacagaaagatgaggaaatcatgatggacatagcaacatgtgcaatggcatttcgccttttgaggatgaatggttacaatgtttcctcagatgagctgtctcacgttgctggagcttccactttccatgattcactacaaggatatttaaatgatacaaaatccctactggaattgtacaagacctcaaaagtcaccttatcagaaaacgatctgatcttagatcgcataggttcctggtctggcaacttattgaaggataagatgtgctgtagtagggtgcaaaaagactcgatttttggagagatggagtatgctgttaattttcccttgtattccacactggagcgtctagaacacaagagaaacatcgaacattttgatgcttggggttctctgatgctaacaacaaaatcctcatcttttcgtatcaatcaagaattcctagctttggcagtcgaagatttcagtttctctcaacgtgtttgccgggatgaacttcggcatcttgatagttgggtgaaggagaacaagctggaccagctacaatttgctcggcagaaactgacatattgctatctgtctgctgctgctaccgtattttcttctgaattgtctgacgctcgcatttcatgggccaaaaatggtgtcctcacaactgtggttgatgacttcttcgatgttggtggatcaaaagaagaattagaaaacctgatagcactagttgagaaatggcatgcgcaccatgcagttgagttctattcggaacaggtgaaaatagtattttctgctatttatacaacagtgaaccatcttggagcaatggcttctgcagcacaaggccgtgatcttacaaaccacctagtagaaatatggctggatttgttaagatctatgatggtcgaggcagaatggcagagatgccaatatgtaccaacagttgaagaatacatgacaaatgctgttgtctcatttgcactgggcccaattgtgctcccagcattgtattttgtagggcaagagctattagagcatgctgtcaaagatgaagagtacgataaattatttaggctagtgagcacttgcgggaggctcctcaatgactaccaaagtttagagagggaaggcaaccaggggaagctgaatagtgtttctctacttgtgctccacagtggtggttctatgtccatagaagccgctaaaaaggcaatgcagaagtccatagacgtgtctaggagagacttgctaagattggttctcaggaaagaaagtgctgttcctaggccatgcaaggagctcttctggaagatgtgtaagatacttcacctgttttactctcagaatgatggatttagctccccaaaggaaatggtcagtgcagtgaatgctgttatcaacgagccactcaaagtccaaaatagtactacgtttttgtctagttcatcaaggtagcgaggatatcatgtaatttatcctgttcatatggatcagaagcaacagcagcaagcttaagatatttgtaagtttgtgactgggctggtgtggatctgtgaagctacaactttgctgtatgtggatcaaggtattaggaagatctggttcacatattgataacataatggataaaccataacgttaaaaaaaaaaaaaaaaaaaaaaaaaaaaaaaaaaaaaaaaaaaaaaaaaaactcgaaggtggg

SEQ ID NO: 22042 - DNA, 2730 bp, Zea mays
  Clone ID: MRT4577_120099C.1
cttcgggttcgcgtcgcgagtggtacatacattcctataataagcagtcccaaaaactcaaacttctcgatcaggttcctcttcttcttcggcgcgcccgtctcggtggacgccacaggaattggctcctgacttttttccacaggtggtttcgctgggcccgatgcccgacgttatggccgcagccctaaccggcttctcgcctcgcggggtgattccgagcagaggcagagcatctcttcccggggtcgctagagcgtatgccgagaggcggttggttgcagaaaacacaagcctgccaaacatgcataaggaagatcttgagactataataaggaatcagctccggaagccccagttgccaccttcttcatacgacacagcgtgggtttctatggtgccagtgcggggctctcatcagactccccgcttcccacagtgtgttgagtggatactgcagaaccagcaggatgatgggatcttggggtgtcagccaatctgactcatcggtcagcaaggatgttctcctatccacgttggcatgtgttcttgcgttgaagagatggaatgttggcagagagaacatttggagaggactgcatttcatcgggaggaatttctctgttgctatggacgagcagttcacttctcctataggtttcaacttcaccctttcctggtttgcttagcctcggcatttgatatgggtttagaatttcctgtaagacaaactgatgtctgtggcattcttcaccgccgggagatggaattgaaaaggctggctgtggatagttcttttggaagaaaagcatatatggcttttatcccagaaggattcggaaatatgctggactgggatcaagttatgaagtttcagaggaagaatggatcattgttcagcactccttccacaactgctgttgcattaatccacaaatacaacgaccaagcccttcaatacctaaatttgcttgtcagtgaatttggcagtgcagtaccagcaatgtatccttcaatggtacattgtcagctttcaatggtggacgcgcttgaaaaaatgggaatttctcagcgctttgtcagtgaaatagaaagcatcctggacatggcatacaattgctggttacagaaagatgaggaaatcatgatggacatagcaacatgtgcaatggcatttcgccttttgaggatgaatggttacaatgtttcctcagatgagctgtctcacgttgctggagcttccactttccatgattcactacaaggatatttaaatgatacaaaatccctactggaattgtacaagacctcaaaagtcaccttatcagaaaacgatctgatcttagatcgcataggttcctggtctggcaacttattgaaggataagatgtgctgtagtagggtgcaaaaagactcgatttttggagaggtgctgcaaacaaaatttaaattctcattttcacctgggaggttcagtttatgtctgtgttttgtgatttcagatggagtatgctgttaattttcccttgtattccacactggagcgtctagaacacaagagaaacatcgaacattttgatgcttggggttctctgatgctaacaacaaaatcctcatcttttcgtatcaatcaagaattcctagctttggcagtcgaagatttcagtttctctcaacgtgtttaccgggatgaacttcggcatcttgatagttgggtgaaggagaacaagctggaccagctacaatttgctcggcagaaactgacatattgctatctgtctgctgctgctaccgtattttcttctgaattgtctgacgctcgcatttcatgggccaaaaatggtgtcctcacaactgtggttgatgacttcttcgatgttggtggatcaaaagaagaattagaaaacctgatagcactagttgagaaatggcatgcgcaccatgcagttgagttctattcggaacaggtgaaaatagtattttctgctatttatacaacagtgaaccatcttggagcaatggcttctgcagcacaaggccgtgatcttacaaaccacctagtagaaatatggctggatttgttaagatctatgatggtcgaggcagaatggcagagatgccaatatgtaccaacagttgaagaatacatgacaaatgctgttgtctcatttgcactgggcccaattgtgctcccagcattgtattttgtagggcaagagctattagagcatgctgtcaaagatgaagagtacgataaattatttaggctagtgagcacttgcgggaggctcctcaatgactaccaaagtttagagagggaaggcaaccaggggaagctgaatagtgtttctctacttgtgctccacagtggtggttctatgtccatagaagccgctaaaaaggcaatgcagaagtccatagacgtgtctaggagagacttgctaagattggttctcaggaaagaaagtgctgttcctaggccatgcaaggagctcttctggaagatgtgtaagatacttcacctgttttactctcagaatgatggatttagctccccaaaggaaatggtcagtgcagtgaatgctgttatcaacgagccactcaaagtccaaaatagtactacgtttttgtctagttcatcaaggtagcgaggatatcatgtaatttatcctgttcatatggatcagaagcaacagcagcaagcttaagatacaaaaaaaaaatataagg

SEQ ID NO: 22043 - DNA, 323 bp, Zea mays
  Clone ID: MRT4577_12009C.1
ggagctaggaccctgtagagcggccgtccttcttttttttttttgcacaaaacagggaggagctcggcctggggattatttaggaatcgacccagctggaagccaaaccaggcccaacagaaaacacctaccacacatagacactgactcattgtccctagggagacatcgcagaggggagcaccacaagtgacaggtcagtacttgttgccacgataggtaacacaagggcccaggaaactcgacaaggaaggcgaacacctgacaaaagaaaggagactgagggacgcccgcggggcccaagccaaagaaacttcaggcgg

SEQ ID NO: 22044 - DNA, 1299 bp, Zea mays
  Clone ID: MRT4577_1200C.1
cattgggtacctcgaggccggccgggaactaaccacccaggtcaattcccaacagccaccatgtcgaggccaaccgtcaccgtcgtctctgccaagggcgaggtcacccaggacaccatccccgtccccaatgtcttcaaggccccaatccgcccggatgtcgtccacgcggtgcacactggcatgaacaagaaccgccgccagccctacgctgtctctgagaaggctggtcaccaaacttctgccgagtcctggggtactggtcgcgctgttgcccgtatcccccgtgtctctggtggtggtactcaccgtgctggtcaggctgctttcggtaacatgtgccgctccggccgcatgtttgctcctaccaaggtctggcgcaagtggcaccagaagatcaacctgaaccagaagcgcttcgctaccgcctctgcgctcgctgcttcaggaagccctgctcttctccttgcccgtggccacgctatcagcaccgtccccgaggttcctctcgtcgtctcatcgactgctttcgccgatgccgccatcaagaagacctccgctgccgtcgctctcctcaaggccgtcggtgctggtgctgatgttgagaaggcccgcaactcgcgcaagctccgcgctggtaagggtaagctccgtggtcgccgccacaagcagcgccgtggacctcttgtcatctacaaccctgatgaggatggcaaggagcttgtccttgctttccgcaacatcccaggtgttgagacctcatctgtctactccctgaacctcctccagctcgcccccggtggtcaccttggccgcttcattgtctggacctcttccgctttcagcgccctcgacaaggtctacggatccaccactgagccctcagcgctcaagaaggacttccttctcccatcccccatgatggtccagcccgacctcagcaagatcatcaactccagcgacatccagaaggtcctccgccccgtccgtggcggagccgttactaagcgcagccacacccagaagaagaaccctctcaagaacttccaggtgcagctccgcctcaacccttacgctgctaccttcgccaaggagaagcttggccagaagaagatcgaggctggcaaggccgagcctgccgccgataccttctacgagctgctccaggataactagatggttgttggttagcgttatgatttcctaaggtgttctctcttcggctgggatggactggaatgatgaatggctatgacaaatgtagctcttcacaaaatacctcatgaaaaggttgcttcc

SEQ ID NO: 22045 - DNA, 2971 bp, Zea mays
  Clone ID: MRT4577_120100C.1
ctcgagccgcctgactcggccaagtcaataaaacatcttattgcagctgcccaagcaaggaggaaccttatggcttcagctccctcgaggcggcaagggttgatgggtcttcgactgataatcctgatattacgtctacacatatggtttgccgggactaagccctagtcctgtttttcgcattccatccccaaccactattacttttcacggtactcctggtcaacgtattctgaaaagcccaatagatctagacaatgctcatgaaaagagtccaaaatcttgtgatgcccgcgcttttcatagtggtggtactcatgaagctattgctagtattgctttggagggaatgatagagactatatcgaggacaaaggatggtataggacgtgcaacacgccatgcaattgagtgctctaaatatggcattgctggagagattgtcgagcttctcatacagaaattgcagagcgagcctaattttcatcgcagaattgacctcctttttcttgtagattccataacacagtgttctcattctcagagaggagttgccagggcttcatatgttcccactgttcaagcggcattgcctcgtcttctcggtgctgctgctccacctggagctggtgctcgtgaaaaccggcgccagtgccttaaagttttaagattgtggcttgagagaaagattatgccagaagacatactccggaagtacatgggcgacattgaggtgccaaatgatgatactagcactactttaatgttgaagcgaccatcccgtgctgaacgttctgtagacgatcctattagggagatggatgacatgcttgttgatgaatatggaagcaatgcaacttttgagctttctggaattttatcatcaaaagtgtttgaagatgatgaagacttccctaaaaataatgggtcatcaccatttgtttcacaggcacggcctgttgaaaatgatgtcatacgaaaaactgaagatactattgctccagtatatgttgaggaacacattattatagtagagaatgtaactactgatgctgctatggaagatgctttagagttaccaggcaacaaacaacagactgatggagctgtccttattgaacacgactctattcaagatccaggttcagagcaggcaattgaccagaatgactttccctctctacccgatggccctccaccgcttccgtcagattcaccaccacctccacctcctttgcctccttcaccaccacctgttacaccgccgcctccgccaccacctccactttctccagcttcaccacctccgccaccacctcccccactgccatctggaccacctcctcagcctgctccaccacctctggcaacccaggtcccacctcttccttctattccgctgcctgtttcttcatctccgttgtcattgggttatcagcctccagcgccagagtacttcatgacgcccaatggtaatcaattggcccagatgacagtaaacacatcaattcaagctattggaaatacaacaaccttcattcctggtggaccagttaatggacaagctgcagttaattttgttacttcaatgccggcagaatttggaaatactagcgtatttatggcgcaagcttctaatggtaattaccagtttcggccaactggtgtaccttttcagcaagggaatttcagtgcctttccatctgcacaaacacctccagttcatccccattctcgtatggcacacatgaatcccatgggccaacaagctgttgcaccttcacacaatccttatgctgcacagtcctttccaaacagtcagagccattatccatctgaagaacattggcggatggcatctggtaacttcagtccagatgaccagcataattggatagcaagtggcagatcattaccttgctcagaagggccatttgtgcatgatggatattcaagatcaaacattgacagatcttcaatgaatcctatgaatcatcaacatactgttctgaatcatttgccatctggagcaccactaccaggccatatttctcagatgctaccagccaggtctgatatgcacactcttaattgctggaggccctcttgatagagttgtaaactgaacttcttgtttgtgattttgacatggaaagctcagggcattggaggcaatttgaattgagttcaacaattggtggctgttagtctgagatggagatgcacttgccagggtttaacgatgagatctgtcatagtatgtggaatggacattttacaatgtaactagtcctgacaacagtatccagcagacaatctctcttagtgtgagctcatcttttcacatgacgcaaatgtcctccagttttttagatgttgcttccagtatggatcaggacagcgaactgttcctatgctatggtagtaaatatcttgtgcagatacattaattataaatagaggtctggtagtaaataccaggaactggtatcatcaaggcattttgtcacggtgcctatgctatggttcgcttttttctcttaaaaaaaaaaaaaaaaaaaaaaaaaaaaaaaaaaaaaaaaaaaaaaaaaaaaaaaaaaaaaaaaaaaaaaaaaaaaaaaaaaaaaaaaaaaagcttccccccaaaaggaaggaaaaatggtaaaggtttacctttagggggacttgccctgaaaaaccgtgacccaacgttgattgggtttgatttgttgaagcgtcgttttggttttccccccagccagtttttgaagtgaaagcaataataatgttgttggtgcccccctaaggggtttaggttttacccctggtttggtgttggggaaaggttcctatcatctcactaaacaaaaatgttgactgtacatttgggagggaggtgatttgggatattaaggtgggtatcatcatgtgacggcgaggcacttggtgccaaatcgtactgaattttgtt

SEQ ID NO: 22046 - DNA, 669 bp, Zea mays
  unsure (1)..(669): unsure at all n locations
  Clone ID: MRT4577_120101C.1
gctgctcgccgacccgtcactgctgctccggccagccatgagggtcctcgcgttcctcctcctactatggatctctgccgccgccactgcatcccctccgccgctcgagaccctcggcatccctccgcaagatgaggcgtactacaggggcggcgtgatcaagtgcagggacggatcgggcaagttcaccagggatcagctcaacgacgacttctgcgactgtcccgacggcaccgacgagccagggacatccgcgtgcccggaggcgaaattctactgcaagaatgccggacattctccaatcacaatcttctcgtcgcgagtgaatgatggtatatgcgattgctgtgatgggagtgacgaatacggtagcaatggcacttgcaagaatacatgctgggaagctggcaaggcggcgagggagaagttaaagaagaaagtagctacatataaaagtggtgtcgttattcggaatcaggaagttgaaaaggccaaattggcaattgctaaagatgaagcagagttaacaaaactgaagggtgaagagaagatactccaggggcttgttgacaagctcaaagagcaaaagagattaatagaaaaggcagaggaagaggagcgcctaataaaagagaaggaaganaagagaattaaagaagaagctgaaaa

SEQ ID NO: 22047 - DNA, 297 bp, Zea mays
  unsure (1)..(297): unsure at all n locations
  Clone ID: MRT4577_120102C.1
ttggatcctctaacgcccccttttgtgggggggtttttaaaaaaaccaatttggtccccaaaataaataataataatacaagaagtgaaattaaaatatcctcttttttttaaaaactatacttgtggtttttttcaataaccaagtaattttgtttgttggatggggggcccccannnnaaaactttntggtcncaaaaaagatacaactaacattcaaattatacggttgctgtctcaacaaaatgtattngcagctcataaagncttcctccggcgaaaanaaaaactatataa

SEQ ID NO: 22048 - DNA, 590 bp, Zea mays
  Clone ID: MRT4577_120103C.1
aattcggcacgaggcgtccatccatccctggccaccacttcgcctgatgtccatctccatgccgccaccgccgccttcttctccactcttttgactgttttctttttcgcctctcctctcctcctggttatgggcgccggcgagttggatggacgcgccttgtcggacgcggagcagcagtagcggcgggcaaccaggcgggggatctggatccgaggcaccaccaccgggctcctcacggcggcggcggagaaggaggaggaggcggaggagcgcagcaagaagcagatgagcagcagcggcaccacaacaaccggctgctgcagttccaccagcaagtgcagcagaaccaagacccgccgccggtccccctctttcagctccagcacctgcaggccgcggcggccgtgaggcagcggggcggcttgtcggccgagtatgcccttctcgaccccatgggcgacgccggccagtcccactcccaccaccaccaccacggtttccagccgcagctcctgtccttcggaggagtcggccagcaccacatgcaccagttcaccgcgcaagcccccccggcgactcactcctca

SEQ ID NO: 22049 - DNA, 429 bp, Zea mays
  Clone ID: MRT4577_120104C.1
atacaaacgccacctagttgatagctaacagtcatagtttgtcgtctgtacttctgaacaagggctaattagagctggtaaggggaagatcagtccctgttagtgtcgaacacttccacaggggtaggacggaacaaacttaacagacaacacaaaggtaatttccacgggtgtccatttgctgcatcattcggtgtcttcaacgccgccaccggacgacatctcgaaaactgagagcacgatgagcgggcccataactggaggcaaaggaggtggactgttgaaggcgacaaggggcttaacgttttggtctttggtgacgattgattacccgatagtattctcgtgcccatgcctttgaggattagtgatcgccggcatcctcgctggcccattgacaggattgatctggttggttttggtccagct

SEQ ID NO: 22050 - DNA, 2646 bp, Zea mays
  Clone ID: MRT4577_120105C.1
aagaacaaaaaggactctggcgaggaaaaaaaagaaaagaaaggaaggagcagcagcgctgcggaagcagagcgcgaggaaggagacggatttgctcggctgggatcccccgccaggggtccacatggcggcgtcgccttgagccgggcctctcctacccgcgacgtcctgcgatgccgccgcggggagcggcgctcctcctcctcctcgtcgtgctctgcgtgcaactgggaacatcaagctcaacaagtcttgcatcatacttattcggattctggagtagaacccaccagcatcgctttcctgcactagcccctggcccagccccttctcctcaacctgaaggcgccattattgctcacccagtgcataggcatcacagaagaagacaccatgcttccccaccaccttcatcattttcgccagaaagacaagattgcagcagaacaacttgttctgctccacttacgtcgactccaattggttcaccctgtggttgtgtatatcctatgcaaattcagcttgatcttggtgtggcgccgtatcaattgtttccaagaattgatgaattagaaatcgaggtggcagcaggtacattcttgaaacagagtcaagttcggataatgggtgctgggagtagtcttcaagatcctgaaaagacaacagtgaccattgatttggtgccattaggccagaaatttgataggacttcagccttactgattagcaacagatttttgcaaaagaaggtgccaataaactcatccacttttggtggattatgttgctacatatgttcattatccaggccttgcttctttagtacctattcctggatcattgggtccagtaagcagtaatgaggacccttttggtgcaaatatacacaatagaaggcaccacaagattaactctaaaactgttgccataattgctctatcagctgtggtttttgttttgacgtgcttggccattggcatcacttggagattcaatggactccgggattctcatgctatgggccctatttcaagttcgtccatcactagaaaaggagctatgaggtcatcgttctctggtacgagcagctcggcagcatcatttggttcaacaataggaacctgcccatccaccgtgaagacatttacaataactgagcttgagaaggccacagaaaacttcagcttcaacaaaataataggcgaagggggttatggacgcgtctatcgtggtgtaattgaagatggtgttgaggttgctgtcaaattgctcacaaggaaacatcaaaacagagaccgtgagttcattgcagaggttgagatgctaagtcgtctacatcaccgcaaccttgtcaaactgattggtatatgcattgagcggagcacaaggtgcttggtttttgagctcgttccaaacggaagtgttgaatctcatctacatggctcagataaaatatatggcccgactgattttgacactagaatgaaaatagccctcggcgcagcaaggggactagcctatctgcatgaggacgccaaccctcatgtcattcaccgggatttcaaggctagcaatgttctactggaaaacgatttcacccccaaggttgctgattttgggctggcaaaggaagcatcagatgggatggatcatatttctactcaggtcatggggactttcgggtatgttgccccagagtatgcgatgacagggcatctgcttgtcaagagcgacgtctacagctacggagtggtgctcctggagctgctgtcaggccgaaaacccgtggacatgacccagccgccggggtccgagaacctggtcacctgggcgcgcccgctcctcaccacgcgggaaggactgcagcggctggtggacccgtcgctcccggccggttacgacttcgagaagctggccaaggcggcggccatcgcgtccatgtgcgtgcacgtcgaggcgtcgcaccggccgttcatgggcgaggtcgtgcaggcgctgaagctgatccacagcggcggaggcggcgacgagacctgcagcggctccttcgtgggcggcgcaacagaggagtccccgtggaacgacgtcagcaggagctcgtggaacgacgacccgccggccactccgggcccggcgctccccctgggatacggctcggaccctgccggcgccgacgagcgcaggccacggtcggcgtcgagcgcggtgctggacaagatcgagtccctggcgatgtacgactggtccggcccgctgcgcaccaaggggaggggcagcttctacaggctgagggggagcatgagcgagcacggtcgcccctcggacgacggtagcgtcgaaggttacttgatgtagccggcggcccgacgaccgtgcgcagcagattgccgcggcaggcatacctcgcgtttcttttgtctgtctagaattgtatagctgctgcttgacgagattttggtgcctgttgcgaagaatacatcgttctggacatcggacgtatccgatgcagtttggtcaagagatgttcagaatttgcgtatgtcgaattgaatcacatatcagagctacaaaaaacagaacaacatggacgagaatcatgttttcatagtagaaaatgaggaggtttataaccgaaaaccccccccc

SEQ ID NO: 22051 - DNA, 370 bp, Zea mays
  Clone ID: MRT4577_120106C.1
aaagtggatgcagttctccgttgccgattctcggaatcggtttctcgattgatgcctgaaatttcatcatgattagcgtttatgggtgatttcaacgatgagggggttcccaagggctatgctttccctctcacgatgcctactgttactctgattgagtgaagatttgcaaccttcactcacaggtcagctgctgcacatccgtggcatttcgtgtagattgttccataagcgcctactgttttcaactgtgtagttgtcattatcaagagtagtacggttaagtatgagctacacacagacagtagacttaattgggctgatcacgttctctattcaaccattatttacccccaaagctacggtttca

SEQ ID NO: 22052 - DNA, 497 bp, Zea mays
  Clone ID: MRT4577_120107C.1
gccgggctgggacctgccccagcgtttactcaccttgttccctagccccggcggccaccctgtccttgatcatttccaagttgtgttgcagcgagcttctacgtagttcttccccacccgctcgctcccagcctgtctggtcctgcgtacttcgacgccgttctccagacgtgacagctccatcgctggtcgtccaatccatgttgatcctgactgatctcgcacgagcactgaaggcgtgagtgccaagaaggagattctgaagaggagtctactcctgtgcctgctcatcaagtggatggagctatctaactgatggttgggtagagggatcgagtacctcttcactgcaacaaaggcaagccctgtttatagggattgcttggaaactacttgatgcattgactaccttgatatccattcctttatagatacttctatttaagtattaaaatatgatttacgaaaatggttagacctgcttacatcttgtgggg

SEQ ID NO: 22053 - DNA, 411 bp, Zea mays
  Clone ID: MRT4577_120108C.1
ttagaggttgcgcgtgctacatgcttatccattttgctgatgagaccatgcgtagaactaccgcgtgcgtgaaaccaaaaccaagagattagcgtagtatgtctcagaattgaacgcaaatctgacacatgctccatgctaattcgtactgatgctgtcttttctcctctctcgaatgaccgatgactacaccgaggcgaggaagctgctagccagagcgccggaagtgagcggcgatcttaccagctccgagcaacaatagatcgctagatgcacgtggcgatctcaccagctacaggcagctgcagggatgcccgatagcagtttgtgctgccggcgccatgaacagcaacatgcaggggctgatttacagttttgtggccaagggctacttcgtgctggcacagcaca

SEQ ID NO: 22054 - DNA, 1209 bp, Zea mays
  Clone ID: MRT4577_120109C.1
atggccagagtgcgatcaacttctagagtgtctcatgagggggacgaaaccgaggctgctgaaacaacaccgatttcagaagtaatgaagcgatctggtctggttgtgactgacgaaggtgcttctaatgccgaagctgaacaaactgtggttgagggtgaagatgttggtgagagtgaagaagactacaacattctgataccaacgaagcctagtcatctagattttgaaaaatctactgtgacagaagatgacatgcctatgatgatgaagttgggctattttggagaggctgagagtaagcttattcgttttgctggagaagagactatcccagagttgaagaaggatgaagtcctgactcccaacgctattgttaggttcagcgtctatatctgggccctccgaagccaatggatgagcccagatgccgaagctttctaccgagtgcatgagctacactatcatacgaaggccagggcagatggccttcatgaaaattttggttgttataattttgcacatcgaaaggatacaaaggcaccagtccttagctaccgcacgaagtggccgactggttggaaaaatgagtggttctatatgaaggctgatgagaaaaagagggagaagctgatgaccatgttggctaaagtggaatttagagtggtagctgagcagatcagtaccagggacttggtgcaagaatacttggcaaatagaacatatcctacatcaagtggctggggaatgccgaagaagaaagaagcggagaagaagcatgaacttgttcgactttcttaccacttcaagtttgagaaacaattcaagaagccttgcaaaaaatggctagacatgattgagaccatgtgcaatgaaatacttaggaattataccaaaaaggaagatccactgatgaccgcagccttcggggccgaaggggttaaaagaaaaagggttgtcagtattctaagcagacaagctgctagaatggtaaaggaggacgagaaggcctcaaagaagacaaaaacttctcatgagccgaaggtagcagtgtcaaaaaagaagaaggttgaagctccggagccgaaggtaactgaggcaacggaagaaactcctttgacacctcctgctgttgaaatagcagaaattctaaaggtattgattgaatccttacccatcaagctgctaagtcctctgtgtgggggatag

SEQ ID NO: 22055 - DNA, 330 bp, Zea mays
  Clone ID: MRT4577_12010C.1
gcatgatccctaccgccatgggcgcgggatacaatcaccatggatgcacaagtctcatatataaaaatggtgtagtaattgcagaaaacctaggtttatcctcccatatacttcaaatcagctactagatgaggtataatacttaatacactgtagatgcaaggtctatagttgtaattacaatgtaaatgctatgtaaatagttgctgaatgtgtaggatgttcaagtgtttgcatgttggtacttgactgaactttttttcttctttcgaaaggatgtcaacccattggttggctgaatccgtgaatgtggaactcattgagtcgagt

SEQ ID NO: 22056 - DNA, 809 bp, Zea mays
  unsure (1)..(809): unsure at all n locations
  Clone ID: MRT4577_120110C.1
ccggccggggaagttgtcctgaagagttaatgttgttcgactgcaagtgccatatattcctggttttcttgcattcagagagtctagagccaagggattctagtatgatcaatccaaaatcatagatcttgagaaaggctccagttcttcttggactcttggaaaaggtgaagatcaatgcacctcatttctgcccacagttgctcatggttgatggaaatggattgctccatccgcgaggttttggtttagcttgtcatctcggcgttcttgcagacattcctactattggagttggaaaaaatctacatcaggtagatggccttaaccaatcagaagttagaagacagctcggatcaaaagagaactgcaacagggaactggttttgttgactggacagtctgggacaaaatggggcatggcaaatagtagtgaatggcggcgtcggcccaactgagcccgcatcagaggacgcgcagaaattgcctcctgattttgtgcgtggttgtttgggcggggagtgcaattccccgattcgagcggaactcctcccatccgatccggcggcggatgactatataaagcgagccaatctgcatctagctgtagcacctctgcgtctcaagatttggagatccattagctgtagcacctctgcctcccacgaatcgattcgacgacatcttgctgcaggtacaacctaccatcatggtgggcatgctattgaacgccggccgcagcaatggccgcggcggcaggaggactagcatccagtcaccgnccgcagtcctctcctctgttcccttac

SEQ ID NO: 22057 - DNA, 1277 bp, Zea mays
  Clone ID: MRT4577_120111C.1
ctggccggggagttacaccgtcaccacagccgcatctctcgctcttctttcttgtcccgggctcccggctccatagtcgccgttacatcggacaagggcatcttgcggtgaagcatctaatctgagcagtcagtcgtccccccgctcgcggccgggctactgctggtcgtcaagtactcaagttgtaggcgtgcagccggggcgccggccgctagctgctgtcagcacgcgcacacagcagcagggtggtcgcccgcggccggtagccggcacgcggtcgcgacaagccgatagcaacagcaagccaggcccaagttcagtccccagagagcggcaagctaggtctgtcatcttctctggagggttcagaaccaccgagaattagctgtctttgaggagtacaataggaatggatgatgctcaagggtatcaagaaggagatgatcatgagttagtgctgaagaaacaagaatggatcaaaacacaagacatgctcaagagtaaacttattcttgaagatgaatttgcctggagtttaccttcggtgggctcaggtttagatgaacctgagtggtgcaaactgaagtatattggtgggactgacatcagcttcttgaaggaagacccatccacagcatgtgccgcggtggtagtcctcaatgccgatactttagaagttgtccatgaagagttcaatgttgttcgactgcaagtgccatatattcctggttttcttgcattcagagagtctagagccaagggattctagtatgatcaatccaaaatcatagatcttgagaaaggctccagttcttcttggactcttggaaaaggtgaagatcaatgcacctcatttctgcccacagttgctcatggttgatggaaatggattgctccatccgcgagcaggttttggtttagcttgtcatctcggcgttcttgcagacattcctactattggagttggaaaaaatctacatcaggtagatggccttaaccaatcagaagttagaagacagctcggatcaaaagagaactgcaacagggaactggttttgttgactggacagtctgggacaaaatggggcatggtaagagattccaaataagacctcaatgactttgccggtagaactgagtagttcatttgtgccaggcgatgcgctcctgccctggttcgtcgaagccaatctacgtcttgcttgctgtagtcgagttttcagaaacaaatatgtaacatgatagaattgtcacttgcgaggttgccgcaccgtagt

SEQ ID NO: 22058 - DNA, 524 bp, Zea mays
  Clone ID: MRT4577_120112C.1
aaaaaaaaaaaaaaaaaaaaaaaaaaaaaaaaaaaaaaaaaaaaaaaaaaaaaaaaaaaaaaaaaaaaaaaaaaagggaagaaaaatgtgggggggccaataattaataaaacatacggggccggcgtctttgcggattccttagttatctctttatgtgccgtccacctggcacgtcgtttgccctggggtgggcgggggggaaaaccctggggttcccccttttttatccctttgcatttgattccctttgtcgccccctttcgttattcgggggggggccccctcccgtcccccttcccacccttttcccaacctgggcggcccctgggtccctccctttacgggccctttaccggcgggttatgggggggctccccgctgggttccctctacccttgcgggccccttgcttcccccttctccctctttttttttttttttttccctcccttccgcgggttttccccggtttgttcttttccgggggcttcttggggggtgccttttgggtgcttttccgc

SEQ ID NO: 22059 - DNA, 400 bp, Zea mays
  Clone ID: MRT4577_120113C.1
aaaaaatgtatgttacttcactgcagtagtgcagtttcaactcacaagtacatctataaatatccagctgttgagaatattgtcaccgaattcaatttctcagtgttccccttctttcagagaagactaatcccaacgtttcaactgcgtagctacatcacgtagatggccttaaccaatcagaagttagaagactgctcggatcaaaagagaaccgcaacagggaactggttttgctgactggacagtctgggacaaaatggggcatggtaagagattccacatcagacctaaacgacttcgtcggtagaactgagtagttcgtctgtgccaggcggtgcgctcctgccctggttcgtcgaagccaatctacgtctcagttgggcatcgcatctcactt

SEQ ID NO: 22060 - DNA, 470 bp, Zea mays
  Clone ID: MRT4577_120114C.1
tttttttttttttttaacagtttgaaaaaaactgccaattaacattaacacattttgaataaatgacataaatattgaaaacctttctagataaaactcacacctcgtgagaaaccctaaaaagaaaaaaagagtacatctgacaatggtgacgacgaggcggtgacgaccgtggataagcgagtggtgaaaggtcaagaggagctgagcaagagaagccatatgggagtgggacaccgggagtctgggacgcgatgggggaggctgggccttatgccccgcaccccgacatcgggccgaccccgtgcgtaccgttttatggcgggccgagccgggccgcctaccgggcactgtcggcaacccaacccaggcacgacatggtttattatgccggaccgggcacgaacccaaccgggtcgtgtcgtgcttgagctgggccaaaaaattgggcctcgagctacatgctcatg

SEQ ID NO: 22061 - DNA, 304 bp, Zea mays
  Clone ID: MRT4577_120115C.1
gacggaaacgacaagggcgcggcgagggcggagacgggaaggccctgggcgcggaggcgccgagcacatggcatcgtcgagggtgataccgacgcctcgccgtcgacacacggcctcggatctcgcgcgcctagcgcaagccgccagcaggcccggcggcgggggcagcgggccgggctccatgaacgtcgaggagctcctccgcggcatctacagcgacatgcccaccccggcgccgcccgcgtcggaacccggacgcccgatgcccccggccccggcgccggtgagcgccacgcggaagacg

SEQ ID NO: 22062 - DNA, 1372 bp, Zea mays
  Clone ID: MRT4577_120116C.1
gggcatcttgcggtgaagcatctaatctgagcagtcagtcgtccccccgctcgcggccgggctactgctggtcgtcaagtactcaagttgtaggcgtgcagccggggcgtcggccgctagctgctgtcagcacgcgcacacagcagcagggtggtcgcccgcgggccggtagccggcacgcggtcgcgacaagccgatagcaacagcaagcgaggcccaagttcagtccccagagagcggcaagctaggtctgtcatcttctctggagggttcagaaccaccgagaattagctgtctttgaggagtacaataggaatggatgatgctcaagggtatcaagaaggagatgatcatgacttagtgctgcagaaacaagaatggatcaaaacacaagacatgctcaagagtaaacttattcttgaagatgaatttgcctggagtttaccttcggtgggctcaggtttagatgaacctgagtggtgcaaactgaagtatattggtgggactgacatcagcttcttgaaggaagacccatccacagcatgtgccgcggtggtagtcctcaatgtcgatactttagaagttgtccatgaagagttcaatgttgtccgactgcaagtgccatatattcctggttttcttgcattcagagaggctccagttcttcttggactcttggaaaaggtgaagatcaatgcacctcatttctgccctcagttgctcatggttgatggaaatggattgctccatccgcgaggttttggtttagcttgtcatctcggcgttcttgcagacattcctactgttggagttggaaaaaatctacatcacgtagatggccttaaccaatcagaagttagaagactgctcggatcaaaagagaactgcaacagggaactggttttgttgactggacagtctgggacaaaatggggcatggcggtgcgctcctgccctggttcgtcgaagccaatctacgtctcagttgggcatcgcatctcacttgattcagccacggcgatagtgaaatcttgctgtagataccgtgttcctgagcctacaaggcaggcggatataagatcaaaggtcttcctgcagaagctccaaaagccacggcagtgacaggacttcctttttgttttttttcctcaagtatgttacaaactgggatcctgaccgtcttgcttgctgtagtcgagttttcagaaacaaatatgtaacatgatagaattgtcacttgcgaggttgccgcaccgtagtttgtaaaacagaccgatgatttctctgaatttgtaaaacatcaccaggcaaatagccgacagcagtgaatggcggcgtcggcccaactgagcccgcatcagaggacgcgcag

SEQ ID NO: 22063 - DNA, 302 bp, Zea mays
  Clone ID: MRT4577_120117C.1
tcttttttgtttgggcttaaaccgaaccatgggtgcatttgtaaagatctcgcgagctataaccagggttctagtcactggctgtgagccttcattatgtactgcttcgttcatagtttctcaagcggcacacaggacatgctacgtagattctgcctgacattagttgccatttgccgcagagcgactatattatgcgcactgtcagaagctcgacaagagattggagtcacgtatcagcgtgctacggttccagctgtagttgcgcatgggagatccggctactcattactacgtgcgcg

SEQ ID NO: 22064 - DNA, 1148 bp, Zea mays
  Clone ID: MRT4577_120118C.1
acttattcttgaagatgaatttgcctggagtttaccttcggggggctcatggttagatgaacctgagtggggcgaactgaagtatattggggggactgacatcagcttcttgaaggaagacccatccacagcatgtgccgcggggggagtcctcaatgccgatactttagaagtggtgcatgaagagtgtcaatgtggttcgactgcgagtgccatatattcctgggtttcttgcattcagagagtgtgacatggcctgtggctaactgttcgttcttactgcctctaaaggctagagccaagggattctagtatgatcaatccaaaatcatagatcttgagaaaggcgccaggtcttcttggactcttggaaaagctgaagatcaatgcacttcatttctgcccacagttgctcatggttgatggaaatggattgctccatccgcgaggttttggtttagcttgtcatctcggcgttcttgcagacattcctactattggagttggaaaaaatgtaggttacttcagtgcagtagcgcagtttcaactcacaagtagatctataaatatccagctgttgagaatattgtcaccgaattcaatttctcagtgttccccttctttcagagaacactaatctcaatgtttcaactgcatagctacatcaggtagatggccttaaccaatcagaagttagaagacagctcggatcaaaagagaactgcaacagggaactggttttgttgactggacagtctgggacaaaatggggcatggtaagagattccacatcagacctaaatgactttgccggtagaactgagtagttcatttgtgccaggcgatgcgctcctgccctggttcgtcgaagccaatctacgtcttgcttgctgtagtcgagttttcagaaacaaatatgtaacatgatagaattgtcacttgcgaggttgccgcaccgtagtttgtaaaacagacccagaccgatgatttctttgaccgacctgaatttgtttctctgttgctgccctgctacacatcaccaggcaaatagtagtgaatggcggcgtcggcccaactgagcccgcatcagaggacgcgcagaaattcctcctgattttgtgcgtggttgtttgggaggggagtgcccc

SEQ ID NO: 22065 - DNA, 279 bp, Zea mays
  Clone ID: MRT4577_120119C.1
aggagacatgccatatcattggttactgtgataacgatgtcggtcttgacactgaccactagcaggtgctagtgagcattagaacaatggccacctgatttgtttaaggtgatgacaggcacttgatcatgcgcaccgaggatatagaagctggcaaccatgggcacatgtccgagtatgcgactgacgataaccctgagctgatgcccattagtcatgaacttgccaacagactaggtgctactgtcacagatgttcacgagaatggaacctgcccct

SEQ ID NO: 22066 - DNA, 241 bp, Zea mays
  Clone ID: MRT4577_12011C.1
actctatagcctgtgtcctcctagctcgttcagtcatataacttctatgattgagtagtagtgtttaacccattaccattgctggcctcgtcacagggagcaaccacccgcatgaacaactgatactaaaacaaaaaactctcgctgcacatgtatcacctccgcccggcaccggacggctccctcctcgacgccgccttcgccgacctcctgcacgcgcacttctacgagtcctgcccct

SEQ ID NO: 22067 - DNA, 1499 bp, Zea mays
  Clone ID: MRT4577_120120C.1
cattgggtacctcgaggccggccgggcctgattttgtgcgtggttgtttgggcggggcgtgcaattccccgattcgagcggagctcctcccatccgatccggcggaggaggacaatataaaagcgagccaatcggcgtctagcggtagcacctctgcgtctcaagattagagatccattagctgtagcacctctgcctcccacgaatcgattcgacgacatcttgctggtacaacctaccatcatggtgggcatgctattgaacgccggccgcagcaatggccgcggcggcaggaggactagcatccagtcaccgccgcaggtcctctcctctgttcccttactcgtctacgagtacgaggatcccgccggctctactcctaccgctgccgcaaagatgctcatgtacagcctgcctgagcggagcatcgtctacacgcacgacagcaggcctcaggccatggagggcaacttcttcagcacgcctcaaggctggctggtcatccttgggcatggcgaagtgacgtcggaggcctccatgtggcatccgctcaccggggagaccatcaccctcccacccatacacgacgaccactacatccccaccaactgcaagtgcctgctcacccacaactccgccgcccacccggactgcgccgtcgtgctcctcgacgtcgccgatcctctcatgtggttctgccgtgtcaatggcggggctgaccggaggtggggacagcacacctacgacattggcgactacgagttccccgatgagttccgcaccccctctacgcccaccaagaacgtcatcagaagcgtcgccgcgcttaaagggaagctgcatttttgcttcatggaatcgcaccaaaacaagatgtgcgtcgttgacttagatttcccgtccgatcatggccaccctcccaccgcagagttccacgagtttgatgtctccccagagttcggcatcaagtttcctgacggcgtctgctctgccagcatccacttggtagagtccatggacgagctttttgccgtctgcgtcttctatgtcggttttgatcccaccaacgttagtgccgctggaatcttcaagatggaggactcctgcggcgaggaaaccatggcctggcaccgggtggatgatatcggtgacagggcttttctcttgatgggcaccaacatggcaacttggtgctctgcaagcaccaataacctgaaaggcagcaccctctacttcttcctccacttcttacttggcgacagggatctatacatctatgatgtacaggagcagtccctggagactgtccaggttcacgaccagctagatttgaaggtcgtgcacacagaaccatactggattaatgtacctccgttttagtattagcccattacattatattctactcttttagttaatatagcttcctgctactcttttagttaatattgattcagtaaaaataaataaataatttgctcaaaaaaaaaaaaaaaaaa

SEQ ID NO: 22068 - DNA, 338 bp, Zea mays
  Clone ID: MRT4577_120121C.1
gcacgagggccaccccacggtcatcgtcctccgttgctctacgtttcatgcttctcacctcctctcctcaatctcatcactagaggcggaaagcagatcagatgagatttttggtcttgcgtggttcttttaatctgctcacatgatacttcttattcattgtcgtccagtgaaattaattgccctcggttgaattggttcctttgccattttacttaggaggataaaggagacactaccttggtacatgcctgttgccacaatggacaaaagaagattagtgttgtgtgagattttttcattcctttgatctattgcatgctatttgtaccctaatc

SEQ ID NO: 22069 - DNA, 305 bp, Zea mays
  Clone ID: MRT4577_120122C.1
cggctcgagctgagcctgggcggaacccccgagggggactctgcccaggctacactgagactgaccacggcctgtttgaggacccccacgtgcctttccacgtccggtgtgagaggaggacttcgaaggtggaagtcattgagctgcaggacgtggaatgcgaggagaggccccggggaagcagctccaactgagggtgattaaaatctgaagcaaagaggccaaagattggaaaccccccacccccacctctttccagaactgcttgaagagaactggttggagttatggaaaagatgccctgt

SEQ ID NO: 22070 - DNA, 295 bp, Zea mays
  Clone ID: MRT4577_120123C.1
aaccgcgtcacattagccgaaaatttttattagctcaaaacatcccgagtactaagggtaaagaagccacaatatccttgctcttgaggaaaaaatttagggggtctagaacatttcagcaccccccataaattttttggaactcgccaaggacctttaaactcaggcgtaattagacacgggcatcctcatcctgggacattttgggggtctgcccccctctaggaagggcaacctccttttggaaccccagacatttgccaaacgaacgttggatgcaacacccttgttgctg

SEQ ID NO: 22071 - DNA, 342 bp, Zea mays
  Clone ID: MRT4577_120124C.1
cctttactttttttactttttttttcagccagctattgatttcgcaatcacttgtactggctgtatgcttgattcgatgggctccgagtaaacctcgaggatgacaaggaaagcatggcgagtacgccatacggatgggtgccaaagaccgtttctgaatcacgctcatgttgatggtcgccgaggcactgtggacctgctgcacatgccaacgatgctgactagaaggaacatattctttcaaccaagattccagcccgtctgaagaggtgcagcggactatgctcgatctgtgaaaacttggacagcgaagccgccactgatctgggcatggaacagaca

SEQ ID NO: 22072 - DNA, 261 bp, Zea mays
  Clone ID: MRT4577_120125C.1
agcgcgacgcgtagggtggatgcttactgagagaatgcaatttcaagcatgctgtgattggagtggggtcgcgtgtcaccctctggatgtgaacctcaagactccgcgatgatggtagcggacacctattgaactgcagaagaagcttgcaagctactgttagctgggatggtaccagttgtgataggaaggagcacaaagataaagaacttggtcactgacatgaaagctaggagatggaagaacgtggtgatcacaaac

SEQ ID NO: 22073 - DNA, 137 bp, Zea mays
  Clone ID: MRT4577_120126C.1
cggccgccgacaccagggagcccggcgacgccagaggcaccgagcccacggacaagaccgggcggccggacagcacgcgccgaagggcggccagaaccgagcccccgagcccgcaacaagccagacccgcccgacac

SEQ ID NO: 22074 - DNA, 937 bp, Zea mays
  Clone ID: MRT4577_120127C.1
ccggccgggccagtatctccttctcggatattgaatcacacacggcaacgccgcaacgcgcagcggactcgggtcctcgcactcgcaatcaagcatgggggccgccgttgggaagccagctttcggtgtcgccgtcgcgccgaagacgcaggcggaggagcggctcgccctcgcggagcacgccctgctccagtggactcgctcacccggcgccgactcgggcatctgggacgccggggcgagctacaccaacagaggcctcctggcggcggtcgacgaggtgctcctcctggcggcggagaaccctttcccgctcccggaggccgcctccgcgcgccgccgcctggacagcgccgtcggcgccgtccacaggctctcgctcgcctccactaaccaatcacgactgatcttccccagcgccggcaagaaggacagctcggcgggcaccggcggggtggtcgacgcgtccgacgggagccggtcgagggcgagctcgagcgtgcctcacgaggtcgcggccctcttggacgccgaggtctgggacgacctcgatctcatctgccccgcaggcgtgtccgtccttcacgagatcgcgcttcgggtcgttcgtgccggatgcaccgaggtactcttccgggcgttcgccaacgctccctgcgatgtgctagacagtttcttgtcaattcttcgggtcgaatgctcgcagcagacgactgaggccgtgatcaagcggtggacgacggtgacggagatcatagggaaggccatggtcgccatgcggaggcagctgtacgcgcagaacccaggcgccttcgacggtttcagggacgaatacttgctggccatcgcggagaaccgcatcctgatcctgctcgacttcgccaacggattcaccagcatcacgtcgcacgagaagctcgtgtacatgctcggcatg

SEQ ID NO: 22075 - DNA, 225 bp, Zea mays
  Clone ID: MRT4577_120128C.1
gtttctctcaggttacattaccctggcgtaaaggtcggtaactttacctgtgctagaccgacaatcaccaccaggaattggggacatggggaccttggtgacccaagagactgagctcgttcacggtcttaacggctgggaagggggccatgtttatcaactatgtccattgctggtgctggcagaaggaaagctaccagagggtaggcggagtattcagaaccc

SEQ ID NO: 22076 - DNA, 264 bp, Zea mays
  Clone ID: MRT4577_120129C.1
ccggccgggaacatcattaccatacaaacaagcaaccctctgacgataagcagactctatgtcgtacggtaacaagatcaccgaggactatggtacagaaggccctggagtgcctgcaaggctgcccgatcagctgcacctgcttcgcccaccatcaagacatacatggcctcggcaaggtagacgggtccctggagctgaatgacttcaagagcctcatggtgcgggctctggcccctcataaaactccttgtctatcgaata

SEQ ID NO: 22077 - DNA, 237 bp, Zea mays
  Clone ID: MRT4577_12012C.1
tacaaacttcttcacaatactcattttatctctcacttcttgtgtacagcacacccttaaaagcattagatcctaccatcattactccacattaccacactttaactcaatatttcatccacttttaagcccatgatcacaatgagacacaatttataacctctgacaataatgatgcatataacacgaccatattcatccaaaattcataaaaacccttcaacattatcactcaca

SEQ ID NO: 22078 - DNA, 446 bp, Zea mays
  Clone ID: MRT4577_120130C.1
ggggcccaaactaaaataaactttggtcaacccgggccaattttaattttttaaaaggaaattttcaaaactccgggtccaaactaacaaaaacaactttgttcgccttggcaaacttaaacaaaaatgcctgttgcccgactcccgggggggataaaggccctagcccaaaaactggtcgccgcataagatagccctccttcgggggggccaaactttactcggcatccccatcggcgaaatttgccccccccggggggttgagttgggtgggcctttcaatgagactggccttcctctgctcgtatggcaatttcttggggggggcccccttgggcccctttggggggtgcttgggtgacttgcccccaaaaggatcaccccgggtgggaacatggacctttttgtacaaagcttccatggtatcagccccaattcccttttta

SEQ ID NO: 22079 - DNA, 400 bp, Zea mays
  unsure (1)..(400): unsure at all n locations
  Clone ID: MRT4577_120131C.1
atgaggcctcgactaataatatgaaggtcacatctcgtacatcncatttctcaaatgcaagatcgtccaccttgttgctagacacaagacaggggcatacttgtacgataggacgcacgaccactcaatcattcccaatcactctacggacggagcctcgtcatgagcgcctgtacatcccatgaaacaagagtgacacgaagctctatccatgaatcgctgcagtatggtatcatcgaactggaaagctcctacattgacatacaggaacactcggggacaccattatctacagtatagagaagagtctggcggagtacagggacaaaatgccagcgcaagttgcatccgagatcgaggcaggcatagctgacctacgtcaggatatggcctaggatga

SEQ ID NO: 22080 - DNA, 615 bp, Zea mays
  Clone ID: MRT4577_120132C.1
agccatcgacctctactacgactggccccgcggccgcaacctgaatctcatccgcaaccagctctccggcgacccgacctacgacgtggagtggaccaacggcacctcctacatctttgactccgcctcctgccgcaccatacggttccccgtcggcgtcctgcccccggactggctccacggcgccgtctacctcggccgcgagaccaccgacggcttcgactgccacctctggaccaaggtcgatttcgtgtggtactacgaggacgtcctcacccaccgccccgtccgctggaacttcttcaatgggatgcagcagcatgtgatgagcttcgaggtgggcggggtgctagaggactcccactggcaggcaccctcgcactgcttcactgacaacgccgccgccgccatcgccaccggaaccgacgggacgagcagcctcctcaggctcgcacggacgaccgcagcggctgtaacatctgcagcttaaaaaacagagttgggttcccacaggcggtctttccatttcattatggatctacgtatcgtattatgctactcttgtgttgtgtaacaaatcaagtgtggagctggttttcgtcacagcatcctgac

SEQ ID NO: 22081 - DNA, 195 bp, Zea mays
  Clone ID: MRT4577_120133C.1
cacgcgtccggtaactcacacaacatgatttttttgtttctcatctccctcctcgcggggagcgattctatttcacaggatgtcgccaaacacaacggaggacgtacagtatagcctgtggttgctcggctcctacgtggatgggaagcagaagatcatggtcggcatgactataataaacaagcttaggtaccc

SEQ ID NO: 22082 - DNA, 535 bp, Zea mays
  Clone ID: MRT4577_120134C.1
cccaacgtacgcccagcgtacggcttcctcgtggacatcacctatgtggaaagcgccgtggccaaggtacagggagccaggatggttgcgcgccggtgcaccatcttgaccgcggcttcgggtccggtgaaaaacagttgactggtccatttctagggagggaggatggttgcaacaatgccaccacctgcctgcatcagaagcgcactcggttgtgctcgttcaacgagatggcgacacagatagccttctccggaatcctgagtgtcacgcacggatgacaacccatatttttacaatgggaacaacgcttaaggttcggcactgagatggtcatctttcactgtacatgcgaagaaccgatcctgtaacaaagctacattatacaggtgctaggatatggtaagctgccatgggcgacctgcttgccaaatggacggacaaagctgaaaatattggatgaccttctggcgccggctgtaagggttaactgcctttctgatgctgagatcttcattaatgagaaagaccatgc

SEQ ID NO: 22083 - DNA, 1743 bp, Zea mays
  Clone ID: MRT4577_120135C.1
atggtgcgtcggaggaatccatctgttgttgaatccgactcctctgacgaacaagagattcatgaagatactcccccgcgttccagatccaaacgtgggcgaggatctggcaacgtcatgcaaggtggtgaggcctccgggtctcatggagctcgcggtcggatgacccggaatccctccggtcggtcccgacccgcgacaaatccacaagcttgggaagcaacaagtgatgatgatggtgggaaagatgatgaaattgatcttccccctgcccacgcccctgttattcgagggttggtcctccaccgggcggaggcccgtcgttctggcaatgagccagtcactgattttactgccagcgggggttctgcacttcttcaggacatccgctttcagaatcctgcattgcgcattcgtgatgccaggattgatgggaaccgtttctggactctccagcatgaaggatgtgaggctattggggacccggagatgacacaggcattgagggcctgtgaaagaaagaagatgaagaatataatgacattccaatatgattggaatgatgaggtcattgcccagttttactcaactctttggatcaagctggccgatgaggaaagtccctacaactttccttatcttaatttctacatcgaaggcagctggtacaaggtgagctaccgtcggttcgctcacattcttggattcactgacaatgacatttctggtgataagatcaaaatccattattttcgccaacctaccaaagatgaagccagagatcttcatctctctgagtctggaaaatattgggagtccaccaacatgcacaaatattacagatatatcaactccctcagcagaatgaccctcattcccaaagggggtaaccagatgaatattcttggagagagtaaggttttgctctcatttatgaagcccaacagcttcgagagcatcaacgtctttgatatgatctggcaggagattatccatgctgcatgctttccacttaagggatgtctacatgcacctttcatcatgaagatgattgaagttgtgacgcagtttcgatatgataaaggtactagacatcaatcttatacccctttctggattgatcccaacaatccagtagggcgcttgaggaaagccccttccagctcccgtgcacatacctctgctggtccttctgctggtcctgctgctgctgccggtgcctcgcgtccctcccctggccgcggatctcccacgccacgtggacgtggtcgtggtcgaggtcgtggccgagggatgggtgcccgcttggcccatgggattgcggcatttttctctacgtgccggaatatttctgctgatgtgcatgagctggcaaggcgtcagcgggagactgacgacaatcttcgtcgtcaagcttccactatgggtatgccctttgcccctcgctcgcctgacgtgcctctccatccgcctcccccggagatcaatgggtggcaccagcaggcctacggggtgcccttcatgtcagcagacgacgaagaagaagaagaagcatactttgatgatcgcgagcagtttgccccgcctccctaccaaggggatccgggtcaatcatcctctcaccctccgccccaggatccttctggaagtgctcctcccccggatcagtctggggaagaacactttgcatctcacctggcgcatcatttctttgctccgcatcagcctcctcctaactggtga

SEQ ID NO: 22084 - DNA, 546 bp, Zea mays
  unsure (1)..(546): unsure at all n locations
  Clone ID: MRT4577_120136C.1
ggccgccctttttttttttttttttcccagatcggcaataaatcatattaagaatatggtaccaccaggtccatccagggacaaaggttgcagcgtacatctcataacctgaaacgaaatggctttattcttttaactctcaaaagtaccctcccagactagaccaataggacactatctgagcaaccgacaccacatccatcctacaatcctccagtatacggtaacataagtaaactaggaataggaaaactttggtacggagctaatgacatcccaaatgcccaggagaagtttggagagtatgtggagctggcaacagatcgcggttgggtggtgccggccttcgcctgcgttccctgagcattcaccactggcgatacctttcttatgtgttcatttgtgcccgtggtgtctttgggtccgttcctnagtttttctgttttggggttncttgtgttgccgttttctgggggtttgtggggtggttgtggtgttgggttgttgggtttgtgtcctattggttttgtcttgggtgggttcttt

SEQ ID NO: 22085 - DNA, 859 bp, Zea mays
  Clone ID: MRT4577_120137C.1
tttttttttttttttttgaaataattctttatacaaaatgattacaagttacaacatttacaagttataacaagattacaatatatatcatcggagttgattacaaaagaaattgatttcaaaagattacaatttgaatgtataaaacatttataagttttaaaatacatgctagcttaagtgacaatcctcaataaggaagctaaagatgggatatacttatataagaaggccgagcccaccggcacttagcaccatccacaacagaacaaaattacaacctgggataacactaagtcagtgttgttagatgatgtttgcttggcgagcatctcccattctggcacttgtttgattcacccattttagcttcgtccatcagcattatcttgagatcaatccaaactttgtcttccacatcacgtgatcaattaacgtaccaacactaaatagactcggatttcacaagagcaacaaggatctccggttcatccattccatcaaacacctagagcgcgtcgaactgaaacactgtttcttctccatcgatttccctagaactctcttccaatcacttgacaaaagggagggggctggcgcttgggctttcattcatggagaacaaaagaagaagggggaagctgctgctggcgtggggagaaatcagggagcagagaggggcggccatgagggggctaggaacctggctaggggctttgacgccatgggaagctggagcacgccacaaacagagaggggctgggcgagctcagcttggggaggaagatgagggaggggcggccatgacaggaggaggaagatggccgtagtttcggatcgataagagactagaagggat

SEQ ID NO: 22086 - DNA, 263 bp, Zea mays
  Clone ID: MRT4577_120138C.1
ctttcacgttgggggacatcccaccaactcttcgattagtacgacctgtatgatcggcgccgatcaccgacacagcccatggagttgtggaccgaccttcgatcccattatcaatgttctcattgtaagcgtctaggggcatatcacccgaagggtcgttacacagtatggacagaggagtttctcaggagctggatactatcggggcaattccgagaccaagccaactaccactgttaacagttcttgccaggatcggagat

SEQ ID NO: 22087 - DNA, 1679 bp, Zea mays
  unsure (1)..(1679): unsure at all n locations
  Clone ID: MRT4577_120139C.1
gcagcggaaataaattctttattacaaaatgattacatgttacaataattttacattatacaattatcggagtgattacaagagaaaaagattcaaaagaattacaaatttgaaatgttataaaatatttgtaaatttgaagatacatgctagcttaagtgacaatcctcaatatagaagctaaagatgggatatacttatataagaaggccgagcccaccggcacttagcaccatccacaacagaacaaaattacaacctgaaaaacaacagggaataaacccctgggataaacattatgttagtgttgttaattgacgaccacttggtaagtatcttccattctggtgctggcttgatgcatccacaagattaatcctccaataccatctcatggttcgctctgatccatgtccttcagctcgcataatcatctagcgtaccacgactaaactcaaagcggcgtccacaaacacggcgatggctttgggttcagtctttctatcagacacctgtcaagccccacccggatctcgcttgctttcacccaacatccgggattcgctccacacaaccacacataaatatacacatgattaatttcttataagcgacgccgagaaacaaaacacccaagtaagaacataacctcatggtcgtgcaaaaacttgcggtgtcacggatgaagaacgaggatgaactctggtcaatcctcccgtcgaacacatggcgtgcgtcgtggacattggactgctccggcgtgctgctgctcgcatagagacaaggagggatgctgctggggaagaaatagaagcagtgaaggcgaagtcgccatggggagaggagtagagacgacagccttcggagttcggacatggggcgagcttggcatgggatctgccaccatggggaagagacctgggcgcccatggagaggagcgtgactagcaaagaaccaagagggagagggctagggcaaactcgactgggacaccatgggaggaacaggagcagggagtacgggcgaccggtgcctagaggttgaggaccgacgccatgggaaactggagcacgccacaaacagagaggggctgggtgagctggggctggacgccatggctgcttgccgctgctggcatggggagaaaccagggagcagagaggggcagccatgagggggctgggaacctggctcggggctttgacgccatgggaaactggagcacgccacaaacagagaggggctgggcgagctcagcttggggaggaagatgagggaggggcggccatgggaacctagggcagtggagggagctcactatgggagaagctgcaggcacgaccaagttgaaaccgagcagaggatgggcgagctcggactgacgacggactccatggcagggggataggaacggcaagcagggagggctcgaccggctgggcgatgctggctaccaggactggagggcacgtcgcatatttgggaacaacggctggcaagcaaaatgcgtagagaagaatggatcaaatgcacatttctggaaaaggatgcgtacttgagaaatcctgagtgagcactgggagcttccggaagcatgtgtcaccactcacaggcacaaagaaatgtgtgtgatttcccctgacaggcatacaaggagagagactcnngtggattgaag

SEQ ID NO: 22088 - DNA, 691 bp, Zea mays
  unsure (1)..(691): unsure at all n locations
  Clone ID: MRT4577_12013C.1
ccggccgggaactctatcaagacaaaacctattctacaaaatctaccagaccaaatcgaaatcatggataagctcatcaacgccgccaaggagtaccttgatgatgacaaggataaacgccaagaccaatctcaacaaagccacggacagcagcaaggctacggtggaggtcaacaacaacagggctatggccaacaacaaggttacggacaggagggcggctatggacagcagcagggaggccagtatggccagcagcagcagtaccctcctcctggcggcatccaagcacaaggtgctggtgcattcggaggcttccacggcggagatgtcgacttcaacaacgccaaggaggaggctcaccagaaggccggatcttctggtgacaaggacctctttggcagcattctaggtgctctcggacagaagaagaacaagcttgccgacgnaggaccttgatgaagaagatgccatcaagcagcacaagaacacatacgataacgacgaaccacagcaggacagtaagagcctcggtacggccgctgctatgaagcccctcaagatgttcacacagggccaaggccagagcaggtgctgggcggtaacagtcagactgcattcctaggtctcgccttggccgaggccagcaagctctttgacaacaaggctgcgaacggcaaggtagctgatg

SEQ ID NO: 22089 - DNA, 484 bp, Zea mays
  Clone ID: MRT4577_120140C.1
aattcggcacgagggttcttgtgaggataaatcccatgatttgggggaagacgaagtccaaacacaacacccgccaatcgctcgatgaaaaatctaaaccaaaaccctcggcgttttcatgggttctgaagggattttattttggtacactagatgattatgcgagctgaaggacatggatcagagcgaaccataagatggtattggaggattaatcttgtggatgcatcaagccagcaccagaatggaagatgctcaccaagtggtcgtcaattaacaacactaacataatgtttatcccaggttacgagtcactttgattgtgattgatgttaagtgccggtgggctcgaccttcttatataagtatatcccatctttagcttctttgttgaggattgttacttaagctagcatgtattttcaaatttacgaatattttataacatttcaaattgtaattcttttgaatcactttgttttgt

SEQ ID NO: 22090 - DNA, 1254 bp, Zea mays
  Clone ID: MRT4577_120141C.1
ataacaagattacaatttggtatcattggagtgattacaaaagaaagtgattcaaaaaaattacaaatttgaaatgttataaaatatttgtaaatttgaagatacatgctagcttaagtgtcaatcctcaataaagaagctaaagatgggatatacttatataagaaggccgagcccaccggcacttagcaccattcacaatagaacaaaattataacctgggataaacactacgttagtgttgttaattgacgaccacttggtaagtatcttccattctggcgctggcttgatgcatttacaagattaatccttcaataccatctaatggttcgctgtgatccatgtccttcagctcgcataatcatctagcgtaccacgactaaactcaaagtcggtgtccacaaacacgacgatggctttgggttcagtctttctatcggacacctgtcaagccccacccggatctcgcttgctttcacccaacatcagggattcgctccacacaaccacacataaatatacacatgattaatttcttataagcgacgccgagaaacaaaacacccaagtaagaacataacctcatggtcgtgcaaaaacttgcggtgtcacggatgaagaacgaggatgaactctggtcaatcctcccgtcgaacacatggcgtgcgtcgtggacattggactgctccggcgtgctgctgctcgcatagagacaagaaggggtgctgctggggaagaaatagaagcagtgaaggcgaagtcgccatggggagaggagtagagacgactgccttcgaagttcggacatggggcgagctttgcatggggtctgccaccacggggaagagacctgggcgcccatggagaggagcgtgaccagcaaagaaccaagagggagagggctagggcaaacttgactgggacaccatgggaggaacaggagcagggagtaggggcgactggtgcctagaggttgaggaccgacgccatgggaaactggagcacgccacaaacagagaggggctgggcgagctggagttgaggataagtgttggctgatcactgttgtgctggcgtgagcagtactggccgagcagccacgcggactcggcggtgtgtgctggcagccgcgtacagagagaagaacgcccagaatttgctaggagctgagcacgcgtgtagaaaataagatacagatggttgagcggttttttttttttttttttttttttttttttttttttttttttt

SEQ ID NO: 22091 - DNA, 271 bp, Zea mays
  Clone ID: MRT4577_120142C.1
ggaggacgacagaaactgcaggatttttgtgttcgatctgttcaaggatgcatacaaacaatggcaagctccttataactctatcccttacagttatcctttaggctacacaaaaccctgaaaaccagaattgggtctgcggacatggctttcccttcttgggcctgcttatgctgacttgggcttaattttcggaagagtggcactcccgcttaggagtagtggacataacattcgtcgcgacattattgactgactggagagttcatgc

SEQ ID NO: 22092 - DNA, 266 bp, Zea mays
  Clone ID: MRT4577_120143C.1
gcgtgcgacaagtcacagcagacaaaagagccgtgcttttgcacaggccatactgtttgcaagaacgcgtctcatttgacaagtgacagcccatctgttttctgccaccacccgcttcgactaagttatgttcaaactgatagatcccgtcgctgagctcgagctagctcatgactcttatcatcctgctcaatgtgactgaatgccacttccatcagtgcaagcagactggtgcatctatacatgcgcttcatcttgtttaacgg

SEQ ID NO: 22093 - DNA, 1246 bp, Zea mays
  Clone ID: MRT4577_120144C.1
tttttttttttttttcgccgcggaaataaattctttattgcaaaatgattacatgttacaataagtttacattatacaattatcggagtgattacaaaagaaaatgattaaatagaattacaatttaaaatgtataaatatttataagttttaaaatacatgttaacttaagtgacaatcctcaatagagaaactaaagacgggatatacttatagaagaaggccgagcccaccggcacttagcaccatccacaacagaacaaaattacaacctgagataacactaagttagtgttgttagatgacatccgattagggagcatctctcgtcctggtacttgaccagatcatccaagcttcaggttcgttcaccagcatcattttgggatcaactcggctcttgtcgtccacatcacgtgatcaattagcgaatcatgactaaagttgactcgatcggcactaaacgaccacgacagccgattcaatcctttcacccagcagctagtaagcgacggacgtgctatgtttcttcttcacccagattccacggatttcgctcctcaacacacataggcacataaacacaatctacattagcaaatagacgtcgatcgatgaaatgacaaagcaagaatgaaatctcaccgagggtcgatggtgtcgtggatgggctgcacaaaataccaaacatcccacgacgctaatagggttgtccatgacacggtactccacttggacattttatcaaacaccatacgggtgcggatggtgcgggatatggtgcgggattaccggaggatgtccggcagcgaggggctgctacagataagtgcgcaaccgtgggaaaaacagagaggcgctgacctgctgcaggaaaggaggcggtctgcaggcacgaccaagttgaaaccgagcaaaggatgggcgagctcggactgacgacgaactccatgacagggggataggaacggcgagaagggagggcgctggacagagggcaggggcgagctccagagaggggcatcggccatgggagggagcacgacgtgtgctgcaggaaggggagagagctcggctgggcaccatagcaagaggaggatggggagggctggagtgcggacctgggaggggcgagcaccagggagctgtggccggtggtggaggctggcgtggggagggaggaagaaagctccctgctggagaacacacatcgtgagggagatttcccggcccggccggcttcgag

SEQ ID NO: 22094 - DNA, 583 bp, Zea mays
  Clone ID: MRT4577_120145C.1
ccggccgggaacataggaattcccctcctccccttcctcttagggtaaacatgtctgatacttcgtgcacagcgcactgcctcatttcagccgtccaacaccgaatcactcctaccgctctcctcgagatgggtctcaatcgctacgctcgggggaaccgcaaatgtacatgcgaactacacgactctctgttgtacacacatctcgccgaacacccgtgcaatgcaaggaaaagactacccctcatctccactgctgctgcaggtcggtcgtgcacgcgctccatgactgtgcctgtcgaaccggtgaacaccccaggtgcgaccacgagcgctatctgctgtgctgaagtgatgggcgaaaaagagaggagagaactgctaggatattattggttagatgctcaaaaagatgtgcaggctctctgggtgatctctagaacgaatcatcataggagagatgcatgcatactagaatcgatattgagcgtggtaggacatcctgatgtctctatcgctataaaacggggacaatgattgcattgcatgcgaatgggacgaacgttaacaaaatttagaggtag

SEQ ID NO: 22095 - DNA, 346 bp, Zea mays
  Clone ID: MRT4577_120146C.1
ttctgaaatgaacaaaccagctgttggatcataaacttctgatttaaaccataatttgaagagctcaaatggtaaaagtaaacatacgctttcagaagcagtatgtaccagtgcaaaggttcctggaggtcatcagtccaacagcacggtcgaaatttctgaaaatgttccagtgtctgttgacagtagtaagatgggatcaagtatgaaacatgcaaatgcaaattttggtgaagatggttcttccaccaaggacttaaatggggtgtcaccatgtaagtctcagtcttctccatcaaacataaatggtcatagcagttttgtaaacgatgaattctgcaatcat

SEQ ID NO: 22096 - DNA, 767 bp, Zea mays
  unsure (1)..(767): unsure at all n locations
  Clone ID: MRT4577_120147C.1
ctgtaactccacctttcagctgactcccatcaatctcgatttgccagccctccgcgacgccggcgagcccgactaccccccgtagcgggcatgggatcgacggcgctcggtggtgcggctccggcgcgcgccggattggcccccaagaatggactccttggatctactttcaagccatgtggtggtttcaagctcaaaacaactcctaaggttggacgctcttcagtttgtgtgagagcatccattgcttcttcaccacaaaaacagtactctcctaagacaccagcagttaaatcaggggaggaagtgcgcattgcagtgctaggagccagcggttatactggagctgagattgttcggcttctagcaaaccaccctcagttccgtatcacagtgatgaccgcggacagaaaagctggtgaacagtttggatctgtatttcctcacttgataacacaagacctgccaaatttagttgcaattaaagatgcagatttttcagacgttgatgctgttttttgttgcttgccacatggaacaacacaggaaattattaaaggcttaccccagcaactgaagattgttgatctctctgcggatttccgtttgcgtgacatcaatgagtatgctgagtggtatggtcatgctcatagggcaccanaacttcaggaaaaggctgtttatggtttgacggaggctcttcgaaatgaaataaaaatgctcggcttgttgccaaccccggatgttatcccccgtctattcagctc

SEQ ID NO: 22097 - DNA, 1215 bp, Zea mays
  Clone ID: MRT4577_120148C.1
ggggatgtagttcagatggaaatagctcatctgtcaacctcgcgctagctcgttgattaaagcaaaagacctgctggctctaggtacatccatgattgtaggtcaggtcaactgctctacccattcgaatccaaagatccaaccactatggctggtaccgagcaccccgtgcacgctgtcctccgcccgttcatggcgcagggccacgtcgcgccgttccgcttcctcgccgagctcgtccgccgagcccgaccagacgccagcatcaccatagtcgcaactccctgggtgtccgagtcactccgggccactctcgcggcgagcaacgtcgacgtccacgccctgccgttcaacccagccgaccatggtctcccggccgacgcccacaactcggcaagcatcggccccgatcagctcggcagcctcttcgccgcctctgagtccctcggcccagcgttctgtcgcttcgtcgccggcctcagggccaccgaccctgccgctcatgtacatatcatggcggacatgttcttgggctggacggtgggcgtcgcccgcgacgacgccggcgtgtcccactccatcgtcttcacctgcggcagctacggggcggcggtttacttctcgctatggaacagcgtcccgctcggcgcattcagcgcggggtcaaccgacgacgccttcgtgttgccgcagttcccgcagattagcgtccggcgctcgcagctcagcgaccaacttgccgcggccgacggcaaggacaccaggtctactttcatccgcaagcagatcgccttcttctcccgtgccgacgcgctgattgtcaacaccgcagagaacctggaacccaagggctgacgatgctccagcaatggttcaacgtaccagcgtacccagttgggccactcctccgtaccacggtggcagcgtcgtcgtcagaaacgaaggatactagcagcacaatcttcgcctggctcgacaagcagctgccgggttccgttctgtacgtgtcgttcgggtcacagttcaacatcaacgccacacagatggtggagctagcgattgggctcgagcagagcgcccacaagttcgtgtgggtgatccggccgccgtctgggttcgacgacaaccgcgagtgctggtccgagtggctgccggacgggttcagtgagagactagtggtcacagggcagggccttgtggtaccgtgctgggcgc

SEQ ID NO: 22098 - DNA, 439 bp, Zea mays
  Clone ID: MRT4577_120149C.1
tttttaataattttttttttttcttcttttttatttggggttttttgacggaaatcataggtatttccaaaacattttcagattttcaacatatctcatattttttaggttaaaacaagggacactggagccctagtccaaactggaggttctagcttaataaaatggaatatggccaccgttgatggagaaattgggcgcgagctcactggattcaactatcgattgaggaaggcaactgcccaacacaaatctcatgcactggtgatcacagaggaaacagctcctggcatcctcgttaagacaacatttcatagacttcccttggtggggacactccctggggttttggggcacccaaaatttctgcctccagtttataaaaagaccttttggcaccattttgggaaaagggcctcacccacttttttgttcctcc

SEQ ID NO: 22099 - DNA, 1341 bp, Zea mays
  Clone ID: MRT4577_12014C.1
cccacgcgtccggtttgcaattgcatttggtaccgcaattggctgcatcggcctcctcgtcctcgctgccgggtttctgttctggtggaggcatcgtagaaaccggcaggtcctttttgatgtcgatgatcaacacatggagaacgttagcctcgggaacgtgaagaggttccagttcagggagcttcagtctgcgacaggcaacttcagcagcaagaacatactgggaaaaggtggctttggatacgtctacagagggcagttccctgacggaactcttgtggccgtgaagcgactcaaggacggcaacgccgcgggcggcgaggcccggtttcaaaccgaggtcgagatgatcagcctggcactgcacagaaaccttctcaggctctatgggttctgcatgaccgccacagagaggttgctggtctacccatacatgtctaacggaagcgtcgcgtcgcgcctgaaagggaagccacctttggactgggcgacgaggaagaggatagctcttggcgcagggagggggctgctgtacctgcacgagcagtgtgaccccaagatcatacacagggacgtcaaagcagccaacgtcctgctagatgactgctgcgaggccatcgttggtgactttgggctcgcgaagctcctcgaccaccgggactcgcatgtcaccactgcggtgcggggcaccgtcggtcacatcgcgcccgagtacctctccactggccagtcgtctgacaagaccgacgtcttcgggtttggcatcctgctgctggagctggtcactggtcagaccgcgctggagttcgggaaggcagcaaaccagaagaagggagccatgcttgattgggtgaagaagatgcaccaggagaagaagctggacgttctggtggacaaggggctgaggagcaggtacgacgggatcgagatggaggagatggtgcgagtagcgctgctgtgcacgcagtaccttcccggccaccggccgaagatgtcggaggtggtccggatgctggaagcaggggaagggctcgcagagcggtgggaagcctcgcactcgcagtcgcagcgcgcggactcgcacgagttcaaggccgtcgagctgtcgggcccgagatgatgatgacgacgacgccgccgccagtttgcactttgtacagcatgcatattaaggaccgagaatcctgtgtggactaccatactagaatagctagctatagatgtgtattagattaactgtacaaaaagaagagcgtgtgaggtttgtactgatttggatatttacagaattagtagtcgagacaataagaccaagtaaaaaagagcttttcattgttc

SEQ ID NO: 22100 - DNA, 335 bp, Zea mays
  Clone ID: MRT4577_120150C.1
gccctatagcaacggccggacagggacgcgttcaagctataatgtactggagctcgctgtctagctagctaacggtagttcacccgattgagggcgatgagcagcggagtggcacccatgagccagggcggcacacgggcgccctggccggagggaaccactgccctggctgggggggggggaacgagagaacgggcgtttggtagctagtcagcggctccgaaacattagtccgaccgtgcctgggcggcggccccgctgggggcgattccgcgcacaggggggggtcgctcgaggggctgggcgcggggccccgcgcgcggcgtcatcgtggt

SEQ ID NO: 22101 - DNA, 378 bp, Zea mays
  Clone ID: MRT4577_120151C.1
ggatgcataagcagagcaagttcttaaaggaacagaggtcaccaacttgctgcctaaattctaacaggtacttgctgtacctaaactgtatgcactggcaattgaaaaacgcagcaaccatatcacaagacaagacaagaccacacgttacagctcagaaacggttccattatacctaccattgaaaattgctgcaagtattatgtgtattgtaactgtactgctgtacaccagttataatctcattatcttctcttgtggttgagttggccatttggggggctatactatctgggggaaattgtgcttgtacaataaaaaaagtttccatacagccacacgcatgcactggggacccaaaaacatatgataaagttc

SEQ ID NO: 22102 - DNA, 177 bp, Zea mays
  Clone ID: MRT4577_120152C.1
tggcctggaacctttgggctgctttatgtgcttggggtggtgcgtcgaacttcccgtagatcatcgtcggcacagagttggaggacgcggtagaatgtccgacggatcatgggccttatgtattgattacgctacggttcgccttcggtatatccacgaccgaattaatccaaagcg

SEQ ID NO: 22103 - DNA, 605 bp, Zea mays
  Clone ID: MRT4577_120153C.1
gtgatggaatctgcagactcggccttagcagggggaacaacgcagagtacgcgggatctcactccctgagtctgctgatgctcagccaataaagaatcattccatctcaaaaaaaaaaaaaaaaaaaaaaaaaaaaaaaaaaaaaaaaaaaaaaaaaaaaaaaaaaaaaaccaaaaaaaaaaaaaaaaaaaaaaaaaaagggggggggggggggtaaccacgggtaaagggggaattccaggaaacggggggcgggtacaaggggatcggggctgggaaccaaggggggggtaaggaggggaaaaggtgggttccggggggaaagggtgatcggggaacatttcgccacaagaaacgggggggaggcttaagggggaaagccgggggggggtaaggggggggcggccgcacagtaaggggggggggggcgcgggggcgggttcgagggggggaaaaccggggggggcgcggggggtcggggacggggcaaccgggggggggggggggggcggggccttggggggggtggcggggggcgcgggggggagcgggggcgcggggcggggccgggtgggggcggggggggggggcggggagcggagggg

SEQ ID NO: 22104 - DNA, 313 bp, Zea mays
  Clone ID: MRT4577_120154C.1
acccacgcgtccgactatgtatgagatctcatctcctttctcctactgaatgaatgaatcattattggctttgctttgcttcaaaaaaaaaaaaaaaaaaaaaaaaaaaaaaaaaaaaaaaaaaaaaaaaaaaaaaaaaaaaaaaaaaaaaaaaaaaataaaaaaaaaaaaaaaaaaaaaaaaaaaaacaacaaaaaaaaaagagtattacacttaactggggtacgttttacagattctgaacttcaaaaattctgcctaaaaagaattaaagacacattattataaaagcaccatttcggaaaaaggtata

SEQ ID NO: 22105 - DNA, 239 bp, Zea mays
  unsure (1)..(239): unsure at all n locations
  Clone ID: MRT4577_120155C.1
agcagnggnaacaacgcagagnacgcgggatcttatttgnttctggtccacttgcctaaacttttgtaatctttgttggcttggccttttcgaatatatccaaaacaaaaaaaaaatgccctgcgatgagattttcgtcggttctatgctgaaaaaaaaaaaaaaaaaaaaaaanaaaaaaaaaaaaaaaaaaaaaaaaaaaaaaaaaaaaaaaaaaaaaaaaaaanaaaggggggggg

SEQ ID NO: 22106 - DNA, 276 bp, Zea mays
  Clone ID: MRT4577_120156C.1
gtatactcgaaaacctacagaaggggggaccttggttacagggtgtgcggcaactgtctgacatgaatcctgcgcctttcaaccacggtaaataaattgggaatcaaaagcattatgagcttaaatgacagtttagtgatcctagagttccctctgaacagcaaatgggcaagggctcgccattgcactactggaggcactggctcatcggatcaatgggcttgccctgggtgatgggaacaagaacattgatcaactccctgacatgtgagcggg

SEQ ID NO: 22107 - DNA, 406 bp, Zea mays
  unsure (1)..(406): unsure at all n locations
  Clone ID: MRT4577_120157C.1
cggaangccggggcggcccaagccttcgggggttccattccggnccggcccttggntttttcggtttcggccggaccccgggggcgggggacaagaagccatgtggggctccaacctttcaaccgcctggtcctcctgggggctggccagaagggcctcaaccacccgtgggggctcccccccgggctcgggtttcctggggcggggttccctccgggggctccgaacccgaatcgactccgtaaggaacacccaaaaaatcacggaggccatgaagctggtggccgccgccaaggtccggcgcccgcaggaagccgtcgtctcctttcgccctttttcggaggcgctggtggaggtgctctacaacatgaaccaggagatccagactgaggacatcgacctgccc

SEQ ID NO: 22108 - DNA, 384 bp, Zea mays
  Clone ID: MRT4577_120158C.1
accacgcgtacgcatgacgcaaggaacacgagcgtaataaacaaatacgtgcacatacggaaactaataaatccgagggacaactcccttttacttcgacaaaccacatatagtcgagatggggatgaaaaaggtcgcctgcgccgacctcgacggcgccgactgcgccaccgtggtcctcgccgccgaggccccggcgcccgcgcccaccagcgcctactcggctgcgttcccggccgtcggcgccgtgctgagcgcctccgtgctctccttattcgcctactacctgcagtaaaattaaatgaggatcggtgggagaggctgatgggtgccattgcctgtattcgtttggatcccgttcatatatatatatatatattcaag

SEQ ID NO: 22109 - DNA, 159 bp, Zea mays
  Clone ID: MRT4577_120159C.1
tgcttatgtgccatgcatcacattgcaagggggggagtattttgatggacacctaaggtccgtcccgctgggacatatctaggtgacgtaggcccgtgaccatatagagatataaggagcgcatggctattgcttctaagataaagggaatggaacacc

SEQ ID NO: 22110 - DNA, 897 bp, Zea mays
  unsure (1)..(897): unsure at all n locations
  Clone ID: MRT4577_12015C.1
ggggctgctgtacctgcacgagcagtgcgaccccaagatcatacacagggacgtcaaggctgccaacatcctgctagacgactgctgcgaggccattgtcggtgacttcgggctcgctaaactcctcgaccatcgggactcccatgtcaccactgcggtgcggggcactgtcggccacatcgcgcccgagtacctctccactggccagtcgtcggagaagaccgacgtcttcgggttcggcatcctgctgctggagctcgtcaccggtcagacggcgctggagtttgggaagacggcaaaccagaagggagccatgctggactgggtgaagaagacgcaccaggagaagaagctggacgtgctggtggaccaggggctgaggggcggctacgacaagatggagctagaggagatggtgcgagtagcgctgctgtgcacgcagtaccttcccggccaccggccgaagatgtcggaggtggtccggatgctggaagcaggggaagggctcgcagagcggtgggaagcctcgcactcgcagtcgcagagcgcggactcgcacgagttcaaggtgcctgacttcactttcagccgctgctactctgaccttaccgacgactcgtcgctgctggtgcaggccgtcgagctgtcgggcccgagatgatgatgacgacgacgccgccgccagtttgcactttgtacagcatgcatattaaggaccgagaatcctgtgtggactaccatactagaatagctagctatagatgtgtattagattaactgtacaaaaagaagagcgtgtgaggtttgtactgatttggatatttacagaattagtagtcgagacaataagaccaagtaaaaaagagcttttcattgttctttnnaaaaaataatttt

SEQ ID NO: 22111 - DNA, 408 bp, Zea mays
  Clone ID: MRT4577_120160C.1
ctcactcctcccagctcatataataattgtactgaagaccgaccgagaatggggggctctaaacgcactagtctcaaagccgcgctagcatgagtcctgcgggcatggaggggcaaaacatggccggcaaagggtggatccaacaacactccgtaggacttggagaacctggacaaccgcgcgcgctcgggagacggtgcggaccctgtggcttgacacgccaaagaagccaaggacacccaggactacatcgggcaagcgctcatgatactggcgggtgggacactccgacggagcacccggagagaacatcatctggagctcagcgggtctaacctggagcgccccaaactcgctgcggtcgtgggtagaccaaaacgagaactaccaactgatcatgaacacctg

SEQ ID NO: 22112 - DNA, 201 bp, Zea mays
  Clone ID: MRT4577_120161C.1
cctgaaccattgcctgagcaatagaataactgtgcttttgaagtaatgtctgactctgaaggcagcacctgaccgctcccccgcgtgctgggctggtcgtgccgatactctgggctcccaattgctgcttctcaaatatacctcttgcccgactgccgccttctcaatccaccttattcactcaaccatgccccacaaaca

SEQ ID NO: 22113 - DNA, 718 bp, Zea mays
  Clone ID: MRT4577_120162C.1
cgaggagctcggcgtggcgcgccgcgccgcggacgccgtcgcgcgcggcgtctgcgccgaggcgctgtccctgtcgtactcgtcggcgtcgcgcggccccgggtggtggaagctggagctggcggcgctgtcgccgcgctcgttcgggaaggtcgtcacggcgctgcggtgccgccgcgccgagccggccgtgctggccgcggcggcgggggcctacgcggagctcgtcctggccgaggtcctcgcggcgccccaggaccgcgcggaccaccgcgcgctgctcgagtccgtggtcgacgtgctgccctcgcccgccgacgcgcccggcgtcccggcgccgttcctctgccgcctcctccacgccgccgtcgccgccggggcgtccgccaagacgtgccgcgacctcgagctccgcgtcgccgccgtgctcgaccaggccaccgcccaggacctgctcgccgtcgcgctggacgccaccggggagcgcgtcaggaacacggacatcgtgcgccgcgtcgtcgccgccttcgtcgagcggcaggctgcggtgacgcccgggggtgagcggaggagccgccgggcgtccatgtccgggacgacggcggcgacggagctcggtgccgccaggcccggcgcgctggagaaggtcgccatgatggtggacgagctggcggcggagatcgcgacggaggaggcgctgcccatctccaagttcgtc

SEQ ID NO: 22114 - DNA, 1416 bp, Zea mays
  Clone ID: MRT4577_120163C.1
ccggccgggtctcctgattcgtcttcgtcgcgagcggcagaattcaccaaatcagccctcgcgtttctcccttcccccggctcccggcgtctctgcgctgcggccgtacggcgatgcggtggctatcgaggctgctctctcaagccgtcgccgccaggagggcctccgcggcggcgaggtccaacactagtctcgtcaagggaggatcccacgggttcgctagtggcggcagggatgggtcaccggaggtgcctcgggagtggttgcggaagctgtgggtagacgagctgaagaagcagaaggaagccgcgaggagatggggcgtcggctcatcattagaggttgcaggagcgaccgaggaggcaccgtcaaggagctatcagtacgaatacagcggctctaaccccgtggaggccaaactggctccgcttcttgcaagagctaacctcgtcattgccagggatattgagtgggcaaacatcatgtttgcttttgagcaggagagcaggtatatcataatggacccactctttccacaatctccagtaggttttattcgagagaaaagcaacatcatctttagacagctactcagaacaagacggccatttgttgcagaaataactgatgctatgggtaacgagatatttaaggttcgccggccattttggtggatcaacagctcaatttatgtagaagtgaatgataaggagataggtgtagtccacaggcgttggcacctttggcggagaatttatgacttgtacttagggaatatgcaatttgcagttgttgagaatccaggattctggaactggacctttaacctggtggatgaagatgataaaatgttggctcagattgatcgtaattggaggggcctcggctttgagctcttcacggatgctggccagtatgctatccggtttggtgatgaggggcaaagccacaagtttgctcccgcagaagatgtcgaagaactgcatgttgttcgccagctgactttgcctgaaagggcagtggctcttgctctcgcgatttccttggacagtgattacttctctagaagaggtggctggggacttccgtttctgatagccacagagtagacaaatgaaccaccctcgcccacactcaagggaaaaactttttttggggctctcaatttcccaagagtgcaagtgtatgatacgagtgcaagtgtatgatatgagtggcttttagaattgctaaaactcaatcattactacgccattgtcacattagttggtaaacgggatgttgttgatgaaaggcatgacttttgcttcatcggtgcctaaaaaaaaaaaaaaaaaagcccaaaaaaaaaaaaaaaaaaaaaaaaaaaaaaaaaaaaaaaaaaaaaaaaagaaaaaaaaaaaaaaaaaagcggcc

SEQ ID NO: 22115 - DNA, 172 bp, Zea mays
  Clone ID: MRT4577_120164C.1
tccactttactccacatggacaaagttcacccctgtctcgcgcgaagtcgtactacaaggggggcctcctggttgcgcgcgtggtccgatgtggccgtacagcgccctcgatttcacgtccgtgctgcgcccacgctcactcagttcttggggccgttcgtgcccgcgctct

SEQ ID NO: 22116 - DNA, 994 bp, Zea mays
  unsure (1)..(994): unsure at all n locations
  Clone ID: MRT4577_120165C.1
cggacgcgtgggcgagacgcgtgggcggacgcgtgggctggagcctgatgtttacagtgttctagaacttnngtcccgtcgaaacgaggccgcttttttttttttttttttcctttttttttttttttttaaccaaatggatttaattcctaaacaatatacattcacatccaagtagcctagcagacgagtgcaagacgagttgcactgtaaacatcaggctccagtgttctagaacttaaatgcggtatcgtttggatgttcatgtatcttttaatccatgtgtcatgaaatagtttagcctgtatctaacaccaaactatttcaacacatctggagtgagaggaatatatgaccatagccatccaaacaagccacgcatgtgtgcatctccatagcagaaacaaaggggaaaggaaggcttccgaaatctcctgacaatagtaatgagtcagaagcacgcagaacggcagaaacagtttctgcctctggcgatgatgccgatcacctgacaacagtgatgagtgtaactgctagcctcttcaggaatgagaataaagaaattccttgtatacggcagatggtggttcgtgtgcctactccgtggcaatcagaaacggaagtccccagccacctcttctagagaagtaatcactgtctaaggaaatggcgagagcaagagccactgcccgttcaggcaaagtcagctggcgaacaacatgcaattctttggtctggagcttttgtgagacattaactaactgggaaaagtgggcacccacatacccagatataataaacggtaagtgagcaaacttgtcgccttgtacatcatcaccaaaccggatagcatactggccagcatccgtgaagagctcaaagccgatgcccctccaattacgatcaatctgagccaacagtttgtcatcttcatccactaggctaaaggtccagttccagaatccggattctcaacaactgttttttttttttt

SEQ ID NO: 22117 - DNA, 607 bp, Zea mays
  Clone ID: MRT4577_120166C.1
tttaccctggtggatgaagatgataaaatgttggctcagattgatcgtaattggaggggcctcggctttgagctcttcacggatgctggccagtatgctatccggtttggtgatgaggggcaaagccacaagtttgctcccgcagaagatgtcgaagaactgcatgttgttcgccagctgactttgcctgaaagggcagtggctcttgctctcgcgatttccttggacagtgattacttctctagaagaggtggctggggacttccgtttctgatagccacagagtagacaaatgaaccaccctcgcccacactcaaggaaaaaactttttttggggctctcaatttcccaagagtgcaagtgtatgatatgagtggcttttagaattgctaaaactcaatcattactacgccattgtcacattagttggtaaacaggatgttgttgatgaaagggatgacttttgcttcatcggtgcccagtcggtgtcccagtcttgatcagcttgaacggatgtgttgcctttgcctcagcggtgcccagcaacgacgtgtccgatctcgtttacacaaaacgtgtcgttggaataataatgacaagtttcact

SEQ ID NO: 22118 - DNA, 793 bp, Zea mays
  Clone ID: MRT4577_120167C.1
ggcgattgggttcatcgaggccggccgggagaattcaccaaatcagccctcgcgtttctcccttcccccggctcccggcgtctctgcgctgcggccgtacggcgatgcggtggctatcgaggctgctctctcaagccgtcgccgccaggagggcctccgcggcggcgaggtccaacactagtctcgtcaagggaggatcccacgggttcgctagtggcggcagggatgggtcaccggaggtgcctcgggagtggttgcggaagctgtgggtagacgagctgaagaagcagaaggaagccgcgaggagatggggcgtcggctcatcattagaggttgcaggaacgaccgaggaggcaccgtcaaggagctatcagtacgaatacagcggctctaaccccgtggaggccaaactggctccgcttcttgcaagacctaacctcgtcattgccagggatattgagtgggcaaacatcatgtttgcttttgagcaggagagcaggtatatcataatggacccactctttccacaatctccagtaggttttattcgagagaaaagcaacatcatctttagacagctactcagaacaagacggccatttgttgcagaaataactgatgctatgggtaacgagatatttaaggtaatatttctgcaagccactacggcattttttagaaaaaaaaattgaattgtactgctgagtttaggttcgccggccattttggtggatcaacagctcaatttatgtagaagtgaatgataaggagataggtgtagtccacaggcgtt

SEQ ID NO: 22119 - DNA, 334 bp, Zea mays
  Clone ID: MRT4577_120169C.1
tacgagcggtcaccccgggcaatgactgaattcgaaccgtgcaagcgtggatctatgacatcctttataccttccttgttggaagcttgtagctgtaatagaagaaaccacatggatcactggctggatggatcacaccgctatataggaacgtggctttttgttacatcgatgtgagatatgtctattataccctaatgaagaccaccccgtgatggatagttaacctaccacctgggaacgtaacatgtgctgacaacgtccagagcacatggtagtcgtaccttactgatgaccgctccgcgataataattgaacctacatcctcatacgt

SEQ ID NO: 22120 - DNA, 891 bp, Zea mays
  Clone ID: MRT4577_12016C.1
ctcttggcgcagggagggggctgctgtacctgcacgagcagtgtgaccccaagatcatacacagggacgtcaaagcagccaacgtcctgctagatgactgctgcgaggccatcgttggtgactttgggctcgcgaagctcctggaccaccgggactcgcatgtcaccactgcggtgcgaggcaccgtcggtcacatcgcgcccgagtacctctccactggccagtcgtctgacaagaccgacgtcttcgggtttggcatcctgctgctggagctggtcactggtcagaccgcgctggagttcgggaaggcagcaaaccagaagaagggagccatgcttgattgggtgaagaagatgcaccaggagaagaagctggacgttctggtggacaaggggctgaggagcaggtacgacgggatcgagatggaggagatggtgcaggtggcgttgctgtgcacgcagtacctccccggccaccggccgaagatgtcggaggtggtccggatgctggaaggtgacgggctcgcagagcggtggcaggcttcgcagcgcgcggactcgcacaagtccttcaaagtgcccgacttcactttcagccgctgctactccgaccttaccgacgactcgtcattgctggtgcaggccgtcgagctgtccggcccaagatgacaccaaccaccaccaccgtcagtttgcacttgtacagcataaggaccgagaatcatgtgtatattgccatattggagaataaaatgagccatgttagaataactatagtgtgtattagatagatgaactgtacaaaagaagagcgtaaggtttgtacaggtttggatatttacatatttctagcagttgagacagtaataccaagtagacgagctttttactg

SEQ ID NO: 22121 - DNA, 482 bp, Zea mays
  Clone ID: MRT4577_120170C.1
ccggtcgacccacgccgtccgttaaaaaaaaaaaaaaaaaaaaaaaaaaaaaaaaaaaaaaaaaaaaaaaaaaaaaaaaaaaaaaaaaaaaaaaaaaaaaaaaaaaaaaagggcgtgacggtttccaaggattccgggcttccttcctccttgcttgctaacgtcttgcctgcttttttcgtgccccctatattcctgttcacttggccgccgctttcccgcctggtgcattgggtgaacccttcccctttttccctctttttgtccccttggcgccctttcccccttttgcccccttggcggctttgcctttaggcgggtgccgttcgcccttcccaccctttctgcatcctgtttggggattgggttgccccctttcttggccctttcggcccgccgggtttgggggttttggcccccctttctgttttctttcctttcctcctgcccccctttctttctcccttttttttttctttttt

SEQ ID NO: 22122 - DNA, 352 bp, Zea mays
  Clone ID: MRT4577_120171C.1
ggaagcattggatacatgtgatggaatactcaacagaatacaactaacagctaaaacagctataagcgagaagagggcaacagatctctattcgttactgtaacacatactgatgcactgctgccctgtttattgcaccaagaacactgcacgatttagaaagccatgacctacgaggcatggccgggacatagacgacatttctgctcactaccgtgggccctccggtgctaccgctcctttcggagcgattgggattgccagagccgtcagatgtcaggaccaaactccgaagacccaagcttaatctcttctctttcatacccttctacttctactgggccctggctgt

SEQ ID NO: 22123 - DNA, 406 bp, Zea mays
  Clone ID: MRT4577_120172C.1
tgacgtttcatgcacacgtccctccgcttgtatcctctacagcggcacgccttcatattggtttatttttttacacaacaaccgccagcgcacgctaactggatttttggtggtgaacaaaaccgcacttaatctgtctaccccaaaggctgtgattacccgactggttccgagaccatgtccccatggcacgccccctttattaatggtgctgatagacacaaggacatgtcccgcccattatctcatgggggcaccgagctctactgtacacgggaaaaggtgtttatgcacttttgcgcctggttcgcattatcggcagaggaaggatggcaaccgctgcttatttatggagccagcttcaccgtgcaagaagttgcattgccctaactagttcattaaggag

SEQ ID NO: 22124 - DNA, 901 bp, Zea mays
  Clone ID: MRT4577_120173C.1
attggtacctcgagccggcgggttattatatattttatagtatattattttgaagttatagttgttaaaaatattttctaatacgttaaatataaagaagttgactcaatctaaatctagaatttcatttctttagaaccgagatagtaaatcagactgacatatgcttaaaaaaatactgaaccagttcggtacaacgggttattcttttagtaatgccaaattggtcgtgcgccattcgattttaaaattatagatgtcagagcacatttgaattatctgtctgttatgtgcaagttatgctggttgctggctatcttcatgacaggtagtagtgcgctgggcttctacgctgaaactaattattagttgttacaaccaagtatactaaaatctatatgcttctacacaggacaataattttgagagcgaggattaaagagcacatgactgtaattataagagatatggcgtgttagaaatttgtagataaatttggggtcgatagctaatcaaatttatttttgctctatctaatctgttcatagtgtttaacacaatagtcacacatatactttcccatcttgatccagctatagtagattttacttcagaatttatttttggtccatctcatttattcacattttaatacaatagttacacatatactttcttatctttgtctaaccgtagtgtactttagttatcaagtactttaacagttttttttcatcttttttatattttttggttagtaccataactctatgtgtttttatatgtatttggttgaaaccttagcttgagctgtgtgtttgactaaaatctattataaccaccgcttgatgtatacatgcatacataatgtgaatccgacatatcatgcatgtatacctta

SEQ ID NO: 22125 - DNA, 445 bp, Zea mays
  Clone ID: MRT4577_120174C.1
cccgtccgcccacgcgtgcgcctacgcatggacctagcaagggacttcgctttgaaaaacgccctagacaaggcacgggccgggccagataccacaaatgatcggacactggacctgcaacttgaaaagggacttgaaagtggacgtgcctgcataggtgccaaccttaactacaatcctccttaggatgccggagggtatgccaaggagactgcatacgctactacatacactacaaagtaaggtgcatataccagcagggcaaacaacatgcttcatcacatgcttactcacactagtacgaatactgagcagcaccttgagcatcaactttcagtcccacacgacgagctatacgacgagcactctgatgtctacacacctaacaaggaggcaaacaatgaggtcaaaagtgagaacgatagggaagaaaacatgattgctg

SEQ ID NO: 22126 - DNA, 640 bp, Zea mays
  unsure (1)..(640): unsure at all n locations
  Clone ID: MRT4577_120175C.1
acgccccgggcgcccgactgcatgggcgccatatacacctccggcatgtcggcgcgcgcgtgcaggccagtgtccggccccacccacgtcttcgtcccgacgtcgaccgccccgtcgaggacgccttctccagggcgttcctgtgcgagggctacctcgccgagcaggtcggacggatcaggcacttcgtcatcccgtcacaccgcgacaaggacggcacgccattctgcccttgacaagagtttgttctgctttggtttggatcccacggtgcccattgccaaactactacagtactattattgctgcatagatgttgctttgcagtttttcattctacactgatgagtgcctgagagttgggtagacgaccgctctgtaaaatcgacaacttgctttgtctgttactcggatgaaaaactccagggtccaaaaaaaaaaaanaaaaaaaaaaaaaaaaacctcatcctaagtttgctaatttgcctctcctcacttcactagttcacttcacctcacttgcgcaatcgcccccgccgtcacgacaccacccagccgcaacagtagattacctcgatctctcagagggccaccaaggcggaggaagaaagccatgtccagccccacgcccgcccgcaag

SEQ ID NO: 22127 - DNA, 433 bp, Zea mays
  Clone ID: MRT4577_120176C.1
gttaaaaaaaaaaaaaacaaagaatatttttacggggggcaaactaaccggcacaaaaaaaaaaaaattggggttaattttccggagggggccaccccaagcatttttgggggaaaagctacccctaaccggaaccctgggtaaaaaggggacccccgccccaaaaaagggggggggggcccgggggaaaaccggaacctgtgggaaaactgtttggaaaaacccaaccccccggtaaattgggggggggttttcccgttacactaaagggcccccttaaaggacctaatggggggcccaaaaccccggggaataacacgggggccgtggttaaaaaaaaaacaaagaccctttttaaacaaaaacacggggttctgccccacccttttggggggggggaacccgtaaaaaacaatgtccctccccgggggcc

SEQ ID NO: 22128 - DNA, 656 bp, Zea mays
  Clone ID: MRT4577_120177C.1
ccggccgggtaaccctagcgccacccacccacccatgcagttgcttgagtccgcctacgccgtgcgtacaagcgggtggagacaggatgccgggtggccactgtctgcgatggcggacgctcatacctcttacatcgcccattacggaagaagggctactattctgattatcatgtaccatacgacgtacatgatgggacagtacgattatgtaaatgcgatcggttcacaggcacaacgggtagcctgacatgttgtaccacaaggcgctccttttgtgtgatgaacatcaacaagctcgcgatttgaagtcgaggtcatcacacttgctaaagtgcgcaataaaacaatgcgcatgcttgtgcgtgaggatgattttctgcagaccggctaaacactatgaatgatgctgatgaatgctacaaaggaaacactgaaagtatatgtcaaacatttacatgagtctattataaccagtatggagccaataacgctcaatacgtattggatgactgtggtggccagcattgagagcgtgcgttcattgaaattctggagaaggacgatgtgaagactagttactagactggatgtggactgtatgtggaaggctttgtgataggtagcgcgtttggtcacagagagacattattgaa

SEQ ID NO: 22129 - DNA, 483 bp, Zea mays
  Clone ID: MRT4577_120178C.1
aaataaaaaaaaaaaaaaaaaaaaagagaaggagaggaaaaaaaaaaaggaaaaaactatataaaaaaaaaaaaaataaaataaaccaaacgtgcaaaaacataaaatatttactatgggggcctaccttcttttcagtgtcctggttttttaccccttgattcctttgaatacctttttgtttggggtttattaattgtattatcttgtgcggttttttaactaatggggtcttgggaaaacccctctttttcccctttttaccctcttggggttcaccctaattttccactgttgacatcccttgaaaggggttctttaacgctgggcgctttccgaatgttacgccaaattagtcggttaaggtggccccccccttttcccggcgcttttttagcgttgttccgttcgttttccccccttttttcccgttttttttcccggccctttagggcgggggcttttttttggtttccattcttt

SEQ ID NO: 22130 - DNA, 539 bp, Zea mays
  Clone ID: MRT4577_120179C.1
ccggccgggccgcgccgccatcagggcgtctcgtttctccagggcgccgcgccgttctccagggcgccgcgctgcctacaggcgtctcgtttctccagggggcgcgcgccgcctacagggcgcctcgtttctccactctccagggcgagtccgcgacggcgcgatgtctcgtttctcccgtcacagtctccaccttttgattctctcaccttctggatgattctctcacacggtgttagtttatttctctcacgcgaagccttgcgcagagctgcagttacgtgatttagtgtgtggtgcgtgtgtcctattcttgtacatgggaattggattctgatgaatgaatctatgaatgaatctatctatctgctatatacaaattttgtgacaatgtgagctcaattctgctgagtcttcgtgacctgttgtatggtttatgttgtgcgtgattaaatttctgtatttgattcttcagagtgtctctgtgttaataacaagttgtttttgtttgtgttaaaaaaaaaaaaaaaaaagcggcc

SEQ ID NO: 22131 - DNA, 285 bp, Zea mays
  Clone ID: MRT4577_12017C.1
cgcacgcgtccgatacaacgctcgtgtgcgactgcgctactgctatctcctcttgagtcctaagcagacagatacagagccccggcgacagcgagatggaagatgagcagaagcatcgtcgatatcggctatgacgcgacgaacaaggcgccgctgctggaaccacgtgcagagttggactaccatctacggaacggtacatcagcaggatacggtgcttgcgcaggctatgcggaagcatacttgtctgcgatgccgctgcagcggcgcgttatggaggagaac

SEQ ID NO: 22132 - DNA, 169 bp, Zea mays
  Clone ID: MRT4577_120180C.1
ccggcggcatcggtcctctgccggcccttcgtgcacgcggagcaccagaccattgccacaaaagataaacatgacccacgacaatgccccatgccaggccacctccgaagaaatggatggagaagcttgacactgactgttcctgcccatctcaaccccggagactgtt

SEQ ID NO: 22133 - DNA, 218 bp, Zea mays
  Clone ID: MRT4577_120181C.1
gcgtctccttccattcaaaacaagtgcttttctgggaaaggcaccaggtcaaccagtcattttgagatatccctacaaaagatttaatgcagcatgaggattccatgtcaggcgcacgtcatgtatttcagccgctctgtcattttgtttattacctatacgtgctccgcttaccagtttactatccttctgagcaagaaaaagaagatcctatgctc

SEQ ID NO: 22134 - DNA, 319 bp, Zea mays
  Clone ID: MRT4577_120182C.1
ctctagctaagttggttaggtggtctgagtagcactcctcgggtcctgggttcgacttcccgtgggagcgaattttagactgtggttaaaaaattcccctcgtctgtcccacgccaaagcacaggtctaaggcttagccccggtcgtggtcgttctcacatgggcttcaatgccgctgtcttacccccccccccccccagtacctgcacgtcaggtttttttttcagcaaattccatctgataaggtaagaaatttataatgtaattcctattaatctggcattttctaagctcattgtcttttttccacatataccgt

SEQ ID NO: 22135 - DNA, 866 bp, Zea mays
  Clone ID: MRT4577_120183C.1
cacttcacgttctacaaccgactccaacagtaatgacatcactagttcagccacaagaatcacaagcttcatgacagcacttagtgagcatcgtcttaataccacgcggcaaaccccacgcgtccgcccacgcgtccggcatgctatcctgaagttccttaaacagagtgacagtgacttgaaagacgacttcatttgtctatccattcatcaaattcataagatgccttggaatttgttccatcaattacatgctggaggacttgccagctgtgccaaggatagcagaattagcaccagtaatgattccgcacagtctggaattctgactggcagtcttctccagctgttgggctctttacttgaccaaagttacctgagagacacagacggacaagatatgtttgtgaaacttgtggatgtagttcccaagatagcattgttgtccttcggaggacagcatgatggatccaaaagtctttatcagtacttaaagcacaaaattctgatggtaatgatgcggcttaagccatacatacagcaagattgttcgcatattgttagttggctgaaattgcttcgacgttactttggagaccttcttcatcagcctatctcacaacatattgctaaaccagaaaattgtttagaaggttctccgtttttattggacatggtagatttagttgagagtcaggataagtcaactcggcacttgcaaaggcaaactatctatttgttccttagttgttccatatgtttgtcttacaacagaaatgatggtgcacttcagtgttcatgcaagcgtgatgagtgtttgttgggtcacaaagtacaaggctgtagtaatcaattgcactgttttg

SEQ ID NO: 22136 - DNA, 317 bp, Zea mays
  unsure (1)..(317): unsure at all n locations
  Clone ID: MRT4577_120184C.1
gcggggaaaaaggatgtttggaaaaaaaaaaaaaaaagaaaaaaaaaaaaaaaaaaaaaaaaaaaaaaaaagaaaaagtaaatagataaaaatagaaaggaagggataatgatggaatataagaataatggataatatgaaattgtagaaaaaaatgatgaaagntgttttgnaattanatttgttaggagaaaatgggttgaattgtaaatatttgttgttgnnagttggggaaagggtttatgatggttaggtggtttagtgttggtagtaantgttgttgttgntgngttgagatggnttgtattgttagatgt

SEQ ID NO: 22137 - DNA, 341 bp, Zea mays
  Clone ID: MRT4577_120185C.1
cacccccctaggaaagtattatgggcacacgtaaacgcacatatacataggcgagaaaaagggaaaacgctgattggatcacttaacccttcagatgtgcaaccggcgacggaaggagccacgggtgcgaatcgtcactccgtgcttttactcccagaggtgctacttgtgctcggaaaacacgccacttgagaaaacgtttaacgtgggaacaaaggaggggacagcgactttggttcaacaaaaaaaaaagctggacgagaggaactacacactaagcaggagggatgtcgtgcaggcggatctaaatgagctgacggaggaaaaactgcgggtgaagg

SEQ ID NO: 22138 - DNA, 218 bp, Zea mays
  unsure (1)..(218): unsure at all n locations
  Clone ID: MRT4577_120186C.1
acccacgcgtacgttatactatactctaagatgttagtataccaccaacatggcagccaagtgccgtgcttttttcactctcctagctctttcnacaaacaccactattgctacccatattccattgcactagccaccattcatgccattgtgtaccatgaacccatgcattcactactccatgattcaacatgcgcttgccaacttgatggcttttc

SEQ ID NO: 22139 - DNA, 123 bp, Zea mays
  Clone ID: MRT4577_120188C.1
gatttggtttttttttcacagtaagagtatattaagaggaagggtgcctgaaatttgatgctggacgacttgaaaagaacagaccccttatggattattttgaccatgtgaaatccattggat

SEQ ID NO: 22140 - DNA, 101 bp, Zea mays
  Clone ID: MRT4577_12018C.1
ctctgtaattatatatattaaaggcttttacttgtataagcatgcagacccacagtcatggtagtcacactgtaataccacccctttatttgttatgtatc

SEQ ID NO: 22141 - DNA, 425 bp, Zea mays
  Clone ID: MRT4577_120190C.1
tcgcgatctagaactttgttaacaaagaattccctcatagccgccgccgccgccgccgccgccgctcatctcgccgagaggtgacgggaccgaggaactcgccgagttctaagatagagaatcgcttttcacagcctggggtctgctgcgtagggtggtgttgaaggggagaagtttaagatctgttccacagatcacgcgtgcgcgctcgcgaatcgggggttccacacatagcttcgtcgttttgaatttgatgtactaatggagttatcttatctatctatagtatcgtgttaccgttcgcttctgtcaccgtgttagtgtccgttctacctttggattaggtgttggtacccctgttgttccctttgtttgctcccgctatgaaacgagacgagagaagaatgagcaaggtttttgttcgc

SEQ ID NO: 22142 - DNA, 252 bp, Zea mays
  Clone ID: MRT4577_120191C.1
tcgcggacgcgtgggaattgagattaaagttagtttttctaggagtgtattgaatcactctgtgactttccaaaggctaggatagacttatttctgagcaaaaatatatatgcagccattggaagtaaccatttggtcattgaatttggaatttgatcatgtggaacattttagaatatttgccaagcatatacctacttaaacaaaaaggtctacacatttgcacaactgttaaccaactgatttctgcaa

SEQ ID NO: 22143 - DNA, 584 bp, Zea mays
  Clone ID: MRT4577_120195C.1
agcgacccagccagccacccatcagcgtgcgcgaggcgttcggagcatcccgtcccgaggaagaccggccggcgacgagggggaaaacatggggaaggtgccggtgcggatgaaggcggtggtgtacgcgctatcaccgttccagcagaaggtgatgccggggctgtggaaggacatcaccaccaagatccaccacaaggtcacggagaactggatctccgccacgctcctcgtcaccccagtcgtcggcacctaccaatacgccatgtggtacaaagagcaggagaagctttcccacagatactaaatgtgaggctctccaagttgactgcgatagcagttagttctcatgatgggttctgtaatccttcaatgatgatttaacatttgttggatcaaatttagttcaatgcctttttcatatttccaatgcatatacggtatctgtgcctggcatacttattttgaggcttgctaaatatgtaccttttgtctctgaagttgttaaataaagtaaattaactggcagtttctcttgtattttgtttaataattggtaactgggtttgtttgtcagttgtttc

SEQ ID NO: 22144 - DNA, 321 bp, Zea mays
  Clone ID: MRT4577_120196C.1
ggggggttttttttttttttttttttttatcgaggaaaatgtcaatcaatataattgattattttctagggaaacacatgccggtttgagggcaccatttatcgattacatctcatatgtaatctaaaaaaggcacctccaacaattggttgttggggggggggggcagggttcatcaaagagaactggctgtatggaagcaattgttgctgctgtaggaaggcagtgaccaatgggttaggcactgatagtggattaagtaactgctgtcgctgttgttggtactccacacagatcgacacagtcagttggttgaatggg

SEQ ID NO: 22145 - DNA, 437 bp, Zea mays
  Clone ID: MRT4577_120197C.1
tttgctgatctggctccaggagtaacaacttctcaccacacatgccacggaatgatgtagaccaacgagccatggatgatggaaacactcaccccctgccctcgaccgcgaggccgacgacgacagggcctgtcaggctcgaggattgccgcaactgagggagagagacgagaacgtgaagagcggcggcgaccactcgaggatggcgagccagcgcgtacgacctgaacaacgaagcatcggccacgattgtggccgagaacaacaacgcgcagaccaccaaggacgaggtggccctggtggacgaccggatgtccaccgaggtcaccgtcctcaatctgcagctcaacaacgacctgctgaggaggatcctgatggatgccttcgggctgatgtgccacctctacaccgactacacctccacgctcaatgaggac

SEQ ID NO: 22146 - DNA, 654 bp, Zea mays
  unsure (1)..(654): unsure at all n locations
  Clone ID: MRT4577_120198C.1
aatattgtcaaccgaatcttgccccatcggactccgtggggagtccaattgtctcctttacaataccccgacccctcgagaccatcgacagcgatgatccgataatgcaaagcatgtggtcccgcgccgtcccgtcgcagtcaagctgccggtgcgtctcgtgtttgagtacggttgccaacggcgtcacttcgcgatcagcgacggctgccagcaaaaggaaattgaggatagggaactctgtcacggcactctacacgagtattttcgctgccgctgccctcgcggatgcgaaggccaagacgcagcgtcgacatgatctcgaagagaaaattgcggcagtcaaagccgaagtgaacgagctagtggatgaggaacatcgaattcttcagtctctacaatcacgaagaaaaaaccgggggataaatcgattgctacaagaaggagggttcggcaccgttgcaacttcccctcgaatccgccaacgaatcacaccgagccaacaaccagcaaggtccttctatacccagcgccatatttatggtaatcagggtgcgcagattgacgagaacttgccgacgggaggagtttgggcatcttgatcttcaggaggncgaagcgagtgcactgcgcgcggccatgaatgaagcattg

SEQ ID NO: 22147 - DNA, 283 bp, Zea mays
  unsure (1)..(283): unsure at all n locations
  Clone ID: MRT4577_120199C.1
gggggaggggaccagaaggctctataaaaagaaatgatttcaagggggggaatgcaccaaagggtgtgcacgcaactcctattaacctcgagtacactaagtttacaaatgctaaggaaccacttggcgagcatcctgnggctcgacactcggtcacattatgcatcttaaggttggtccatcaccatcactttgcggattatcccacgattggggtcgccttcgagtttttcctacagattactagattaaccatggtaccagtattctaacgtgtcaagaa

SEQ ID NO: 22148 - DNA, 321 bp, Zea mays
  unsure (1)..(321): unsure at all n locations
  Clone ID: MRT4577_12019C.1
gtagcagcatcgagagcacactgtggtcaacccagtggcagtcacaaaattntgcctggtaatggagcaaggacaatgtgtaagattcgatacagtgaccacactgaagcatggcgcgcatgcgcagatacatctactaccatttaggcagctagcaacagccgactcttaggaacgagaacacccaacacttaaacaatacaggatacagcacgcacgctacagatggcaagcaacctatactaccgtcgttcatcgagcaagcatgagccctgacacactagctacctgacacagcatacagttggcacacaacataca

SEQ ID NO: 22149 - DNA, 505 bp, Zea mays
  Clone ID: MRT4577_1201C.1
ggggggggtgtgtttttttttttaatttttttttttttttttttttttttttttttttttttttttaagaaggaagaacctaattgttagatgcacatcaaattaatggttagggtcttatgttcagaggggtaccatacatcacgattcacgggggggggggggggcccgacttggaaaaatcctggggcttattgcttggaaaggccaaccatacaacagtcccagttaagtaaaaaaagatagaaggcgcaaagagtgatatactccaagaatgagttgaatcaaaaaaaaagcctgtgagtgcaacccctacaattcttggcaccacccctacagggtttgggattcccttgaatttgacaacatccttgctcctcttgatcttcactgatcgggcatccttcctcctcacgatcaaaatgaagtccttgatctcggattagacaaagaaaagagaatgttgatacttggtggggaattacaaaatactaacagggtgggc

SEQ ID NO: 22150 - DNA, 631 bp, Zea mays
  Clone ID: MRT4577_120200C.1
tgtttgtgtgcgtgtctcggagaagctctccctcgcctcgcagatccgcggcctgctttgttgctgctttgccagcaagctgccgcgctcatcctcgcgcgccgccgtcatgaagcgcaatccccgcgtcacgagctcccgccggaagtgccgcaaggcgcactttacggccccgtcctccgtccgccgcgttctcatgtccgccgggctgtcgacggagctccgccacaagtacaacgtgcgctccatcccgatccgcaaggacgacgaggtgcaggtcgtgcgcggcacctacaagggccgcgaggggaaggtggtgcaggtctaccgccgccgctgggtcatccacgtcgagcggatcacccgcgagaaggtgaacggctccaccgtgaacgtgggcatccacccctccaaggtgatcgtcactaagctgaagctcgacaaggaccgcaaggcgctcctggaccgcaagggccggggccgcgccgccgacaaggctaagggcaagtttactgccgacgacgtcgctgcagccgccgctggtggcgccgccaccggcgcctctcttcaggagatcgactagactcttcacggtcatctgatgggtggcggaccggcttttcctcatctc

SEQ ID NO: 22151 - DNA, 258 bp, Zea mays
  Clone ID: MRT4577_120201C.1
cttactcgtattcaaacaacttgcagcattgaactcttccgcctatgtacaacagctacggcggctaccattcagccagcttgctgctgtgagccctgctgtcttcttgacacagcaacaatggttgtcagtctacctgcactcagcgcctaacatttgcacccttttacaactgctacaattgctgacaattaaccaacttgctttgaccaatccatcatcgttctacctacaacccataattggtagggccctctt

SEQ ID NO: 22152 - DNA, 212 bp, Zea mays
  Clone ID: MRT4577_120202C.1
aaagaagctctatctttcgcgcaatgttatgtgctacaagtgcaagggcaaggacatgaagtctggcgccttaaagatgtgccgtgagtgccagtgctaaggcatgaatgtcactattggtgagatgaacccttatatgatgcaccagatgcttgaatcttgcgacgagcgcaatgtgactggacagagcatcaatgagaaggaccgctgga

SEQ ID NO: 22153 - DNA, 287 bp, Zea mays
  Clone ID: MRT4577_120203C.1
accggagcccgcccgacgtcgaggacccctgcccgcttctcttactcgattgacctccttgtcgagccatctccatttccctgcgcaagcgagaacccaagaagccgattgtgcggtaggcgattcgaatacgttcgaggacgacccgcaagacgcttttgagcaaggtttcaaaggggtggttcttcctcgcttgcaccatccttgccggagctccgcgttcctgtccgagtactccagactcgaggattatccaagggcaaccggctggttcagcaggtcctggt

SEQ ID NO: 22154 - DNA, 412 bp, Zea mays
  Clone ID: MRT4577_120204C.1
attccatcatagggggttttgttggggtcagctgaaccctataaaatttgaaaagtgcgtgggcaaatatttatgggggattggagaatccacacccgcgcacggacagctcaactgccatttttatcgctgcgccatcttggcggttctctctctctctccgattcaggtcacttcagtgcagctgaaatcgcgggaagcaccacaggcagctcgtgaggcagcgcgacaaggactctcgatgcgatttttgtcctggtatcattgtacatgctacgtgcactcgtctagatgtatatttgtttcctgtatagaaggaaacaaacgagaagtcggtggccgcggtgacctcttttcaagaaaaaccacgagggaaagaatgatcatcaagaggacaggagggctgggcggt

SEQ ID NO: 22155 - DNA, 690 bp, Zea mays
  Clone ID: MRT4577_120205C.1
cattgggtacctcgaggccggccgggatggacttctatcccgtactcggcgacaggaagcaagcgctccccgcgcgatcacacctcgacctgcgacgagatgccggcgaggaccaggcgccgaccacacgtcttggagtctgccatgcgcctacacacaagcgccgccgccgaccgccgcaagggggaggagagatgaaatgggggctggaatgcgccgtggcttccgcggcgaccgcggcggcagcgccgccagccgagctcctcgcctgcaactgcgacgcctccactccggcttcggcccctgccgcgaccgtccgcaggagcgacggtactggagctctcccggcagcaccacgacgaccaggtccctgagggatcctcgtccgagttgatagacaacatacatagcggcggtcgccgcgggcaaagaaatcagaggcgtgattcaatgggctgagcgtcatcgagacggtcgtcacgtcgcaccgatgaagcgactgacccatgatccgactggctgcctatgctcccatgctaatctccccgccgccatgattccgcgatcccctgctgctggagtggcttaggccaccagaaccttgctggaacaacaatttcaggcttccccttttcatttgcggctgtgctgctcgagctcttgttgatgtcagtgggccgtgaccattca

SEQ ID NO: 22156 - DNA, 478 bp, Zea mays
  Clone ID: MRT4577_120206C.1
gtggaccgccgggggaaactgcctgagtgtgtgcctacccaacaaaaagcagcataggcgctcaacagggcagctcgacacactagccttagaaagaggctgaagggaacctcaaggccgactacgacacataggatagggtactggtcaaatatgaccttgccagcgagaagatcatggagagaatcgatcaatattggaaggttagaaagggatgagataataaagacatgacactcgtatacaggttactgaatatgccactaactcacatgcttgataaggttggccgtgaaaggactacaacaaacatggacggtgatttggacacgaaagaacgtgtgacgacggtgcaattgtttgcggcactacctgctgtagactgagaaactgttgaggtcaaacgaatacataactgccgggggttaagctatgaatggccagcatacatatcccgaacctattatctgaggaagac

SEQ ID NO: 22157 - DNA, 326 bp, Zea mays
  Clone ID: MRT4577_120208C.1
attcggctcgagtaaagggagttttttttagctaccatctaattggctctctgccgggcttttgatcttctacccatgttaaacaaggaagatcaaatccttctagctgtaaaggaaagcaaggcaaaggacggtaatgcataagctagtcaaatgctcgacgaacggacaaagagggctggaccatgacaccacaaagctgccagacgtctggcagattccaaaccagacgatccgatcacctgttcaacatttgctcaggatgtcattcaagggagagaacgcgtttcacaggcccacgagcacacaacaccagtctctgatat

SEQ ID NO: 22158 - DNA, 211 bp, Zea mays
  unsure (1)..(211): unsure at all n locations
  Clone ID: MRT4577_120209C.1
gcctgcagtaccnntccanattggggggggagggagcgtccgaaaaaataatactataaggtggaaaagataattattatatttacgattcatcctggtcgggaacattaagaagtgtgagatagactgaacaaaaggtggggagaggatcgacagatactggagttgacaagtgtattttatacctgataaatcaaattataagtttctg

SEQ ID NO: 22159 - DNA, 451 bp, Zea mays
  Clone ID: MRT4577_12020C.1
gcagtggtaacaacgcagagtacttttttttttttttttttttttttttgtttgtttttttttttttttttttttttttttttttttttttttgggggggggagagaattcccaccaactaactttcccaaccaatcaataggggggcaaacaaacaatcacccaggctgtgtttaccaacccacccttttttaggggagggggggggcgggctggtcttgccagaaacaagcagggcgtccgggagggaaaagaaagcagacagccatggtgggttggtcgggtgggtgggggggcgctcgtcggtcgccgaaacccccccacccgccggaggaatgaatcgcccgaggggggggaacggacggagaaaaaacaaacaaacccccgcctgccggccggctgcttgcggtgaattaactgattgattaccccccccgaccgccgagccccc

SEQ ID NO: 22160 - DNA, 1224 bp, Zea mays
  Clone ID: MRT4577_120210C.1
ttgggtcccctcgaggccggccgggagctgtgcggcatcttcgatcgtgtcaccactggcgatggacatggcggcgagcggcgcgctccccgtggtggacctggcgccgttcttcaccgacggcgacgagggcggcgcctcccgcgccagagccaccgaagccgtgcgccaggcgtgccggacgcatggcttcttccgcgtcgtcaaccacggcgtgccggcacacctcatggcgcgcgcgctcgagctgtcgtccgctttcttcgcgctgccggacgacgacaaggccagggctcgggcgcccgagggctccgaagcaccgctccccgcgggctacgcgcggcagccggcgcactcggcggacaagaacgagtacctcctggtgtttggtcccaagcttgggttcaacgtgtaccccgccgagccatcaggattcagagaggcagtggaggagtgctacaccaagctcaccgagctggggctgctcgtgcaggaggtcctgaacgagtgcatggacctcccgccgggcttcctcacggactacaacagcgaccgcagcttcgacttcttggcggcgctgcgctacttcccggcgacggaggaggaggacaacggcatcagcgcgcacgaggacgggaactgcatcaccttcgtcatccaggacggtgtcgggggcctcgaggtcctcaacgacgacggcgactgggtcccggcggagcccatcgagggcagcatcatcgtcaacctaggcgacgtcatacaggtgctaagtaataacaagctcaagagtgcgacgcaccgggtggtgaggaagcccgtgcacaggcactcgttcgtgttcttcttcaacatccatggggccaagtggatcgagccgctgccggagttcacggccaagatcggcgagccaccgcggtacagagggttcgtgtacaacgagtacatgcagctgcggatgaggaacaagacacatccgccggcgaggcccgaggacgtcgtccacgtaacccactacgccatctagcttgcttgcgaatccaaaacaggcttcgagacgcagaaactgcacaaacaagcaacctgcacacaaatggctgtgtcagctcttgttaagattgttgtggtctggccatcccacgcaccatgctatgctatcattaaaatcgagattaaataaacaacaaatccagctatgcacagtcgccgttgtttccgcttttccct

SEQ ID NO: 22161 - DNA, 836 bp, Zea mays
  unsure (1)..(836): unsure at all n locations
  Clone ID: MRT4577_120211C.1
ccggccgggatcggtgccgatgaaggaacttgtcgtcgacgctacattgtcaattgcctagacttggttgcttagatccaacccattcccctagtagcagtctccatatacaggtgctgcctgcccctcaatgagttaaaacaaaacatcaaggccatctttgaccccatcacgacttttagcaactcccatcacaaacacacacaaaatgtctgcttcgttcttctctcttcaaggccaaacggctcttgtcactggtggcacacgtggtattggccaagctgtagccatcggcctggcagaggctggctccgacatcattctagtacagagagacacaacatcacaatcgacgaaggagtcaatcgagaagctaggccgaaaggcttttatttacaccgccgacctatcatcgcaagaatctgttgctgctcttgtgcccaaggtccttgccgacggtcatgagatccgcatcttgatcaactgtgctggcattcagcgacgtcacccttgcgaagtcttccctgacagcgacttcaatgaggttatccaagtcaacctcaactctgttttcactctttgtcgcgatgttggcgcccatatgctaaatctagaaccgtcccccgtcaccggtcgtcgcggcagcatcatcaacttcggctcccttctgacattccagggcggcttcacagtccccgcctacgccgcatctaaaggcgctgttggccaaatgaccaagagtttcgccaacgagtggactgccaagggcattaccgtcaacgcaattgctcctggatacatcgaaactgatatgaatgangctctactaaacaacc

SEQ ID NO: 22162 - DNA, 196 bp, Zea mays
  Clone ID: MRT4577_120212C.1
tgctgtctaacgagtctgggagtgctgtttcaggtttactttatcaaggattgagggcgaaacaaaacttctactttcatccactgacaaatgatgtgacaattgcttttagctcaagcaattcagacaagcttctcatcttcaatggtaaactaccaacatattttgacctgaaggcctcaacaacttttggtta

SEQ ID NO: 22163 - DNA, 128 bp, Zea mays
  Clone ID: MRT4577_120213C.1
ggcgcgcgggttcccgaaagcaggctccacgcagcgcggcgcgcgtcgtcgcctctacccaccggactacgcgcgccacgacgagccggcgagccatcagcccatcaccaacccccccccccggggga

SEQ ID NO: 22164 - DNA, 304 bp, Zea mays
  Clone ID: MRT4577_120214C.1
gggggggcaaaaccttggggttcaaaagaacccataaaatgcctgctttgggggtgattttggtaaaacaaataaatccccacccctggggctgcatgggaatcacggggctgccccaggaagatttccccttttgggggggggaaaaatgcaaactttcccgggggtgccgcaagccttttttcaacagaatcgggggggccccgggaaaaaacaaccgcggcttatttttttttcacccccccgcaacaaggggcttggggcccccccctgaaaaaacaaccgcggcttatttttttttccc

SEQ ID NO: 22165 - DNA, 372 bp, Zea mays
  Clone ID: MRT4577_120215C.1
ggtcgatcaaggtgaagcaaaaacggaatcgaattcggttttaaaattcggcagggcatgcaatggccatttgccgatcttagcaaacacatatcgccagcaataacgctacgggcccacaaacaaaactgggcccttcttgaatacagaatttatccatggaccacttgacaccagctggcatgttgtttaatggactttggctcttgtacaaggaacaattgtaactaggagcacatgcctgtaactacaaataaaaaaaattatatatatcatcatgtgtgtacaacacatattatttatcgggccagatagctccaaagtctccaaaacaatgggaccattaggcatgttctcaagaaggacgaaaac

SEQ ID NO: 22166 - DNA, 610 bp, Zea mays
  unsure (1)..(610): unsure at all n locations
  Clone ID: MRT4577_120216C.1
actagttctagatcgcgagcgccgccctttttttttttttttttttttttttgattcaaagtgaggggctgagcttattaaacaaaggcaaggcgacaaacaaaccggccagtagttgggtcggagaacgctggctagaaattaaacgaacaaacaaacagggagaattgatatatagtaaaatcatggcatcggcgattggattggaggatttgatcaggtttgaaacaagctgctagtggtgggcatcgatcggggtgctggctccctgtcgtctccccgaatctgaagctcctcattccgcatctcaacccactttcgtccttgccttcgtccctgcctgtcgtcgatcgtcaacccacataacaagaacatcagagatattccggggctggcacctcccgccatgaacaggaggctgctgtccatcgacgccttaggactatgagcgctgtgaatggctgctcccctgcagcacagcgctgcgcagcgcatcagagttctcttaacgagccacgatatatgatttcacgattcttttgtgcctgtatattgngtttatgttgtttgcgtccgcccattccttccctattgcattggtaagtagtag

SEQ ID NO: 22167 - DNA, 3179 bp, Zea mays
  Clone ID: MRT4577_120217C.1
gccggccgggccggccggtcgcaacactggttcacgtccgtccacctctctccgcctttcctcttatcctcccgtctcgcgccgtcgcgcgtctcgggtctctcttctctctctcggctctcgcctccctcccggtccgggtcgctcgcaggtcgcagccaccagtgcatttttatgcgccgcgctggtggttttggggcgcggagtccatatccatggtcatggacgctggcctgcacgagccgtgcgcgctgctgccgggatccaagcgcgacagccacatgctagtctacccccaaatcgccgccgccgctaatgggttcacggcgcaggagctcgagtcgctgctgttcctgtcgcctgatgggattactttggctgcgggcagtggcggtggcggcggcggcggcagctatctgaatgtcgcgcctaccactgtggtcccgcccgccccgaccaaccgcgcgtcgccgccgagggatgtgtccgccgcgccgccctcggtggggcagccggatgattcggaggcgttctcggacatcgtcctgggctacatcaaccgcatgctcatggccgaggacatcgacgataagttcgagcactacccggagcaccccgcggtgctcgccgccgagaagccgttcctcgagatcctcgccgagcggccctcgagctccggtggcagcgcggtggagagcccgggcggcagcagtgtggggaactcttgctacagcgcgcgctcttgcacctgcgccaccgccacggcggcgtccgacgcctttggcgccgtgctgacgccggcgctcgacttcccgtcggccgcgttcctgcagccaccacagctgtaccaggatctaagccctgagggcagcgtggtggatgcaggcggcgcgtggccgtacgactcgacggaattctaccagctgcacagcaacccgtcgtcgttcgcgtcatccaacggcagctgtgctacaatatcagacggctttgagtcgttgctgagctcgcctggtgtcatgccagatgttggcttcgccgattttgcggtgcagagccagcaggctatgcagttctgccgtgggttcgaagaagcaagcaagtttctgcctgacgagagtaagcttgtgattgatcttgagaagccagcatctgttacaagcttggtggctaacatcaaaggggagaacaggtttgcagaggtcaaggcagagaaggccgatgttcaggcagaaattcacagaggaaagaagcatttctatggtgatgacttggatgcagaggaagggaggcgcagtaaacattcagcacccgctatcgacactgatcaccttgtgcgggagatgatggacaaggtcttgttgtgcaatggcgagacatgttcaaaaggcgtcaaggaactccgtgaagccctgcagcatgacgtggcaaagaattcacacggggttcatggaaaagggtccggacatggcaagggccgtggcaagaaacagccgaagaaggaggtggttgacttggagactctcctcgtccactgtgctcagtctgtggccaccgatgatcgacgtggtgcaactgagctcctgaagcagatcagacagcatgcatcgcccaatggcgacggtgaccagcgtttggcgcactgcttcgccaacggccttgaggcgaggcttgctggcaatggaagtcagatttacaagtctcttataatgacgaggtttccctgcaccgatgtgctgaaagcctaccagctttacttggcagcttgcccattcaagaagatctcccatttctttgccaatcaaaccattatgaatgctgtggagaaggcgaagaaagtccacatcgtggactatggtatatactacggctttcagtggccgtgcctcattcaacggctctctaccaggcctggtggccctccgagactccggatcacggcaatcgacacaccgcaccctggttttcgcccagcagagcgcatagaggagaccggaaggtatctaaaagattatgctgagaccttcaatgtgcccttcgagttccgagccattccatctaggttcgaggcggtgcagatagaggatctccacattgccaaggacgagctgctgatcgtcaacagcatgttcaaattcaagacactgatggacgagagcgtggtggctgagagtccaaggaacatggtcttgagcacaatcaggaagatgaacccacatctgttcattcatgggatcatcaatggctcctacaacgcaccgttctttgcgtctcgcttccgggaggccttataccactactccgccatctttgacatgctggagacgaacatcccgagggacaacgagcagaggctgctcatcgagtcagcactgttcggtcgagaggcaatcaacgtaatctcctgcgagggcctggaaaggatggagaggcccgagacatacaagcagtggcaggtgaggtatcagagagctgggttcaggcagctcccgatcaaccaggacatcatgaagcgtgctcgggagaaggtcaggtgctaccacaaggacttcctcatcgacgaagacaacaggtggttactgcaagggtggaaaggacgcatcgtgctggcgctctcaacgtggaagccagatcacaggtcttcctagctcctcctcgagggcggctacatggttgcagatcgagcactgcactgtagatggatggaggcctgttcgtatctttggatgcttgggctggttgttcctgggatgcaacatatagctaggctaggctgtgctattcgaactactaaagcatgttttgcactgtctttatatagtgatgccatcaagggtccctgtatgtcatgttaggttatggttcagttttggacaggaacagttagtgcattctttgatggaacagcaggctaggtatgttagttacgcacgcggtagaccctagggttgtttcatgcatggatcagtcttatggattcttgtattatatttcttcccccattaaccagtgctgtcaaagttttgggcttctttggtaggtaggtagtaggtactacaaactttcttgcacctccatccgagataggcaagcaagtgataccatcgtggcccgattaagtttccagtcctctgagcgagaaggtgagcagagctagctaaccgcttctgtatcttgcttgt

SEQ ID NO: 22168 - DNA, 1379 bp, Zea mays
  Clone ID: MRT4577_120218C.1
ccgatgggtacctcgttgccggccggggcggccgtaaaatcgtcttgccttccatccttactctatcccctctcaaccttatcttggcggcggcgcaggcgcaggcgagcggccgtccagtcgcgcgggcagcagggggcggccgtccgtccaggcgcaggcgagcgaccgtctgtccagcgcaggctagcggccatccgtccagcgaactgcgagcaggcgtccgtccaggcttccatccagacgagcggcagaacttttctacgcacaacacattccaagaaccgaaaatggagagtgaaggagctggtgagcactttgtggaacaagctgatggtagtggccatgttgtgtggacttctgcaatgtccgcttacatgctcagtaacctagcaagccttgtggctgaagggatcaggacatcaacaggcttcaagaaagttcaccttaacatgtgtgctaaggctctaaatgactatttcaagatgaagctcactggagaacaagtgaagaaccatttgaggacatggaagagaagatatgcgaagataaacagacttaggaagttaagtgctgcttcttggaacgaagataactacatgatcactcttgatcatgaacattatgcaaactatgtgcaggatcacaaatctgatgctgagtttttaaacaagcctttggagaactataaggaaatgttcattgtctttggaaacaatatggctacaggaaagtatgcaaaaggatcaagtgaagctctaggtactgaagatagaaacagtatggctgaaacagagattgatgagggagatggtaatgctgttcctagtcctatagatgatattggggcttcatcctcagctcctagacctaggaagaaggcaaaggttactggtaatgaagaggcagggctgattggagcattcaaagatggtgctgaaaggcttgcaatggctattgagaaggctggttcagatgacctaccacctgacttgcttcaaacattgcaaagtattccaggttttgatgacacacacaaggccttttactttgcatatctagtgaaaaatcctggattggcaaggcagttccctactctcccattgacatatcagataagtttgcttgctcgcttcgttagtgagaaccttccttagattatgaggaccaggaattaggactatgctggaggttaagtggaaattagaactatgttgttcttttgttatgtaataatggctttgctatgtcgaaataccgggtttgttatgaaatactgggtttgttatgaccaacacggatgctcggtttgtttgttttgaaatactgggtttgagattcatggtaatggtgtatgttcagtatgtttgttttgaagt

SEQ ID NO: 22169 - DNA, 470 bp, Zea mays
  Clone ID: MRT4577_120219C.1
caaacatgttagctggtttccccatcttcttcccattaagaaaacccatctacgtgccggaagggtctcctatggaagtgcacttctggtggtgctgcgcccccacaaaggtgtggtacgagtgggctgtgactacaccgaccccgtcgccgatccacaacagcaatggccggtcctattgggttggtctatagtaaggcaatcaagatggtcgctttgtgttgtaacagagaagaaaaaagaacagagagatgatagggtccagttctatttgagccggatgctactggtttctgcccggaggagcagatcaaaggatctgtaacgcgttgttatctgaaaggtgcttgacctccaacgttgcctactcgattttgatagttgtagcagtaaaatttcttgtcttgcaaatgtttcttgttccgacaaatatccttttcccccatctatatcgctcttgtcaactccaa

SEQ ID NO: 22170 - DNA, 973 bp, Zea mays
  Clone ID: MRT4577_12021C.1
aattcggcacgaggggttgatgaagcccaccggttgaaaaattgtgaagcatcactatatactacccttttggaattcagcactaagaataagctgcttatcactggaacacctttgcagaacagtgtggaagagctttgggcattacttcatttccttgatccagttaaattcaacagcaaggatagttttgttgaaagatacaaaaatttgagttccttcaatgaaaccgagcttgcgaatctgcataaggaattgaggcctcatattctaaggcgggttataaaagatgtcgagaagtctttacctcctaaaattgaacggattctacgtgtcgagatgtcaccccttcagaaacaatactacaagtggattttagagcggaatttccagaatctaaataaaggagtccgtgggaatcaggtatcacttttgaacattgttgttgaattgaagaaatgctgcaaccatccatttttgtttgaaagtgccgatcacggttatggtggagatagcattggcgatcggaataaagttgaacgtattgttatgagtagtgggaaacttgtcttgttggacaaactattggtgagactgcgggagactaaccatcgtgtgcttatattctcacagatggttaagatgttggacatccttgcagaatacctctctcttcggggatttcagtttcagaggcttgatggtagtacaagagcagatcttcgtcatcaagccatggaacactttaatgctcccggaagtgatgatttctgttttcttttatccacacgtgccggaggacttggtattaatctagcaactgcagatacagtgataatttttgattcagattggaatccacaaaatgatttgcaggccatgagtagggcacataggattggccaacaggagacagttaatatctaccgcttcgtcacatgcaaaagtgttgaggaggatatttggaacgcgc

SEQ ID NO: 22171 - DNA, 582 bp, Zea mays
  Clone ID: MRT4577_120220C.1
cccctctcaaccttatcttggcggcggcgcaggcgcaggcgagcggtcgtccgtccaggcgcaggcgagcggccgtctgtccagcgcaggctagcggccatccgtccaggcgaactgcgagcaggcgttcgtccaggcttccatccagacgagcggcagaacttttctacgcacaacacattccaagaaccgaaaatggagagtgaaggagctggtgagcactttgtggaacaagctgatggtagtggccatgttgtgtggacttctacaatgtccgcttacatgctcagtaacctagcaagccttgtggctgaagggatcaggacatcaacaggcttcaagaaagttcaccttaacatgtgtgctaaggctctaaatgactatttcaagatgaagctcactggagaacaagtgaagaaccatttgaggacatggaagagaagatatgcgaagataaacagacttaggaagttaagtgctgcttcttggaacgaagataactacatgatcactcttgatcatgaacattatgcaaactatgtgcaggatcacaaatctgatgctggggtttttaaacaagcc

SEQ ID NO: 22172 - DNA, 2177 bp, Zea mays
  Clone ID: MRT4577_120221C.1
ccggccgggattcttatcttggcggcggagaaaagtgcggcgcagacgcaggcgagtggagcaggccgtccgtccgtccgtccgtccaggcgtccagtcgcgcgggcagcaggccgtccgtccgtccaggcgtccagtcgcgcgggcagcaggccgtccgtccgtccgtccgtccagccgtccagtcgcgcgggcagcagacgcagacgagcggtcgtccgtccaggcgcaggcgagcggccgtccgtccaggcgtccgtccgttcaggcgtccgtccaagcgaactggtccaatcgttcagcgggcgtccgttcaggcgaaacaatatggctacaggaaagtatgcaaaagggatcagtgaagctctaggtactgaagatagaaacagtatggcccgcgccccacgcgcaagcgcgccgtcgtccctctagctactccacccccgccgtccgtcacccgggcgccagcgcacgcgcatgcgagcggccttccagtcgcgcggtcggccgggcgcgcaagcgcggccaggcccaaccgagtgtccgcctcaccagtgcctgctaccggcaattcgtcgtgcaaactctgcgcaggcgtccgtccaggctcccatccagacgggcggcagaacttttctacgcacaacatattccaagaaccgaaaatggagagtgaaggagctggtgagcactttgtggaacaagctgatggtagtggagatgttgtgtggacttctgcaatgtccgcttacatgcggagtaacctagcaagtcttatggctaaaaagtggatgagtgatacaacatgtgtgaacatgcttagacttagtaggtctagtttctttcgcttttgtaaggcctttagaaacagaggtgtacatgaagatacaaaaatcatgtgtgttgatgaacaagtggccatgtatttgaacactttgggacagaaccttaggaataggttggtgggaacaaattatggtagatctggtgagactgttagtcgctacttcaacaaagtgcttcgtgctattggtgagctacgagttgaacttattaggccaccatcattagagactccatccaaaatagcaggaaatccaagatgggatccctactttaaggattgcattggagctattgatggcacacatataagagcttcggtttccatagatatggaaccttcatttcgtggtagaaagtcttatgcctctcaaaatgtaatggcggtcgttgattttgatcttcgattcacatatgtcttggctagttgggagggttcagcacatgatgctttagtactaagagatgctttagagcgagagaatggccttcgtgtaccacaaggaaaattctatctagtggacgctggatatggagccaaacctggatttttgcccccttttcgtgctgtccggtatcacttgaatgaatggggaaataatccggtacaaaatgagaaggagttgttcaaccttaggcactcgtctcttcgtgtcaccgtagagcgtgcatttggttcactgaagagaagatttaaaatacttgatgatgccacaccattctttccattttctacattatgaaacatagattgatgagggagatgttaatgctgttcctagtcctatagatgatattggggcttcatcctcagctcctagacctaggaagaaggcaaaggttactagtaatgaagaggcagggctgattggagcattcaaagatggtgctgaaaggcttgcaatggctattgagaaggctggttcagatgacctaccacctgacttgcttcaaacattgcaaagtattccaggttttgatgacacacacaaggccttttactttgcatatctagtgaaaaatcctggattagcaaggcagttccctactctcccattgacatatcagataagtttgcttgctcggttcgttagtgagacctttccttagattatgaggaccgggaattaggactatgctggaggttaagtggaaattagaactatgttgttcttttgttatgtaaaccatgaccaatactttgttttccaagtactgggattgaaataatggctttgctatgtcgaaatactcggtttgttatgaaatactgggtttgttatgcccaacatggatgctcggtttgtttgttttgaaaaactgggtttgagatt

SEQ ID NO: 22173 - DNA, 645 bp, Zea mays
  Clone ID: MRT4577_120222C.1
aattcggcacgaggggggttttctcgacctgtgtgagggcttattcttgatgtaatatttgtgggctctcttacccgtaggtcgagtttttttgtatttgtgaatgaaagggctgtaatataggctccttttgagttacttaagcagattcatggtatgagttgtccagcaaagtagcttttccttgctcttgtattttgttacctttttttttgctgctccagcaagtcattgattgacattactgaagcatattaacatgcattggcatgtaaattttatgtcgtgctgtatgcatgtgtttcacaccgttcaacaacaaaagtgggaggtttggcagatcttaccgcttttctagcttgcttggatgcattctgttttacataagtgtcttacatgagtttattttgcttcattcaggcaactgatttagctgggttgcttcatctggttaagttctataaaagccgccgctttgattcagatattggaatgcccaggccgaacgacttccatgatgtcccagagtacttcgttcttgaggcaatcccccatgcagtagctcttgttagatcatcggacaagaatagccccaaaggagccattgagtttattcttcagctactgaagtacaatgataacaac

SEQ ID NO: 22174 - DNA, 349 bp, Zea mays
  Clone ID: MRT4577_120223C.1
ccccttcaacattccccagttcattcaaaaccaaacattccatgctcgacaaacacggggggggtccaggtggaacgaaaccaaaaaagaagaacgggttctagctttaacagcatgggcgacggttactgttttaacctgcaacctttacagaccaagcccaaccaaccccagacctttggggggtcaggtcaggtcacgggacctgttgcccccaattgtacctgtccttggggacaaacaccggtttgttgttttgttgggggatgatcacgggctggcccatcgggatgccctggttttggggggctgaaaacccccgcggggggcccttggatgatgacagccc

SEQ ID NO: 22175 - DNA, 353 bp, Zea mays
  unsure (1)..(353): unsure at all n locations
  Clone ID: MRT4577_120224C.1
ttatgttagcactaactaaccaattttgaggaatgaagtggtgatagatcaactcagtccattacactaaccatacaaatagtgggaaattagaaatggagaaaatgagggactagcctagttctcaaaccaagcaccctgttagagaaacatctcatttggggcaaacaaatagtgttactcaagcgcacacagagtagcttaaactaaacagtttcacgcaggtcttgcatccacagcttaaagactccaaagtccaaaccttcgttctcaaatgggcctaaatgggcttgaacagtntcattgcacttgataactttgtcagttagtgttcctttttttttccaatttta

SEQ ID NO: 22176 - DNA, 198 bp, Zea mays
  Clone ID: MRT4577_120225C.1
ttcccgcgcgggccgcccccattgctcttcagggcaagctgcacttggattcctttcttcttggcgctttgcaggcccagcttcggcgtaaagtcagcaggcacaagctcatcattattggcagcatcaaaaaaaccattttcatcatcttcaggtggggctaggccatttttttcaggggggcttttttttaccggg

SEQ ID NO: 22177 - DNA, 613 bp, Zea mays
  Clone ID: MRT4577_120226C.1
cttgattctgtcctagctcccacctccaccggagatcccagcaagacacatgcctcccagtaagcccgagcctaagaaggaagcagccaaggctgccccagcccctgcccctgccccagctcctgaaccccccaaggaacctgcctttgatcccaagagtgtaaagatagacttcactgctgaccagatcgaagagttcaaagaggctttctcattgtttgaccggacaccgactggagagatgaagatcacctatgggcagtgtggagacgtactgcgggcactgggccagaaccccaccaatgccgaggtgctgcgtgtcctgggcaagcccaagcctgaagagatgaatgccaagatgctggactttgagacgttcctgccaatcttgcagcacatctcccgcaacaaggaacagggcacctatgaggactttgtggaggggctgcgtgtgtttgacaaggagagtaatgggacagttatgggtgctgagcttcgccatgtccttgccaccctgggagagaagatgactgaggccgaagtggagcagctgttggccgggcaagaggatgccaatggctgtatcaattacgaagcctttgtcaaacacatc

SEQ ID NO: 22178 - DNA, 574 bp, Zea mays
  Clone ID: MRT4577_120227C.1
ggggagcttcctgacgacgatcagcacgacactgagctccccgttcacgcagcgtgacacccaccaggggaagcatgagccggtgcagctgaactcaggtgtctaccccgacggaccgccggtcccgctccggtccaggaagctcctcaagttcgtcgacatttcggaggtggtaaaagggccacacgacgtcccaggccactggctggtgatcgcggcgaagcttgtgaaagagagaaggaagatcgggatccatgttaagtttgcactgctgggctatgaaggcctgtcgcagaatgatagtttcatgggttgagtctgtacataacaacagctggctgatcttcgtagatttcaggattttagaaaaaagcataggatgaggatttgttattagttttttttgggagggtcgacaggaagtgtatagagggcagtcagactcacagtaaaaccaatcacggctgtgttgagttgttccgtgaattagagaccatacttgtaaattacttcttttttaaatcacttcggttaagttactctcttaatattctcatttatatttatctgacgc

SEQ ID NO: 22179 - DNA, 466 bp, Zea mays
  Clone ID: MRT4577_120228C.1
agggggggggcacccaaccccaacttaaactggtgccacaaaatatttggggggggggagggggggaactgtccattttttgtccttccaaaaaaaatgggccctttattggttttccccctccctttttttttactaaaaaagggtgttcaaaaaggggccttggcaattttcctgggggctttttcggggggggggccctaccaaacgcataaaaattgggggtttaaaggtttttttaactttttttttttggggttttaccgtccttccaggggggttgtgccaaaaaaaggaattgttttcccccccccacaatttttttccgtttttgggggcccattttttttaaatttttttttggggggttcccctttaaggggtcaatgttggaaactaaatctttattttggttgcccctgggtttggaacccaattattttttttgttcaaaaccccttctaaa

SEQ ID NO: 22180 - DNA, 376 bp, Zea mays
  unsure (1)..(376): unsure at all n locations
  Clone ID: MRT4577_12022C.1
aaggccaaacctcaaactttataagggttcaagccatactggtgcaaaaaagttttgggtccaacacagaggacccaacggggcctttaaaccaacgaagccacaacccctttttttgacccccaacccacagatgttttttagacgacgacctccttttagggggcccccagggggccccagacgacgcaaatccccaggtcccgccgccgcttaaatgaaccatggtttactgccccccccggggggggggcccccgggggagagggctctccttttgggtgttggngtctgctggggggcggccctcctccagttgtttgcccgcgaaaatcacaccctgctggtttgggggggtgccctttttggcctgggt

SEQ ID NO: 22181 - DNA, 508 bp, Zea mays
  Clone ID: MRT4577_120231C.1
gaacagacttgatctgcctcttctacgatgcggccgtctcgtaaagctcgttccccatgtcttcatcagactccgcgagaggaggactacgactcctcttgtcgtcggctgctgcgtggagtgcgtagctaatattgcatgcagcggcgccagcggggctctgttatcctggagtgttcatgttcatagactcgatggtcgacacgatgaactacccgctcgtctacggcaacgactctggatctgatggggacgagctccgtgcaccctagcggaagagcttcttccaccgtgtcaccgcttgaagatccatggcgtcgtctcgtgttcgacttcatcgccggacactgtgaatctcccgatcgggtcatcgcatctgaaccgacgatgcgcgtagaacttctcgtgagatgacaacttctcccacggcgccaacacttgactcaacccggactatgtccgacgcaagataccgctaccccttgggaaacttcgtggacctcgacat

SEQ ID NO: 22182 - DNA, 251 bp, Zea mays
  Clone ID: MRT4577_120232C.1
ttttagcagaagcccagcccactttattgccgaattaacttaaaaatgtccagcacttcacatacattaatgttgagaggacaaggtccccccttagggagctagctggggctaattgccaaaatgattgggcctcccacgccgggtttctaagggcaaaagcggcccggcagaatgattgcccaatcattttctgttgaattaaaaaaacaggggcacccggcatggattttgggggggcttttttttaa

SEQ ID NO: 22183 - DNA, 1726 bp, Zea mays
  Clone ID: MRT4577_120233C.1
cattgggtacctcgaggccggccggggagttggcacccccgaccgggaggcagtccgggacacacggcccccggtttctccccgttgctgctgtcccgccggcgtccagtctcgactctcgagagaaggcagcgccgcagcggcggggtgcgtccggtgctctagctgggctcgcgctgtgacctgggagctctggaggcgctgcaggcggtcgggcgggtgatggggtgggcttcctgctgcaagcggtcggacggggctgaacctggcaggaggaggaggaggaggaagaagaaggacacggcgtggcggatcttctcactcaaggagctccagtcagcgacgaacaatttcaattacgacaacaagctcggcgagggcgggttcggcagtgtgtactggggccagctctgggacggatcacagatcgccgtgaagaggctcaagagctggagcaacaaggccgaaacggagttcgctgtcgaggtggaggttctggcacgcgtgcggcacaggagccttctaagcctgcgcgggtactgcgccgaaggccaggagcgcctgattgtctacgattacatgccgaacctgagcatacactctcagctccatgggcagcacgcggcggagtgcaacctcagctgggagaggaggatgaggatcgccgtggactccgcggaagggatcgcctacctgcaccacagcgcgacgccgcacatcatccacagagacgtgaaggcgagcaacgtgctcctggacgccgacttccaggcgcgggtcgccgacttcggcttcgccaagctggtcccggacggcgcgacgcacgtcaccaccaaggtgaaaggcacgctggggtacctggcgccggagtacgcgatgctcgggaaggcctccgagagctgcgacgtcttcagcttcggggtcacgctgctggagctggccagcgggaggaggcccgtggagaagctgagccccaccacgagcgcgaagcagaccgtgacggagtgggcgctcccgctggcccgcgccaggaggttcggcgagatcgccgaccccaagctccagggcggattcgtcgaggaggagctcaagcgggtggtgctcgtcgggctcgtctgcgcccaggacaggccggagcttcggcccaccatgtctgaggtcgtccagctgctcaagggagagtctgctgagaagctcgacagcctggagaacgactgcctgttcaagcctggtggtagctcgttccagggctcggactgcgtcggcgagggcgaggggaggagccccggagcagatggagggatacaggaggcagttgattcgagcgagacagtatcctcagcaagctagtgtgtggtattggcagtagctggttcctcagcaagacagcagctccctgcctctgggagaaacgtgtgttgatcagtgtattttttgtgtggttaatccttgctattagcgagttaattcgggagtttcattgcccagttctccaatgtgatatcatctatcgtgttggcatggttctatcttctatggttccagatgttcactgcactggtgttagcgtttagctacttcagtgcatcaatggttttgtgtgcaagtccgtaataatacatttttgaggttttcatcatgcaaggttgatttcttcgagcacgagcttctagatagaccgcgggctccgcgatgaagtactctaaaaaaaaaaaaaaaaaaaaaa

SEQ ID NO: 22184 - DNA, 448 bp, Zea mays
  Clone ID: MRT4577_120234C.1
ggcacaacgacgcgtcagcatttttggatttttggattcgtttgttgttggtctggttgctcaaggtgtgaaatggcagtagttgaagataacagagtctttgttggtggtcatccttggtcagttagtgaagaagaccttcgtgaaactttttccaaatatggagaagttgttgatgcaagggtgaatatccgtgttccttttgttttgggttaaacttggatcccttgactacctgcacctattctcgggttcccttttatttgccccatagttagtgtcactaactagtcgcatgttactttgagagggtagagagcttttcgagttactttataactgttcacacttgggaaccctcgaaaatagtgtgaatgatatgcacttgggttgactagtgtacaccaaagttgttgttactatatagtgctcacaactgtgtcgttgc

SEQ ID NO: 22185 - DNA, 473 bp, Zea mays
  Clone ID: MRT4577_120235C.1
tcgacggtatcgataagcttgttcaacatacaaacttacttcggttcctaaaatggcaaaaggacctattcgtcaattattttgtttttcactcgatctacacctgaactttgtttttcttgatctataatatcacatttaacttatttaatcatcacattattcaatatagtccaaaaatgcattatggaaaaaattacatttttgctcctaccttttcaacattttacaatttagtccctagacttgtaaaatgaatttttttcaatttcatcacaacccaagtctagcaaaatattatttgtgctcataaaaacccatatttttcatttattcacacttttgtacacattttatagacttttacaaataagtccctatttaacgtttttatcaaaaatcacttgacaaacgttgtttaactaacaatgaacatgcattttctaccatcaaacaccaaaatacaaacatat

SEQ ID NO: 22186 - DNA, 278 bp, Zea mays
  Clone ID: MRT4577_120236C.1
cctgagtagcgtggtgtgttgtttcatgaagtgaacttcgtgtgtcagcagtccgtacagttaagtctgaactctttctcaacctcacttccgtctctgtgatgtttatgctgcatttccttgattcccacccccttctctgaaggttttgcgtcctggagagagttgtgaaaagcaaggaaccctagactggcttttcttgctgctgctggaactacggttggtggttcctgactgattttatttattttcgtgttctcgctcccgtgatatcccgc

SEQ ID NO: 22187 - DNA, 741 bp, Zea mays
  unsure (1)..(741): unsure at all n locations
  Clone ID: MRT4577_120237C.1
gcttccatccccaacctaacttcgtcagttcatcgacgcgacaccggcttaccagtccagtccaggatccaggaagcaaacgaagcgacaacagcgaaccagcaaccgaaagcatggcggcactccatccccagcgcctcttcttggcccagccttcctcttccccttcgacttccacagcgcggccacggcctcgcccacgacggagcggcgccgctacctgccgcgccgccctgcgcgtggcttctggcattcacaccgcgcaggacaacctcagcctcaagctcggatggatcgaggcgccgcgcgtcccggcctccccgtcgaccgacgtgtccgtcgagaggctccgcgccatcgcggaggcggcggcggaccgcgccgagatgcacgacatcatcggcaagcagcgcgacaactggaaccacctgctgctccactccaccaactccctcacgctcgccgcctccgtcatggccgcgctcgcgcccgccgcgccgaccatggtcgcgctcaaggcatccgcgggggtgcttctcgccacggcggcggtcaccatggcggccgtcaacaagatccagccctcgcagctcgccgaggagcagcgcaacgccaccaggctgtggagggaggtcgagcgcgatgtccgtgccgccctcgcgctagccgcgccgaccaccagggccgacgtgcaggaggccatggaccgngtgctcgcgctcgacgcgcctacccgctgcc

SEQ ID NO: 22188 - DNA, 621 bp, Zea mays
  unsure (1)..(621): unsure at all n locations
  Clone ID: MRT4577_120238C.1
ggccgcttttttttttttttttttgttttttttttttttttttttttttttaaaatcaatccagctagtacgcatgcattatattacgtagtccgtacgcaaaggtaggttggtgtggaagacgataaacattgtagagagtggacatgatctggcgggagctacacaagcgaggatagcaaccagcgtaatacagtgaagtggatattcgactcgataggctagctttatattaggttgacgggggatctttgcgcgaccatttccggcttcctttgatgcgggcttcgcagtnaaaacgccgtaggtttctccggcaccggtgaggggtgacaggagtagggtcttcgccttggccgcgttagaggtacctccctcctggggagaatcttgggtggcggtcgaccgccgcttcggacacctcgttcttcggtcgaagaacgaacgttgtgcgggaaagccgcgcgtctgttctttgaatgtagatggtgtccgccggcctgtgacggtgaacttggctgggcttcgaagacgagcctcgccagtcgccttgcgcccagacagaaccttcctggggccatggccaccgccggcaagcagggtcgctggcagccattgcca

SEQ ID NO: 22189 - DNA, 295 bp, Zea mays
  Clone ID: MRT4577_120239C.1
tcgatggaaccccgtttattggcatactggggggggccttcagagagatcttgctggcctggatcagcttacaggagatcatcgccgtccagaactacctatactgcttgggcatgatcctggagttgataggcttcatcaagctgggggtggaccatacaaacgcctgtcggccctacaagatccctctgggcaccattggcgctatccttatgatcatcccacctggtctcttgatcattgcggggatggcacttaggtgctacaaggtgatggggatgagaatcctagacat

SEQ ID NO: 22190 - DNA, 404 bp, Zea mays
  Clone ID: MRT4577_12023C.1
caggaatagcaaaaatatttgttggcgagcttattttaacaggcaagttcagaataatacgttggcttttttttcctatggagtccgattttctacagcgtagctgaaatgtatattatgtacgttgtctaaggatgataaccaacatccaactgtaagctcacctagtatgatcttgcttttttagctggcttctgcattctgtggtccattttcttctttccacctcgctacgatccaaggaacttgctagcagaatttgtaggttccaacagaagggatggctttcttggttggtgctttctcttgacaatttcactgtgtattgcatcaagagtagtcatgagtgagaggaaggattcaggacccatcaagccttgtcacatcatggaggcatacagaag

SEQ ID NO: 22191 - DNA, 1059 bp, Zea mays
  unsure (1)..(1059): unsure at all n locations
  Clone ID: MRT4577_120240C.1
ttttgaaacagctggagtacaattttcatgagcggctactttgttcagccctacagtttgatttggccagatatataaacaaaacttccctatacgatatccaaagcaatttactgggctaaattcgggtattgggtgccaaagcagtaacatattcccttttaggggcctttttgcttttttttttttgatttgcaacaatctattgaaagacttcaagtttgaaacaaaacatcccactcggtaatccaatccaattcgcaaagcaacgttccagctcatatcaacaaactggtaacttattcccactcatggtcctacatgcagctgaggtaaaggtaagataatggtgatctgtgtagcacaacgcaagtacacaacacaacacagcagaccccagatccagatcactacaaatgcgaagcatggggttaaaagacagagacaaagttgtaacgccttcggatcgtcacttattttttcgcttctttccgggcttcagcttgataacctcgtcaatgtacaggatccccttccccttgtacacctctggagccttagagctccggatggcgccggcgaactggtgcaccctgtccttatcgatgccggtgcagcagattatgttgggtttgaagcagaagacacggacagctggaggagcggtgaactgcacctcatggctgaagcccagtttaaggaacaactcacggccttggctctctgacctcgctttgaagccgaccccaacgagcttcaggaaacggaaaaacttggcttccattgagattaaatggcgagctcttcaaacagcctgcaggccggctgctggcgccgccgcgccggggatggaggaggggacgatgccgccgtatcccccgtcaccggtagcgcgccgccgtcacctgttccgctagggttcctccctccgcggctggctgcctggttcgtgtcgtgtgtgcctgggcgttgctctgttgcctgccttttttgattttttttttttttttttttttnnnnnnnnannnnnnnncccggccggcctcgaggtacccaatg

SEQ ID NO: 22192 - DNA, 550 bp, Zea mays
  unsure (1)..(550): unsure at all n locations
  Clone ID: MRT4577_120241C.1
atgtcgagaacgcggccttagcgtgatatctgggctctcgcatcgatgaagaacgtagcaaaatgcgatacctggtgtgaattgcagaatcccgcgaaccatcgagtttttgaacgcaagttgcgcccgaagccttctggcggagggcacttctggctgggggtggcgttgcagcttcttcttcggtttcatagatgtccgctcccatcatcacggagtccttgagttcacatcccgagctgacacgtgagcttactccaatcacagaatgctcgatgttgcattctgtcagntcgcaaccttctgtgataaatgcatatttcctnnncccnnttctcttttttccggtccttttcttccctcctctttcntctnnttccttacacttgtccacttgcgtcggaggcatgcatcgttgtgctgtgctgaaaggtgtttttgggtcgtgttttttaaacttggacggctgctcagtgtgggccttgtttgcgcctttttttgatttggttgntcccccatcctcccaatagcccgtaaaaatgcttgcctg

SEQ ID NO: 22193 - DNA, 762 bp, Zea mays
  unsure (1)..(762): unsure at all n locations
  Clone ID: MRT4577_120242C.1
gctttccggggaggtgnctgctgctgcaaggcaataataataatggcggccaagcagaggcgcagggctctcgtggagacgaacgacgacaggtagcttggaaagagcatgacggtgaatgtagcaaggagaagcagccgacgagcggggagatggtcacgagcaaggcgagagcgagagaaatggtagcagggaagaaaaggagcacgctgaagccaaggtcggtggcctcgctccttagactgctcgcgtgcaagggcggctttgccaccccggttctggaaccgaggagccctttcccccagtcgagaatggagaagctgctcaaggcgatactggagaagaagatacacccgcagaaccccagcacggctgcagcgaggcggcaccagctggactggaagctagacgagaaagagatcgacgagtgccttgacgacgcgctgcgtgacctcgacgacgacggcgccaagtgggtcaaaactgactcggactttattgtgctcgaaatgtaaaggcccgcgcgtgtgtggttatgtttgtttctttgaggccaggtcccgaagctctctcttggcggcctggtgcaaatatatatatgattattagattatatatgtgataaatagaaggaattaattatgggggtattgtaagcatcatgaggctatcatgtaccatctgtaagtttgggtttatgatgagtcngaacaacagatcctattccatgcctgcttaaaaaaaaaaaaaaaaaagcgggcc

SEQ ID NO: 22194 - DNA, 331 bp, Zea mays
  Clone ID: MRT4577_120243C.1
tttttatgttatatattttttttttattttttgggggggtcactttaataatgggtaggggatgaacgagtgaagaacacaattttgaaccatggagcagtttggaagttttacatgactggaaaaaaaaggggaaagggattagagcttttaagagcactgctactagtaatgttcacataacacggctttgtaataatactggtggtcaccacattcaccagtaggaggtaattcggttgccaacgaggaggcggccttatacaagcccctgagctgcagatagcctaagaattggaaccctgaaaggggagcaagaaacggaattcag

SEQ ID NO: 22195 - DNA, 257 bp, Zea mays
  Clone ID: MRT4577_120244C.1
cacgccttctcggactactcgctccttttcatgttttcggcctggtgctgcactcgggagtcatggtttccctacttgtgggggaagtacagccaccggcgccaccactccaacacggtgtccctggagcgcgacgaggtgttcgtgcccaagaagaaggaggcgctgccgtggtacaccccgtacgtgtacaacaacccggtcggtcggctggtgcacattgtggtgcatctcaccctttggtggtcgttgtacct

SEQ ID NO: 22196 - DNA, 2712 bp, Zea mays
  Clone ID: MRT4577_120245C.1
aatttcccctacccgagggaggaacacacaccgaggaggccgcagcagggcagagtacacccccgcgtttcgggaatggcagtgctgctgcgccccgcggcgatcgcaggcggccggcaggtgtggccggtggcggaggacgaggagggggcccgcgaggcggaggcgtcgtcgcagcggctggtggaggcggtggcgcgcggcgacgcgagggaggccggcgagctgctcgcggctgggcgcgcggacgtgaactacgccggagtggtgtggctcagggcgcgtcgcgtcgcggaggcggagccccgggaggacgccgccgccgaggcgcgggccgtgcacgaggagatccgcgccgacgtctcgccgctcttcctcgcggccggcaacggggacgtcgcgctcgtccgcgccttgctcgcaaagggagcggacgtgaacggcaaggtgttccggggctacccgacgacggccgcggtacgggaagggtgcgcggaggtggcggagcgcgttgagggagggaggtgctcttcgtgtgccaacgaagtagaggaggccgcggagctgtgggtgaggggcatcagggtcgctaccagggcggcgtttggcaagagaggcaaggagtgagtaacgcatggctgcgctctctccggttagagtctgtaggttgcagcgagcgcgtgcttgtaaagagttgtagcgggcgtagagccgtaggggtgctatgtggttcggtgtggggtgcagctgcgctggtcttcagctcgagggctttggcttgccatgatggtttttggttcaggggcatggtgttgtgttgtgttgtgtgtatataggctggctgttgtctcatcgacgtaggtgaggctagcgagcgtgttgctgggtcgcgtccaccggcgaggagctgcgcgtcggcgccggactcgccgaaccttacgacgcggtatggtgcgccgtggagtactacgagtccacgggctccatcctgcgcatgctcctccgtagcgggttcacgtcgactgccgctcacctcggccggacgctcctccaccacgccatcctatgcggcagcgctggtgccgtccagaccttgctggcgtccggtgcagactcggaagctcccgtgaagacgaccaggagcaacaggtccaggccggttcacctggccgcgcgcctcggccagccggagatcctgcggatgctggctgacaggggctgcgacctgaacgcgagggcggaggctggcgacactgccgccatcatctgctcgcgccacaaacgcgaggactgcctccgagttctcgtgtccgccggtgcagatgtcgcgctgttaaactcggctggcgactcgtcggcctccgtcgcttcctctgggggatggaagaccggcttcgaacgggctgttattggcgcgattcggtgcggggccgtcccacgctccagcgaacggagcgtgttctccccgctgatgttcggcgcgctgtgcggcgacgcgaccgcgatggaagtgctgctctctcagccagacgtggacgtggacgagcaggattcggacggatgctcgcccataatggctgctgccaagatgggaaacgtcgaggccttccgcgccctcgtattcgccggcgccaacgtgaagctgagcaacaagcgcggggagacggccatcgggctggcgcagcagagcaagaagagagacctcttcgagcaggtcatgctcgagctcgcgctggagaagggcatgcctggaggcttctacgcgcttcactgcgcctcccggcgcggcgacaccgcggcggtgcgccacctcgccagcacgggctgcgacgtcaatatccccgacggtgacggctacaccccgctgatgctcgcggccagggaaggccacgcgggcgtgtgcgagcttctcatctcctacggcgctcgctgcgacctccggacgccgcgcggcgagacggcgctctccctggcgcgagcagcgctggctacggcggcgttcaacaaggccgaagacgtgatcatggacgagatgggccggcaggcggtccttcagggcgcgcgcgtcaggaagcacaccaagggcggacgcgcgaggcctcacggcaagtcgctgcgcatggtcgctgcggcgggcgtgctccggtggggcgggtcaagccggcgcaacgtgatctgccgggaggccgaggtcggtggcagctcggcgttccagcggcacaggcagaggaagggggacgcgtatgagccggggctgttccgcgtggtgactgcgacagggagggaggtgcacttcgtgtgccagggcggtaaggaggccgcggagctgtgggtgaggggcatcagggccgtcaccagggcggcgtttggcaagagaggcaaggagtgagtgacgcatggctgctctctctccgttaggctctgtaggttgcagcgagcgcgtgcttgtaaagagttgtagcgggcgtagagccgtaggggtgctatgtggttcggtgtggggtgcagctgcgctggtcttcagctcgaaggctttggcttgccatgatggtttttggttcaggggcatggtgttgtgttgtgtgtatatagactggctgttgtctcatcgaagttgctttagctaactggtttgtagtgcgtttctatctgaattatcagtctcctatgcgaaacttctccatttgagttactaattacgatttctgatgt

SEQ ID NO: 22197 - DNA, 274 bp, Zea mays
  Clone ID: MRT4577_120246C.1
cccacgcgtccgcccacgcgtccgccgcagcctccacagccactcacagacccccgcttccagagccttctcgaagctccccgccgactcctccactcgcaccgatggcgaaggtaccaatgcgcgtgctcgtcactggcgccgcacgacaaattggatatgccctggttctcatgattgctacgggtgttatgcctggtgcagaccagcatgctatgctgcacatgcttgacattccgcctacagctgacagccttaatggcgataagacgga

SEQ ID NO: 22198 - DNA, 456 bp, Zea mays
  Clone ID: MRT4577_120247C.1
ccgaggagcttatgctatgatgttcctaggcgatgcccggaccggaaaatggcccagtggttttgggctagcaggagatcaaataggtactggggatcacaaacccaaagcctacaggagggtgactataattcgggttatctaaaccgtgacatggactaaacctgccggatggtcttgaaggttctggatgccatttgaaggtaccggacgggcgagccgatgcgtttaggtctactctgttgatggacttttaagggggccctactacctggttttggcaatgggctacagatgttcaatgattcctttattgcatatgatgcggtggactttttcagcaagcccgcttactgaaggcaaggatgccttcccagtgattatttcccaaggcttaattgttgagtggccttttgcaatcacaaattctaaccttgtggtaaacaaaccccttct

SEQ ID NO: 22199 - DNA, 401 bp, Zea mays
  Clone ID: MRT4577_120248C.1
tatatttgaacaaaaagaggtctggagctctgattaaaaaattggcggtgcaacattaaacgccccgaaaactgctggggggatttcagaatactcggctcacatgaccgacgacacgatacctacccaagttgtattcactggtggataggggacactacaggggctatgttctatcaaagcgaaggccccatccaaaaacccaccaccatgcttactaggggtatgggttttccccaattaccacggtgatgactcttgaagccatgatacccttggatcgtaaacaggcgttgatggctctgcaaggagaaactgaatgaccgtggcagccctattgggcatcttcttggagtaagaaccagaagctccacatcaaaacacatgatgtcctacccccc

SEQ ID NO: 22200 - DNA, 340 bp, Zea mays
  Clone ID: MRT4577_120249C.1
ctgtgcacaaacaaaaatgctactatcagcactctccctgagttctttccctgaccgaccccgaccgcttgcatgcatcaccagcatacgtctcttctaacctacccgccggcgcattatcgttacacgaccgagacccgcactcatcgccataactgcatggccgcttcgtcctcgctggcgctgtctctgctcctcttcgcgacgatgacggcgctgtctttcctgcctccgcgcctataaatgcttacccgcctgttcccaccggtagatgcggcggtgaccaggcctacgacctccctctttttcgtcatacgaatgtgaagacaaaggcgtcctt

SEQ ID NO: 22201 - DNA, 1218 bp, Zea mays
  Clone ID: MRT4577_12024C.1
accagcaccagcagcagcagcaggaggacgatgtcatgcagcagccgccgccgcagcagtgcaactacgccatgaagacggagatgccgccgtggccggcgatggcctacgaccacccgctgctgcagccgctctgcaacgccgccgccgcagcggcggcgcagggctcggcggccacgtccgcgccgcagctgcccgcggcctccgcgcacctgtcggccacggcgctgctgcagaaggcggcgcagatgggcgccaccatcggcggcgcgggctacacccagatggcgggtcccgcgacgagcgccaccgccgccttcggcctcggcctcccgggcctgcagaatgcccagcaccaccacccgcagcagcaagatggcggcggcggggtcatggcggccgggctcgcgaggacagccagctcccacggccgcggcggcgacgaaggcggcggaggcggatcaggcgacggcatgaccagggactttctcggcctgcgcgccttctcccaccgcgacatcctcggcctcgctggcctggactcctcgtgcatgggcgccatcaccgccagcgccagcatgggctgctacgagccacagcaacaacatacacagcctcaggcgccgcagcagcagcaaagcagcaacgaaccatggcacggcatggggcagccatagctagcttaggtcgtcgctacccattctggcaccaaagctactttctgtgcgtcttcctctcatcagccgtactacatcgccgtcgctgcttcaattctgattatcgctgccgccgcgcgcggtgcagaggcaaaactagctacggccggccgcccagagtgcaacgcgtggcttttgagtcgggtaatctcatcgtctcccgcccctcacttcggtcatcttttgctcctgttcatgctgtcatcccgtctgaacttttaaccacgcaatgcaagcaagcctgcaagctaggatgaggatgatagattggattggataatacacaagtacgcagggagttgtgtaattttttttcaggttggggaagaagatcgaccaacatgtaaactaataagctcggttcaattaagcagatgggaagaacaccatagctacgtgacagtaataataatacatgcatgcgttcatcgtcaaaaaaaaaaaaaaaatacatcaggggatgtgtgcaattttggtgatataaaagttctctttttttccc

SEQ ID NO: 22202 - DNA, 197 bp, Zea mays
  Clone ID: MRT4577_120250C.1
agggaagctaaatttttaactaactgggcaaacccaacaaaaaaacagttttacctaaaagttttacgggttgcaaactcatttttttttttgcgtaagtacatggatcaagggttgtttttttgacatgggtaacgtttaatgatctaattcctaaggcagggggggttgttttaggcaaaatagcgggacatttt

SEQ ID NO: 22203 - DNA, 727 bp, Zea mays
  Clone ID: MRT4577_120251C.1
tggctgcttttgatgaggccgagaaaaagaaggaagaagaggtatatatttaaacaccatatagtgtttttgtgacgggtgtatgcatgagtgtcccgtatattgggttttgctgtatgttgtgtctttgccatgcatcctggtttatgttgacgtaggggaatatctttgttaggttgaactgaatgaactataaccagtggcaagtgcatgtgagtttaacagataaaactatcgagtttaaccgtccgttgtgtttttttgtgtcctgcatatcaacagtttggctgaactcatctttatgaaccacaaggtctgtgcttttctgttggaggtttgcacgtcgctgattgtgaatcgctttctcttgtcaacaggatgccgccaagggtggggatgatgaggatgatgacctagaggtcagcattgcaccttcatattcttcatgggccattacgtttcatatatgcagcttaaatgatctaataaataaattgtacatgtatcggtctcaggatgaggaagacgatgagaaggcagacgaggacaaggccgactctgatgccgaggatagcaaggattctgatgatgagaagcagcacgtaagaaactctttcttgagacctgaccaagccatttgtcatgtctctctctgtctatgccctcacacgcctgttgtgatgaaatgccatttgcaggacgagctctagatggcgaggatgatgtt

SEQ ID NO: 22204 - DNA, 248 bp, Zea mays
  Clone ID: MRT4577_120252C.1
ctgaaaaaaaaaacggcccggggttccctttcttttaaaaaatgcgggggcccggggccttttttattgttttaaagccttccccccttagccgcaaaacccggaaccgttcttttatgccccccttttttggggtgtcccacccaaaccatttgcgcggtgcctttcaattaagaccccccccctttttgtagcctttttaaatcttttttttaccccggtgcccccccaaaggttttttcttaaaa

SEQ ID NO: 22205 - DNA, 493 bp, Zea mays
  Clone ID: MRT4577_120253C.1
gaagcacccggagcagcgcacagcaacagagcacacgccgcacaccgccgcctccgcagcagcagcaatggcgcgcgccggcgctctctgcctggtgctgctctgcctcgtggccgcgcactcagccgcagcgcagaagtccacgacagccccggccgccgcgccggccgccgccaccaccccgccggcgaccccgaccaagaagtcgcccgcgcccgccgccgcgccgcccaccaccccagccaccaagcccgccgaggtccccgcgcccgcgccgtccaagaagaagaagaagccttcctcgtcctccaagaacaagaagaagaagtccaaggccccggctccagcccccgtcgccgaggcacccaccagcaccaagcgctccaaggctaaggcaccttcggccagcgaagccgacgcacccggcccggtaggcgatggcgtcgccgccgacaccgcgggtgctggaaggaccgtggcaggcgtaatcatg

SEQ ID NO: 22206 - DNA, 1167 bp, Zea mays
  unsure (1)..(1167): unsure at all n locations
  Clone ID: MRT4577_120254C.1
ctggccgggaactcctccggccgagccagaagcacccggagcagcgcacagcaacagagcacacgccgcacaccgccgcctccgcagcagcagcaatggcgcgcgccggcgctctctgcctggtgctgctctgcctcgtggccgcgcactcagccgcggcgcagaagtccacgacagccccggccgccgcgccggccgccgccaccaccccgccggcgaccccgaccaagaagtcgcccgcgcccgccgccgcgccgcccaccaccccggccaccctggccccggccgccgcgccgcccaccacgccggccacccccgcgcccgtcgctgcggcgcccactaccccggccaccctggcacccgccgcggcgccgcccaagtccgcccccaaggcgtcccctcccgccccgtcgcccaaggccaaggccaccccgccggtggccgagctgccgcccgccgcctcgcctcccgcccccgcccccgcctccccgcccaccaagcccgccgaggtccccgcgcccgcgccgtccaagaagaagaagaagccctcctcgtcgtccaagaacaagaagaagaagtccaaggccccggctccagcccccgtcgccgaggcacccaccagcaccaagcgctccaaggctaaggcaccttcggccagcgaagccgacgcacccggcccggtcggcgatggcgtggccgccgacaccgcgggtgctggaaggaccgtggcaggcgtaatcatggctgggcctcgtggccctgctcgcctaggcacgggcgcgcgcgcgagcgggtggcgcctgcacggccgcaccgcactgccgggacggacgacgacaggaattggtgacgcggatgcagccggtgcgcggcgccgcgctgtattcttggccgggcctcgcgtgtgtagtagtagtgcagtgccactcacgttcggtggcgggtggtacgtgcggtgcggacgtagcaccgtcgcctcggattctttctttctcttctcttccttttttttggttttgctgtactatattgcgaccccattgagatgctttattttatatatttattttattgccgttgtttgtatggtccccatccatgcacgacttanaaaaaaaaaaaaaaaaaaaaaaaaaaaaaaaaaatataaaataataaataaaataa

SEQ ID NO: 22207 - DNA, 632 bp, Zea mays
  Clone ID: MRT4577_120255C.1
catagcgtgtaactttttttccttcccatttttccgtttagttttttgctggctgtgtgtgagcattcgtgtagggtgttgtaggaaaactgagaatgaaggtggtattaacgtatccccgtggcgtgacgttatttagacaacgacccacggatggatcaaattttgcgtgtattggggccaaaacagttctgcttcaaggattgaagttggaaatttgaattgttccgtgtactgatggactttttgctggttaaaaaaaaatgaaaacggcaaaacggttctcttctcggggaaatgacgttagagacgcggatgacgtaaaacgaagtgtaactggaaaaactgtaaactaaaaagggtgacgcggggcttatgtgtgtcctgtaaacccggaatttaagtcgggggcgcgcggcgccggaaagacgaacaaacgtgttagtggcggttttctggtgggtaaaaaaaaaaaaagcactcccgttctgcgcggggtccgaaaaacgccccggcgcggcggcggcgccgaaaaaaaactaatacaaggtgcggggggcgggtaaggtcagcgcgtgtgcggtggcgcggaaaaaaatttctaattctatgttataactctcctctttact

SEQ ID NO: 22208 - DNA, 977 bp, Zea mays
  Clone ID: MRT4577_120256C.1
gcggccagtagcagcggagcagccttcgcggcgcccgccacgccggcgctctcgcccgcgtcctcgtgcgtcaccagctcctccagcggcgacgtgcgcctcggcgcagcgtacacggagccgccgccgcctcggcagcacgcggggctcgtacgctctgacgctccgcggacggagctcgcgcccgtgccggcagtcgcgcacctggacggcgcctgctggccggccgcggcggcgctggacgtgctcctgcccgagctcggcggcgagcagctgttcccgtacgggtacggcgacttcttcggcgggctgcaggacagggccctggagcagcagctctcgtcgtgctacttccccaacgtggccgagatatggggcgccgctgccgtcgcccccgacggcaagccgccgggtctctgcaacaggctgacgtagtggggaactggggatacggcggtcgagcccgaacgtacgaagaccccggtagagttcacgggatcgatgcgcggaaacatcgatttggtgtacgctttgtgcgtgcacggtgcagtgctccattggttcatcattcatggacgacgacgagtgcaagctagctactagaatagctcttgctcttctccccttgcctgttcttgtttttctcccttcgcttcgcttcgcgtggacatacaggacgatgtattttgctgtgcattattacatgtaaattactcactaaaaaaaaaaaaaaaaaagcggcccccggtagagttcacgggatcgatgcgcggaaacatcgatttggtgtacgctttgtgcgtgcagtgctccattggttcatcatcattcatggacgacgacgagtgcaagctagctagtagaatagctcttgctcttctccccttgcctgttcttgtttttctccctgcgcttcgcttcccttcccttcccttcgcgtggacatacagatacaggacgacgatgtattttgctgg

SEQ ID NO: 22209 - DNA, 497 bp, Zea mays
  Clone ID: MRT4577_120257C.1
atctgatgattgtggaacctgagcagcgagtccctgattttatcaaggcaggtgctgatattgttagtgtccactgtgaacaaacatcgaccatccatttgcacagaacagtcaatcaggtaatatctgtaccaccttatatttacaagttaatgctcagataatagtatggaacttcaatgtatttggatataaataccaacgaatgtggcttttaccttcttgcttggtgttgtacaacacaaatggcttcaacgaatattttgcttaaacccttcactgtatttttttcattcaggatttagctaatcatggactattacgtaatgaatgtttttctttgtgtgtgtgtgtgtgtttgtttgttttgtgaggctgaattattactaattactgggctccaacaatagctataggagcacatttgctacttgctagtgttaggcctacaacaaaccacattcctaaatgtatttagttacgatataggattattt

SEQ ID NO: 22210 - DNA, 675 bp, Zea mays
  unsure (1)..(675): unsure at all n locations
  Clone ID: MRT4577_120258C.1
ttttttttntaaaaggtgccccattggaaacgcttgaaagcaaggtagctaataatcatggtgttatggagcaacaagctgttcctgtccgcctggtggccactggattattttatattcctacacagatcaacttctacgcacagtataaagcgaagctgctacaacaggccggcgcgcttggtatgcatgcgtcccagcccaggatatatatactgcaataattttcagacgcggagctcttaattaattcatgacactgacagagcacagagcggttctgttccaattccaggacgacgaatccctctgctcttcttcaactcaggcatcatcagtggcggccgggatctctgtccgctcagcttggatcagttccgcaagttcatccaatttataccttaacacgcaggagaccaccttcaacagtcaaaaaacatctgggaggagttgacatgagcaccaataagtttgtttggagaaagagtcgacaacaataggaacatcctcagcaccatcattgctcattagagaccaaccatcacctggaaccccatttgtagcatcattgaaacacctgttaagcctcttgctaaatgttcccaagaaaagctgctgacgtccccatccaaacgacatttccccgctcgattcatgtgcaatttgcattttttt

SEQ ID NO: 22211 - DNA, 250 bp, Zea mays
  unsure (1)..(250): unsure at all n locations
  Clone ID: MRT4577_120259C.1
acgaagcacgcaacgtctctcgtggggctcgtggttggccctgttctcnccccgggaggtgcgtctctcggccttncggggcgccccggtggggtggtgggtgtgtcggggggtgtgcgggcctgccggggggtccctttgcccccgcnccgggggggggctcttctcgtgtcttgttgttttgcgctgcgggcgcccctcggcctgttcctgcccttcntcctgcccgctgtgctcggccttcttctcg

SEQ ID NO: 22212 - DNA, 319 bp, Zea mays
  Clone ID: MRT4577_12025C.1
aaaccaaccaaacctctcttgacaaaaaacaatcatgtacccttctaccgatcctatggagtggaatttcaataagccaccgtgcccgtatgaaaaagaactcctatctactctaattacaatttacttgcgagctgtgatccaattcatgcccgagctatccctcgtacatactgcctttatccttattaagaatgcacctacttgagctgctcaccctgaatgagaaataacccactccgtatctttcatgaccagccactctctccccggatgaacatatatcactttctctgccagtgacaatacaagcttgatt

SEQ ID NO: 22213 - DNA, 183 bp, Zea mays
  Clone ID: MRT4577_120260C.1
agctcggaattcggctcgagctgaagcccacctggatcttgccctgccgggcgccatgactgacgcggtggttatttacttcgaggggcgcgtgcaacagctgaagccccgatgtaggcccaagtagtgctggtagcgcaagaaaaaggccacagtggccggatcagacagagccgtgacgct

SEQ ID NO: 22214 - DNA, 177 bp, Zea mays
  Clone ID: MRT4577_120261C.1
cgtgaagaaagacagatctactttatacattcatacatcaggcggaccataccttcataaaatctaccgaccaacatccgtgccactgcagaccgagctgctaagtgtttcataatcatacaaggctcatctctgacttatagtatgttgaccacgggtgatctttatatacaaaga

SEQ ID NO: 22215 - DNA, 1227 bp, Zea mays
  Clone ID: MRT4577_120262C.1
ggagaagatcgccaagtggcaggcgcaggtcgaggagcggctcagagtgcttggtcagagaagtgctgaaggtgccactgctgcaatagtgcctaagaaggttgtcatggtgcaatggtctacttgttaggctatgttgaggtgggggagctactaataaacctcaagagttggatgatgctgttcttcgaagactggtgaaaagaatatatgtgccactacctggtccaaacgtacggaggctacttctgaaaaatcagctcaaaggacaagcattcaaattgtcgagtaagtgctccagggtttctctgtataactacttgattgtggtggttgtatatgtagcacagtctttttatgtttggcacggtagccaacctggaactgatccctggcagaccatgatttcgaaagattagttgtggagaccgaagggtattctggaagtgacctgagagccgtgtgcgaagaagctgcaatgatgccaataagagagctcgggccacagagtattcttgctattaaagcaaatcagttgcgacctttgaagtacgaggatttcaagaacgcgatggcggtgatcaggccaagcttgcagaagagcaaatgggacgagcttgagaaatggaacgaggaatttggttcgagctgacggcggctcgcactgcctgtgcctgatgatgatcaagcggtcctatttccatctgtatatatgatttatgtctcccacgctgtggctcacaacacaaggggtcacaccatgcgcccattgatgcgtcctcgttgggctaggcagcacaacatcgacagaagcagaatgtaaaggtatacttctggcaacggcctatacagccattgagggctagtttgaaacaccgttcaagggattttcatttttcaaagggaaattagctcattttcccttgtaaaaatgaaaattttttaggaaaatggtgttcccaaactagccctaagtattgctgttgcccaagttaaacaaaaaaacgtgtctattattgggctctgtttgtttaccctctaaattatattatccagcttaaataagttaagagataaataaacaacacaacatagattattaggtggattatataatttagatacctagattacgataattcataagcaggtcattggatgcttatagaaataagttaagacataaataaacaacacacaatacagattattaggtcggaggctcgg

SEQ ID NO: 22216 - DNA, 324 bp, Zea mays
  Clone ID: MRT4577_120263C.1
tcggcaacatacctttatcaccctttgttcatcaatcgccagccctatctttggtgcagtcattggtacaaaccatcaaggcacattatctgcagcaactcgtgctacctgcgatcaatcaagttgcacaggcaaaccttgctttctactttttttttactacatttttttttatttaaccaactgtttacattgaaccgtgctgcttatttgcaagtacaactattaccattttttctgctagcaactgtctactcttagtatcatcaactttattcattttaccaattggtcgcattgtactcccgtgttttatttgtagca

SEQ ID NO: 22217 - DNA, 261 bp, Zea mays
  Clone ID: MRT4577_120264C.1
cacttttactctcctaacatcatggccttggggaggggctcaatggaccacaattccctctgcgcagagcccgaccccacaattaacgtccaccttatggacaagtacacattctatgtcatcgaaattttagaagagattactccagctaaccaaactaacatgcataacctttttcaagtgtgtcccaaaagcctactgtgtgtctacccctggacatcgtactgaccttttccagcgatatcctaaaaacgtcctgat

SEQ ID NO: 22218 - DNA, 627 bp, Zea mays
  Clone ID: MRT4577_120265C.1
cctcgaggccggccgggccctcgttcagttgttcctcaacctacctacgccgctccgccctcgaccgcctttgcctgccttcccattccccccgtctcctcttcccttccgccatggcccagcccgctttcctctcctctctccgctcccgcctcggctccgcgccgccgcccccgccgaaccatcgcctccagcccaggcgcggctaccacgtcgagcttggggctcgcgaaaaagcgcttttggaggaggatgttgctttgaagaggttcaaatcatacaaaaacagtgtgaaacaggtctccaagatcgggaatgctctcactttagctgttgtacttgcttgcagctacgagcttgctgtgttggcgactagcacaaaatgaaggaaaactcagtcatgtggcggcacggttattccgggaagtgatccatcagcatgaactggcactctctctcttcgtgtttttttagccccgtttgttgatcactcgtaccgtgtaaaataaaataaactaggttaaccttgattggcaaataatgtctctgtttttatggcaaaaaaaaaaaaaaagtgaggcaagcattccgtggtgaatcgcgaaaaaaaaaaaaaaaaaagcggcc

SEQ ID NO: 22219 - DNA, 292 bp, Zea mays
  Clone ID: MRT4577_120266C.1
aaaaaaaaatccccttggatttggccgggttcgactttggggggtggaacatggccccgggcccaaaaaaaattgcttggcagaaatgcgaaaccgggttgttacaatgggggggttttggagcccactcccccagttactttcccaaggcccaaccccgggaccaggaacaagccatcggggttttgggtttttttgccgttttttttgggggtgggaggccttgttaaacatggccgggggatcgttttggatgttcagtttcgggggggcgacagtttgcttgtaaaac

SEQ ID NO: 22220 - DNA, 146 bp, Zea mays
  Clone ID: MRT4577_120267C.1
gaatcattagatggtcttcaacaaggaaacacacaatgaacaatggggattgactttcggggacagatgagttctttaaaaataatgcaaaaaaggcaaacttaggcttgagaaagggccacaaactaattttgcgatcgatcaaa

SEQ ID NO: 22221 - DNA, 592 bp, Zea mays
  Clone ID: MRT4577_120268C.1
ctcgagccggccgggaaacgtttcagacaggggcctagcctctcgccctttcctattcttctaaccctagccgccaaacctcccatccaccgctagccgccgtcgttctccactctccacggctccatcagcatccaggcggccaaccaccaggccacggccgagcggggcgccgagcacccaggccgaccgagcgaggcgccgagcacccgagcacccaggctgccgcacccgagcacccgagcggctagcgaggcaccgagccgagtggagagtggagcactgagcacccgagcgaccagcggggcaccgagccgagcggaggcacgaccgcacgggcgcggccgtgtggagccaagctgaggcacgatcgcatgactcgtcttctctgattgcgatgtcaactcccaacgaaagtagcaaccctcaatttcaacctccatcatctcaagcatctattgagggtggaagtgggcttccagagaatgtgattaatgttgaacaggatggtgatgaggatgatgacgaagtagaagtagaagaaaatgggagaaaaagaaaattgaatctgcagcgcggaatgaattcaaga

SEQ ID NO: 22222 - DNA, 1748 bp, Zea mays
  Clone ID: MRT4577_120269C.1
aaattttattgtttttttttacctaatatcttgagggatgtttctgatctgaagtacttatttacaacttctctcacttgtcatctatgtaccatgtatgtttctgaaattacatgaacagtaatgtttttttggaagacacaacatacctttaattattcatctactgtacaatgtacaaattcttaatttactgctaggcaaatttatgctctcaaccattttaacttctgattgcattagatgagagaaccgaaatgctagatctatttttagtacttttaccgtgctggtctatggatccctcatccttcactatttatcgccggccggatttggtgccgttgcccgttggcttggcttttctcccctcgcaccggagaacgcggccgccgatcccctcccctcccctttcccgccgactgatcccaccaattctgcacccgcgcagttcctgattcgattggcaagcgcaattggccgctcctgaccagacgccggatagggctggatttgattggattggatccccaattgtgtttgccacgtccgtgcgttcgggcgggcgggggagttactttagggtttcggcgggtgcggtcgccgtgtaggcggtagggttttgccatggcggagaagggctgcctcaagcggctccagaaggagtaccacgccctctgcaaggagccgcctccgcagatcgtggctcgcccgctgcccaacgacatactggagtggcactatgtactggaaggaagtaaaggcacaccctttgaaggtggatattactatgggaagctcaaatttccaccggattatccttttaaacctccaagcatcagcatgacaacccctagcggcaggtttgcgccacataaaagaatatgcttgtcaatgagtgactttcatcctgaatcttggaatccaatgtggtctgttgcaagcattctcactgggcttctgtctttcatgatggacgatgcactgacaactggaagcatcaagacgtcagatgcagaaaagagacgtttagcaaaagcttcccttgcttacaattgtgagagcaaaaactgtccgcacttcaggaaacttttcccagagtatgttgagaagtacaatcaacagcaacaattggagaatactgctgcagagccggtgccacaggagaatcctgcacctgttccatcccttgctgtccagcaagctccggtcgtcgccaatagggcgcaaccactggcggaggtacgccgtgacaagaaccagaagaaggcggtgcccttctggatggtgctggtcatgttttcagtttttggggccgtgatggcgttgcccctaatgcaactttgacaacaataaagaccatgaggacgtgtgataccggggcagtaattttgtatagttttccattggtttgtcagtgtaacaaagttgccccctagacttacctaccaccttggagtcgtattgatgaacttgtgatggtaacatgtgtagaaccgttatctatcttgactagtagcgtcagaagctcgttcgtattttgctttcgtttccaaaatcgtatagttattacttttcttgccaaaaaaaaaaaaaaaacttgttcatcttctttaaggtcagttcacaatttcaaaaaaacattcaaaaaaaaaaaaaaaaaaaaaaagagggggggccggtaccggtgcctcccagttggtctttgtaatgggggctgccttcaaggttgggttcgctttttcccc

SEQ ID NO: 22223 - DNA, 171 bp, Zea mays
  Clone ID: MRT4577_12026C.1
ttcgcctagcgtggtaacaacgcagagtcgcggctttaatatggcctgattgccactgtgttatgaaacgttattatagctgtaaaaactctgttgtgctgtttagtgctttgggatttttctacacctgtgtttgggggggtaaattttttttccaggccccgccgcttt

SEQ ID NO: 22224 - DNA, 228 bp, Zea mays
  Clone ID: MRT4577_120270C.1
aaaccaaaaaagggtgcatcccataaggtattccaacacatcctaaacaaatcctgtttttgtttcaatccatattaaactgaggtttccatcagacacccatactgactacttcccatgctgtaacaaaatatttttcgaagccacacgacatttaactgttttttacccctgcaccaggcattgcaaaccaaacttatggaatatttatttccaagttcggccttt

SEQ ID NO: 22225 - DNA, 1397 bp, Zea mays
  Clone ID: MRT4577_120271C.1
tccctcgggcccgggtcgaatctcgaagcacatcatgcgcccccccgaaaaaaaattccccacgtactagaccaccacccgttggctttctcccctcgcaccggggaacgcggctgccgatccgctcccgatcccctgccctcctccttccagccgactgagattccaccaaatcggcgcccgtgcagtccccgattcgattggcaagcacgattggccgctcctgatcagctacgggacagggctggatttgatttgatcggatccccaattgggtgtccgggtccgcgcgttcgggcgggcgggcgtgcgggcggggggattgctttagggtttcagcgggtgcggtcgctgtgtaggcgggtagggttttgccatggcggagaaaggctgcctgaagcggctccagaaggagtaccatgcgctctgtaaggaaccgccgccgcaggtcgtggctcgcccactgcccaacgacatattggagtggcactatgtacttgaaggaagtaaaggcacaccctttgaaggtggatattactatgggaaactcaaatttccaccggattatccttttaagcctccaagtatcagcatgacaaccccgagcggcagatttgcgccacacaaaagaatatgcttgtcaatgagtgactttcatcctgaatcttggaatccgatgtggtctgttgcaagcattctcactgggcttctgtccttcatgatggacgatgcactgacaactggaagcataaagacatcagatgcagaaaagaggcgtttagcaaaagcttcccttgtctacaattgtgagagcaaaaactgtccgcacttcaggaaacttttcccagagtatgttgagaagtacaatcaacagctacaattggagaacactgctgcagagccggtgcctcaggagaatcctgcacctgctccatcccctgctgtccagcaagctccgaccgtggccaacagcgcacaaccactggcggaggcgcgccgtgacaagaaccagaagaaggcggtgcccttctggatggtgctggtcatgttttcagttttcggggctgtgatggcgttgcccctaatgcaactttgacaataataaagacaataagaacgtgtgatgccagggccgtaattttgtatagttttccattggtttgtctgagtgactcagttggtcccctagactacctaccacctcggagtcgtattgatgaacctgtgatggtatatctgaagaacttttgttctcagttctcactcttgagtagcagcgccagaaggtcgttcgtttttgctttctgtttccgaaatcgtatacttaattttttttgttgcctcccagttcgtctttgtgatgtgtgctgacttcaaggttgagttcgcattttcac

SEQ ID NO: 22226 - DNA, 539 bp, Zea mays
  unsure (1)..(539): unsure at all n locations
  Clone ID: MRT4577_120272C.1
caatgacataaacgacatgtgtcgtccggccaaagacagaccctggtgtctcgtcaaaatcagaaatttcatttagccattggaacaaacttcgctactgcaactagggatcgtgtaatggagaatgatgtggataatgaaattgatcatcagactgtttcagagatcgacaacaatgaacgtaccggtctatgtccattccctcacacggagagtaacaatatgactgaaggagcagacattgggatgcaacaccaggcagccccgactgtcactaccaatgaggatgatgatgaagctgcactttttgaagatgacgaagacgaaggatacctattcgctgggcaagtatcatgatttctaaccaccagaatgaaacttgagcaattctgaagacctgaattacttggatgtaaattatatgcactgctgcacctgaaaggngcacgctggcatcttcatattatattttttcttggtcagcaaggggtgatggacgctttgctcctgtactgtgccgcgcgcagaaaaaaaaatca

SEQ ID NO: 22227 - DNA, 1133 bp, Zea mays
  Clone ID: MRT4577_120273C.1
catttctgcactgatattcttacagtaaataagatcaaggaacctatattgtgtaccatgtaatatcatttttaacagtttgatgaggaagtactactactattacaattgatgcttcagttctacgacttctttcaaaccaagcgtccacacatatcttgaggtatgtttctgatctgaagtacttatttacaacttctctcacttgtcatctatgtaccatgtatgtttctgaaattacatgaacagtaatgttttttttggaagacacagcatacctttaattattcagctactgtacaatgtacaaattcttaatttactgctaggcaaatcaatgctctcaaccatttcaacttctgttgccatgagatgagagaactgaaatgatagtctcattgttagtactttaactgtgctgttctatggatccttcatccttcactatctagcagtcaatatgcttcagttcaaattgtttgcattttctttcctttgttggtctgacatgtaaaactttatgctgcagcattctcactgggcttctgtccttcatgatggacgatgcactgacaactggaagcatcaagacatcagatgcagaaaagaggcgtttagcaaaagcttcccttgcctacaattgtgagagcaaaaactgtccgcacttcaggaaacttttcccagagtatgttgagaagtacaatcaacagctacaattggagaacactgctgcagagccggtgcctcaggagaatcctgcacctgctccatcccctgctgcccagcaagctccgaccgtggccaatagggcacaaccactggcggaggcgcgccgtgacaagaaccagaagaaggcggtgcccttctggatggtgctggtcatgttttcagtttttggggctgtgatggcgttgcccctaatgcaactttgacaacaataaagaccatgaggacgtgtgataccggggcagtaattttgtatagttttccattggttcgtgagtgtaacaaagttgccccctagacttacctaccaccttggagtcatattgatgaacttgtgatggtaacatgtgtagaaccgttatctaaaaaaaaaaaaaaaaaaccccccgcgtcccccacgccgtcgg

SEQ ID NO: 22228 - DNA, 351 bp, Zea mays
  Clone ID: MRT4577_120274C.1
aaataaagccacaaacattaaagtttaacacgatcagagccacactgctgcaccagagggtatggcacaactcactgtggccagatatgggcccacaaaccaacggggccccagcccctgccacgacagacaaacgaggggggggcaacagacgcccacaagcttgtcaaggtgctcggacggcaccatactatggctgaccacggatcatggatccctacccggatgcacagttcactgcccagcgcccaatgcgacaaacctttaggcgagcgcctttcttgtgctacttctaggctggtagggaccgggcataatagacttgatagctagcgaagaacacaccctcct

SEQ ID NO: 22229 - DNA, 505 bp, Zea mays
  Clone ID: MRT4577_120275C.1
gagagaatagtgcgcatactctctttgtttaaaaatgaattccaaaaactattgtttgcaagatcgaaggatgcaaaagtaacaaagtgtacaccacagttgcattttcaagagaaatgtgtaatacctttctatgaccttcacctgatatctgtgctagaacctttccgttgggtccaataagaacaaatgtaggccaagagttcacccccagttctctccacaagtacatgtcaccatcatttacaaccgggtgagtaatgttgtagcgcaaaacagcattacgtatagcttcaaggtccttttcattatcgaatttggcagagtgcacaccaacaacagtgaaaggtttttctttatacttcttctctacaaaatccaggtctggcaaaacatgcatgcagttaatgcagcaatatgtccaaaaatccagcagcaccactcttcctttcaaatctcttccaaactgaagtggggctgtattcaaccagtcaagctttcttgg

SEQ ID NO: 22230 - DNA, 1463 bp, Zea mays
  unsure (1)..(1463): unsure at all n locations
  Clone ID: MRT4577_120276C.1
tcgagcgccggccggactactactacgcgcgccggacgcggcttgctcgatctcgagcacatcatgcgcccctccgaaaaaaaattccccacgcactagaccaccacccgttggctttctcccctcgcaccgtggaacgcgactgccgatccgctcccgatcccctgccctcctctttcccgccgactgatcccaccaattctgcacccgcgcagttcctgattcgattggcaagcgcaattggccgctcctgaccagacgccggatagggctggatttgattggattggatccccaattgtgtttgccacgtccgtgcgttcgggcgggcgggggagttactttagggtttcggcgggtgcggtcgccgtgtaggcggtagggttttgccatggcggagaagggctgcctcaagcggctccagaaggagtaccacgccctctgcaaggagccgcctccgcagatcgttgctcgcccgctgcccaacgacatactggagtggcactatgtactggaaggaagtaaaggaacgccctttgaaggtaaagatcatacataatataccacattatctactgcctccaatatttgttttgttacttataatctcaaacgatgttttccacgcttcaatttccctacctgcaggtggatattactatgggaagctcaaatttccaccggattatccttttaaacctccaagcatcagcatgacaacccctagcggcaggtttgcgccacataaaagaatatgcttgtcaatgagtggctttcatcctgaatcttggaatccaatgtggtctgttgcaagcattctcactgggcttctgtccttcatgatggacgatgcactgacaactggaagcatcaagacgtcagatgcagaaaagagacgtttagcaaaagcttcccttgcttacaattgtgagagcaaaaactgtccgcacttcaggaaacttttcccagagtatgttgagaagtacaatcaacagcaacaattggagaatactgccgcagagccggtgccacaggagaatcctgcacctgttccatcccttgctgtccagcaagctccagtcgtcgccaatagggcgcaaccactggctgaggtacgccgtgacaggaaccagaagaaggtggtgcccttctggatggtgctggtcatgttttcagtttttggtgccgtgatggcgttgcccctaatgcaactttgacaacaataaagaccgtgaggacgtgtgataccggggcagtaattttgtatagttttccattggtttgtgagtgtaacaaagttgcccccctagacttacctaccaccttggagtcatattgatgaacctgtgatggtaacatgtgtagaaccgttctctatcttgactagtagcgtcagaagctcgttcgtatttggaaaaaaaaaaaaaaaaaaaggggcggccactanaaaaaaaaaaaaaaaa

SEQ ID NO: 22231 - DNA, 390 bp, Zea mays
  Clone ID: MRT4577_120277C.1
acaatcgattcaagggttggaattcctgataatagacacacccactaacacacacacacacatactgtgtgtgtgtgacagtttaacgctacgtaacgtgagagtaagcttaattaccagacgaagttggggccgatctcggcgactgcttgctgccagcccgccgcccagagcttgggtccctccatggcgacggcgaaggggaggaggatcaccagcgacatgatggagaggcaggcgtagtagttcatcccgctcacggacttgcccttcatccccttcttggagaagatggtccggacgacgaacgccaggttcgagatcattgtccccatgaaccctacagtgtgggtcgaacaagacaggttcagttatcccatcatttttcca

SEQ ID NO: 22232 - DNA, 207 bp, Zea mays
  unsure (1)..(207): unsure at all n locations
  Clone ID: MRT4577_120278C.1
cgnnntnnnnnnnnnnnnnnnnnnnnnnnnttttgactcatatttttatcagacagcaacgatgcaaattcccccttcaaagaaagggtttgagtggtaactcaggattacaagaatgccaacaagaccaaatgtatatggatttactcagaaaaaaaagatatgataacaaatgagtaaatggcccacggcaaaccaaattgaaac

SEQ ID NO: 22233 - DNA, 261 bp, Zea mays
  Clone ID: MRT4577_120279C.1
ttctttcgtgcgaaaatttagttggacttctcagggtcccagactcttacccttgtggggttcgggagacaaatgtactcctttctacaatcttcccgctctatcgttgttcatgatgacaacgttaagaactgagacgatgcttgtccagagaaaggagcttgtgtatttccatacactttatgtgtcatgttctggcacggctggcacatgggtcttaaacttaataaaccctgtcggttttttgaccattattgctat

SEQ ID NO: 22234 - DNA, 734 bp, Zea mays
  Clone ID: MRT4577_12027C.1
acatccatcactggggccgccgtctcctcttttttccttcttccttcgagcttcagccatggttaatgagaagactcacctcaacatcgtggtcattgcccatgtcgactccggcgagtcgaccaccactggtcatctgatctactaacttggaggtattgaccggcatgtgatcgagaggatcgagaaggaagccgctgatatgaacaaccggtcgttcaagtacgcctgggagcttgacaagctgaaggacgagcgtgagaggagtatcaccattgatattgccctgcggaagttgtagaccaccaagtactactgctccgacattgatgcccctgctgaccgtgacttcatcaagaacatgattactggtacctcccaggatgattgtggtgcgctcatcattgactccaccactgctggtgttgaggatgctatctccaaggatggtcagacccgtgagcacgccctccttgctgtcactcttggagtgaagcagatgatctgctgctgcaacaacatggatgtcgccactcctaagaactcgaaggatcgctatgatgaaattgtcgaggaagtctcttcgtacctgcagaagggtggctactaccctgacgaggagcccttcgtccccatctcagcggttgatgatgacaacatcattgataggaccaccaaccttgactgatacaaggaccctacccttcttgaggatgttgaccagatcaacgagg

SEQ ID NO: 22235 - DNA, 324 bp, Zea mays
  Clone ID: MRT4577_120280C.1
atcagtctctgggaagagaaaaacttggtagtgcgggtacaaagcttgggagctcacctagattttggatttggcgaatagaatagtagtttccttgagaaaaaaaaaaaaaaaaaaaacaaaaaaaaaaaaaaaaaacaaaaaagaaccaaggaacaaaaatttccactgtcaaaaggctccaatcctaattccgctgctatctataaccaactgtcttgcgattacagttcaccctccataccttgcaacccctgcccaacccgatctgtcaaaatcaccatgacatcaaactctcgcctcctctataaaattcccactttc

SEQ ID NO: 22236 - DNA, 189 bp, Zea mays
  Clone ID: MRT4577_120281C.1
gtgtgaagtttcattgctcgggtaatactcctttaatattaaaaaacactggggtgcgacaaatagacacacacacttaaaacgagttaacgaggcatacagacgttttggtgtgcaaaagggaaaattattttttcgtggatgagtttgaacgacatttgtccacttccaaatggatgttgagtgaag

SEQ ID NO: 22237 - DNA, 176 bp, Zea mays
  Clone ID: MRT4577_120282C.1
cctgggcttggatagtggggaccatggaactgcccttcagatagcacaacctgcagtacttttctccgacgacatagctggcggcggcggccatggacaaccagagggcgggcagcgctctcgttggggccatgcctgggacgacggggggtgagggcgacagcaacggaattcga

SEQ ID NO: 22238 - DNA, 740 bp, Zea mays
  Clone ID: MRT4577_120283C.1
cctccctcgagtttttttttttttttttttttttttttttttttttttttttttttttttttttttttttttttttttttttttttttttaaggggggcccccaaattttattcaggagaggggccccccccccggttaaaaccaacaggaaaaaccgggagaaaaccttcgggggccccctttttttttagggggaaacccaaccccaaacccaaccgaaggagggggggattattccccccctcccggcagcgggggaaacgggggttgaaaaaccgcaaaccaaaagggtggagggaaccccccggtgctaaaaggggacccaaattttttgcccttggcaggggccactctcctggaaggcccaaaaccggtttggcccctccccccccgggtttggaaggattttccccggccaatttcagggaaaccccggggcggtttgttcccccccgggttgccccagggaaaaaaaaatccccaagcccgcccatgggggcccctgccgggaaaccccctgggggccgggttgccctgccccaaaaagccggttttgggggggaggaaggcaacccccccccccgtgggaaaggggcccgggaccggcgacctgtaaacggaccccatccattttttcccggggcccaccaggttaaggtgggccccgggggggtttaaaacaagacccagggggccccccccgtggccaaactttttttttggtccccccccggggccc

SEQ ID NO: 22239 - DNA, 247 bp, Zea mays
  Clone ID: MRT4577_120284C.1
caaaaagaaggtaattctgtttttaagacaacgtgtcaagggggacataatatatattactcaatattgaaaagggcacatgagaccagattacacggagtgaggactactccttgaacgacaatacagaatcaaaggcccccaccaaggtctttacacgggtgttgttatacagcaggagcttgcttttggataaatcaatcacgtcattgccatttggatcatcctttctccatacctgaaccac

SEQ ID NO: 22240 - DNA, 266 bp, Zea mays
  Clone ID: MRT4577_120285C.1
cggcccggaatccccgggccgaccacacccttccaaccacaacccaacaaccctaaacaaacaggtctaccgccttcggaccccattcccggcggggcgtttactactacacggcggggcaggaaaccctgccccccaagtccttgcctgcaaaccaaaaggagtgccaggccccgaccgtaaccaaggtcctgccggcccaacggttttaccccgcctgggagtcccaccacgcagcccttaagagggccggccagtccgccaaa

SEQ ID NO: 22241 - DNA, 280 bp, Zea mays
  Clone ID: MRT4577_120286C.1
tggaataccagggcggaccacacccttccgagacacccttggccgaccccttggccttttcttgtggccggccccttgacccttccccggaaggattctttagcaagaaaggaggccccccgaataacccccataagcaagtcaaccaccaccgccattaacttcccaagaaacctttcaatagcctaaaaccaacagccccaggccaaaaccaccgagaagttcctcttaatcgtcaccattcctttctccttttttggcttaccctaagtccctttgt

SEQ ID NO: 22242 - DNA, 285 bp, Zea mays
  Clone ID: MRT4577_120287C.1
atcattgtgtggttttttttaatttttcaagaatctctaccgactttataacgagcgagaacgccccgaaaacaccacactacaacggtgccacaaaacacaggccgcccggggccttgtccaccacccacgggctctacctcttaccgcgccacaaaaatggagagttcaatacccccagcccgtgcaaccccacccaggggaaaactctagtatgttccagccaggaagctggcggcggccacaggttctgaatacacacgaactagtttagacatagaaggg

SEQ ID NO: 22243 - DNA, 2381 bp, Zea mays
  Clone ID: MRT4577_120288C.1
cattggctacctcgaggccggccgggaggggcatccgccacttcgtcgtcgtcgtcgcacggattggcattggctgccccccggccctgttcctcgtcctcctcatcaattcccgtctctcagtcctcccaataatggtggcgtggtgagaaatccttccgtccggccgtcgtcttagaagatgaactgttcctcttgctgcgccgctgccactccatcttctccggcgcttctcgccaggccgcgggggggtttagctgctagctgctccacgacgacagcaaatcagaaggtgcttttcctgggctcaaaacagtttccacggatcacgtatagccgtgcgtcgtcacggttgtcgcggagagaggtaatagcttttgccgggcaacaaccttgggacatcggcagatttgtcaagacgctgtatttcttcaacgggcctccaaaccttctcaagattgtagaatctatcatcagcagtttcactggacctgcttctagtgaagtgccaaagaaaatggaaacgtcggatgtggtgctggttactggagccaccggtggtgttgggcgacgggtggtggacgtcctgcagaagaagggagtacctgttcgagtattggctagaaatgtagacaaggcaaggagcatgttggggccggatgtacctctgatcataggagatgttacaaaggaagatacacttgatcctaagctattcaaagggataaaaaaagtagtcaatgcagtctctgtcatagtggggccaaaggaaggtgatacgccagacaggcagaagtacaaacaaggcatcaaatttttcgaacctgagatcaagggaccttcacctgaaatggttgagtacatcggaatgcaaaacttgattaatgccataaagagtagtgttggactgagtgaagggaaactgctatttggtttcaaagctagcacaataatctcatttttaggcaacttatctggagagattgtgtggggagctcttgatgacgttgtgatgggtggtgttagtgaaagtacattccaaatcttgccaacaggaagtgaaagtagtggaccaactgggttgttcaaagggactgtatctacttcaaataatggtgggtttactagtataaggacaaagaattttactgtgccagaggacctgtcagcatatgatggtgttgagttacgagttaatggtgatgggcgacggtataaactcattatacggactagctatgaatgggatactgttggctatacagcaagttttaacacaactaaggggggatggcaaagtgttaaagtacctttctcttctctgaaacctgtattccgtgctcgtactgtgactgatgctccacccttcgatgcaagcaacattacttcactacaactcatgtttagcaaatttgaatacgatggaatactcaacccaacatttactgaaggtccgtttgagcttcctttttcgagtattagagcatacatcaatgagccgatcactccaaggttcgttcatgtgagttctgcgggagttacaagacctgaaagaccggggttagatttaagcaagcagccacctgctgttcgattgaacaaagagcttggctccattttaacttttaagttgaagggagaggatttaattcgggaaagcggtattccgtacactattgtaaggccatgtgcattaactgaggaaccagctggagccgatctcatgtttgaccagggggacaacatcacaggaaagatatcaagggaagaagttgcccgtatttgtgtagcagctctggcaagcccagatgctgtgggcaaaactttcgaggtcaagagcactgttccattcagcgaaccgtatgtgattgaccctgcaaatcctcctcctgaaaaggactatgaagtatatttcaaagaactcaaagaaggcatcacgggtaaagaggcgttagaggcaacacctgctcaagtttgaagatgtcgttgaattaagaatttcgtctgttttcttaaattctgacacagtaacccccactctgaatgtctaaagtcatctagaaacatagatgacactaatgctaaattttgtagctgaagatcagaccaataaatattcccaagaacacattactgttaggttgggggatcattaaactcgagctaagacacaaatatgtagatgaaattagtgctgctgttcatgccttcgttggagttagccattacaggacacaagaatttagtaagaggtttggtaaaccttttccagtgcaggagcagctgcctgatgagttggtagagtggttgctttcagtcaattctctagggtgcctatctctatttaacttgatgctgcacactgggggctcccttcagtc

SEQ ID NO: 22244 - DNA, 347 bp, Zea mays
  Clone ID: MRT4577_120289C.1
cccacgcgtacgggctaatctaactcgactcccggctatactggaggcctgaggtgacgcatactgggtcagaacccacagcccgtgtgctctcctcaactgcgtccggcaccctcgatcaacacaagtaatcacctttcgcgcgtgcggcttaccggcactctgacacctatccacgggatctcttagggggagggcacaagatgaccatgttcattcatacacagatgagcccgaacctgcagtgagttatgttctctccgggaaagcgcaattatggagattgtcagctctgactcgcctgatgctcagaatgctattacataagacttgaatacgtttgtcat

SEQ ID NO: 22245 - DNA, 154 bp, Zea mays
  Clone ID: MRT4577_12028C.1
aaaaaaaaaaaaaaaaagaaaaaaaaaataaattaacaaatccacctcaggggaaacgagcaaaagctatctgttgtataatctcaccttatttcactggccggctttttacaaccatcggcctgggagaaccatgccggtagctacccaaatt

SEQ ID NO: 22246 - DNA, 247 bp, Zea mays
  Clone ID: MRT4577_120290C.1
atattcttcccttccggggtgggtcgtctttattcatcattttaacctattttctctcttacttcataaattaattttaaaacaaaagcgggtccacccaaaaaaattccacgcacccccgcctccgggattcttcaacacctttctcacaccgatacaaattacagcttgcccaaaatcagaacacatcttttgcccagcgtaatattcccccccctaagactccccaccctatacattcccacaa

SEQ ID NO: 22247 - DNA, 382 bp, Zea mays
  Clone ID: MRT4577_120291C.1
atcagtgcgattagttgatgccatagtgcgatcggatgctcaatgcctggccgggtgccctttttatagaaaacaatgatagtgataatcgtttactgattgaatacttccaaagcttacaccagagcattcatgcaagcctataacgctaatatgccgtcctgatattctatcgtgtaaccaatgaacatgctgactgcgacaacgatctatatgatttacacttatcccttaacacgcgttgacgacccttttgtctacctttgactccaccactctggcaccaccatgttgggtgctatatgtaagggcctcaatgatttcttacagcacatacttggtcgcactattggtgtgtataacacacaacattcgactgtta

SEQ ID NO: 22248 - DNA, 273 bp, Zea mays
  Clone ID: MRT4577_120292C.1
accacaggggtcgtcaccgccacctttaataactatgtgttctagggccacagactcgtccgctaccaggtgaccaggaggcgtgctatgcacgaaacgcattctgcgccggggatgcatcccgcgcacgcaccgttagaaccggcacaagaataagggcaggacgacctgctgccgaaggcgactcgcccgacgcaagggaggcgtgcccggacagccaggaccacgtccgtatgccccgcgaggctagacgccgggtgggctcgccacggc

SEQ ID NO: 22249 - DNA, 589 bp, Zea mays
  Clone ID: MRT4577_120293C.1
cgggctacgcggcgccgtcagcatcaatctcctcgaccaataccctacttgtaccccgccgccgtcgcagtccgcctgcgcggccacaccagtaagctgaactagcagccatgccgcccaaattaggacccctctcaggtggtggaggtcttcgtccgagtgacgtgaaggtgaggtcggcgcggcatcattgatgtcccctaagatcggcccgctcggtctctgcccgaagaagatcggggaggacatccccaatgacatcgccaatgactggaaggccctccgcgttaccgctaagcttaccgcgcagaaccggaaggccaaggtctccgtgatcccctccgccgtggcgcttgtgatgaaggggctcaaagaacccgagagggacaggaagatggtcaagaccatgaagcacagcggcgacatctacctcgacgacgtcatcatgatcgccaagaccatgctgaacaagtacatggccaaggagctggacgtgaccggcaaggagatcctggggacctgcgtcagcgttggctgcaccgtcgatgggaacgaccccctgggcttgctacatgagatctatgatggg

SEQ ID NO: 22250 - DNA, 2353 bp, Zea mays
  Clone ID: MRT4577_120294C.1
gccccctttttttttttttttttccgttcggccgcttttttttttttttttttcgaatattcaaccttctctgtggttggaggtggcattccattgaaatatttagagcccaaggatggtactcatcaccgatccatcgactcaacgatgtccgagggcacacgggtgcaccattcagagttgcaagttatacaggtgatcgcaaaacacgacggaccgtcttttggtaaaaaggcaacaaggacagacaaaaaaaaactcaggccaacagtgcaatcatttatcatgttgcactcaggcaaaggtcaccaaaaatgctaccatacgccagtagggcagcgagtcatatccatagttgctccttgcggtactctctcacaatgaccggtacactagttggcggaagcattccgtagtcagttatgatcatcgacacataatcaggtggggtggcatcgtacgttaaatttagcaattggagatttgcactgtctgcccagttcttaagatggtcctctgccttcccaggaattttcaaaatgacatctggatcgccaagctcattagcacatatagaatcaagttgcactctctcatgaaacttgtatgcctcacaacaaaccagaactggaactccaaatgcatgcgcaaccatagccacagatgctgtcccaactcgagaataaactgtcccatttgataatattgatgaggcacccaacaaaactcgagttacttcatgcatgatgtatgagatggcatttatgtgtgtatatgtgcaattaatgccctttgccactaatctccgcagcaatccctgtccctcaagctttgggcgagaatctaccactacaactcgaaagttcctcccaagttcatgagcataatccaaaatcatttcaacaactgttgatgatccatatgtcagtaagacatcgttgtctctgacctttgtgatggcatggctgacaataactttgtctgcaagaactatcttctcatttataaaacgatcaatatcagactgaagactagttttggcttcagactctgacaatgcatgtggtagctttgctatcctgctcttcagaaacctaatagcattgcccatgctgattgaaagaggcctacactcgataagaaatgacacataactgctgatttttgcagtaagatctctgctgagtgttttatttgtaggtgtagtgtaatcttttattgcctctttgaatgcaagaagcattgctacacaacgatcattaccaccagatacttcaccagacaaatattggagcccaaccttgtatacagaaggatgcattggttctaattgaaagaattttgactcgaggtcaggaagctgagtgccatgcacatactgaggaagatgcctgaacagttcaactctgtttcgagcttctgattggttgactaccgcacgtttttttgctttctccaccttatgcacatcatcaaactgcatgcggggatggggagcatctaattttttttctctttctggaggacgttcagtagccttcttctcagaagcaagtgtacttgcagcttggggcacatctttcttctgagcagtttttgctggcttggcttgcttggacatcgcagcaccagcagattttcctgatttatctgcctccttcgctgcagctttagcagcacgttgggcctcctgaattgcacgtctctctgccttcgaggttttctgcttttgtggaatggaagctggagcaccctcattccgtatttcagccaaaccacgcttgttttcttctagctccacagcagaaggcgcgcgtgaccaggagtcgtcgtcgccgatctcggacacgatgtcgaggcgcggggacgaacgcacgggcgcagaagtggcgaggacgacgtcggccgccgccggggggtgtgggcccagggcgaggtggtcggcatggcgcgggggagggatcatgacaggggaaaggcggccctgggagaagtcgtctgacgccggaggcgacgccgtgaccggcctctgctgcgccgatggtgcctggaccaccgcggcggggggcaggggctcggacggcgcggaggcatccggggtgaagaagccgacctggcggatcttgggctccacgccgcccgacgaggagcgcggcgggcggcgaagatccatggccgcggacggcgccgagggtttggttggggctttggggcggcgctcgagacgagtgtgtgactgtgggagaggagcgagcaagagaggttggggaactcgaattcctcacggtttcttttgagcacacgacacgagcgatgatggtggaccactgctcggcccggccggcctcgaggt

SEQ ID NO: 22251 - DNA, 392 bp, Zea mays
  Clone ID: MRT4577_120295C.1
aaaaacaaaacataaacatggtggttttaatattacacggtgcggatatataactagtaaacaagaaacatgacgatttataataaccagtaccgtcaaattacttacaaatacaaacattacctattttcttccacccaacctcgcgaccaactcccagattttgatcatcccgcgttgccttctctacaaccaccttctccacagcttgttgcttccttccccttaaactaacacaaaaaaacttacatcacctgagatactaacagatacgacaagtcgtcttctttcatcttcccaaacccacttgccgaaaccggccgcggtgataccgacccagcctcatgaacacactccttctgctgaccaacaggcccccgacacaaacccat

SEQ ID NO: 22252 - DNA, 238 bp, Zea mays
  unsure (1)..(238): unsure at all n locations
  Clone ID: MRT4577_120296C.1
tgcggccttggtttttgnattggggatgttgnggggagggaggaagatgttagagnggagnncnngggtgcttacatcaacactagttccaggggttgccacaaccaatcgcttgcgaattgcaaacacgggcaatggtgttgcagcccacaaagagctttgcaaacagtaaattacacactggggntntnacantgtggcagtgagcaccttgaagaccacgggccccattaagaca

SEQ ID NO: 22253 - DNA, 602 bp, Zea mays
  Clone ID: MRT4577_120297C.1
ggttcagacttcagagcccttcctcttgtgtccgtgcaaattggagatacttgaacagggatctcctccatattagtgagcaggatgtataatcctcccagtgggcaggacatgtcctactacgatcatgtgcagaagcgccatgaggagaagggctgcctatatgcatgcctgttcactgcgtgctgctgcttctgctgcttcgagacctgtgagtgctgcctcgaggccatctgctgctgctgctagttctgcttggagggcatgggcgtccatcatcgtggagatgtggccatgcgggacacccaccgccgaataaaatgctgtacttatatgcacgcacgttagaaatgcattagtgtctgtttgatgtgatcttgtgtgtgtgtgcgcgcgcgcatcttcatttgcactggaaaatgctttataatttgtgaaggcctgtaaatctgttgtatgtatcttggtcagatgaactctattattgtgccatatatctcgcttgattggacaaatcctttcgaagtttcctcttgtccttgcttatcgatggcagggttagaaggagagagttcgaaaaacaaaagtatttgtgactgttt

SEQ ID NO: 22254 - DNA, 503 bp, Zea mays
  Clone ID: MRT4577_120298C.1
ttcctggcgattgggagttaaggagagaatgcagtacgactttcctggcctccttcagctcggaggatgacctaacaagttgtttaaagaaccctgagatccaaacattactggataacaaggaggtgaaattgactgtaacgaggtggaatgaaagcgacgatggaagccctggcttggttgaagagtggcttttagtgtctggggtcccaagaatgtatagaaactggaaggagctatatgaggttgcttctgcacttggtgtgctgatcgacgtcgatgaggaaagtttgcaagtcggagataaggagcctattaggctgaagctgaagacagcattcaggagttttgatgctgctcccttttcttactactttgcatttggatgttggtcgtcaagactagtaatggtcacagcagtacaagacaaaacacaaggtatggaacataaaattaagcgacagcactgcaaggagcataaaaaggaactgaatgggggaaaa

SEQ ID NO: 22255 - DNA, 620 bp, Zea mays
  Clone ID: MRT4577_120299C.1
atctcagcaaccctagtcccctgctccattactacaaccgccgccaattccttcccgtgctccgcaaccgctgagtgagaataagatatgtccggcaagggctatggaccggatatcagcatcgatctcggtacgacgcactcttgcgcccgcgtgcggcaccacgaccgcgtccagatcattgccaacgaccagggtaaccgcaccacgccctcgtacgtcgccttcaccgactccgagcgcctcatcggagatgcggccaagaaccaggtcgccatgaaccccatcaacaccgtctttgatgccaagcgtctcatcggcaggaggttcagtgatgcgtctgtccagagtgatatcaagctgtggcccttcaaggtcatttctgggcctggtgagaagccaatgattgttgtccagcacaagggtgaggagaagcagtttgcagctgaagagatctcctctatggttcttatcaagatgcgtgagattgctgaagcttaccttggtagcacgatcaagaatgctgtgggcacagtccctgcctacctcaatgactcccagaggcaggccacaaagatgctggggtgattgctggccttaatgggctgcgtatcatcaac

SEQ ID NO: 22256 - DNA, 274 bp, Zea mays
  Clone ID: MRT4577_12029C.1
cgcttctacatgatcttacatgagctgctttactaacaaatgagagtataaccacaccttatattctaccctatttatgaatttctccatcccaaacctcttccttatatttttaatgcctatattgcatcctatctcttttctattccacaaactatttttatctacaacctgcattacctaatctcacaatccacacatatacatagtcacagttccctgcttcaagctccactgaggcaaacaggatcagagaaatgttccataactcact

SEQ ID NO: 22257 - DNA, 631 bp, Zea mays
  Clone ID: MRT4577_1202C.1
tttatttatttattttatttattttattttattttattttattttttatttttttattgggtttttttttttttttcacaaaacccgccaacccggggcgggaccccaggggaccggggaaaaaaggcccctttgccactaaaaaagccccggcgggtttaaaggggggggaaaaggaataaacccccccccccggggaaagggagcttaaagggggcccccccggggccgtgggccgggggggctaaaccaaaggcccggcccctgggggggcaaacccccaaacgggggtcggggggggcgggaaacaaaagcccccggggcaaactgggattccgaccaaaagggggtaaaacaaaaaccggcccacgggaacttccccccccggggttttaaaccaagcccgaaaaccaaaggggggaaaaaacgggcccccccgaccaagggggaaaaacaaacggggggggggcaaaaaggggggaaaacaaaccgggcccacaaggggcaaaacccagctcacggtccctaagggggggggaacaacccaaccccgggggaaactcgccccacaaggaagggaaaagcccccctcgaaggaccaaaaagcaacggccttataaaccctgggggg

SEQ ID NO: 22258 - DNA, 597 bp, Zea mays
  Clone ID: MRT4577_120300C.1
ggaccctcgaggccggccgggccgggtttccagctccctgctttgttcagacttcagagcccttcctcttgtgtccgtgcaaattggtgatacttgaacagggatctcctccatattagtgagcaggatgtataatcctcccagtgggcaggacatgtcctactacgatcatgtgcagaagcgccatgaggagaagggctgcctatatgcatgcctgttcactgcgtgctgctgcttctgctgcttcgagacctgtgagtgctgcctcgaggccatctgctgctgctgctagttctgcttggagggcatgggcgtccatcatcgtggagatgtggccatgcgggacacccaccgccgaataaaatgctgtacttatatgcacgcacgttagaaatgcattagtgtctgtttgatgtgatcttgtgtgtgtgtgcgcgcgcgcatcttcatttgcactggaaaatgctttataatttgtgaaggcctgtaaatctgttgtatgtatcttggtcagatgaactctattattgtgccatatatctcgcttgattggaaaaatcctttcgaaaaaaaaaaaaaaaaaaggcccctagggcc

SEQ ID NO: 22259 - DNA, 703 bp, Zea mays
  unsure (1)..(703): unsure at all n locations
  Clone ID: MRT4577_120301C.1
ctggcccgggctctcgaaaccctagtcccctgctccattctcagccgccgccaatcccttcccgtgctccgcaaccgctgagtgagaagaagagatggccggcaagggcgatggcccggctatcggcatcgatctcggcacgacgtactcttgcgtcggcgtgtggcagcacgaccgcgtcgagatcattgccaacgaccagggtaaccgcaccacgccctcggacgtcgccttcaccgactccgagcgcctcatcggagatgcggccaagaaccaggtcgccatgaaccccatcaacaccgtctttgatgccaagcgtctcatcggcaggaggttcagtgatgcgtctgtccagagtgatatcaagctgtggcccttcaaggtcatttctgggcctggtgagaagccaatgattgttgtccagcacaagggtgaggagaagcagtttgcagctgaagagatctnctctatggttcttatcaagatgcgtgagattgctgaagcttaccttggtagcacgatcaagaatgctgtggncacagtccctgcctacttgaatgactgacagaggtaggtcacaaaggatgctggggngattgctggtcttaatgtgctggctgctatgaacgagccaacagctgnagtggtcggccatggtcctgtctagaaggcctcgcttgttcggttggagaatgtttttttt

SEQ ID NO: 22260 - DNA, 591 bp, Zea mays
  Clone ID: MRT4577_120302C.1
ggccggccggaaaaaaaaaaaaaaaaaaagaggctgaaggctccacacagacaactccgtagagctccctgctttgttcagacttcagagcccttcctcttgtgtccgtgcaaattggtgatacttgaacagggatctcctccatattagtgagcaggatgtataatcctcccagtgggcaggacatgtcctactacgatcatgtgcagaagcgccatgaggagaagggctgcctatatgcatgcctgttcactgcgtgctgctgcttctgctgcttcgagacctgtgagtgctgcctcgaggccatctgctgctgctgctagttctgcttggagggcatgggcgtccatcatcgtggagatgtggccatgcgggacacccaccgccgaataaaatgctgtacttatatgcacgcacgttagaaatgcattagtgtctgtttgatgtgatcttgtgtgtgtgtgtgcgcgcgcatcttcatttgcactggaaaatgctttataatttgtgaaggcctgtaaatctgttgtatgtatcttggtcagatgaactctattattgtgccacaaaaaaaaaaaaaaaaaagcggcc

SEQ ID NO: 22261 - DNA, 686 bp, Zea mays
  unsure (1)..(686): unsure at all n locations
  Clone ID: MRT4577_120303C.1
gccggccgggttccaatatcgaggccctagncccctgctcttttctcacccgcacgccaatcccttcccgtgctccgcaaccgctgcagtcgagaagaagagatggccggcaaaggcgatggcccggctatcggcatccatctcggcacgacgtactcttgcgtcggcgtgtggcagcacgaccgcgtccagatcattgccaacgaccagggtaaccgcaccacgccctcgtacgtcgccttcaccgactccgagcgcctcatcggagatgcggtcaacaaccacgtcgccatgaaccccatcaacaccgtctttgatgccaagcgtctcatcggcaggaggttcattgatgcgtctggccagactgatatcaaggtgcgccccttcaagggcatttctgggcctggtgagaagccaatgaacgttgcccaccacaagggtgaggagaaacagtctgcagctgaagagatctccgctatgggtcttatcaagatcgcgtgagattgctgaagcttaccttgggagcacgatcaagaatgctgtggtcacagtccctgcctacttcaatgactcacagacgcaggccactaaggatgctggctctgattgctggccttaatgcgctgcgtatcgtccacgagccaacaggtgcagctatcgcctatgatgttgaaagaaagctacca

SEQ ID NO: 22262 - DNA, 1018 bp, Zea mays
  Clone ID: MRT4577_120304C.1
tcttgtcaaaagggcgcagcttcaggatcaggatgggagaggcctctcttatctaatctattagctgtccaacatctattccttatggccagccatagacaactcttgcatttaggaggggcccaactcttccataatctttcattttttgaagcttcagcttgtttagagtgagctgtatttgatttagtggtgattctggtggcataacttcttgttttgtcaattaccttgtgtttactagactctgcatctttcccagatagttgtgtgcactctataaaaacaaggattgataggactatgagagtaaatttttgaaattagtgactgtaaatttttgaaattagtggaagcttaaaggggatgtgacccaaactttcaaggagagagttatcgaggagggcccttgggcagaagagggagactcaaatatcatgtggaggaagatggcgatgtgcatccgaaagatagcttcagaagagtttgggttgagtcaaggaaacagaagggaagttaaagacacttggtggtggaacgaagatgtccaaaaggctatcaaggagaagaaagattgctacaaacgcttacatcatgacaagtgtgcagaaaacatagagaagtataggatagcgaagaagtctgctgctgctgctagttctgcttggagggcatgggcgtccatcatcgtggagatgtggccatgcgggacacccaccgccgaataaaatgctgtacttatatgcacgcacgttagaaatgcattagtgtctgtttgatgtgatcttgtgtgtgtgcgcgcgcatcttcatttgcactggaaaatgctttattatttgtgaaggtctgtaaatctgttgtatgtatcttggtcagatgaactctattattgtgccatatatctcgcttgattggacaaatcctttcgaagtttcctcttgtccttgcttaccgatggcagggttagaaggagagagttcgaaaaataaaaaaaaaaaaaaaaaaggcccctagggcc

SEQ ID NO: 22263 - DNA, 206 bp, Zea mays
  Clone ID: MRT4577_120305C.1
cccacacatcctctcttttatctaacctttacaacatcactgtctcctaacatgaacacggtcactcataaaatagtggagataacatacaatatcactgcccgcctgccttacatcaataaacacaacacaactttcattctcacctatcattcctaccaacacttccctcccgtcgagtttatgatacaaatacctctatccac

SEQ ID NO: 22264 - DNA, 601 bp, Zea mays
  Clone ID: MRT4577_120306C.1
ccccccctcgattccttttttttttttttttttttttttggaaactatgtagtgcaattacgactaaccaaagcccatgcatcactcatccatcgcaactaaactactaaaccgattatccctagccgcagcatatgactccaagtcctcgtccccatcctcactatcgctctgatcccgcacatcacgtcgcgacctgcccaatcccttcaaaacatcctcgacattccacgcgatcctctctgcgccaattctggccccgaccaaattcggcgcaccaggccctaggcgcagtccagcaagtcgccccgtaacaaagagcggtacgtcatcgttccacatcatgtcctcagttaaacagggcaggccgccaacgtacttgataggatgctgtttctggatcgtctgcaggaaaggtatggtgcggatatccgactgaatgcccgtagcaaacacaatgtagtcaactggtggaagactaacttgcgacgacgacgtctcgcacgaccaagtcttgaaacaagggtcccaagatatcgatgcgagtgttgtatgcgtgtgtagagcaatcttaccattagcaatgtgcgtgtcgagaatc

SEQ ID NO: 22265 - DNA, 496 bp, Zea mays
  Clone ID: MRT4577_120307C.1
cgacgctgatccttagagcggcgcggactctgcccgatttctttgaccgggcagctctgccgagctggcggactcttccggagtaccctattccgacaaggatgggcattttaataatggtttcgtcgtttcaacaatgtgctatcaaaggaaatagtggggactgctccaaaaattcaacttgtgcacatatatttgaagaaatccatggcttggagggtttatgacagtagcctagttggtctgctcagtaacgactagttaatgtcctttggacaaggtcaagaatagctctccatggatagaaaagtccatctgatgatgctgcacagtactttgttagctacgagtcagatgatgggtatccatgcttagataagccaagatactccacgtaatagaaaactgaaacccggagtgcattttagtcatgtgaatgatcatgcggcccactcttttcttaccctgtacgttctaatttataattcgcttgatt

SEQ ID NO: 22266 - DNA, 449 bp, Zea mays
  unsure (1)..(449): unsure at all n locations
  Clone ID: MRT4577_120308C.1
gggctcgaaaccctagtcccctgctccatgctcagccgcctccaatcccttcacgtgctgggcagccggtgagtgagaagaagagatggccggcaagggcgatggcccggctatcggcatcgatctcggcacgacgtactcttgcgtcggcgtgtggcagcacgaccgcgtcgagatcattgccaacgaccagggtaaccgcaccacgccctcgtacgtcgctggaccgactccgagtgaancatcggagatgcggccaagaaccaggncgccacgaaccccatcaacaccggctgggaggccaagcgncncatcggcaggaggggcagngangcgncngnccagagnganaacaagnngnggcccnncaagggcannncngggcccggngagaagccaanganngnngnccagcacaagggggaggagaagcagnnngcagcngaaga

SEQ ID NO: 22267 - DNA, 1409 bp, Zea mays
  Clone ID: MRT4577_120309C.1
tcgagtttttttttttttttttttacaaaaaccaaacgacgtttatatcagcatagccagcgttccatcatctgttgcacataattacaggttccaagctcatatttttacaacccatggcccaccaaaaagcttgagtggtctaccatacatctatctggcagaccctcacaacctacacagaaaaattgttgacgtgtggccacagcaacccgcctgcgctactcttttttttttccactcagatacatgtaattacaccagaagccctcaacatggggtgcaaaaaaggatgtacacaagaagcatatttacgtcaggatagaatacacaccgtgaccagtacatgtatatatatactctatgcacacataggagcctcgcggggtcagtgcagaagctgattgcagctaaaaataatctgctggctgatgtttataacctcatcatctcttcagagcccttcctcttgtgtccgtgcaaattggtgatacttgaacagggatctcctccatattagtgagcaggatgtataatcctcccagtgggcaggacatgtcctactacgatcatgtgcagaagcgccatgaggagaagggctgcctatatgcatgcatctggccagcgaaacagagcaagggtccatggctatcgttttcaaggtcccctactgggctataaatccacgacagcgaggctgtggtgcctttggctcatgtgaatgatcaaacgggaaatgtcaatttggttgttgctagttgctggtccttttcatgtgacatctgccttcgtctagatgcgatgtttgtccttggttcacatcgcttctgttggaacaattatcctctcgaccttgagcttcagctaatgatttagcctgttcactgcgtgctgctgcttctgctgcttcgagacctgtgagtgctgcctcgaggccatctgctgctgctgctagttctgcttggagggcatgggcgtccatcatcgtggagatgtggccatgcgggacacccaccgccgaataaaatgctgtacttatatgcacgcacgttagaaatgcattagtgtctgtttgatgtgatcttgtgtgtgtgtgaaatgcattagtgtctgtttgatgtgatcttgtgtgtgtgcgcgcgcatcttcatttgcaccggaaaaatgctttgtgaaggtctgtaaatctgttgtatgtatcttggtcagatgaactctattattgtgccatatatctcgcttgcattggacaaatcctttcgaagtttcctcttgtccttgcttatcgatggcaggttagaaggagagagttcgaaaaacaaaagtatttgtgactttttttcccggatgcgtgaaagctgcagtaactttatgttggaatacaaaaaaaaaaaaaaaaaaggccccta

SEQ ID NO: 22268 - DNA, 281 bp, Zea mays
  Clone ID: MRT4577_12030C.1
tctctgaggaagaatcgcatgtcccagagaccgtggattttgaaagtggggaggggtctcatacatcattcggctgttgttaagacatgatgcatccaccaggcgtgatgatcattatagtctatgcatataccaatcatttccttaatattgcttttccatcattgttatttacttgtccttatattatttgtaatccttattagttttttctttattacattataattgtttttatttattcttatttatttaaatttcttctatatttttttttagtc

SEQ ID NO: 22269 - DNA, 430 bp, Zea mays
  Clone ID: MRT4577_120310C.1
ccggccgggctctcgaaaccctagtcccctgctccattctcagccgccgccaatcccttcccgtgctccgcaaccgctgagtgagaagaagagatggccggcaaaggcgatggcccggctatcggcatcgatctcggcacgacgtactcttgcgtcggcgtgtggcagcacgaccgcgtcgagatcattggcaacgaccagggtaaccgcaccacgccctcgtacggcggcttcaccgactccgaggggctcctcggagatgggggccagaaccaaggcggcatggaccccctccacaccggctttgatggccaggggctcctcggcaagaaggtccgtggaggggctggcccaaatggtatccaggtgggggccctccagggcatttctggggccggggggaaacccatggatggtggcccgcaccaag

SEQ ID NO: 22270 - DNA, 717 bp, Zea mays
  Clone ID: MRT4577_120311C.1
cgatgtttatctcctgctcattgtcagcgggcgacaatcccttctcgtgctccgcaaccgctgagtgagaataagagatgaccggctagggtgatggaccggctatcggcatcaatctcggcacgacgtactcttgcgtcggcgtgtggcagcacgaccgcgtacgagatcattgccaacgaccagggtaaccgcaccacgccctcgtacgtcgccttcaccgactccgagcgcctcatcggagatggggacaacaaccaggtcgccatgaaccccatcaacaccgtctttgatgccaagcgactcatcggtgaggaggttcagagatgcgtctgaccatgagtgatatcaagctgtggcccttctaggtcatttctgggcctggtgagaagccaatgattgttgtccagcacaagggtgaggagaagcagtttgcagctgaagagatctcctctatggctcttatcaagatgcgtgagattgctgaagcttaccttggtaacacgatcaagaatgctgtggacacagtccctggctacttcaatgactcacagaagcaaggcacaaaggatgatggcgagattgctggccttaatgtgctgcgtatcatcaacgagccaacagctgcagctatcgcctatggtcttgacgagaacgctaccagtgtcggtggagagaatgtcctcatctttgatcttggaggcggtacctttgatg

SEQ ID NO: 22271 - DNA, 553 bp, Zea mays
  Clone ID: MRT4577_120312C.1
cccctcgagtttttttttttttttttttttttttttttttttttaagggcccaaatttttcctttttggggggagaaaccacccaagaagggaattaccgtggcggttggttaccttaacttaccttattttttttccacccccttttgggaggggaagggattaaaggtacccgacccaaaaccccttttggggaaaccaaattgcgaaaagaaaaccacctggtcaaaacttttttgggaaagggaagggaccacttcccttccccttaatcgaagaaacccgggcggggcaagaacggatttgggaccccggggaaggccgggccctttaacgttcttccggggcctttcaacacccaacttggcccgggaacccggggccccgaaaatttctggggggggaacaaaggcttcccgggggtcttcggggtggcggcaggttcccccccgggggggggcccaccttccccttcgggggggaatccagagggattcccaccggggccgaacccggacccgaacccgggcgggggggggtttttttttttggc

SEQ ID NO: 22272 - DNA, 467 bp, Zea mays
  unsure (1)..(467): unsure at all n locations
  Clone ID: MRT4577_120313C.1
tgggtaccctggtccgcccttcgaacctnatcccctgctccttctcagccgccgccaatcccttcccgtgctccgcaaccgctgagtgagaagaagagaggccggcaagggcgatggcccggntatcggcatcgatctcggcacgacgtactcttgcgtcggcgtgtggcagcacgaccgcgtcgagatcattgccaacgaccagggtaaccgcaccacgccctcgtacgtcgccttcaccgactccgagcgcctcatcggagatgcggccaagaaccagntcgccatgaaacccatcaacaccgtctttgtngccaaggcgtntcatcgggaggaggttcagtgatgcgtctgtccataaggatancnagctggggccccttcaaggtcattttctgggccctagtnaagaanccaatggattgttngtcccagcacaagggtgaaggagaaggnagttttgcagc

SEQ ID NO: 22273 - DNA, 636 bp, Zea mays
  Clone ID: MRT4577_120314C.1
aaaaaaaaaaaaaaaaaaaaaaaaaaaaaaaaaaaaaaaaaaaaaaaaaaaaaaaattttttcttccaccacttccattcagaattttattttccccattccaccgaagggacccttaaaatcctcgtcgttacaacaaggggatccctccccaaagggggtggttcccgttcctctggttcctcctcgcgggggcgggggccggggcctccaaaaaccatttcttttcgggggggggaaaccaaagttacaaattcaattggggggggggggggaatttcacctcggctttcgggggccgggggttcgggaacggttttttctccggggggggggccgccggaatgggggggaagccgaaccgtttcccgaagccgaaggagggaacgttccgttttttcccgccctcttcggcgggaaagtcctcttgttattcgttcccgtttcccccgggcggttattacctccgccttttctccgtttacaaaaattacaattccaagttgcgaacgccttctttaaaggtctccgcggccgcaaggttggggttctctttccgttcgccttggcccaagcccgccgggggttacggggcctattccaacctcattttcccttccgcaacggagcccgcct

SEQ ID NO: 22274 - DNA, 1120 bp, Zea mays
  unsure (1)..(1120): unsure at all n locations
  Clone ID: MRT4577_120315C.1
gggaccctcgaggccggccgggccggggaaaatacatacatacatacggccggggtcagtaaacatagaaaatgcacggtgaagcaagcgcccagcgtaatgaatggactgctggtaccgtagtgatcaccaaggcctcaccggtggtggtccggccgtcggagttggagctgggacgaacgccaatgccaacgccgccgctgcccgccggtgactacaccaccgttcctctctcctctttcgacaaacgcgtgcctcctatgccggccacctcgctgctggtgttcgagcgcaccatcgacgagcccgtcgagacgataaagcgcgccctgtcgcgagcgctggctcactaccgacccatggccggccgcctcgacggtgccggcggcatcgcgtgcaccgatgagggcgtgacgttcgtaggcgcggcagccagctgcgctctcaaggaggccaccacgacggcgctgcaggagatggacctcgccgtgtgctatcccagcttcctctgccgtgacgtggaccccttgcttctggtgcaggtgacaaagttcgcctgcggcggcttcgttgtcggggtgacgtcgaaccacgtcgccgcggatggcctcgggatggcacagttcctgcaggctctcggcgagctcgcgcgcgggacctcgccgctgtcttgcatccctgtcaggagctgggacgagtcgctcccggtctcgtcagccatccctgctgccaaggggagcatggagcatcacgagccccagcatctggctaccctcgacatcgtcatcccgtcggacctgatcagccggatcaaagctgacgggtgctgctcggtgttagacgccgtcatggcggtgctctggcgctgccgcactcgcgcgaccatgtcgcccggcgacgccgaatctcccgcgccgctcaagttcgcctgcaacatgcgagcgcacgccggggcgccggccggatactacggcaactgcatccgcgtgcaggtcgtcccggcgacggccgtcgtggtggccagcagcggcatcggacaccttgttgggctcatcaggcgcgccaaggagaaggtgccggaccttctgtccacgcctggcagcggngcggcagcagatca

SEQ ID NO: 22275 - DNA, 104 bp, Zea mays
  Clone ID: MRT4577_120316C.1
ctctactattcggaggttttaccgtcaacttgcttggatagtataccagagcacgaggaaggctacacggaaatcgtcgaaagaagacatgatagtcctggcgg

SEQ ID NO: 22276 - DNA, 712 bp, Zea mays
  Clone ID: MRT4577_120317C.1
cggttttccctctcgaaccctagtcccctgctccattctcagccgccgccaatcccttcccgtgctccgcaaccgctgagtgagaagaagagatggccggcaagggcgatggcccggctatcggcatcgatctcggcacgacgtactcttgcgtcggcgtgtggcagcacgaccgcgtcgagatcattgccaacgaccagggtaaccgcaccacgccctcgtacgtcgccttcaccgactccgagcgcctcatcggagatgcggccaagaaccaggtcgccatgaaccccatcaacaccgtctttgatgccaagcgtctcatcggcaggaggttcagtgatgcgtctgtccagagtgatatcaagctgtggcccttcaaggtcatttctgggcctggtgagaagccaatgattgttgtccagcacaagggtgaggagaagcagtttgcacctgaagagatctcctctatggttcttatcaagatgcgtgagattgctgaagcttaccttggtagcacgatcaagaatgctgtggtcacagcccctgcctacttcaatgactcccagagcaggcccacaaaggaagcctggggtgattgctggtcttaatgtgctggggaatcctcaaccgagccaaccgctggccgcttatcccctatggggcttgaacacgaaggctacccggggcggggaaaaaaatgtccctcctcttt

SEQ ID NO: 22277 - DNA, 346 bp, Zea mays
  Clone ID: MRT4577_120318C.1
aattcggcacgaggaccggtccggttccgctgaaaaggaaggcggcttggggtgcatctctacttttcccccttctctttcatagaggacgcgcgggcaccaccctctatctcttgacaccgaggtgagaacaggggccaccagagtgcgccagagcctgtccccgttgtggtatggagagccctcgatgtatgagatgcagactatggcgcgtcttatgaagtacgcacgctccaagagactacagctgcatgaggaatgctctgatcatgatagcagagcactgtctgatgagctaactgtggaagcaactagaagacacactctggttgcgtgcacaatccct

SEQ ID NO: 22278 - DNA, 141 bp, Zea mays
  Clone ID: MRT4577_120319C.1
aatttaaaatttctgcccccccacacctcacatacaaatgctctaccaaccgcaaatacaataaacgctgcagctggcaattgaaaacttcacttgcatatcgacggcccacatcacatgccaaagacctacttgacaaaa

SEQ ID NO: 22279 - DNA, 843 bp, Zea mays
  Clone ID: MRT4577_12031C.1
aaaccgcgtcctccgccttgtcctctttcctcaacctaacccccatccagcgaggtttctccgctctcatatagaatcagatatgaagagggccgcgccgtctcaggagcccctcgacgtttcttccggggactcctcgggctcggattccgatcaattaggcggcaaggataagggcgggagcgcctctaaagctgccgcaggggcggaagatgtgaagagggtggtgctgcataaagaatcccaggacgtatcttctgatgatgacctgagctcggattctgatgatgatgctgggaaggggaatgcttggaatgcctttgggctgcccaattcctccaaagctgcttcgacggcagaaggtgctctgatcaggagggccgaaatgtatcagcaatacatgaagcgcattcccgttcctgcttactgtgattctgtaatcccattcacatcgtggctgggactcgccggatcgctgaagcagctgtatgagcaacccttgcattacctcaccaatgtcctcttaaaaaagtgggaccagcaaaggattgggagcgatgatgagcaccggcgtctggacgctatcatccaccctgccagagctgagaccctggtttgggccactgaagaggtccataggctgaccacctctggccagcacttggctagcctctgggcctcagatcccttgtatcatgcttacgtagatcccgtgtttgcttccgtaaagctggagtagcaaccgttatgagttggggggttttggtgtttccatggtgtaagcctgcacactttgatttgctaaaatagcaagtgccaatctagtgatgcgaactccagtcc

SEQ ID NO: 22280 - DNA, 234 bp, Zea mays
  Clone ID: MRT4577_120320C.1
tcggtttagtttatactacctaacacagggccttcgtacacaaaaaaatgccctaggttcctagggcgcgcggattgtaacaaattcgctcccgaagtttcttagctccgatcaggcgcctaagggaattctgtgggccttcccataacaaaactggtataagtacgctcaggttgctcctttcttgccccttggatctttaacatgttctgttttcataactccgtcagattc

SEQ ID NO: 22281 - DNA, 129 bp, Zea mays
  Clone ID: MRT4577_120321C.1
caacattcacgtctactgcagagtataacttttacaagaacgaggttagggacattaagaatcatttaaatataaaagatactatagtagagaggatattaggagaaactttaacgtgcggatcaattc

SEQ ID NO: 22282 - DNA, 323 bp, Zea mays
  Clone ID: MRT4577_120322C.1
gctgaggtgatcctactgcttgatcattaggtcgataatgatgaggtagctctgctaaggggggtgttctaaccaaggggtgtggaggctctataactattccaggggcatcaacaacacgctcccatgagtgcatgacaaagttaaacccacagccacaccatgctaatatctatgtatgatctccatgaaaacgacccaccaatgaaaatattccaagtggcagttatgattatccaatattcacactccgtcatgctacttaatacggattgttttgtggcgcctaaatataatatcgtgtacgtagtattataacatgc

SEQ ID NO: 22283 - DNA, 1055 bp, Zea mays
  Clone ID: MRT4577_120323C.1
ccggccggggccggtcagcacattcccccttcgtcgtcgcttatatagctcccgcgcgacattggcttcttctcatgccgtgaccaccgcacaccagctgggaaaccgatcgagcgagcgaccatggcccgtgctctcaccctcaccgtcttcctcgtcgtcatcgcctccgctgtcgtgtcgttcgctgcggatgaggcaccggctgcctcgccaaagcattcggcctccacaccgtcaaaggcacccagcacgtcgcccgacaagtctgagaaggcccccacggcgtcgtctgaggatggtgcggctacccccgctaaggccccagcttccgcggcctccaactcagaggcgtcaccttccgaggcacctacctccgggtctgagtccggtgccgcctcacctaacgagagcgctgcgtcagaagaggcccctacaagtgcccccgaggactcatcatcggccagcccttccacgtccccgtcggaggctgaggctgcagtatcgcccgatagtagcagcggtggtggtgccacctcgaaagagccttccgccagcgaggctggtgccgcagaggagccgtcggcggccgaggccggcggcgcatcggccgacagcccgcctgaggcgacccacacttcttcagactcgccagcggagtctcctggcccggccgctgaccacgagagcggcagcccgagcatgttgggtggcactggccttgccctggtcatgctggtcgcgaccgtcacgtcctccgccatgctttgtttctaaacgaccacgatcgctctgagtttaatatggtcatgcatgcatggttgtgggagccgatgactacgccttattacgagtctctgaatctctccttaggagttttttaggcttttcgattcatccttttcggggttaccttgtttctatgtttgttttttgggtattgttttgtaatttttaactacgataaatgaattgttgcatagctgtgttttatgtatccactcgtgaaatactatgtgtttttacgttaaaaaaaaaaaaaaaaatttgcggcc

SEQ ID NO: 22284 - DNA, 451 bp, Zea mays
  Clone ID: MRT4577_120324C.1
cggacttttggttttgtttatacgaacccccctggagaggaagaaaggaaatatgcaccatctaatctggatgaggaagcctcatgatattacaaaagaagaggatgctagatcagacactacagctgcaacaccagtcagaaagacaaggttccagacgcgacaaacggatactatattcataggcaaccagttaacattctgtgttatcaacagggaagggttcattagattaatgttcatactcagactatggatcggtggagggactgccaaaccctgaaacatggcctaaccgggaatacgacccaatggtgtaagaataaacaaggtcaaacccaatactggtttctttttcacacgaggtaaaaagcaggtgccacaatgaaatctaagacggacaactaatggcaactaaacaaaacctttggtgtggcacacaaggaggccg

SEQ ID NO: 22285 - DNA, 415 bp, Zea mays
  Clone ID: MRT4577_120325C.1
cattcctgcctcgcaaggatgagtggccggctaggctagctggtgcttggacgtcataagctgcctcctgcctgccgtttgattcctgtgcaacaagaaggctgacaaaaataaaagggggtgggtcagtgaatggacattttaaaaccagttagcaccggcatctaccgcaagctagtttgaagttggtataataggtgcaagcgaataagacggacacgtatcagtggacactgcaagtaaatccaccgccaaatttgccatcctagggaagaaaaatgattccctggttaacttgtggaacccgatttaatttgagacaagacaacaataccagggttgagcttgccacttggtcatgacacacacgagaatacgagatgaccaagtaaaaactggacagaatgcactcaca

SEQ ID NO: 22286 - DNA, 376 bp, Zea mays
  unsure (1)..(376): unsure at all n locations
  Clone ID: MRT4577_120326C.1
tgacgatggccggcgccggcgcngaccagttcatccgggcgnggacggcgctggcgcgcggggaggcccccgcgtggacttttttgtactattggacgctcccgcgcgcgcgcaccccggcgaacgaccttttttgggatgactttgtgtattgaggggcctaagggggggcgccgccgnggagnngngngacagncgaggccgacccggcggcggggggcgcgcgcacccccggccgaacggcangaggaggggacgggnncaaggtgggaagtgccgagggcgggaaggcggcagacgggggggtggccgccgaccggcgggtccaatgggtctgggtgcggcttcatccggccggcgagtcgccggccgcccc

SEQ ID NO: 22287 - DNA, 188 bp, Zea mays
  Clone ID: MRT4577_120327C.1
ccttatttttattttgtttgtttttttttttggccacacgcgaaacgtggtaaactagatacaaaacaggatcaggagtttgcgtccacaaaatcattagatggtcagtgtggtaacagcgtaaagaaactatgtaaagtggcgagggtaatgaaagggctcattttcttgggaaagttttatcattt

SEQ ID NO: 22288 - DNA, 288 bp, Zea mays
  Clone ID: MRT4577_120328C.1
gctgtgtgcctgtcaagattccctccggttttctggctagaaagctcatccgtttccggtttctaagagtcagttcagtggcagagccaccagggaaaagtgaggctcttgggggtggtttgaccctgcttacctgggagcacacttttcccttccccgatgacctgggatggtggccaggccgtgcccttgctgttgctgggcagtgtccttttggaaagggagctgccccaggctttagtgcagctgccaaccctgttaggcctggcctctcgaggcctcttctga

SEQ ID NO: 22289 - DNA, 360 bp, Zea mays
  Clone ID: MRT4577_120329C.1
ggcccggccttaattcccggctcgacttgcccactatttgtaggccgccctaccttttttattttgccgggggccttaataaattatacgggggaaacacacgcaccccaacccattccagcgtgcatcgctaagccatttcgcatagcgttaaaggcttaaagcatttgctcccgacgtgttctacagaagttaaagacaacagcaacctatataggaccatgaggttccatcttactcgaacagctcggttagcctggcaggcagcaaaggggggatagcaaaagcatacgcatgactcgttatgaactctgaaggacacggccctatttcaaggcaatgtaaccaaagcgccggcta

SEQ ID NO: 22290 - DNA, 1071 bp, Zea mays
  Clone ID: MRT4577_12032C.1
aggcccaaaacgcctccaagccgtccaagggtactcgagctcgagctacactcggcgtttacggcgccggcgatcacccaccgcgtcctccgccttgtcctctttcctcaacctaacccccatccagcgaggtttctccgctctcatataggtgaggccccaaaccccctgcccctctgcgttctctgcgagcttcggattgagtggcgctgaccgcgtttgtgggggatcagaatcagatatgaagagggcggcgccgtctcaggagcccctcgacgtttcttccggggactcctcgggctcggattccgatcaattaggcggcaaggataagggcgggagcgcctctaaagctgctgcaggggctgaagatgtgaagagggtggtgctgcataaagaatcccaggacgtatcttctgatgatgacctgagctcggattctgatgatgatgctgggaaggggaatgcttggaatgcctttgggctgcccaattcctccaaagctgcttcgacggcagaaggtgctctgatcaggagggccgaaatgtatcagcaatacatgaagcacattccggttcctgcttactgtgattctgtaatcccattcacatcgtggctgggactcgccggatcgctgaagcagctgtatgagcaacccttgcattacctcaccaatgtcctcttaaaaaagtgggaccagcaaaggattgggagcgatgatgagcaccggcgtctggacgctatcatccaccctgccagagctgagaccctggtttgggccactgaagaggtccataggctgaccacctctggccagcacttggctagcctctgggcctcagatcccatgtatcatgcttacgtagatcccgtgtttgcttccgtaaagctggagtaccagccgttatgagtttggggggtgggtgggggggtcttcttcttctctgcctgttttggtgtttccatggtgtaagcctgcacactttgatttgctaaaatagcaagtaccaatctagtgatgcgaactacaatccattggaacttcaaatatctgaaaaaaaaaaaaaaaaa

SEQ ID NO: 22291 - DNA, 574 bp, Zea mays
  Clone ID: MRT4577_120330C.1
acaccaaccaggtagtggttgcggagggcctcagccagggaccaggaactaccggggcggcgatcgacgtcaggaagctcatggaggccatcgacatcctggaagctgatgcaggccagctacattgcgccacctgtgcgaggacatgaacgtgcgccacctgaacaagaacatcaaggcggccgagaaggaaaccgccatcaacccggccaacaaggtgttgaccatgaacttcagggacaaggtgttcatcacccgcttcaaccagaaggacctgatcacctccatcgaccacgaggccaggttcacgctcgcggtggaccagaacatggccaccctgctggtggagcacaacctgcgcaccgggctggcggaccacgagctctgcgtgttctacaagataagcaagccctacgaggagttcaagatcacgatgtcccaggaggagctcgccgccctgctggccgacgacgaggacgccgcccgcgtggcgaaccgcgagggcaccagccccgtggtgaacctgatcccgtacaggcgcgaggtactgctgtaccggttcctgcacgaggag

SEQ ID NO: 22292 - DNA, 195 bp, Zea mays
  Clone ID: MRT4577_120331C.1
aaataccctgcttttcttccatttttttttttttttttggcaccacaagagagggtttttcaaagcctccccccattaattaatttttttacccacggactcctaattaattctttttccccaaaataacaaaccttttttgaaggaaattggcccccaccgggcggtctttaaccaaaaggcccgtttgattca

SEQ ID NO: 22293 - DNA, 756 bp, Zea mays
  Clone ID: MRT4577_120332C.1
ttgggtacctcgaggccggccgggaagcatttccttctgagctgtgttgtctgaggatttttaatcttctagttgcacgctgtatctagctaaagaggtgtatagcagcaccaaatggaagagataggtggtggacctccggacaaacactgcttcaatgcctccgtacgccaggggcacccgaccatgactgcctccaacacggattacgaagctatggggacggactcgagcgcaaaatcatttctggatcgagatacgcacaggtcatggcgaatgaagcttcgctgccttcgccaccgaggaccatgtgcaaactcatatccatgctctggaactgaaagagctcgaccagcgagaccttactcgtaacacaagtccaacatccacgtgtacgagaacggggggatgtccaccatcgggggcgtgcaccccaatacagggaagtaacaaccccgacggcaccatgtatatcgacgagatcggtggctacatcagggatgctgaactccattacgcgaagaccagactgatctgcttgaacaacacacatgacaatactgactggaaagtgtttatccgctgaagacaatgactagggtgcgcttatggtacaagagccatggctagaaacatcatatctatggatctctgatcttcaactcgtgtgcgatagttggagttcctgtagatagactcgtgaaacctgctgattcatgatcggaatgtctatccaaaggatgtagtgcacccgtc

SEQ ID NO: 22294 - DNA, 309 bp, Zea mays
  Clone ID: MRT4577_120333C.1
gtgtaattagaggagacccctcatggcacaccatgccagactcggagctggcggggaagattgtttaaaccattcaacacaaagcatttaaaggaacctcaatggaatcactggacaaagacttcattggatatgctaagattgaccatagtctcgcaaaattctggactatcttttagcaataacatgaagattccaattgtcaaattgaacatatggaacttaagcattgaattcaaaaactgggccttgaatcgaccgatcaggatatcaaagatgtgtttcaagcatttgacatatattaacaca

SEQ ID NO: 22295 - DNA, 392 bp, Zea mays
  unsure (1)..(392): unsure at all n locations
  Clone ID: MRT4577_120334C.1
gctgncgnccttttttttttttttttttttttacaaacagggtcaagcggactttactttacaaacagcgtcaaacaatattatttacagttccgcattctttattttacactacccatgaagacgggctggggttgagttggacccacaaatctttttctttgtagtcaatgttgcaccagctctgtacatattgctttttatagagacattaatttttgtattcatttaaaaaacaggctgcggaaaagctaaaacattttattatttggaacggagtattttactttcgcgctagtcatatttgaatgaaaaccacggcgaacaaatttacagaaaagtggagacttaaaaacatttgaaactattttatttggaggcttctggatttt

SEQ ID NO: 22296 - DNA, 270 bp, Zea mays
  Clone ID: MRT4577_120335C.1
aaacctaatttttgcggaaaatactatccgatctgccatcaaaaaaatgcctcacgttcggtcacaaataccaaagccgcagcacccgacaagacttaaaaaaccggaaaactctgtaaccctatccctaatgcccacgcccaggcacacacctaaatagggaccgcgggtggggcaaatttcctaaccatcaaagaaaacatccagaaatatagggactaaagagacccaagggagaagcacgacaccctctggggatgacatggggag

SEQ ID NO: 22297 - DNA, 745 bp, Zea mays
  Clone ID: MRT4577_120336C.1
aaaaaaaaaaaaaaaaacccccaaaccccatccatcactctcgcctcgcttgactcctccttggaagcacagagagagaggagagcatggcgtcgtccggtggcaagctcttcaccctggaggaggtcgccaagcacagctccaaggacgactgctggctagtcatcggcggcaaggtgtacaatgtgaccaagtttctcgatgaccaccctggaggcgacgacgtcttgctgtcttcaacagccaaggatgcgaccgacgacttcgaggacgtggggcacagcacgaccgcccgggcgatgatggacgagtactacgtgggcgagatcgacgcgaccacgatacccaccaaggtcaagtacacgccgcccaagcagccgcactacaaccaggacaagacccccgagttcgtcatcaagatcctccagttcttggtccccctcgcgatactgggcctggccgtcgccgtacggatctacaccaaggcggagtctgtctagcaccgtcgtcttataccagtcagtcagtcagtcattcggaagtgtccaagagctgaataagttttagtggggatttgcatattttgtgtaccagcgtcaccgtcctgtcatggaatctgggaactgctctcgacccgtcgttgcgttatggttctaagacgtccgctgttgaaatcgtgactcgggaaaacggatagatacttggctatattttcatatcgctggtgaatgttcagacatacata

SEQ ID NO: 22298 - DNA, 472 bp, Zea mays
  Clone ID: MRT4577_120337C.1
ggctcgaggaagggaaaactgcgtaccgcccgctggtcgtcactccaggcaacagtggtagtatatcatgtcatgtccttcaattgtagtgtctggtgtccgaattttttgttttttagctcattttgtgacacaaatttacgtttggacccccagaaattttatttgcacgtttggacctgatgctcagcgccataggctgtggcgccgaggtaacacagctcggcgccgagctgtgacgtggcagcaacggctacttgcgcctagggctgacctggcaccgacgtggggcgacgcggcctcgtagctcggcgccacagatcttggcgccgagctacgaatgcctatagaaacgcccgcgcggctggtcgatagcagcgcattttctctcattttcaaacttcgtcaaaatttgctacattcaaagatttgagtttggttcactccgtaaaccaagatatgatgccccact

SEQ ID NO: 22299 - DNA, 243 bp, Zea mays
  Clone ID: MRT4577_120338C.1
gcacacccacctacgctagctcttaattcttttcgagctttatcttcaccccccactggttcccccccccctctcttcgcgccgggtcgggctttattaaacctttttgtgcgtaccacctggtcctaacctttctctctttcatataaaggtatcattgtgctgggcttaagaagttattctcctaagggctaacaaaacaatcatgcaacgaatcagtgtctcccttcctccaacaaagtc

SEQ ID NO: 22300 - DNA, 316 bp, Zea mays
  Clone ID: MRT4577_120339C.1
ttctattctacctgcagcgcaccacatgggcccagcaatagcagcgtcacatggtggtggccatcgtcacgtcgagctagagatgtcaatgggtaattccccatcgggttatagcatcccagacccatccccatcatgtttgatacatccccatacccatacccatacccatcatgggtacaaaactcatcccatacccatctccattcgggtttcgggtccccaatgggtccccatccccaattaaggaataactaggtactaacatctagcacaaattatccagatttcatacatcaccacatcgggcaagcac

SEQ ID NO: 22301 - DNA, 436 bp, Zea mays
  Clone ID: MRT4577_12033C.1
agctcgaattcgctcgagccacaggtcgcaaggtttagattagaccaccgcaccgacctgccggcgcgtcgtggatttcagaaccgccacctcaccgccgtcctctgcgtgtcgtcgccgcctctcgctccgtcccactgcagctgcagcggcgccaataagcagagctgctctctgcgtcatgcgcggcagcaaatgaggcgcctccgcgtttcccgcgccgtagaggtggacgcgccttccaacggcgcaccgtagccggaggaggcggaggagccgcccgtcgacttcgactttcttcagcccgacgctgatgccggacgggacgccggacgttcactaccagacggagcgcggcgtgcagaagctcagggacatcatgctcgactgctacatcgacctctacgggccctacgataaggtttttctcaactgc

SEQ ID NO: 22302 - DNA, 414 bp, Zea mays
  Clone ID: MRT4577_120340C.1
attcactgtttttttttcttttatttttgtttgtggttgctggtcatggtgcacgtgctgacgcaaacacacggggtaccgagaaatggtgagccaatgggtagagcaggaagtgcggccaggagccctaccttatggcaaccaaccgggagctgaaccggtacaacccagggcgcggattgggaaacgggcgctagctatacagcttgaagagcaacgcacggggcagagaggcgctgaccaccgccggaggatgatgaaagaaacccatccggtgggggaagcacacactataactaagatgaggcccggactgtgcgacgtggcagcgggacacgcaagcgccgcccagccacctaccacagcgcgggatgctcgtgcgggggcaggacatcccagctggagctgaccatc

SEQ ID NO: 22303 - DNA, 619 bp, Zea mays
  Clone ID: MRT4577_120341C.1
gtctgttggtcgcttgctcagagaaagtaccaataagaatggcttatgctttgttatttcaataagtttaagtgttcgatagactgaactttcctaaaaaggtttagttcactgaatattttggaggctgtcagtgtgagtgtaggacagtggaccatctggcgatttaagaaaacaagtctcttgcaacattgtaaatgtatcatccgcttccagaaataaatgtatcaagccaattaaggttgcaggatatatttattttagtttagatacatggataaagcattgagatgatttcatatagattcagattatatttagacccatcaaacctttgagcaatataaccaataccccctaaatatactggttggtttaatctttaagtaggttcgagctgctaaatgatgcaattttaaacttgaaatatgttatgttttctatatgtcacggataaagcgttgaggtgtttccatgtgagtgactcgaatttgcaatcggtatgagtttgtaactaaaatcaatccacaaattcaggtttcacatactatgtagctatgtgtgctgaattattttaaaaaaaaacactaagttattcctgtttcgtgatgtctgtgcg

SEQ ID NO: 22304 - DNA, 254 bp, Zea mays
  Clone ID: MRT4577_120342C.1
gtggctgggcgctgagaacagagatctcaggctgggcgcaggtctggggcttcacggggttcctcgggtggtggttgtggtcgtcctggtcgaagtggtgcaccaggatctcgttgatttctcgtcggggcgtggatccaggggttctcggtggtactcggcgaggagttcctgatgcgcgtgcttcggttcctggagttgtgggcgatgggaggccagggtccgcaatgtaccgtgtgctcagttctctgctg

SEQ ID NO: 22305 - DNA, 370 bp, Zea mays
  unsure (1)..(370): unsure at all n locations
  Clone ID: MRT4577_120343C.1
ggtgcangacgatggtgaagtgcagagttcttcggcaggacaccatgtccatctccaccgcttcccgccgcgccctcagccggatcggcggcgccctccggcggtccttgtcgtcgtcgtcatcgtcggtgccggacgcctcggggtaccacgtgtcgggcgggccgagcttcatgcgcgcggccgtgttctgggagcccggccgcccgctcaccatggaggagttccgcatgccgcgccccaaggccggcgaggtcctcgtcaagaccaaagcttgtggagtctgccactctgatctccatgtcatgaaaggcgagctccctttcgccagcccttgcgncgcaggccatgagatcaccggggaggccgc

SEQ ID NO: 22306 - DNA, 678 bp, Zea mays
  Clone ID: MRT4577_120344C.1
cccacgcgtccgcccacgcgtccgggtttctggaaacagtaaaaacatgtgctagtgggtcgaaagcaaaaggaacttgcatcgacaaattgtgcatataagtgaaaaagttaactgtatactgtatatattgctagatagggaatgtatctgagcttttgagtaacttagctattagagcattctgacttattatatgaaagttgacatcactaacaactgcctaactagtaggctaataacatcataattgcttgtaatttgcaggaatataaaatttcttggaattaccatttgaagtataatatggaaactgcttgtttaatttgtttacatttgtgaggagctttcatacatagttaaatttgatggagaaatgatgcactagtgtaatagtagcttactgtcaaagcaccctaagacatgtgcaggtcctccctaagtattgttttttagtcttcaatgggccagtaattcaatataatgttcatgtattggagtgcagattggggcccaaagatcgatgttgttggattttgcttccttgatcttgcttccaattacgtaccttctgaaccacttgtggaatggcttgaagctggtgacaagcccatatatgttggttttggtagtcttgcaagatcaggaggtcctttctttatgtcttgtctttatata

SEQ ID NO: 22307 - DNA, 358 bp, Zea mays
  Clone ID: MRT4577_120345C.1
ttcacgcgttcgcccgacccgatccgcttgccaacgacttccggctccactgtcgctcgcgctcccttcaatcccacgcacgacaatggtggccgatcgcctccgcctcgcgctgatgctcttcgcgtgcctctgctccacgtgggcagcgcacacgactggagccgaccatccgcctgacgttagagcgcgcggctgtcgacgacgccgacgggacccggtggtccgtgctgatcgcgctatccaacgggtactacatgtaccgtcacgagtcggacatctgccatgcataccagatcatgatgatgggcgcacttaaggacgtgaacatactcgtctgcatgtaccatgacatctc

SEQ ID NO: 22308 - DNA, 214 bp, Zea mays
  Clone ID: MRT4577_120346C.1
actacttctatgacaacgtcgcctgcgatctacgtagagtctgtcgtgttgaggatcgatcatgacgtcctactgcggaaactgcgatcatgagctcattgggaatgatgcctaccttcggaactgcggtaaaggtatcctatatgctgatgagtgcactggcatcattggcacgcgcctgtcgagcatcaatgtcgatcacgttggctagacc

SEQ ID NO: 22309 - DNA, 118 bp, Zea mays
  Clone ID: MRT4577_120347C.1
cttttctctttgatgagtatagcgaaaagaaacaaatcaatacatgtgtgccatcaaaactatcactttacctacaaacatccacttttcaatacaactatccttcactcttccatct

SEQ ID NO: 22310 - DNA, 1598 bp, Zea mays
  Clone ID: MRT4577_120348C.1
ttgacgcgtgggcggacgcgtgggttcacacgtaccgccggcggagaaggaaggaattggtcgccgccgcctgcctctctcctcctcctcctccgtcagtggctgtggccacgccgtgctaagctaagctaagctaagctaagcttgcgcaagtgacaagttctttggttggttggaggcagagccagatggcatcgtcgtcgcggctggatctcccgccggggttccgcttccaccccaccgacgaggaggtggtgtcgcactacctgacccacaaggcgctggacagccgcttctcctgcgtcgtcatcgccgacgccgacctcaacaagatcgagccgtgggatctcccaagcaggcaaggctaagatgggcgagaaggagtggttcttcttctgccacaaggaccgcaagtacccgacggggatgcgcaccaaccgcgccaccgccagcgggtactggaaggccacggggaaggacaaggagatcttccgcggcagtagcagtagtccccgccgcgtgctcgtcggcatgaagaagacgctcgtcttctacacgggccgcgcgccgcgcggaggcaagacgccgtgggtcatgcacgagtaccgcctcgagggcagcctgccgcccaacctccaccgcggggccaaggacgaatgggctgtgtgtaaggtgatcaacaaagacttggcgggcaaggctgggcaacaacaaatggcgccgccgccgcacgccgtgtccgtgggcatggagcgcagcgactcgctggccttcctcgacgacctggtgctcgacaacgccgacgacctgcccccgctcgtcgactcgacaacgtacgccgccggctccctcttcgccgcggcggggacgaccacgacgacgaacgacgacagcggcgggtaccaacaagccaccaaggcggagccgcagccgcagctgcccgcgccgagcaacagcccgtaccagcaccagcagcaggccatacggaggcactgcaaggcggaggcgccggcgccggcgatggtgctgagcccgtcgcgcgagacgccgggcgcggacatgttccagctccagcatgtggacgagctgctccagctggacggcggcttcatggaggactactacaacatgaacatgtggaaggtctagttaggctgggatcgaccggccggccggacactagtactatacgtaattagttccatttagtccctatttaatttgggtccatcggtttgccgggcggatggattgattagttggttgattggatatattaacctgttattagacgcagaagagtggaaggaaaggccggccgcgccgattggcatggacgaggtctgtctgacgaagatgtgtcgagacctcgccggcggtgtggtttgtgatgattggttagttggctaatcttcagtagctagctacgtactgagtaattagaacagctagcagtagtgtgtaaccgcgcgcgtgtcgttgcctctggtcgacaggattgaagcacgcattgtgtacataataataggtaggagtcgtcgtcgtcgtcgttgagtgatgagaaaaatggatgaaacatactatatatgctgttgatt

SEQ ID NO: 22311 - DNA, 424 bp, Zea mays
  Clone ID: MRT4577_120349C.1
ggaaaaagggggggcaggggaaaaagcccccctttttaatttcgttttgtttcccaaaggggggggttgcataaaacaaaaaaggggcgacaggagctgcattgggccctcccccgggtggatatcttaatttgcaaaaaaaaaacgggcccctctcggggggggttttaaagctttccacgaaagctagggcttattccgccgttccaacaattttttttttggggggctcaatggcggcaaccaattttttcctgttttttttgaaaaggagggagcggtacacaaaccacccggggtaaccgaggcccacaaactccaaaatcttggggagcaacggccccgggtttatggcccccacaacaacgggcgttaaccatagcgccccgacggccccccccccctacaagaggacggggggctt

SEQ ID NO: 22312 - DNA, 193 bp, Zea mays
  Clone ID: MRT4577_12034C.1
ggaggaagcaggaggaccgaggatttcttccttaattccgtgagaagatagcaatattctgtttttttccttccctagacccttgcccaagtcttggcttaatacattagacattatcgagcccacactctagcctatacacgacagcccaaatataatattaaacccagttttgttcatctactcctttttt

SEQ ID NO: 22313 - DNA, 263 bp, Zea mays
  unsure (1)..(263): unsure at all n locations
  Clone ID: MRT4577_120350C.1
ggccgggnattggcgacactatagaatgccggccgggccggggctcccatccactcccaagccccaagtcccaacacctcgtcgtcgtctagcagaggcagcggcggcggtgatgacgacgagtctgaagaacaatcgtaagaagcgcgggcacgtatcagcgcctcacttgccattcccgactgattgtgatgtatcagtacgacgaagcattcgccatgagattgatacctcccagtctgttgctgctgctcctgcccctc

SEQ ID NO: 22314 - DNA, 765 bp, Zea mays
  unsure (1)..(765): unsure at all n locations
  Clone ID: MRT4577_120351C.1
tggggacccccgggttgccggatgattgagtggaaacacgacattagaaccacaagataaatctatatcaaaaaagtacaaatagctagcacattttgagatgtctatccttgacgacatgtgtggttaaccacttcctccactggaactgccattagaatatgtgaaccgtctattgttccaattggttataagcacttcctccacaagatatgcagatcatcagggtacttcagtccttatttttgtatctcgcatgattgcatttgatcctttatcatggttattgcatctataaaaataagtaaataaattagcaatgcaggggtgggcgctgggcaacgaccggcggcctgtggtggaaactcgaaaggaaaccctacttgctcgtggatttcataaacagtgtcggtggttaatttctctgaaattaaccaactccacaagagtaggtgaaaggaggaagaacatgctgtagtatttgtactcaagggaaaaggctgcttttagataaaagtagctacgagcctacgacttcatatcggcttggttgacttttggttttcgaaaaataaaaacaggttagataacctagccaaaagtacccaaggttatttaatttcatgcgttggtactcctgcgtgctttgcccactttgacttcgcagcctcgcatttaccattttctacctctttaaaatcaaatccaggnggtgaatnttctgtaccnncgaggtgtgccgtcatggaacagttttntcgtttc

SEQ ID NO: 22315 - DNA, 275 bp, Zea mays
  unsure (1)..(275): unsure at all n locations
  Clone ID: MRT4577_120352C.1
ccggtcgcccaccgtccgcgccgcacgcagcctcgacccaactcgccgtcgccaggtgagcaagcancccgncgcctctcgtccttgccgcgtcgccgttgcctccacctccccgccgcctctgtcgcaccgagtcgatactgcagtaaaaagagtcccggtgaagtgagcggggtgcagagcggcccgaccngtcgagcccggcaagcccgcacttttaagactccgntttactgataaaacctcgagaggggaagctggtgatcgaggtaagt

SEQ ID NO: 22316 - DNA, 676 bp, Zea mays
  Clone ID: MRT4577_120353C.1
gccggccgtatactcgaacctcatcttctctcctgttgctcggaacgacacaccgcccgaactccgatctccgatccccgatcccctcgtcaatccaagatgcagagcttcgacaagactctcactgaaaagactatcaccctcgaaggggagtgctctgacaccattgacaacggcaaggacaagatccaggacaaggaaggaatgcccccggaccagcagcggctcatcttctctggcaagcagtggaggacgaacgcacacttgccgactacaacatccagaacgagagcaccctccaccttgatctccgactcatgagaggcgtgcagatcttcgtcaagaccctcaatgaaaagactatcaccctcgaggggcagccttctgacaccatcgacaacgtcaaggccaagatgcaggacaacgagggcatccctccggaccagcagagactcatttttgctggcaagcagctcgaggacggacgcacgctggccgactacaacattcagaaggagagcaccctccacttgctgttgagtctcatgagcgatatgcacatcttcatgaagactctgactggcaagactatcacccttgaggcccagtcttcagataccattgacaatgtctaggccaagatccaggacaaggaggtgatccctccggaccagca

SEQ ID NO: 22317 - DNA, 269 bp, Zea mays
  Clone ID: MRT4577_120354C.1
ttcacgcgttcgcatcccggtcagaggttgtgccctctgcgaaacaagtctgccatgttcgacactatggtggtctgcttccttttcaaatagactgacacgatcacctagtacgtgatcatccataggatgctgatcttccagtcgcgcatccagtgacactaatgggagttctacatggtcatatccgggaagatgacgatgctctggaagagttggagctttcacgtctggaagaccctgactgaccagatgattaccaacgatgc

SEQ ID NO: 22318 - DNA, 320 bp, Zea mays
  Clone ID: MRT4577_120355C.1
aaaaaaaaacaactgctgaaaatttattcccccccctttaaaaggggtaacccaatgattcaaaacccccaaatcccatgtccctcacaggtaaaaaccttctcagttcgacaagctactatttgccccctttaaaaaatcactcccatcccctattttatttaccctctcccggaaaccagtcccccatgaaaggctataaaaagtcttcgacacccaaaacccgatctacattttaaaagggaagcccaaaatttcctatcgggcccaaaaaaggaaaggttgattaattgcgggtgccacctccttttttgataaac

SEQ ID NO: 22319 - DNA, 510 bp, Zea mays
  Clone ID: MRT4577_120356C.1
atggctgtgggccataagggccgcgatcccccctggggcgtgacacaggtggggtggaaacatctcagggatgttgctagagccatcaagggggctgacctttttatgccacatagtgtggggaggcttgctaggattagaagaaggcccacatatcatcgtatgatgggtcaggcagaggccaccgagggcctccatgacggtgtcgagattcctaagcgaaaggggtcgggctttcgaggccttgaccatttcccctttgctgttgaggacgaagtcgaggctcctaaaatggatggtcattatgagggtccaaacaacatcgtggtcgaccatccagagcttggagaagaaaacgtcgggaacatgcaaggcccctacctggcgcaccaattgtcgatggtttgctcagtgggtgcaagatttataccggttcggacagaacgtcccctacatccagactttggtggctcgcgctaccgccaccttgttgctcaattttcgcagtag

SEQ ID NO: 22320 - DNA, 423 bp, Zea mays
  Clone ID: MRT4577_120357C.1
tttttaaccctttgccgagccgaggatccgaggcgaggatccatcggttcgcgagagcgttgctccgtgtagctacaattaaggaaccgtcgccgacgcgcgcccctgccctcgccgccgcccggtctcgcctcgacgcctcccatagcgatctgcttactcttttaagccggtggccggagctccggcggccctctccctcaccggattcggcgccctcttgagaggattcggcgccctcttcagagccctcggtaacctgctcgaccgctccccaccgcccgcggtcatctcccacctcgcgcgaccgacgtactatcttcacctgttggtcgcccctgtcctcgcgacgaagacgccgccggcaagctatcctgtctatctctctatctatctatctatctcatcagattgatatcagct

SEQ ID NO: 22321 - DNA, 537 bp, Zea mays
  unsure (1)..(537): unsure at all n locations
  Clone ID: MRT4577_120358C.1
naannnttttccaaaanngnaaaaaaaaaaaaaaaaaaattaaaaaaaaaaaaaaaaaaaaaaaaaccccgagaccgccaccatccggaaggggaagaaaagggggaagcgccattgcggggaaaagccacacggggggcaataatggggccgccggaaccgtcctcaagaacaaccctctcccggggggttcggaacctcctcctcctcctgtccctgaaggtcgccgcgcccgttgccggggccatgaaccccgccgaggggaaaacgttgctccgcgtaatgaaatccgtctccgccaaccgcaattggggggaggccgccggggccaacccctgaagcgcgccggggccggggttcaagggcaggcccggaaccgcgggggcgggaatgcacgtcgcgcgccttgatttcggggggccgccccacccgacgggaaggaacacggccacgttcccgttcgccgcgttcgcgttgccgaagttgcggtcgttgttcctcgtcggttgtttaaggaacccccgggccgtcgccgct

SEQ ID NO: 22322 - DNA, 674 bp, Zea mays
  Clone ID: MRT4577_120359C.1
ggggggggggtgtttttttttttttttgggggccaacacacagagggcacaacagggccattaaaccaacgaagccccaaccccgatttatgacccacaaaccacagatgtttattaaacgaccacatccatttagagggaccccagagggcaccagggggggcaaatacccattttcagcaacagcttaaatgacccatgggttactgaccaccggggaggcggagcaccagggggaaagggctctccttctggatgttgtaatctgctagggggcggccatcctccaattgtttgccaacaaaaaacaaaccctgctggtctggggggaagccctttttggcctggatcttccccttcaccttggcaatgggggcggagctctcaacctccagggttatggtcttgccaatcaagggcttaacaaaaatttgcataccacctcgcaaggggagcaccagggggagggggctctccttttggatgttgtaggcggggagggtacggccatcctccagttgtttgccaaaaaaaaacaagcgctgctggtccgggggaaagccctccttgtcctggatcttggctttgacattatcgattgggtcaaacgactccacctccaaggtgatgggcttgccaatcaatgtcttcacaaaaatctgcatgccacccct

SEQ ID NO: 22323 - DNA, 490 bp, Zea mays
  Clone ID: MRT4577_12035C.1
ggccgcttttttttttttttttttcggatgcacttccggtattcggggtcgccgcagacagcagccgtactgcttctttcttgcactataactcattggcactctataagcggtctccgcccatggggggttaatgggagaacactgaaacaggttgtcacgcccttgccgttttgcatggcagggggtggtgccgttgcagcatgaacccctcgctcggcctggcgtgcctgtataacgcttgctgccgttgccgggtctgtaggcacaggggcccacatcctttctgtgcctgctggctcctttctgttgccgctgcggtatgctgaactctgcactgcttcttctcggccgtgtggaagaccttgctctggttgggccgcttctatctgcctcgtccgtgcgtcgctgccgtcggttcgcttggctggctggtgcgggctgcggggggcttggcttaacccggtgtggctggcctttgcggctcggg

SEQ ID NO: 22324 - DNA, 155 bp, Zea mays
  Clone ID: MRT4577_120360C.1
cccggggcccccgggccctgagtttggccgcgtggcccgaaacacggcacggggacgctagacaaaccacgggcgcgagcgccaaactaactgagcgcggtacccacctttacgggcaccaaaaaccatgattcgtgcaaccatatggagggccc

SEQ ID NO: 22325 - DNA, 285 bp, Zea mays
  unsure (1)..(285): unsure at all n locations
  Clone ID: MRT4577_120361C.1
ggggaccctaactactgaaaatgaagtccgtactactacactcataagctatgggttgtcggttttatagaccctgtggacaccacacannacctgagccgattccttggcgaacattcagtgccgaccggataacactcaagagacgccaaatgtgtgtatgcaataaatggttgtgacgcataacacaaacgtgtttaataaaaagctgtctgcactcacccaatgtgtgtgcacaaatcaaaatttcgccctggttgctgtcgtggaaatatgttgaagagt

SEQ ID NO: 22326 - DNA, 707 bp, Zea mays
  unsure (1)..(707): unsure at all n locations
  Clone ID: MRT4577_120362C.1
ccggccggggacgttcctctcccctatcttcttcctggccgcgtcctctgctccgtcgtccccagcgctggccgagtccctccatcgtggcgcccctctctctggtcgagctcctctccctccctcgtctccctgcgcacgcttctcttccatggtcgccgtggacgcgccagtgccctccctgctccatctccctccgcgccgcgctcctctgccggcgcccacctccatggctgcggttccctggcgtccgctcgctgtgaagctccctggcgcgcctcctgctttcccaagccgcgcccttctttctctctctggtctgtgtgccgcacgtcctggagctcccatgcgctcggaccgcgcctctgctcgtcttccacttcgccggatccctgctcgcgtccatggacactgtaggtctccagccgccggagttgcagccatggctccctgtgtttggttttggccgtgcccctacacccttcctcgccggtgacggctgctgcgagcgccctctcccggctgctgctcttccccggcgcgttcctgctccagccatggttgccgtgcctgctgcttctccgcgtgcgagctcgccggcgttgctcgccctccagctcggctgaccgcgctgctccctgcatgcccggccccaagctncatggccgctgcgcctccccagccgagcttctctgctgtgtgcacgc

SEQ ID NO: 22327 - DNA, 265 bp, Zea mays
  Clone ID: MRT4577_120363C.1
gggccaacattctgccccctcatcacacacattatgccccatgccctattgttccaattccaaccgaggtatctttaatgtctagagacaccaaaacgccgaccagtaacattatcctgaccaacaacaccaatcacctagtcgggagcattacttccttgctgagatcatgaagccattcaagaccttaaacatcctattccacatctttgagatatacatggacaactacgattgctacaactagtaccactacacgtacaca

SEQ ID NO: 22328 - DNA, 942 bp, Zea mays
  Clone ID: MRT4577_120364C.1
agctggcgaaatcaagccacgcgtccagcttgtccgcacggccgaggcggctaggcagctcgcgccgatgctcgaagtcgggaggccaagctaccaaggccgcagctcagtctaccaatcttcctcaaagatgatgtcggctatctccgtggctcatttggggtgcaaagacatggacgcgttggacgtcggagtggtagggaagatggtggacacgcagagcctatcctcggcacttgagaaactctatttctgggagaggaagctttatgctgaggtcaaggccgaggagaaaatgcgcctacttatttccaagaactccaagcgactgaaattattagatcaaaagggtgcagagcctcaaaagattgatgcaactcgaaatttgctgagaaagctttcaacgaagataaggatagctgtgcgcattattgccaagatttcaagaaaaataaacaaattaagggatgaggaattgtggccgcaagttaacgctttgatccaagggtttgtactaatgtggcaagataaattggacgcttaccatagacagtgtcaagtgatatcagaagccaaaaactgtacctcggttttgtcaggtgaaaatgggcaggatttggtgttggagcttgaggtagagctgataaaatggatcatcagtttttcctcttgggtgaattcacaaaggaactttgtaaaggcactgaatggatgactagcactctgtcttaactacggtcctaactatgatactgcggatgttccaactggagcaccatcttacatgggcgctccattgggttctccactctgcttcgttacctgcaacaaatggtctcaagccatggatcggatttctgagaaggatgtggttaatgccatgcaagctctagtgtctagcgtgtggcacctatgggagcagcagtatcttgagcaaagtga

SEQ ID NO: 22329 - DNA, 169 bp, Zea mays
  unsure (1)..(169): unsure at all n locations
  Clone ID: MRT4577_120365C.1
atcggtccgacgcgtcacgcttcccgtgctcggctcgtggtcttctctcgtggtatatagccacagctcatgnggactgggtctcgggaggggcggatgcgccgattgcgagctcgtcctagaggacctaacgactgcggcttgccggagctcgtctggatggactcgg

SEQ ID NO: 22330 - DNA, 1166 bp, Zea mays
  Clone ID: MRT4577_120366C.1
ctccatctaaaatagcagcgacgagacgagcgagaatatctgccaattcaaaaccaaaaaggagaggaggggagccccggacggagaagagaacagaagaaaccccgcggccaccccttcctgcctatatttctctctctgtcttgcgcgacagggagagaccagcgccaacacctccggtttcttgattgggtggtgatcggtgaaggaaggagaaattaagatgagcctcttcgggcttgggagcaagaatcagaagacgttcaggcctaagaagaatgcaccgtctggcaacaagggtgtgcagctgaagaaacacatcgatgcaaccttaggaagcgggaatttgagggatgctgtccgattgccaccaggggaggatctcaatgaatggctagctgttaacactgttgatttcttcaaccaggtgaacatcctgtatggtactctaatggagttctgcacaccagctacatgcccaacaatgtcagctggaccaaagtttgagtatagatgggccgatggggtgcagatcaagaaaccaattgaggtttcagcaccaaagtatgttgagtacttgatggattggatcgaagctcagcttgatgacgaatccatcttccctcagaaactcggaaccccttttccacaaaatttcaaggaagttgtgaagacaatctttaagcgacttttccgtgtttatgctcatatttaccactcacattttcaaaagattgtcagccttaaggaggaagcacatcttaacacttgcttcaagcattttacattgttcacttgggaattcacgttgattgacaaggctgagcttgcaccacttattgatctaattgaatccattgtttcagtttgttgacatgacatcaatgattatttggatcattttcttatttttggagagcaaggagttacaactaagtgtccagtatgagggtgagactaagaatggtcaaaagtttttttttgttatcttttaggtgtctgtctctacaatgggacttgtgcatgtttgtcttatgaagtcctgaagaaactatttagggctcaatgagataatgttgtgtatccttctcttgaatgactccataagttctgtttgcaacaagcattaatttctcattcctaaaggagaactttattcatctatt

SEQ ID NO: 22331 - DNA, 688 bp, Zea mays
  unsure (1)..(688): unsure at all n locations
  Clone ID: MRT4577_120367C.1
ctttntttttttttttttttttttttttctttttttttttttttttttttttaattttaggaggggggggtgggggcgtcttttggggggggggctggtggaaggggggagggggcggggataggggggggcagaggggtcagagcgcgggtaggtgggccagaaagggtgaagcgggcttcccgtatagggggggaattgggccctaatggcgaagcgggccggccagtgtgagggatagggggcagaaagggggccttagggggggggcgggcgagggggcgtttatgggggggggggggggccttttggcgaggtctggtgttccggggggccagggttagcaaaaacaatgatgtcatttttctcatcatattataaataaaactttgttgtttcgagatatcaggaaaaaataatgacaaactacaggctcgttcaagcaattctcaatctcaacgagatgaatacaaggttcaaaagttacatctggctattccctacatttctctatctattcatttgcacacacgtcagatgacacatctgtaaattgatatgagtttgatcgatgggctccttgaccattttgattgtgcgagacaaaataccgacagattgttattatgttatgaggcttgccaatggttgtagcagcaggtagttttgaaaatatcagccccgcggg

SEQ ID NO: 22332 - DNA, 1587 bp, Zea mays
  Clone ID: MRT4577_120368C.1
cccacgcgtccgcccacgcgtccgcccacgcgtccgcccacgcgtccgcccacgcgtccgcccgctgtcagtctcactccccgcgcgcgctctctctctttcctcgccttcgccgccggcgacgagcttgagctcgagctggttcctcgtatagaagacgacggccgcggtatggagcccatgaacgtagacaacggcggctgcggtggccttgacgcgcagatcgaacagctgatgcagtgccgcccgctcgccgagcaagaggttaaggcactgtgcgagaaggccaaggagatattgatggaggaaagcaacgttcagcctgtcaagagtccagtgacaatatgtggtgatatacatggacaattccatgatcttgtagagcttttccgaattggcgggaagtgtccagacaccaattacttatttatgggagattatgtagatcgtggctactattctgttgagactgtcacgatgctagtagcactaaaagtgaggtatccacatcgaattacaatccttcgtggaaaccacgagagtcggcagatcacacaggtgtatggattctacgacgaatgcctacgaaagtatggcaatgcaaatgtatggaagacatttacggatctttttgattattttcctctgacagctctggtggaatctgagattttctgccttcatggtggcttatccccatcaattgaaaatcttgatagtgtgcgcagcttagatcgagtccaagaggttcctcatgagggacctatgtgcgatcttttatggtcagatccggacgatcgatgtggttggggcatatccccacgtggtgctggctacacttttggccaggacatatcggagcagtttaatcacacaaacaatctcaaacttgtagctcgggctcatcaattagttatggagggatataactgggctcatgaacagaaggttgtcaccatattcagtgctccaaactattgctaccgatgcggcaatatggcatccattttggaagttgacgactgcaatagtcacacattcatacagtttgacccagcccctaggagaggcgagccagatgtgacacgaagaacaccggactatttcctttgagttgtggtgttaccaattcccagcttgtgctgtgataatcgatgtcaacgtctgctggatcaagggccagacagaaataacaggggaataccaaagcactatgcgaaacttgaggtcctcattgccattggtcagtgcaagagatgtctgcaatcctgagagaaagcaattgtgccaagccatgcccgagtttcagccttttcaggtgatatagaggagcggccatccatttgttacagctctcgccgccctcccttttatgcactttttacagaggcttggaattggcaaaaaagaccgaactttcaattgtacttctgtagcgtaagcttgtaccaataggcgtgtactaatttgtatcatcattcatccatggcaagacattgttaaactccttttcatcagtaaattaattttttgttaaaaaaaaaaaaaaaaaaaaaaaaactaaaaaaaaaaaaaaaaaaaaaaaaa

SEQ ID NO: 22333 - DNA, 512 bp, Zea mays
  Clone ID: MRT4577_120369C.1
gggggggggggtgggtttttttttttttttttttttttttttttttttttttttttttttttttttttttttttttttttcggggaaacccgccccaaaatcattatttatccgacaagatcatttttgttaaacagttcgaaaaaaggggggggggggggggggaaaaaacctgggcacagcatacaaaacgacatgctcacaaaagcagttcaaaaaaagggggggcttccatgggccaaaatcaggccaacgagagctctccagggggaaaatttctttttaccaatttctcccatgattcggggggctcttgaaggaccctcaaggggtattccttgcttgggggcttgttgcccaaaccaaatttggggggaggctttccatcagggattttggagtctctgaaccaatctttgaggggagtcagtggccccggaaaagcttttaaacatcatccacgtggttcacaaaaaatgctttggggtcatccaaaaaaaggccacaatttt

SEQ ID NO: 22334 - DNA, 1609 bp, Zea mays
  Clone ID: MRT4577_12036C.1
gattacataccattgcccgcttacgctgcggctgggacgcacatcatcgtcctcctcccttccccgcaggccccctcgcctcgcgcgtgcgccccccctaaccccgtctcctccctgcccgcgcgagcgactagtagaaataggcgcgcgtgccgcctcggccgctcgctcctctggttaatcccccctcgccacgactcgcagccatcccttcacattatccgcgcgcgcgcgagcggacgtagcgtgtgggtagcgtcgccgtgcggacggtctcttggtgctggtgcgggccgcgtgacggtgcgtgtgccgcccgcggggaggaggtcgttcggttggttggccctcggcgacgatggcggtccacggcggagaggcggtctccgtcgcgctcctcttctccctcgctttcttctgcgctcgcctcctgctcgaccgcctcgtctacaagccattagcagtctaccttttcaacaccaaagcttctaagttgatgaataatgaggccaggcaagcaaagattgtcaagttctcagagtccatttggaaacttacctactatgcttctgttcaagcatgggtcctcatgataataaagcaggaaccatggtcattggatatgatgcaatactttgatggctggccgaaccaacccatcgtgtcttcattgatgcttttctatatgtgccagtgtggattttatatctatagcatcggtgctcttgttgcttgggaaacccgcagaaaagattttgctgtaatgatgtctcatcatgtaataacatctactctaattggagtttcatatctgactggatttttccgaattgggaccatcattctcgctcttcatgatgcaagtgatgtgtttcttgagactgccaaattgtgcaaatacacagaaaaagagctgggtgctagcttgttttttggtctcttcgctatctcctggcttctattgcgtctgatttacttcccattttggataatcaaagcctctagctatcattccatcacattcttgaggaagctggatgaattcccaacaactttgtactacatcttgaacacaatgcttctcacattgcttgtattccatatgtactggtggaaactcatatgtttgatgataatgagacagctgaataataaaggacaagttacagacgatgtccgatctgattctgaggatgaggagtaatgggagattcattctttgacatctgcaacgtggcatttcctcgtcaatacttttctatgcctgcttccagaattgattgcttttaatcttggcaagtctcgggaacgtataggaaagtttaatctctgtatattgccttatgatatcaaacatggctagaccgggaatggatctatacatgatgacgggcatagctagcaagcttacttcaaggttccttaaaaaattttggttcacctttatttgatatggggaaagacatgagagggtgtacagctttttcctgaagcttgcagaacccccctctgtaccatgatcaatatacttcacttgtgagtagatttagttctaattgatgataataaattgattcttttgattgggaatgaatctcacctgaacctt

SEQ ID NO: 22335 - DNA, 2720 bp, Zea mays
  unsure (1)..(2720): unsure at all n locations
  Clone ID: MRT4577_120370C.1
attgggcacctcgaggccggccgggatggtgccaacggtaccatgtgtggagcaaggaggcccacctggcgggcggggttctcgaccaatccctccagactccagtatccagactctctctcgggcctctcggctctcctctccccgatttccttccccacccgctgtcagtctcactccccgcgcgcgcgctctctctttcctcgccttcgccgccggcgacgagcttgagctcgagctggttcttcgtatagaagacgacggccgcggtatggagcccatgaacgtagacaacggcggcagcggtggccttgacgcgcagatcgaacagctgatgcagtgccgcccgctcgccgagcaagaggttaaggcactgtgcgagaaggccaaggagatattgatggaggaaagcaacgttcagcctgtcaagagtccagtgacaatatgtggtgatatacatggacaattccatgatcttgtagagcttttccgaattggcgggaagtgtccagacaccaattacttatttatgggagattatgtagatcgtggctactattctgttgagactgtcactatgctagtagcactaaaagtgaggtatccacatcgaattacaatccttcgtggaaaccacgagagtcggcagatcacacaggtgtatggattctatgacgaatgcctacgaaagtatggcaatgcaaatgtatggaagacatttacggatctttttgattattttcctctgacagctctggtggaatctgagattttctgccttcatggtggtttatctccatcaattgaaaatcttgatagtgtgcgcagcttagatcgagtccaagaggttccccatgagggacctatgtgcgatctcttatggtcagatccagacgaccgatgtggttggggcatctcccctcgcggtgctggctacactttcgggcaggacatatcagagcagtttaatcacacaaacaatctcaaactcgtagctcgggctcatcaattagttatggagggatataactgggctcatgagcaaaaggttgtcaccatattcagtgctccaaattactgctatcgatgcggcaatatggcatccattttggaagttgacgactgcaacagccacacattcatccagtttgaaccagcccctaggagaggtgagccagatgtgacgcgaagaacaccggattatttcctttgagctgtcgatgttaccgtttcccagcctgtgtcgtgataatcgatgtcaacgtctgctggatcaagggccagacagaaataacaggggaatgccgaagcactatgcccagagtttcacccttttcaggcgacagagaagggcggccatccacctacaactctggccgccctctgttttatgcactttttacagagtcgtggaactggccaaaaagaccggagtaccatttgcacctgtgtagcgtaagcttgtactacaaataggcgtgtgctaatctgtatcaccattcatcaattgcaacgaactgttgaactccttccatcagtaaagtaaattttggtttatacaaggcgtactgtgtcggataatgatcatctttcatccatggcaagacattgttaaactccttttcatcagcatcacaacgttcattttgttttgaaatacaagcgcaagaatcaacagctcaacatggaggagagatgaacagcatggtatatctatctttagtgcaatgcaagcgcaaccttaggttgctgctacgtacgtagcagtagtatgaggatggaacgtacggcaagattggtcgtcggtcaccggccgtgtggtgtgacggcggcatggcaatggcatgtagcagcagcaacggtctgggcctggcagatagtgtacacgcccgccgtcgcgcatgccgggcggtcacacggaggtgctggcgagcagctggttggcggcgacgcccctgcccttcatgacgtgcttccggagtcccgggatgtggacgttggtgatgtagtccgcccagtccacgccccgcacgtcgaagtggaaccgcgccctctccgccggcgacatggccgcgagcagcgcctccgtgttggcgttgtcgaagcggccgccgtagaaggtgtagggccggtagatgctgcccaggtggacggtctgctccacggacctggcgcacaggtcgcgcgcccgctgcgccagcgacgacgaggacgaggtcgaccgggcgctgcgcagcagcgcgtccgtctccacgtagctggcgaactgctccatggtgtcgaagaggcgcatgggcggcaccaggatgggctgccctgccgcgtcgctgtaggggcaccgcgtgaagtgctggaacaggaaccggctcaggtcgccgaacaccagagggttcaccgtcgacgacgacacgtggtacacgtgcatcccgggccccgccgcgccgccgccgtgcttcgccatcgacgccagcgtcgcgttcaccaccatgtccgccgggaccacatcaagaacaccatctggatctgcgaggaaccccgtcagctggcctttcccgtagtagaggaccacaggatccctcatcctgttcccttccatccagcccgggaatgggctcgtccaggtgctctcgatgcagctggctcgtgccgctnnaaaaaaaaaaaaaaaaaaaaaaaaaaaaaaaaaaaaaaaaaaaaaaaaaaaaaaaaaaaaattttgg

SEQ ID NO: 22336 - DNA, 495 bp, Zea mays
  Clone ID: MRT4577_120371C.1
ggcactggttacgtgtcaacggcacttgcgcatgggttctgccgatcctctaggacggcggataccccgttgatagcgcgatcacgcgcgtcgacccgaatgggtatcctgttaagatttaccgagcctgcacgtggcgacggacggagacgttaggaattccggagcactcctgacgaggctcttgggaaggagtctttttttatgcttaacggccctgcaaccctgtattttggtgatacggaggtaggtgaacaacactcggtaagagcaccagtcatgctgcggggctctggtgcgcccccgggctcccttgaaaatacagagactgaatgcacctcacacgcgctcaaactcataaccacatcacgactctatagtgaacagcctgtggacagtggaacaatggatgccacgtatgttgggctatcggatgcgtaacttaaccaaaatgattgtctctgaggggctggctcggtggtgcctgtcccgaac

SEQ ID NO: 22337 - DNA, 1431 bp, Zea mays
  Clone ID: MRT4577_120372C.1
atggataaatttcttaagagggatatgggagatccgagaaacacaaatgaattggcaatagtgcttgtggagccggtggacgaacaaattggtgggaattcagaataccaaggacctacagaccataatgtaagtgaccatgataatatatctcatccaactgctacagaatctgctagtgttgacgaaccgccagtagtgactatagacatatatgatccaagaaattggaataatcttgataacaaagcaagagatacattagtcgagaagggaccgataagagaaaagaatcttgtctttccaatggatggcaactctaggcatttttcatattcccattattttagaaaattaagcaatggtgaacaacatgacagaaaatggttagtttactcaaagcatgttgatagagtgttttgcttctgttgtaagcttttcaattctgatagctgcacaagttcattagcacatgatggatatagagattggaaacatattagtgagagactgaaagaacatgaaaatagtgctgagcatattactggtatgaacagttggaatgaattgagggatagactaagaaaacaagaaacaatcgataaagatttgcaacgacaaattacaaaggagaaagaacgcatgagacaagttttattcagaatagttgccatcgtgaaatttctgggtaaacgcaatttagcgtttcgagggtccaataatcatctttacaatgaacaaaatggaaatttcttggcttgtgttgaaatggttgcagaatttgatttggtaatgcaagatcaccttagacgaattgaaagaaaggatattcattaccattatcttagtaataaaattcagaatgagttgatatctcttttggcttctgatattactaacactatcataaagattattaaagaggcaaaatacttctctatcattctcgattgtactccggatgttagtcatgaagaacaaatgtctttgatagttcgatgtgtcaacatatctagcaacaaaattgaggttgaggagtactttctgggttttttaaaggtggatgacacatctggtttggggcttttcaatgttttgattgattcattggagtcatttggtcttgatattgatgacataaggggtcaaggttctacaaaaagatggaaagttttacttgatcatgtgccaagtttaactgtgaaatcattgtgcaacactcgttgggaaagtcgtatcaaaagtgtggcagcaattagatatcaagctcctcatataagggcggctttgtttgagttacatcatgcttctgatcctgagcccatggcaaagagtgatgcaaagagtttgtatgacttgattggtacctttgaattcattcttggtatggttatatggcatgatattttatatgcttgtcggggaccataa

SEQ ID NO: 22338 - DNA, 409 bp, Zea mays
  Clone ID: MRT4577_120373C.1
ggaacaacagccagcgccatgggcacgtctactaccgtagtcgtcgtgctggacacgacgaccgtggccgggcttggactggcgccaactgccctatcgcgcgtggcgtaacgcgcggaacaggctctgctgaccgtggcagctcacgcggagatgagtccgttgatcatgatcagcctgagcacggacgtgacggtctttatgggacggagtgccttctgaaacttctcaacgggtagaacgtgtgagagaccattgtgcgccgagcattaacggtaagacgcactttgacatcgacacgaacgcgccaatgagttctagaccgtgctaagtccaaagacgacgaaggctttaaccgtggtcacatcctcgtgtagggctcgataggtcacatagccgtctactacat

SEQ ID NO: 22339 - DNA, 603 bp, Zea mays
  Clone ID: MRT4577_120374C.1
gaaagaaatggatgatggcgcttctgcttaatttacatgaacggaccttgcacgcttttgaaaacctactaaacagatgtttgcccccgaaaaagcaagaacctagttcagtagcgcatgactagaaggaaatggatcccgcttggaccgtccttacattgtagaagccctctcggacgaggcgtgcatgaccgagatcagaccggatgccaaaggggcaacccagaactaagttatgatccttaggggacattgcggaaacccgttacacaaactggaagaaatgttatcattgccaagcggagcgaccgacaggacttagagcaacattatcatcaccatggagatgggccttgtgaaaatgctcaacatcatggcgtccaaagagcgacgggtggaagacttgaggaaggggcaagcttcctgcggatccagcggcacaacacaagcagtaaccatgagcactactgtgagacggccaccaccagattgatggggatgctgtagccgaactagctgagggggttgccgtccaggagcagcgcgccggaggtgaaccatacagccttatggccacagttatatccgaacttattgcgggcc

SEQ ID NO: 22340 - DNA, 450 bp, Zea mays
  Clone ID: MRT4577_120375C.1
tgtactggaaaaagaatccgcaactcttgattcacaggacccacttctgccttcggggatgaatcatcgatcagggcatcaggcagcctctgcccacttgggcagacaacgggggagctcagttagctccctcagttgaacaaacgaccatggcagcgggtttgcccctctgccttctgttacttcgcttcattttgtttcagttgcatcgcttgactccacaaactgctctccctcatctgcaggttctgcgcatggaatagaagattaccacactcctctatcaaggtcttttccgtagcaataacttgggcaagattacatgccacatcgtcgatttgttcgacctttggcaggaaattggcgatgcaagatgtaagcggttcaagcagttgggtagctgattttaggacctctgtaagttcctcgcagttgacatttacactccca

SEQ ID NO: 22341 - DNA, 264 bp, Zea mays
  Clone ID: MRT4577_120376C.1
tatttcctggcatagaaaaatatgaacttaggtaaggctgcattgatcactgacggctgacttgcagctggtggaggtgtctgatctgcagtggacaatctcctgcagatagatattgtcctctttatatgcatccactgcttcggctgcgctgtcagcgactatattatatcctggaatctcgcggtaccacactccgtttaggtgcaaacggcactccagctggcattatacagcgaaattctcgataatgacttctcgctg

SEQ ID NO: 22342 - DNA, 394 bp, Zea mays
  Clone ID: MRT4577_120377C.1
cacaataatatttttttattgttttaaaaagttaatttcaaatagtaaacaataaacttatttgaagtcatttatttacttggtgattctttcgacgattttgatcatcacatcccgtaatcgatcagggtaggcccaagcgatgaaggagagaacgttggcatccaatccaacgaggtatcgggtcttagggaatggagaggtcaaagcgtgaatcacagtgcaagcaacatcttcgggatcaccagcgaagaacttgagtttttcggtgagggtgatgaatttttggtgttcttcagcataatcgttcttgccatagtccatgaggctgtcccaaatttggtgttgttttcctccagagacagagtccaacataggggtgttgacaaatcca

SEQ ID NO: 22343 - DNA, 279 bp, Zea mays
  Clone ID: MRT4577_120378C.1
cgtcgagctcttgttaagcccggcgaccgggcctcatggggcaaaccgccccatcgggcgggctcggaaacccgggcggcgctccgcacgctctccctccagaacaacgcgcacacggggcccataccggacgaccaaaaccgggagaccgagctacgggccaaccactaccagcacaacaagacacaccggcgaggagccggcagagcagaagcgagcacaagaaccctgtgaggcaggaaaaagcggggaacaagtaaagcggaaagagcacgcaag

SEQ ID NO: 22344 - DNA, 990 bp, Zea mays
  Clone ID: MRT4577_120379C.1
cctccggcggggctcgacgaggccgggccgggatagtcctttctcctttgtgacccggcgcaaaaatatggcgtcgtcaccgtccctgcgccccacggacagactccgcaggcctccggcctctcccgcgttctgctccttttcggctgtctccctgcgcggcctcgtctcgctctccagcgcctctagggttctctccgtctccttccggcagcgcctgctgacggctgtgcggagctccagagaccctggagaggtgattgatgtggctagtggtgaaggaactgagctacctggaggctccactggtccaagaaaagatggaaaagagactgccaaaagtttctcaactaaagaattgctagaaaaactaaagagatatggtgttgctggggttctgtcatatggactacttaacactgtctactatgtgactgcatttttgttagtctggttttatgttgcgcctgcacctggtaggatgggttatggtgcagctgttgagaggtttgttaaactaatggcaatggtctgggctggcagtcaagttactaagatttttcgagctggaggagcccttgctctggctccttttgttgagagagggctgaaatggttcacagtcaagttcaacttcaagtcagaagggaaggcttttatgactattgtagggttgtgctttgctgttgctgctctcatgttctttggattaacaatactttgggcatagaacatctgctttcctgacacagttaggaatcttgaagagatgctgtggatccaatcagtaacgcagtgatcacactctactgaaaaatctcacctaatattttcagtgtggttgtccatagcctgcatgaatatgtatcttcatggttcgttagtgatcgcaaacatcttgagtatacatatccctgtaaggtcctgttggaccgtgtgcagtcatgacacattttcaaaacaaaacatgtttgctagtggaattttgcc

SEQ ID NO: 22345 - DNA, 700 bp, Zea mays
  unsure (1)..(700): unsure at all n locations
  Clone ID: MRT4577_12037C.1
gtatcctnnncgaggccggcccgggaaaaaaaaaaaaaaaaaaaaaaaaaaaaaaaaaaaaaaaaaaaaaaaaaaaaaaaaaaaaaaaaaaaaaaaaaaaaaaaaaaaaaaaaaaaaaggccggcctaggcacagttgggaaacgccaatcatttcccaggggtttcataaaagggcgggggggtccaaaggaattaacttgatttgctgagggagggcaagggggcctcaaggagaaaatgccaatcccccccaaaaaaaaggttctaaaggaaaagcccccacccccgattatcaaaggcttctttttgcacttacggcccgcgaccaaaaaaacctaaggcacagagtcccgacaattcaacatgatttgcatgaggaaaactgaaactctgggggggaaaccccttcaaacctgggaaaatggggggaggtttttgatgatgggaaggaggaatgctttgttgataaacgtttgacgaaggctggcaatggccattgacccggggttaacccaaggaccccaaagttcgggggacgggttttatgagggagggcaaggggaggggatcttgtttcccttcccggaacggaacagggtctcgcattttgcccaataggagtaaaaaaggaagggctcttgtttgacaaaaaaaaaaaaaaaaaacccggggcccccaagctccagttttggtcccct

SEQ ID NO: 22346 - DNA, 115 bp, Zea mays
  Clone ID: MRT4577_120380C.1
gagctaacccgagatgatcagaaatgcaaaaatgatgaagccacagagggaggtgataaatgtgagcaaatgaatcctattactagtgtcatcaatgatcacaatgaaattgaat

SEQ ID NO: 22347 - DNA, 207 bp, Zea mays
  Clone ID: MRT4577_120381C.1
ggtgtagttcgtgtccctcgataccagcgtttactccagctacaccataagcggctacttctgctgcatcgtcgacatgtgggatgtgcagtacttcaaattcaaggaatgcatgtacacggacaaggtcactaccggcttggattgtgtctgtcacttgttcgtcagcatgtgaatgtttctcggcttcaacgacgtaattttcac

SEQ ID NO: 22348 - DNA, 213 bp, Zea mays
  unsure (1)..(213): unsure at all n locations
  Clone ID: MRT4577_120382C.1
tcgagtttttttttttttttttttttttttttttttttttttttttttttacactgtagactgcattatttataaagggggtgcttgaaataaagagtgcggaggtgagaatacagaagaaccggctgggatatagcgcttgggagcgagaatgagctanggtgaatgggaaaagtagtgacatgaaatgggacccgtacaaaaccccatttt

SEQ ID NO: 22349 - DNA, 279 bp, Zea mays
  Clone ID: MRT4577_120383C.1
cgggccggggaacagttttcccaaaacaaaaccctcgccgccgatagatttctgacaacagaagcaaatcattatggcgctcgcgtcgctaccgaggctaccgagccacgagattgcgtactagaagctgagaacatcgcattatcaccatgtcctcctgggctcccgcagcgtgcggctgccgttgacatccaccatttcctccaccgcgaaggcgactatctaggaactcaagctggaattgtagggccgtccgttgcttccttccctgcagaggag

SEQ ID NO: 22350 - DNA, 299 bp, Zea mays
  unsure (1)..(299): unsure at all n locations
  Clone ID: MRT4577_120384C.1
acttactcacaccaatctccgcccccgcattgcgtcgaacacctggtgttcgctggcaccgaccccaccgaaccgtaccttcaccaacaacaccaccagtccaccaccacccaccttccacatgtgcacacgctcccttcttccgttcaccaccgttatatatcccggcgcccctttcttccttccccgtccttccctccgnctacgnccccgcccactccttgctgtcaccacttctgtcacctnttgccgcgccgacgcatccttcatggaccccgtttcacatggtgtctaacccc

SEQ ID NO: 22351 - DNA, 594 bp, Zea mays
  Clone ID: MRT4577_120385C.1
gccggccgggccgggctctgtcacgcacgcgccgccagaaaattccccaagccgaccgtgccctgcacccagtggccctgcgcgccctgcaccgcactcacccgcgccccaggacgagccgcccctacaccgagcagcagcagccgagcaacgccaggatgcctgcgaccccgcgcctctgcgtgccacgaccgagccgggcgccgtagccccgacccgatgcgccctgctcgccggagttcgccagagctcgcccccgccggagcccgcccgacgtcgaggacccctgcccgctttccttactcaccgacccccttgccgagctatctccatttccctgcgcaatggactgtgaggtagacgagcctaacacgttcgaggacgacccgcaggacactttttagcaagagggtgatgctggagactttgatggagatttcgtcgatgagttctaagtctaacgatgcgccggtcattttcctatgggagattacccatgttatttaaattccgccatactttgatgttgatacttgttaaagatacaatgattcagatgatgtaataaaatactctactctctttacgcccttt

SEQ ID NO: 22352 - DNA, 382 bp, Zea mays
  Clone ID: MRT4577_120386C.1
atatatatatatatatattattaaaaatattacaacacccaccggtggctgggtattgatctaccccaacgagcttagccttaaactgggagggccacaaaaaaaagggttcaactttaccttcaagaaaaaaaatgggggattcaccaggggtactggaccaaggatctttaaaaagtgtttggcccccaattgagggggaaaacctcccgtgcaaaaagcgtttttcccaaatccgtgccggtcccgatggaaaaagggggcttcaggccggggttggagtccaggccccaaatggatccccataactggtttaagggcctccaagggggggccccctttttcataagggcgacctggacaaccttcccctcgccttttt

SEQ ID NO: 22353 - DNA, 190 bp, Zea mays
  Clone ID: MRT4577_120387C.1
ccggccgggctatttgtaattcactgtcccgcactacttaattgaaaccaaaggattgactagctttctatttaccttgtccttgcttaccttttgggttattatggttagcattttgctattgccttaacttaatcaatgaacatgatgtgactatttatgaaaaaaaaaaaaaaaaaaaaaagcggcc

SEQ ID NO: 22354 - DNA, 667 bp, Zea mays
  Clone ID: MRT4577_120388C.1
actcctatgggcgattgggaccctcgaggccggccgggacatgcatatgtaagctatcatcatcttctgcgattaatgcgatgtctccagaatgatagacatatatattagttacgcacaaagtgctctcatcggcatccggtctccttctgctagatactgaatgctagttctgagcacccgctcgatactcacaggctaagaaaaatacagccggcgccgacgtcgccgaggaaaacaaagcgcatgccaacttctgctctactgtgcgccacggaaagaattggatggacttgggggtgtgtaaccagccatgagacgtctcacagggctccagaactgctgctgtactggcggcttcaacgccatgacgatggcaccagatgagaacgctatcccccatcctcacatgaatgtgtgtccacacggatgagacaatgactacgtgtccaatagcacgatgaggtcaccacggccagaaacactacctgggtccaggagaaccatgctctgctcagctcgaactgcacgatgtcatgcacccctcactctgcgtgaatcatgaacaccagcgacgcccttctgcttctggctgcttgcccgcccctgaatcactgatacctcctacatgcatgtatgggacgcgataacgattcgatgcatgcat

SEQ ID NO: 22355 - DNA, 733 bp, Zea mays
  unsure (1)..(733): unsure at all n locations
  Clone ID: MRT4577_120389C.1
agcagtggtaacaacgcagagtacgcggggtatgctgcagtgcattcccttcccctgcactgcgacgacagcagcgcgtccgaagtccgatccctactccatggcgtagcagcactccttgaaggcctcgaggttttgctggaactggaagacgggcacgaaggcgtccacgctgccgtcgccgatgtaggacggcaccagggacgaacgaggtggtggcaactgaggcgaggaccatcattatcgtgcgaaggtatagatggctaaattggctgtgtctggcgagccggactgaggcgtcacccatttaatagtgcatgagccaaacccagcacgagcgtcgtgcggtgtttggacagtagcctcggtccgtagtgctggcccgatccgatacgattatttctgaaaaatttaaaaaaagtcagtgtttctaggtccacctaccctacggtttggcattggatgtactttaacttgactcggtaatcacaagtcaaggtgaccatgcagcacataggctttgcctttgcgtgcacaaatacaattggtgagaaatgtaaaagaaaacaggttaatcggccacagattaagctgaaaataactattatgtggntgggtggaatcctgcaggatgcatgatagaagagagagatctgtcaatgattaaggcctcacaaaacctggcaaatcaaataaattttttttacatctcacaaaacccaacgaaacactc

SEQ ID NO: 22356 - DNA, 353 bp, Zea mays
  Clone ID: MRT4577_12038C.1
ttttttttttttttttttttttttttcgttgggtttttttttggggtgtttttttttttttttttttttttttttaggaaaaccccggcccatttaacccacaggtgcagattactattactggctgcagtggaccatttaaaacccagggccaagacaacaggacattacatattttgaatacttggaaaccaaaatcccctttcacggggacccccataaatggggctttcacaacataaccaaaatgcaaattattttaaaactgcccagattccaaggcacgaatttttcaggggggttaaacaagtgtgcaccgctcactgcaatgcccacaacaaaattgtttcaac

SEQ ID NO: 22357 - DNA, 347 bp, Zea mays
  Clone ID: MRT4577_120390C.1
ttacttaaaaaacatttatttaagaaaaaacccaaccaacatatggatgattaataggaaacacacgcaggtaagagggcaccacaaggcgagaacaactcatatgaaaccaaaaagaaggcacccccaacgaaggggagctgcctcgacaagacaggaagcatcaaagagaactggttgaatggcagcaatagccgcagctgcaggaaggcggcgaccaatgggttagccactaccaatggattaagtaactgatgccgctgttgtaggtacgcagcaaaggtcgaacagagacagatggttgaatggaagcagctgccgcaagaaggcaacagggtacgccacag

SEQ ID NO: 22358 - DNA, 434 bp, Zea mays
  Clone ID: MRT4577_120391C.1
gggcgaaagggaaaaaattttaaaagggttgcaaaaatttaaaaaggagtatttgatttttaaattaaaaaattttttaaaaggggaattgaaaaatttttttaaagttttttaaaaaaaagggtttaagttttataataatccaccaaagcttaaaataattggttttggggtttgtaatccggtttaaggggaatttaagctttgtaaccaattaaattttgcccaccctttgtttaaaattgggttaaaaaattgtttcctaagctttaagccaagctggggaaataaaataaaaccggtggggaaaaactgaaatttgggctattaaaaaatttcccatgcatgcaaccaatttttatgaagggaaaaactgggccccgaaaagttagcaaaacaaaaaaatcgtcgggtccagctttaactttataaaa

SEQ ID NO: 22359 - DNA, 208 bp, Zea mays
  unsure (1)..(208): unsure at all n locations
  Clone ID: MRT4577_120392C.1
gcgggcaccctccaggtcgtgtccccatctctgtctataaaatacactccgccaccacctgctcggggcttagcatccttaccccctgcgcaagagagaagcgaancaactctccgccgggtccgtttttctccacaccaccccagaaatcgtgagtccgaccacaacctcgcccccagcgcctccttccgcgagaatgtgccgcgcg

SEQ ID NO: 22360 - DNA, 344 bp, Zea mays
  Clone ID: MRT4577_120393C.1
cggaccacacccttccggaaggcaggtccattggtttcggcttaattttcaataccttcgagtttgccaagaggttggggcccaaatcccgcttgatagggaatggtttggttactaaggtggagaagtcccgcaggcaattgaaagagcggaggaccagggccaagaagatccgtggtgtcaagaaaaccaaggttggtgacgccaaaaagaagtaaacagccattattatttttgttttactgtcctgaactttggggggtcggttagttgcaaggtaataattttggcccggtaaggttttgttccgaacttatcattaaggggaagttttgaaattcctt

SEQ ID NO: 22361 - DNA, 443 bp, Zea mays
  Clone ID: MRT4577_120394C.1
ttatttttttattttttttttatttatttttaatttttcccccaccaaatttttataacatacaaaacggggggagccggtttcacaatccaggtagagtagcaaagctgccaagggccaatcctgaaacaaaggccctactaattctactaccatcggcgtacaagtacaaacacaaaaatggatgccccaagttgatgctggaaaacggattactgtaccgacaagcagaaaataaacgcgccgccctggtgtttcctccccttgggttttttttagacgggcaacctggccggggagatccattcctgttgccctgagccatttttgtttttggggggcgagcctggtttaaccgggggggacactttgtccttggatacccggcgcttgaaacaaaaaccccggcctttggcactagccgccttttttttctttttttt

SEQ ID NO: 22362 - DNA, 583 bp, Zea mays
  unsure (1)..(583): unsure at all n locations
  Clone ID: MRT4577_120395C.1
aaagactcaaatatataatttattgttaaaatgctcttgccgcccttgactgggtagccttgccttgcaaacggctggtctagcatgccacccaacacatcatatgctacggaatcaccaggacttgccaagcattattcgatccgctggatagcagaagatcgccgagtcggacagcttcgatccgatcaccatcccccaagccaaatctctatccggatcgagcggcctctccgccttttgttttgttttgttttgttttgtaaaggcccaacgggtggccgcgctcggtcctcttctcctccttcgtcagagcaggagcaccacgtggggccccctctggcccgcgcgctctgattccgacggagatgaatgggatgatggtggccggccatggtcgccagtcgatcgatcaactagtgtctcctttcgcacaattatggtacagtatacggacagggccacgtggtgtggccaacgtgccacgcatctctccggccttcgccaggtcatgctcatgcatgctcacacatatgacnctcgatcgctcatcactagctgcatatatccgtgctttgccatg

SEQ ID NO: 22363 - DNA, 687 bp, Zea mays
  Clone ID: MRT4577_120396C.1
atttctgtcttccttttggttggacacagtcaagggtggaagctgctatggtgaacgcaaggattcagaagactgttagagcaacacaagcaaaggtgggctacattggtcctccagcagacttcaactatgacacttggcatcttggcacagggccagatacccttgtcgagatcgctgagggccgacatcctttctgttcaatactgaagtctgcaaagaacccagtaatcatcgctggagctgggttatttgaacgagaagaccaaggtgctgtgttctcaacaattgaaactgttgccaagaagttcaatgtgacgagaccggactggaacggccttaatgtcctattgctccatgctgcacaggccgcagctcttgatctgggcctcgttgctaatcccaccgagagcgtcaagtctgcaaagttcctttacctgatgggagccgacgatgtaaacttggacaacctcccagcggatgcatttgttgtttaccaggggcaccatggtgacaaggccgtgtacagggccaatgttattctgccgtcctcagcatttagcgagaaagaaggcacctatgagaacaccgagggatgcacccagtggaccatcccagctgtccccacggttggtgatgccagggatgactggaagatcgtccgtgctctttccgaggctgccgggg

SEQ ID NO: 22364 - DNA, 686 bp, Zea mays
  Clone ID: MRT4577_120397C.1
tgtaaatgtcccatgtttctaaccaaaccataggctctcctctcacactgtctcatggtgacccgcagagtacggaatggacggcgatgtctccatccaaggcgacctgtacagctatggcgtcctcctgctcgagatgttcacggggaagcggccgacggatgcctcgttccagggaggccggactctgcagagctacgtcgcgtcctgctacccggacaaggtactggaggtagccgaccctggcctacggcatcagctgggcaacgggtgtttgagcggaggggacgtttgttgcgacgagatcgacgccgaaaagctgcgcaggtgcatggcgtcggtatttcgagtcggcttgcaatgctcccaggaaccacccagagcgagaatgcatgtcgggactgccatcaaagaactcgaggcggtcaaggatgccctgctaaacgactgagtctggatagaatctctcggcaacagaaacacaataaaacctgacagaaaaaaattgacggttagtgaataagttttagggacaacatcttcatttcttctaaagcggtagcaaacatattgttttcagattatctgctttgacttcggcaacgtgcttcgtctgagcgcttgaactgaatcttcttccactttcctatttacctgtattgatacatataaattagttgctcctg

SEQ ID NO: 22365 - DNA, 3140 bp, Zea mays
  Clone ID: MRT4577_120398C.1
cgcgcagcgcagtccatccatccacgcacacgcgcacccgtccctctcggcgcccctctcccccctcctccactccgctgctgcctgcttgcctcctccttgccgccgcgaccgcgaccgccgttcgctgtcgaggccagaggagaggagtggtcaagtccgaggccacctgcccaggctcagacctcccccgccacaacgcgagccgcatcgcctcgtctcctccacgccatacacgcccgccttcccttccccggcgaccaggacccctcgcccgcggcgccagcgagctcccccggccagtcgtaggcctcccggagctcagcacgcacgcaggtgggtccagtgaggcctggttgtgcgcgttcctgcgggcgtcgtcggggcagatccatggaactcagccgcccgcagcgcggatagtactgcacttgtgcaccagccaccagcggatcgccaggactgcccacctgctgctgcttgtgtcgctagccatttttcgggcgtctggcttggaggatatggccgcggcgatggacgcgcccaaccctggagcggctgctggcccaggaatgcctagtgacgccctgtaccaggagctgtggcatgcgtgtgctggcccgttggtcacagtacctagacgaggcgagcgtgtctattacttccctcagggccatatggagcagctcgaggcgtctgcacaccaccagcagcttgatcagtacttaccgatgttcgatctaccacccaagatcctatgcagagtagtcaacgtggaactacgggccgaagctgattcagatgaagtttatgctcaaattatgttgcagccagaagctgatcaaaatgaactcaccagcctggacgctgaaccacaagaacgtgaaaaatgcactgcccattccttctgcaagacactgacagcttcagatacgagcactcacggcgggttttctgttcttcggaggcatgctgaggaatgtcttcctcagctggacatgtctcaaaatccactttgccaagaactggttgccaaagagctccatggcactgaatggcattttcggcacatttttcgagggcaacccaagaggcatctccttaccaccggctggagtgtctttgttagctcaaaaagattggtttctggggatgcattcatcttcatgagaggtgaaaatggtgagctacgggttggtgtaaggagcctcattttgtatgaatctaacatgctcggaaattgttacctttagcagcacatgcactgagggtgtagggtggccaggtgggagaacgtttccactggaaccctcttttctgttttctacaaaccaagaactagtcgctctgattttattgtgagtgtgaacaagtaccttgaagctaagaagcagaaaatatctgttggaatgaggtttaagatgagatttgaaggtgatgatgctcctgaaagaaggttcagcggaacaatcattggcatcgggagtttgccggcaatgtcaaaatctctgtgggcagattctgactggagatctctaaaggttcaatgggatgaaccttcatccattcttcgtccagatagaatctcaccatgggaagtggagccactggatgcagctaatccacaatcccctcaacctccactaagggctaagcgtccacgacccccagcttcaccttgtatggtttcggaactgccttcaggttttggactctggaaatccccaattgaatcatcctgtacactctcattttcggaacctcaacgggctcgagagttatttccttcaatccccacgtcaaccttgtcatcttcatcaaatgtcagttttaattcaaagaatgagccgtccatgctaaccagtcagttctactggtcagcaaggcatacaagagctgactcctgcgctgctagcaccaacacagtcgtaattgaaaagaagcaagagccaagttctggtggttgtagattgtttggaattaatatatgctcagctgaggaagaagtattacctgaggttactgctccaggtgttggttatgagcagactgctgcctctgtagagttgaactcggataagctctcacagccatctgatgtcaacaattctgatgccctagcagctagcagtgaacgttcacctcttgaatcccaaagccggcaagtgaggagctgtaccaaggtaattatgcaaggaatggcagtaggaagggctgtagacctgacaaagcttagtggctacagcgatctttgccagaagctggaggagatgtttgacatccagggggagctgggttccacactaaagaaatggcgggtcattttcactgatgatgaggatgacatgatgcttgttggagatgatccttgggatgagttttgcaggatggtgaaaaggatttacatttacacatacgaggaggcaaagaagctgacatccaagtcaaagttaccggttagcagtgacagcagcaagctgagcgctgcgaactcactgtctgaatgactatgaacaaaaactgcagagtgctaacgtccctctaattttgttatttccatcatttgattatgggggtgaatgctcacggttgctccgtgggctgaagttgtggttggcattcaactgccttgagttttggaggcttttggactgccttgccagcatgagcctcctggaagaggcaccctggcatctgcgtgccatttcccatttgttcgtgccgtttggtaggagtatccattggcttatttagcaggtccctggtttgaagaaagaagcggtcagctgcaagatggacggtgccttgcctcttcttcgactacttagctagtaattaggactatgtatgtaatgaatgtatatagtgccattaagacgcccatgccctggtattgaggtcccggcatttgtatgaatcaattgttcggaaattgttacctttagcagcaacgaacctgagggtgtagggtggccaggtgggagaagttgtatgtttctttcagtaacaatctttgtgcaagtgatctgtatatagtctactgttttaataagcaatgttgtgcaacttgcgctcctacaccctacagtacagtggggcttttcttgtgctaaaaaaaaaaaaaaaaaaaaaaaaaaaaa

SEQ ID NO: 22366 - DNA, 172 bp, Zea mays
  Clone ID: MRT4577_120399C.1
acatctaaaaagggggtacaacatgtttttgtgtataaaagggacataaaacccaatgtctaaaatacatgttatgtatctatatgtatacttttaactatggggcaattggtcacaatctttgatttagtaatgaaatatatgtatttgtaacagatttgagcttagaata

SEQ ID NO: 22367 - DNA, 451 bp, Zea mays
  Clone ID: MRT4577_12039C.1
acacatcacaccgctctcacttattatagaacacaattttcgacgcatgccgagaaaacgaagcccgtccaggattacgggaacacacctttctcgtagtagccccacgcccaccaaccgttttcccttaggctcacactcttactcaccacaaggaagcaggtacccaaggccggagaggggcccattattgtgaaccatcaaattacacaccccttcagtaccgaattaaacaagagtgccgttgtgtgcacccgaactagctagattggttaagagcccgccgggactaacccaaagcgaagaggtgggtgtgctttttctcgccggtggaccactaaggagcccctggggtacttatttttttcacggtgctcgagggaaaactaacccccggcgcccaaaggcggcggggcagtgacccactccgggaacttgcacctgtgggcgg

SEQ ID NO: 22368 - DNA, 416 bp, Zea mays
  Clone ID: MRT4577_1203C.1
ggcggtcgtcggtcgccatctctgcaatgaatttgaaggcagtcgtcagtcggcaaaaaagattggccgaaaccaatgtgggtagagtggaactgtaagtatcgacttcgattagatgtgtctggctggagagattaggtcttgagcttagcgttgttcgtcgtcagattccagatttaggattgtttactctgctacatctccatgaattgttcaaagtggccagctggatattgtagctggtccaggaatggagtgtagagaggagtgaaggcagaagactgattatgcattcttttgcttggtggtagctgttgtacccgtgccatctcgtctttcttgaaacggagaaagatgcaggtgaagtgtggcattgtgccttttttgttctactactagtggtaagatggaggttt

SEQ ID NO: 22369 - DNA, 1348 bp, Zea mays
  Clone ID: MRT4577_120400C.1
agtcaacgtgggaactacgggccgaagctgattcagatgaagtttatgctcaaattatgttgcagccagaagctgatcaaaatgaactcaccagcctggacgctgaaccacagacgtgaaaaagcactgcccattccttctgcaagacactgacagcttgggatacgagcactcacggcgggttttctgttcttcggaggcatgctgaggaagaagtattacctgaggttactgctccaggtgttggttatgagcagactgctgcctctgtagagttgaactcggataagctctcacagccatctgatgtcaacaattctgatgccctagcagctagcagtgaacgttcacctcttgaatcccaaagccggcaagtgaggagctgtaccaaggtaattatgcaaggaatggcagtaggaagggctgtagacctgacaaagcttagtggctacagcgatctttgccagaagctggaggagatgtttgacatccagggggagctgggttccacactaaagaaatggcgggtcattttcactgatgatgaggatgacatgatgcttgttggagatgatccttgggagtaagaaccctttgtctctgtattaacgagtgcatgttttccattattggaagtcctaatccctgtgcaatgcatcttccttcagtgagttttgcaggatggtgaaaaggatttacatttacacatacgaggaggcaaagaagctgacatccaagtcaaagttaccggttagcagtgacagcagcaagctgagcgctgcgaactcactgtctgaatgactatgaacaaaaactgcagagtgctaacgtccctctaattttgttatttccatcatttgattatgggggtgaatgctcacggttgctccgtgggctgaagttgtggttggcattcaactgccttgagttttggaggcttttggactgccttgccagcatgagcctcctggaagaggcaccctggcatctgcgtgccatttcccatttgttcgtgccgtttggtaggagtatccattggcttatttagcaggtccctggtttgaagaaagaagcggtcagctgcaagatggacggtgccttgcctcttcttcgactacttagctagtaattaggactatgtatgtaatgaatgtatatagtgccattaagacgcccatgccctggtattgaggtcccggcatttgtatgaatcaattgttcggaaattgttacctttagcagcaacgaacctgagggtgtagggtggccaggtgggagaagttgtatgtttctttcagtaacaatctttgtgcaagtgatctgtatatagtctactgttttaataagc

SEQ ID NO: 22370 - DNA, 676 bp, Zea mays
  unsure (1)..(676): unsure at all n locations
  Clone ID: MRT4577_120401C.1
gtcgcaatgcagccgcgtanncgtaagncgnttggaaatcctctagagncnnggccgcccttttttttttatttattttattttattttatttttattttttttattttttttttttttttttttttttttttttttttttttttttttttttttttttttttttttttttttttttttttttttgggggaaacccaaaagttcggaaaagggcccccgggcaaccaccaagaaaaaaaaaaaaaaaaccaaaaacgggaaaaaaaataaggcccaaacccaagggggaaggaccccaaaaaacttttaaccttttgggttggccaagggagctacaaagggaggggaaacccccggggaaaggacccaaccaaaggggggaaagggaacccccccccctttaaaaaaaacccagttaaaaaaggccaaaagccacgtttcccccatttttaaaagcaagggggggggccccaaattccagtttttaaggagcggacccccccccaaaaaaaacgggtaggaatttaaggggggggcaaagggaaaaaaaaatttttgggcactccgaaagctccccggaaaaaaaaacaaattttttccccgggtaaaccttaagggccccgttagagtccgggagggccaaaaatttcccctttgggggggccctaaaaacggg

SEQ ID NO: 22371 - DNA, 594 bp, Zea mays
  Clone ID: MRT4577_120402C.1
ggcgagcgatggctgtactctggggacttagcgcgctcgcacccagagggctgctgggcaatgatcatccgcaatagcgatctagatcacgcttcctctcgagctagatgtcatctctagagaaggcctgagttgctcggacatggctgctatatcatgtccatatcgtgagccatgctgaccctttccacacgtgctgggttaccacttcgttgccactgatcagaggactctgttgacctgtgccttgcttgagggacagacatgtaaagacactatcatgattttgcctgatgcgagggacaggattagaagtcactctgtgcttgtacaacgcgggcgacacagcacctgtggagagggtcgacatgcctgacgatctagagctggtaccagcacactgctcgcggaagctaggccttgtctagagtgacctattgctcgagagggaggtggactatatggctttcgagatggaccttgcccagacgtacctctggcggcaccaccctaatgtcgactgatgagaatcttcatcatgactggtttgatgatccatcatgctgccagaggggccagttcgagccctataga

SEQ ID NO: 22372 - DNA, 480 bp, Zea mays
  Clone ID: MRT4577_120403C.1
atatttttttttttttttttttttttttttggtttttttttttttttttttgtttttttttttttttttttttttttttttttggaaagggaccccggaggcccagttacaaagaaaatcccaaaccttatggggagaagcaaaacctttggggcaacattcagtattaaaaggtaaaagggggggaaacaaaccccccacattttattaccccaaaaacaaggtttactacattctagcaaagcaccggggaatccaggctcccggggtttaacgggagttccttggggaaggcggggttgtaaaccaaaaccattttccagccattgggaaaaaaaaaaggggggaactaaggggggaccccagggaggggccctgggtgccaaaaaatttggcccacaagtttttggggcgcaagaaaaaatgcctgggggtttttgaaaacaaaatgggggccaagggaaacccgggcaaaagcat

SEQ ID NO: 22373 - DNA, 266 bp, Zea mays
  unsure (1)..(266): unsure at all n locations
  Clone ID: MRT4577_120404C.1
aggtaacttttccgcaatggcnagaagtaaaacacggaaggcaaagtttctctgtatcnagtctagtggcactgttactctgagttgcataagctaaattattaaacaactaaaatttaagtacttttttatcattccttttgagcttattggattaatccttggctttaattgatgattttttatattcccattttttgctattaaatcctttattcttgttttatcatttttaaatcttatcatttctttcttttatatgtaat

SEQ ID NO: 22374 - DNA, 364 bp, Zea mays
  Clone ID: MRT4577_120405C.1
ctccacgccgactctttcgtatagaggcatccatccctctgttcaagaaggactttcagcacttctcttcattcggcgcacatcgcatttgatccgtgctcttcaatttcccacttgttcacctttccggccacctcgccgattttttcccgctcttcacttctctgacagcaaccaacgttcggtttgccgtctctaatacttcaaccaccaccgcttcacccataatctctctctccctcacatcgcttgttcatcatggctaccaccgcaatggactacgagaacgcgaacggcgaccgcttctatgaggatgcgcctcgctacgagcgcgatcgcagcgcgtctccccgtcgcgacgatg

SEQ ID NO: 22375 - DNA, 430 bp, Zea mays
  Clone ID: MRT4577_120406C.1
ggttttcttttttttttttttttctttttttttttttgttttcctttttttgtctttgcagagacccaaacccgagggaacaaaaaatttggacaaaactgggaacacctttgttcagggagaaaaaggggttggtctttgagacttttacgggcgggaagggaggaaacacagactgacaggttgggaacccccaacgcgatatcacattggtggggttgcatttcgacccccacccttcccgaagtctaaaaaattattttcaactagctaacttgggttgattgggcctgtgcgggggtagagtaaattttatcctaacctgacccccactggagtcttgtttttggttgagcgggaatttctgccgggcaattctatttacaggttcgttttcaagtcctattccggagtctttggctcccgggga

SEQ ID NO: 22376 - DNA, 387 bp, Zea mays
  Clone ID: MRT4577_120407C.1
gaggaaaactacactagacaatgacaactgtgcaaagggagcactaccaaggagcatttagagttcatggccaaaagatgacgagaagctgacccaaaactgtactaaaaacgaacttggaaaccaagggcgtgttcgggtggctacaagccgacactgttgcagctgtttggactgctgcagctgcaatccatagagagaaaaatactgtagaagccgcaaccgcagctggattgtagccgtagcaagccgtagagaacaagctgcaaatacaaaaaaaactgcaatctccctgacgcttcttgcactcgcgttcattcctattatgagctcatggatcctttattcccaaactgtacaagcgcttgctactactacaagcaaatt

SEQ ID NO: 22377 - DNA, 407 bp, Zea mays
  Clone ID: MRT4577_120408C.1
ccgacatgatgctgcagatccactacctctggctcatgccgctccaggttggcgttgctctgggcctgctgtacacgtaccttggccccccggtgacgtcggctctgatcggcgttgccggcgtgatggtgttcgtgctcctgggcacccggcgcaacaaccggtaccagttctcgctgatgaaggagcgcgaccagcggatgaaggcgacgaacgagatgctcaactacatgcgcgtcatcaagttccaggcgtgggaggagcacttcaacgcgcgcatcggccgcttccgccgcctcgagttcggctggctctcccgcttcatgtactccatctccggcaacatcatcgcgctctggagcgcccccgtcgtcgtctccgcgctcgtcttcgccacctgcgtgctc

SEQ ID NO: 22378 - DNA, 209 bp, Zea mays
  Clone ID: MRT4577_120409C.1
acctcgcggccgaggtagcggcaagagagctttcctcaggcgaagctgggctcctgccacccgtccgtccacgcaaccatgaggaggacgaagaccagcgagcccaaggaggaagacgacaccctaggacccactgcccaggaaggagagcgtgtctttagaggtgctcacatctgggcatccttgaatgacacctgaattcatgtcac

SEQ ID NO: 22379 - DNA, 813 bp, Zea mays
  unsure (1)..(813): unsure at all n locations
  Clone ID: MRT4577_12040C.1
ccacagacccacgccgggaccatgaccgcgaggagctgtgtcgctggaggaaccacggtgaactgcgcccgggacagaggtctgcgcgtgggagagaaggagcgganctgtgcaaagccagttttttgggctccggctccttacgagtaaacgggctctggctctgtatatagagccgttttcctggcgtcgtttgggagggctccagcaaagagccggagctagagctgcccgggagcccttccccaacaggcactgaggaaattcaggcgccgtgtatgattctgatctgtgacctgtaaggctaggaattgggaggttggggacgaactttgaattagggctgggcattcagtctattagggtaattcggttcggtctattcgggtttgtgaaatttcggattctgaaaaatgagaaccgaaattttcaaaataattttaggaaccgaacccgaatagactcacaattttggttcggtctattcggtccaccgaatagacccaaatagtggagatactagtatctttttgtcgggtaccataattaggggtacccccaacactcctaaacacggctggtaaccaccatcagcgcaagctgcagagactgatgggcgcgattcaggtcaaggcttcgtctacccaaggggcgcgatctcgcctcacccgagcccaacctcgggcgggaactgtagtcccgaacgaagttacgtctcgcccgagagcctcctcagggagtgggcgcaccctcggcacgcccaaggcccaactcgagcaggcttcgtcaagaagcaaccttggccaaatcgcc

SEQ ID NO: 22380 - DNA, 367 bp, Zea mays
  Clone ID: MRT4577_120410C.1
ggaaaaaaaggcatgggcattatcgaccccgaaaatacgtttacggggaatggttttatgggggggaacagggtcctttgtcatcacagtaaaacaggggttaaggggcaccaaaaggggttgggcctcggggaaacaaagctttttttcggagggggccaagtttgcaaattgggggcgaacttatttacccccctggggggcttcgtaaccgccagcatgggggcctgctcccccaaatccaagggcgggggggtgcgcacccaccccatgggggggggccccctgcccacgggggaagggggaccgcccctgggctaaactggaggaagaaggtagccttggtgggcccaaacccaaaaggggc

SEQ ID NO: 22381 - DNA, 144 bp, Zea mays
  Clone ID: MRT4577_120411C.1
aacaaaaataaagacgtcaccaccacacctattttatggggagcaaaacacctgggtgttcagaccttcctagaaacacaagcttgtcaactctttttgataaaaaggatcacaccttattttttgttcaacatattctcccct

SEQ ID NO: 22382 - DNA, 163 bp, Zea mays
  Clone ID: MRT4577_120412C.1
ccggccacccctcagcgtctacgctcccgaaacgtctgggccctcacctggtcgggggcgtcgtccccttccaggactccctggtttaacgcgcttccccccatgtcctagctgcactccctgtggcgtgagcttcggccaggtgtcccgctgcacttcctgg

SEQ ID NO: 22383 - DNA, 325 bp, Zea mays
  Clone ID: MRT4577_120413C.1
aaagagcttgacggcgccgcgtctaagctgatccttagagcggcgccttgcttcggattataccatcaagttaggaaatatagtttaggatacaaaatatgtcgtcgcagaccatcttacatatggtaacagtagacgcactagggtacaacctaaatgcttgtggactcacattcatgaccacaaaatctgacccctaacctgcattaagagcatgcgaactgcatatcattacattacctatctcaacaggagccctatcaatgcctttgtttggaatactactgggtccatcttatttttgttccaccacctccaggagctt

SEQ ID NO: 22384 - DNA, 385 bp, Zea mays
  Clone ID: MRT4577_120414C.1
taagctgcaacatgtcagctctagctctagctctagtactgctctgctcggcgacgatcatggtggcgccggcggcggcggacgtggagtcccacagcttccccgtcttcaacgtcaccacgaccgagagcctctgggtcgccacgaacatgtccatcgtcatgcccgcagcgctcctcttcatgcccgagcagccgcttcccgaggtcaacgtttccgaggggtttctgctgctccccaagaggatcgacgtctggcgcgccggcgccggcgcgctgccgacacgcgaggcgtccttcaacacgagcttcacggtggaaagctctgcccctcccgtctcgttcgtcctcctcctcgacaggttcccgacactcaacaacccctt

SEQ ID NO: 22385 - DNA, 279 bp, Zea mays
  Clone ID: MRT4577_120415C.1
cctctttcagaacagtgctgcctatacagattgttatcggcaaaggaaaatctggctatctggcaatattttacctaagcgcagattaattggcgaaaaaattaactcttaagatggccattaataattaggaaagtttacagagtggtcttagtagaaaattcaagtcctgctaatttatttaaggttcaataatgcgttcaacatgcctgttatgtataacgcttaggttctaaggaagattaaggtctcataccataatacatgtagcttatcttt

SEQ ID NO: 22386 - DNA, 291 bp, Zea mays
  Clone ID: MRT4577_120416C.1
acaactcgaacttcgttcttgtgtataggtcggcagcaagctgtggtagagcgatatgtcgagaatattaagagcagcactctgttggcgatcctagttctccaggccctttctggtctctgcggccgtgccaaaggaccttgcagggccgacgacgaagaagcagtgctggtgcggcgagtgcaccagctgagcgtgcgtgtggacctgcgacgacctcctcaccaagtgcgcctgcacctgcaagaactgcgtccccgtgtccacggacaagttggtcatcaagtacag

SEQ ID NO: 22387 - DNA, 1986 bp, Zea mays
  Clone ID: MRT4577_120417C.1
tggacgtttgggcggacgcgtgggttgttttgcgctcttattcaaaacccaaatctgtccctcctctcagattattgtgagtttatccccgcgccaatccatctgtccatggtccgcgtgggcttgtcttccgcgcccggggtcaatctgacagagcctatcttttacttctgtgctgcagcaaatcgataatgtttttgaccaactgatcaacaagatagaacatgcggattttgatacgcggcctttcttgaaacaattgaatgtgttaggccgctatgaaccaatcaagcggagtatccttgccaactagacttttgaatcttcactgtaatataggagtattgtttttctcaagataatttatttgcacatttgcctcgtttaattcttactgttcatcatcaaaatatcatattctgacacgtccttgttcaacatattcaaactttctattctatgcctcttttatcagtcaagttagtatttcatccaacatatcctgtaacttgactacattacatagtcctagcctgaagtagaaatcagtgcaggaacgaaactagcaattcaatactgtgactacaacagggatatgtcttaatgttatatcatttttctttttcttattgagagtggagtcaaattgtttttctagcttctgagttctgagtgaaaaaagagaatcgaaatattactataccttggtgaatttgaatatgtgcctttttatggatatgtccacatttttattgcctttaattctactaagatgtatattgcactaagagacgcattgaagattatggcatttcttgtcactgtaagccttctcctggttcatcagttgtgtgtggcagagactgccattgtgggtaagtttccaaacttgtaagacacactagagcattgatactgctaattccgtaaccagttctgttttctatatttatttagaaaaactggatgtgaaaaaacatatgaatctgttagctgttggattattacacctgtgagttttatcattattgagatattctgacatgctgaaactttgctgatgtagcatgcttttctcttgctgttcatcacaatgtgaatgtgatgacacatgcaccaataaatcattccagcacagacctcttaagaaaaccaaattgattaagacagagaaatgtggtcatggattggttgctgaggatgaaataaagaaaggagaatttgttattgagtatgttggagaagtagtaatatggtcattgatgcaacaaacaagggaaaccggtcccgattcataaaccatagctgtgaaccaaacacagcgatgcagaaatggactgttgatggagagaccagggttggaatttttgcacttcgtgacataaagataggggaggagctgacctatgactataaatttgtccagtttggagcagctcaagtttgtcattgtgggtcttcgaactgcagaaaaatgctaggcacgacgaagtattcaggaagctcacagaatcatcatgccaagaagaaaaagcggaaaacaagttgtgagaattgcatacagcagtttcttcggctgtggcatccacataaaaaaatgtatgttggttgttggataattgacttcgatcaagaaactaaaatgcatactctgaagttcaatgatctccatactgaaaagttcaatttgaaggaagaagaatggcacttcttagaggtcgattttgatgaagattgatcattgaaggtaactgcaagagtttgactgtcatggtttgtgacagggttgccatggtttgctgcaccgccggcctactagttgggggttcatttgcgatggcagcatagacagacggacggccagttttctcccattttggagtagtagtccaagcctgaactgtgacattcgtgcttgcttatattatacgtgaaagtgtacctgagagcagattatacgtggaagtgtatcagcgttgcatatgc

SEQ ID NO: 22388 - DNA, 347 bp, Zea mays
  Clone ID: MRT4577_120418C.1
gaagcgaatttcttttcttttttgggttttttttttttaaaaaaggttggaatccacttttcaaaggggctattatttcctcccttggggttcagggtattaacagggggtaaacacatggcccaggtgtaagggaacaatggccaccgatacaaaccttggtagatactcgctaaaagcaacagattccggggtttgtggatgtccttctggaatgacccccccggcttaaaaaaggggacaaggcacttttttatgtcgctctgggtgaccccgaggtgccccctggtgagaatcacgattttaacatgcccagccttcttcagggtcttaaagcaaatccaatt

SEQ ID NO: 22389 - DNA, 344 bp, Zea mays
  Clone ID: MRT4577_120419C.1
gggactagcagcaagatcctagcacaaacaccacaccccacaggctgattaattactcccagactaatgaaacgaacgcttagctaatagcgcgcgggcttttttttccctccccctcttgagcgtgcgagaagagatggctcttaacgggggcgagacattggtgcccgaccaggagaagcagcagattttcctacagaagcacaccgagaagcacttcacctgcggcgagggggttcgggacataaacatccgcgtgtgggacgggctgaccctgcccttcgcgcttgccgtgggggtgttcggcgccaacacctactccgcactcgtggtcaccgcggggg

SEQ ID NO: 22390 - DNA, 294 bp, Zea mays
  Clone ID: MRT4577_12041C.1
atatataaaaaatgggtgcgtttttatttttttttttagaacaaaaagaggccaaaaaaaaataatgccctctgaacattcccaaataattcccaaattttcatgggaaaatttattcaacaacacttaacaagtcttacttacgacaaaagcactgcttttcaaaaaaaatcccaagctccacctcataagcatttatgtatgaaaaaaaaaccttaatcccaacctcaacttactttgctttaacgcaatcaataaaatctcacccatcaaatattttttaaacttaacaac

SEQ ID NO: 22391 - DNA, 293 bp, Zea mays
  Clone ID: MRT4577_120421C.1
cggtcgagcacagtgagcagagggctctggctacagtaagctgctttcttcctaatccagttcagttgaccatggaatacattgtgcaatccctattgagtgtgagaaagatgacaggctgagttgcagacatgtccttgtgcactcacagaatactaagcatgctgcggtgcctgatcgttcagaactggattatcagtatagccagttttcaccatttgacaagtttatgatgagagccagttgctcatttgaaagcatgaattcagtagcggagttcttgtattctgatc

SEQ ID NO: 22392 - DNA, 678 bp, Zea mays
  Clone ID: MRT4577_120423C.1
ttgggtacctcgaggccggccggggtagagatagcagaggtagtttgtttcctctaggctagagtcctctagctactctctatggccatgccgatcccgtcaatggttatggcaatggcaatggcaatggttcttgcggtagcgtctacggcgcactacgggcatcaggcgctggccgatgctcctgccgccgctccgagccctcgtcaccaccatggtcatcgcgccccggcggcgcaggcatcgggttctcatcacgctcatggccacgatggtgcaccggcgccaggtcatcgtggtcaccacggccaccatgcaccagcaccggcgccaagccatcatggtcatcacggccatcatcacgcaccagcatcggcgccaggtcctcatggccaccacggtcaccaccacgcaccaggtcctcacggtcaccgtgccccagcaccggtacataacgaccaccaatcggctcaggctccgaaactgcatcatcatcaccgtcacgctgcagcgcccgcccctgttcagagctcctactagtctagatggcagatggtcaaaacatgcgcatgtgtggcaataataagaagacgatatttacgtcttggttgtatttttgtattcttggctatgcctctgcgttgttcatggtaatctctcggctaatcagccggaatc

SEQ ID NO: 22393 - DNA, 249 bp, Zea mays
  Clone ID: MRT4577_120424C.1
agtccgcgtctagggaggaattgaaccttgatttaccatgttcaatacattttgctgatctcaataagagcagtactagatcggtgcaccaggcgacaagctggccacccatgaatcattaccgattcaactcttcacgtctccgttttaaaacgcatgcatctacctttcctcatcaaacatcgggtggtagacgcagtaggattgctgatccaccatcattttaaagtaactagcggctggtttgca

SEQ ID NO: 22394 - DNA, 843 bp, Zea mays
  unsure (1)..(843): unsure at all n locations
  Clone ID: MRT4577_120425C.1
gtaccctcgggctcggccgggnaagcaaacttaagctgtttcgcggcggagggagcagagaaatcccccaaccaaaccaaaccctcgccgtgccgccgcctccgactcctgctccgtccgagcctaccaccacagggcaagggcttcatccagccgcgtgcgagcctgaccgcccagttagacgatgagccgcagcctcggtatcccggtgaagctgctgcatgaggcggcgggccacgtcgtcacggtcgagctcaagaccggcgaggtctaccgcggctccatggtcgagtgcgaggacaactggaactgccagctcgaaaacatcaccttcacggcaaaggacggcaaggtgtcgcagctggagcacgtcttcatcagggggagcagggtcaggttcatgattatacccgacatgctcaagaacgccccaatgttcaagcgccttgaggccaggattaggggtaaaggctcagctgttggtgtcggccgaggccgcgcggtcgccatgcgggctagggctgctgctggtcgtggcggtggtcctgttggacgaggtggtgcaccccctgtgaggaggtagatctgtcgcgctatgtggcaaatcaagcttttgccctagttgcaaaaactttgcttgagcagcgatgctatatggttgttaagggtagcttatcagcagcagttcatgtttacagcatagatgcaggactttgtgtaactttgcacgagaagactgtggacagtttcgacgatgctatattgctattgagggtctgatttggataatactccctaagtcccaaaataaacaaaaaaaaaaaaaaaaaaactcgtccccgg

SEQ ID NO: 22395 - DNA, 216 bp, Zea mays
  Clone ID: MRT4577_120426C.1
ccaccccagacagcaaataatccaggagaagggcttcttttttgctgcgggtcagtacattagcaacagattagttcttcatctatgatacacatacagccacaccccagaaattctatgttttattggccaagctaagaaataaccctgggcaggaatgagatctttcgctggtaaaaatttagtgttggggttcctatagctgccgcatggttg

SEQ ID NO: 22396 - DNA, 385 bp, Zea mays
  Clone ID: MRT4577_120427C.1
acaaaaagcacacagtggccaattcccaggactcacgagttcaaaaatctctatgactcacaagcgaaccagcccaaatgcaaagacactggtggttcattacaagactaggacacattattatcccgcccaatcctttagcagaatgcaaaaaaaaaagggcagcacatgcgctggacggaaacatgatggatcgcacactactccgtaacctattggagcgagcaggatatccatttctctctcgacaaacggatcagtagcggccatcaaggttgacacatcgctggtggggaaaatgttgtgaggcttcatcctctctgtgaatccataagcaggggcctgtgagacgtacataagcatggagcaacgactgggacatcct

SEQ ID NO: 22397 - DNA, 102 bp, Zea mays
  Clone ID: MRT4577_120428C.1
cacacgagtctacatgtgctccgtctacgtggtggtctgctagggtgcggcaatccacccggactagcatcatctgatcttcgatggcaaatatgtatatga

SEQ ID NO: 22398 - DNA, 317 bp, Zea mays
  Clone ID: MRT4577_120429C.1
gctctttctagcatcctatctccgttgcttttgtgtggcaaagtcctgttaatggtgaaggccacacgtttagacaatgaaggcaccgtgatgcatgaagataaatgcactgtatcggactcatctcgaaataaaaaaaagcgcccaccagaaccaaagaccgatacatagagaagaacataaaaaaaaagctcggcgcgaccttatctaataaatctgcataggagggatgagatgagtcctagtgagacaatctggcctgggtgcgcgcccaccacacccacctgcaggagatcgaaatgaccagttgaaagcac

SEQ ID NO: 22399 - DNA, 323 bp, Zea mays
  Clone ID: MRT4577_12042C.1
gcgcccctctttttttttttttcataaatagcatccagaaggtcagcaacataggcaggcaggtcctcaatcaacacgtagtagaacttctgatagtcaaacagaatacgttcagtaggcagcgggtcacaaagttgatggcaacaccctacctaccaaaacgaccactacgaccaatacgatgcaggtagatcatctggctgggtggcaagatcataggtgctgaccaaggagacacctgctgaacatcaataccacgagcaagcagcatatgaggagatgatacacaacggataggagaccagacacagaactccctcatg

SEQ ID NO: 22400 - DNA, 372 bp, Zea mays
  Clone ID: MRT4577_120430C.1
cgtaccgacggcgtagttgcattacaatcaccacgcgacgatggtgaagtgtctgaataccggtgaggcccttatcctcctccagcgcagattccccgggcggaatgcggtgatcgagcgcttgttccaggagggcacccgcgaccggccctatgggcactgcctcgtcagcggcctggacaagtaccccaagaaggtgatgcgaaaggactccgccaagaagacggccaagaagtgccgcgaccagtgcttaatcatgctcgtgaaggtcactcacctcatgcccacccgctacaccctcgacgtggagttcaaggacatcacctcgtgcgtgaccgacgcgctctacacccgtgacaccaacgaagagga

SEQ ID NO: 22401 - DNA, 1205 bp, Zea mays
  Clone ID: MRT4577_120431C.1
tggaccctcgggccgcccgggcctttttgctcctttttactaacaaccaaacatgacctaaacatgccagggcaaaacgcggacccgtgctgtgcgttccacccaatgtcgcgtgcggccactagatttttcctgacgcggtgtctgctcccacttcccctcctctcccccaggtggcggcagcggcggcggggtagcatttgtgctacgagggcttttgcaatggcggcttcggggttcggcggcggcgaggcgttccggctctcggccgcgccgggggccggcttactgaagctgcacaagggcgacatcaccctctggtccgtcgactgcgccaccgacgccatcgttaatgctgctaatgagcgaatgttaggtggcggaggtgttgatggagctatacatcaagctgctggaccagagctagtgcaagcatgccggaaagttccagaggtcaaaccaggagtccgttgtcctactggagaagctaggattactcctgcttttgagcttcctgcctctcgggtgattcacactgttggccctatatatgatttggacgagcatcctgaggtgtcattaaagaaggcctatgaaaatagcttgaagcttgctaaggataatggcattcagtacatcgcattccctgctatatcttgtggtgtttatcgttatcctcccaaggaagcatcaaaaatagctgtttctaccgcacagaaattttcagaggatatcaaagaggtgcattttgttctgttctcggatgacctttacaatatatggcgcgagactgcccagcagttgctatcacagtttgagaaatgaatggtccataggcagtttgctagcactagcagttgcccagcagtcgttgtctagtgttgagatgtgagcgccataggcagtttgcctggtgtaataaaaatgggtgtatcagacaacgtttaaatcttgatgaaaccgtgtattgcacctgtggtataatgctgaatgagtaaagtttggcgataccgagcagttgcaatactacctatcagcatgcctccggtatttgttgtgcaatgcaggtactgtgaccagtccaacggttcctgtcatgcacacccattgtaatgtttaggatgatgttgcttgagactccttcaggtttcgcaacgtggatgttgtgcgcgatcgcttttaaaaaaaaaaaaaaaaaagggcgg

SEQ ID NO: 22402 - DNA, 355 bp, Zea mays
  Clone ID: MRT4577_120432C.1
ctcttgtgtacagtccgttcaatcttatggctggtggaccgtttggaatgtgctctgtgactgctgggatgtactgtgctggcagatacattactgacataggactaaggaacgacgtggcataagctcaagaggagaaattatcactcgaccccgacttccaccttgttgaagatgaataatcaatcaacaggtgatcaaaaaaaccagagaccttgctggctatgaagaggaaacgagataggtgactgcgaatcacaggttaagaggatgcacttctcttcccttgaataggcgtccaaccgccgactatctgggatatgataataagactcggtatagatatgtgccttgc

SEQ ID NO: 22403 - DNA, 1072 bp, Zea mays
  unsure (1)..(1072): unsure at all n locations
  Clone ID: MRT4577_120433C.1
ggtaccactccaggcctgccgggtcaagactcctaatctcagctggtgtcgcgtgcggccactagatttttcctgacgcggtgtctgctcccacttcccctcctctcccccaggtggcggcagcggcggcggggtagcatttgtgctacgagggcttttgcaatggcggcttcggggttcggcggcggcgaggcgttccggctctcggccgcaccaggggccggcttactgaagctgcacaagggcgacatcaccctctggtccgtcgactgcgccaccgacgccatcgttaatgctgctaatgagcgaatgttaggtggcggaggtgttgatggagctatacatcaagctgctggaccagagctagtgcaagcatgccggaaagttccagaggtcaaaccaggagttcgttgtcctactggagaagctaggattactcctgcttttgagcttcctgcctctcgggtgattcacactgttggccctatatatgatttggacaagcatcctgaggtgtcattaaagaaggcctatgaaaatagcttgaagcttgctaaggataatggcattcagtacatcgcattccctgctatatcttgtggtgtttatcgttatcctcccaaggaagcatcaaaaatagctgtttctaccgcacaaaaattttcagaggatatcaaagaggtgcattttgttctgttctcggacgacctttacaatatatggcgcgagactgcccagcagttgctatcacagtttgagaaatgaatggtccattggcagtttgctagcagttgcccagcagtcgttgtctagtgttgagatgtgagcgccataggcagtttgcctgctgtaataaaaatgggtgtatcagacaacgtttaaatcttgaaaccgtgtattgtacttgtggtnaaaaaaaaaaaaaaaaaaaaaaaaaaaaaaaaaaaaaaaaaaaaaaaaaaaaaaaaaaaaaaaaaaaaaaaaaaantttaaaaaaaaaaaaaaaaaaaaaaaaaaaaaaaaaaaaaaaaaaaaggggcgccccttttaagggaccaaagttaacttcccc

SEQ ID NO: 22404 - DNA, 400 bp, Zea mays
  Clone ID: MRT4577_120434C.1
aaaaaaaaccgggaataaaaaaaactatcccactttggaacaaccggggggggggaaaataaactttacatttggggaggaggcctagggaacacccctttggtgggtggggggcccacccgggggcgggggcctgggtgggaaaacccccccctaaaatgggtccaaaacccaaaaggggaaaagggggggggaatttaaaaggaacccccccgggggtgccacccccttaccaaatttaacgggggcccccaaatttttgagaaccatttccaaaccgttaaaaaatccaaaaaattccacctttttgggggtgccaaaagggccaaacctaaaaaccttcccgggaacctttttgaggcccaggccaaaactgagggtgaaccgtttccacccgggc

SEQ ID NO: 22405 - DNA, 284 bp, Zea mays
  Clone ID: MRT4577_120435C.1
aagcgccgaccgcacaccgcagcacgggactacgggagcagccgaggcccgaccgcccgagaaattcaagataaaagattttgaagcattttcaagtcttaagaactcggaagataaatttaccttgcatcatcatctcatgaacgagaagcatgcagtcgtgtaagtactgcgatccgagcgggtgggcgccgtgggccatgttgctgctgctgacgaggcggcgcgacccatagtaaaggcgtacaacagctcacctccctcgtccagctccagccgccgtc

SEQ ID NO: 22406 - DNA, 448 bp, Zea mays
  Clone ID: MRT4577_120436C.1
cccacgcgtccgtccacttttccgaaaaaaaaaaaaaaattaaaaaaaaaaaaaaaaaataaaaaaaaataaaaaaaaaaaaaaaaaaatggggcggccgctttaaaagtttcggggctccgttcctcgggctcccgacttcctagctcttctttggggtgacttactttttttttacgggccctgattttaatacgcggggcctggtaaaaccctgcggtaaccgaaataaccctgtttggaccacatttaattttctggagcgggggtaacctttaaaaggccggcgccatgcccatttgccaccatctgatcgcctttaatggaaattggaaccccccatgggccaggggatcaccccctggggcggtggtgtaaacgcgcagggtgaggggtacactcgcaggggccccagtacccttgccttggccttagtgcccttcctttt

SEQ ID NO: 22407 - DNA, 535 bp, Zea mays
  unsure (1)..(535): unsure at all n locations
  Clone ID: MRT4577_120437C.1
acaangctttttttttttttttttttttattttcttttttttttttttttttttttttttttttttttttttttttttaaaactaaaatttattagaaaagcaaaaataaaggaaaaaaaaaaaaaaaaaaaggagagcaaaaagaaggagggagaaaaaaaaaggagagaaggggagggatagaggaaaggggaaaaaaagagggaagggggaaaagggcggaaaggaaacggagaggggaaaggggggggggaggcaaaagggaaggggggaccaggggggaaaccaggataagggccaataccaccacaagggggaacgcaagaaaaggggccgagctgggaaaaaaactcggggaaagaaaggacataggggaaaccgggggaaaagcggaatccgggaacaaatggaacaacatacaaaacggaaaaaaaaaaggaaaagcaaggggaaacgaaaaagggagggaagccaaatgaggggggtaacccacaataaccggttaacacccaggaaacccgtcgcaccaggaaa

SEQ ID NO: 22408 - DNA, 633 bp, Zea mays
  Clone ID: MRT4577_120438C.1
gaggccctcccgcgcgctcccaaacctcaagctgctgtacctcgccgacaaccgcctccagggccgcgtccccgccaccctcgccatgctccaccgggccaccctccctcgccgccctgccacgcctgacctcgctgctcctcgaccgcaacctgctcaccggcgccacagctgcgagctctggtgcgagagaggagagaaggggcacccgtgcgagagaagagagaaggaagatgtctgctaggagaaggagagaagggacatctcgacggcgctcacggcgctggagacggcgacagtatcaacgatactaatcgtttttctatccgtgtaatggcgtggtcatgtctattttgaagtgtgggctatcccctagtttttcataatagcgaatccctcgcttacgcctccaaatcgtcgaagccgcacctaaggatctctgtaatggcaaatttctcgccattcgactggcgggcggcgggcgaatcacgcactctctgctgcacgcactacagtttttaataggaaaaaatgtgcggaagtgatgtaatgttttatattacaaaaacaattatgcagaagtgatgtaaaattttgtaatgcgcgaatatatcaagatcgtcttatatgaca

SEQ ID NO: 22409 - DNA, 116 bp, Zea mays
  Clone ID: MRT4577_120439C.1
tactaccagctccccgctgccctgagctcggcgggctggcattcggcccggggaaaagcgcgacaggtctgcgaggctaagtgtctccgcagcgcacctcgcggcgagaatccgga

SEQ ID NO: 22410 - DNA, 141 bp, Zea mays
  Clone ID: MRT4577_12043C.1
gtcggacgggcgcggagacgcttctggaaggaacgccgcgatggctgcgcagggagagccccaggtccagttcaaacttgtattggttggtgatggtggtactggaaaaacgaccttcgtgaaacgtcatttgactggtga

SEQ ID NO: 22411 - DNA, 450 bp, Zea mays
  Clone ID: MRT4577_120440C.1
cttttgcacaacagcaagtctcctatttgggccatgtcatcaatgctcaaggtgtagctacagatccagttaaaattcaagctattgccgagtggccagtgccaaactgtctcaaggatttacgcagttttttgggccttgccggctactacaggaagtttattaggcattttggggtcatttgccagcccttgaccgctttactgaagaagggcagtctgtttgtttggacaaatgatcatggtattgcatttgacactttaaaaaaggctttggtgacagctcctgttcttgcattacctgatttcactgctgcttttatcgtggaaactgatgctagtgctgacggtgtgggtgcagtcctcatgcaaaaaggtcatcctctcgccttgcttagtaaggccctgggtcccaagtctaagggattgtcaacatactaaaaatagtact

SEQ ID NO: 22412 - DNA, 269 bp, Zea mays
  unsure (1)..(269): unsure at all n locations
  Clone ID: MRT4577_120441C.1
acccagcgagcgggggcgggcaancagnncancnnncgggcaggacnccnccacggggaaacaaggggccccgagggccangannacgccaggggggcggacacgaacncancaggggcagccagcagcagggggggggcggacngaancagggggaacncacgcgccgggacgccggggggcacccagnnncncgggnaacgggcagaggcgnnnaagccnncgcgcggggcggccgcancccggcagggcncaggcccggcgacaaa

SEQ ID NO: 22413 - DNA, 458 bp, Zea mays
  Clone ID: MRT4577_120442C.1
cccacgcgtccgggacgccccccctctcccatcttcttcctcctcaaacctttgcagccctcaccacccaaaaccctagccgccccccccccccccccccatttctccccctcctccaaggtgcagccctcccgtgtggttctccgtcgtgtggctgcgatctcaattggagtttggagggaggaagaaggaaggaggaagggaagaacctaaggtggtggacttccggatcgtacttagggatttgcccaaacttccggtaacacatccaccttcactctcataataacgctgcttaggcgcagtcatgatttaattagaaacttcttgtcaaaggatgttgtttgtaactagttgtgcgcactggataatttagctcatgtcgttatggttgtcttcccaaaaaaaaaaaaaaaaaaaaaaaaaaagcttgtacacctgcccgggcggccgctcga

SEQ ID NO: 22414 - DNA, 223 bp, Zea mays
  Clone ID: MRT4577_120443C.1
cggggaccggcccggaacacccgggacgacccacgcgcctttgatttggacgcgcaccccaaggacgaagggggggagggagaacaagacccgccgcgaccagaacaggaccggcacaggcgcctccggacaggcgcaaaaaggagcacacccgacggacacagaggcaaagacgacacggaaaccagcacagaacccacaccaacccccaagggccaggaga

SEQ ID NO: 22415 - DNA, 318 bp, Zea mays
  Clone ID: MRT4577_120444C.1
taccacacaatccaggaacgaaaatatcggctgccataaccgcgacacagcgagggcacgaaggaagtagcagggaaggaagtacctagcgggaggaagagaagaccaagggcgaggggccggcgagcggtatcaacctggggacgacgtactcgagggtcggcgaggggcaacacaaccgctgcatgagcatgggcgacaaccaaggggacacgaccacgccaggctacgacgactacaccaacaccgagcggataagaggggaagccgccgagaaccaagtcggcaagaaccccaccaacaccgtggtagacacaa

SEQ ID NO: 22416 - DNA, 234 bp, Zea mays
  Clone ID: MRT4577_120445C.1
cccacgcgtccgagaactagaaacaagtttatgaaggtctcaaaggtctatacgatctgcgattcatgatgattatggagtttacacaagtgtagacatagaaagcgatgagatttatatgtgtgaggacatcgatgcagaaggtgatcccactacatatgaaacagctacgagaatcgcaaattagtgggtctagaagatcaagcgtgactccaaagggaatatagaaagaga

SEQ ID NO: 22417 - DNA, 1716 bp, Zea mays
  unsure (1)..(1716): unsure at all n locations
  Clone ID: MRT4577_120446C.1
accggggggtacccccgggtccggccgggnataaatctctctcaaatgattttccctatatgccggccggcagcgtattcctcttcggttcctccattgctcctcgcgtgcgctccctctcccgtctgcccctccctctctctctcgtggagacgactgggccgccgtcgttgctgccctacgcggctacacccacgtcttcttcgggcccttagccgcgacgagcgccaccagggagtagaagaggttaaccttctggttggaaacgatgtacttcgaaggctatggcttccgtggaagtactttcgagcagacatatcgctgctatcctgcgtctttcatcgacaagccacaacttgaggccggtgacaaaattataatgccaccatcagctcttgatcgtcttgcatctctgcatattgaataccctatgctatttgaagtccacaatgcagcagcagaacggacttcgcattgtggtgttctggagttcattgcagaagaaggcatgatctacatgccatattggatgatgcaaaatcttcttttgcaagagggagatatggtgttcataaaaaatgccaacctccccaagggcacatatgtgaagttgcagcctcatacaacagactttctagatatttcaaaccccaaagcaatcttggagaaaactttgcggaacttttcttgtctaactacaggtgacagcattatggttgcatataataacaagaagtactacattgatatagtagagacaaagccctccaatgctataagtattattgagaccgattgtgaggttgactttgctccaccacttgactacaaagaacctgagccagtaaaacctgctgttcctgcaagcacggagcctggtaccgacgttccagctgaagaagaaccaaagttcatccccttcactggttcaggaaggcgcttggatgggaagccttccaaagataaagatgtgctagcctcttcccctgcaaagcgacaagctaatgcgaccaacggtgtacagccttcaacagccaccacatcacagggcagttcatcgcgtaaggccacaggaaaacttgtctttggctctggtggtaaccgagccgaaaaggcacctgaaaaggaagcagaggagcccaagaaagaagacccaaaattcgcagcattcacaggaaagaaatactcactgaagggctgaataaataggaagacaatgtattatcagtatttccggtgacggacattctcagggagaagcgcttaccaaccctgttatgtgggagggtctttcggtgggatagtggtctctgtttctcctgaactattacccttgtgtagttgtgtcagccacaccggagcaactgatgtataaagccgctcttgtccgataatggatttctgttgagcttgcatgtacattttctaaaaagataactgaaatcgccaaaaaaactacaaatacaatatgaagacaatgtattatcagtatttccggtgacggacattctcacgggagaagcgcttaccaaccctgttatgggggagggtctttcggtgggatagtggtctctgtttctcctgaactattacccttgtgtagttgtgtcagccacaccggagcaactgatgtataaanccgctcttgtccgataatggatttctgttgagcttgcatgtacattttcntaaaaagataactgaaatcgccaaaaa

SEQ ID NO: 22418 - DNA, 319 bp, Zea mays
  Clone ID: MRT4577_120447C.1
ggaaactgggggcaatttttatttttgcaacaaacacctggaaaaaacggggcaaaggaaaaatgggcggggaaaaaaatggcatgaacctttcaaggcaaaaagagcttccctctcgacaaggggaaaagccgataaccaaacaacaaagggtaccggggggggacaagagatttgacacacaccttgacacgctaaaacggggttttaaaaccaacacttgcatgctggaaaaaccaggtcacaccaaaagggacaaacaatgttcaaaatagggcaagaaggctggcaaaaaaaaaacttgggcctctgggccctt

SEQ ID NO: 22419 - DNA, 370 bp, Zea mays
  Clone ID: MRT4577_120448C.1
gcatgcgtaacctgtgggtgtccttagcaccgggtccaccatgctctggcatgtacggcatggctacacttatgctatccaaggtcaacggtcaacattgctctaaaagagacggttccttgcaaagattcctacttttgctgatgacacacacggcgctgaactcttgtattgcacaattcctgtaagactttcaccagggtctatgtctgtaaacaagactaccactgtcgtcgtgcatgcagcctggtattgcacatccagaaggtttacgacaggaactcttctatgttctgagcaagggctcacataattgttcgccagacccgtaatgtcactgagtgagtaaacatgacggagcgctgccttg

SEQ ID NO: 22420 - DNA, 1562 bp, Zea mays
  unsure (1)..(1562): unsure at all n locations
  Clone ID: MRT4577_120449C.1
ctcgaggccggccgggattaaaaaatgattttccctatatgcccaggcccagcgtattcctcttcggttcctccattgctcctcgcgtgcgctccctctcccgtctgcccctccctctctctcgtggagacgactgggccgggggccgccgtcgttgctgccctacgcggctacacccacgtcttcttcgggcccttagccgcgacgagcaccaccagggagtagaagaggttaaccttctggttggaaacgatgtacttcgaaggctatggcttccgtggaagtactttcgagcagacatatcgctgctatcctgcgtctttcatcgacaagccacaacttgaggccggtgacaaaattataatgccaccatcagctcttgatcgtcttgcatctctgcatattgaataccctatgctatttgaagtccacaatgcagcagcagaacggacttcgcattgtggtgttctggagttcattgcagaagaaggcatgatctacatgccatattggatgatgcaaaatcttctgttgcaagagggagatatggtgttcataaaaaatgccaacctccccaagggcacatatgtgaagttgcagcctcatacaacagactttctagatatttcaaaccccaaagcaatcttggagaaaactttgcggaacttttcttgtctaactacaggtgacagcattatggttgcatataataacaagaagtactacattgatatagtagagacaaagccctccaatgctataagtattattgagaccgattgtgaggttgactttgctccaccacttgactacaaagaacctgagccagtaaaacctgctgttcctgcaagcacggagcctggtaccggtaagactattgtcctatgtgattactgttccccatatggttttctcatgcacattatttttatgattcttgtttcagacgttccagctgaagaagaaccaaagttcatccccttcactggttcaggaaggcgcttggatgggaagccttccaaagataaagatgtgctagcctcttcccctgcaaagcgacaagccaatgcgaccaacggtgtgcagccttcaacagccaccacatcacagggcagttcatcgcgtaaggccacaggaaaacttgtatttggctctggtggtagccgagccgaaaaggcacctgaaaaggaagcagaggagcccaagaaagaagacccaaaattcgcagcattcacaggaaagaaatactcactgaagggctgaataaataggaagacaatgtattatcagtatttccggtgacggacattctcagggagaagcgcttaccaaccatgttatgtgggagggtctttcggtgggatagtggtctctgtttctcctgaactattacccttgtgtagttgtgtcagccacaccggagcaactgatgtataaagccgctcttgtccgataaaaaaaaaaaaaaaaaaaaaaaaaaaaaaaaaaaaaaaaaanaaggaaaaaaggaaaaaaaaaaaaaaaaaaaaaaaaaaaaagtcctctgcgttgttaccactgct

SEQ ID NO: 22421 - DNA, 583 bp, Zea mays
  Clone ID: MRT4577_12044C.1
cccggtacgtgcttgcaagatgaagaggcagtggagccatccgtcggtcgtgctcccgctgctcgtcgccgtcttcctgctcctcacgttccggtgcgccctgcgccacgcgcagcagcaggcgtctagcctccgcgccgacgacgcgggaacaagcacaagctacgccgtcgacgccacgctcgcggagctcgcggccgtggacccggccgcgtcgggggtgctgcgggccgccgaggcgctgctggaggccaacctgacgagggctcccccggagcgccggaacgccgcggtgcgcggcctccgcgactggctcggcaagcagcggttcgagccgcaggtgatggccgagctcgtggacctcatcaagcgccccatggaccggtacgccgccggggcgaggggcggcgacggcgacggcgacgccccccggccgtacgcgtcgtgcgccgtggtcggcaacagcggcgtcctgctggcgcgggagcacggcgcgctcatcgacgcccacgacctggtgatccggctcaacaacgcgcccgcgggcgccggcgccggcggcaggtacgcgcggcacgtgggc

SEQ ID NO: 22422 - DNA, 476 bp, Zea mays
  Clone ID: MRT4577_120450C.1
ccggaaacccgggacgcccacgcgcaagtcacggccacgcccggccccccaccccagggggccctaggagaccaaggggggtcacccaacacgcccccacggggccacaggccaacgaggcgcaccgcgcgggcgcggaggagcaccgcggcccggcgcagagcgcggagaagacgacggaccacatggcaaaggcccaccccccgccgggcccgcagccgccggccgacacggaggagggagggtacaaccacgccacgggccacggggggccgcgccagaggaaggcgcaaacgcacacgaaccggcggaacgcgcgccagggcacaacccccccaaggccaccgcccccatggaggaccgacggaagaggcccaggaccggggaaaaagaccacagagcccccaaactggggcaacccaccccccatggccgacaacagggaccaccccctcaagaaccacccggaagaccgc

SEQ ID NO: 22423 - DNA, 297 bp, Zea mays
  Clone ID: MRT4577_120451C.1
aagctgcagttgaaattgtttaaaaagtagcaggtacaatgaatattgtcacagatgtgttaatttttgaagcaatgtgggtgctgactatctgtagtatcataaatatgttcaggattgttttgatacttgtatttataataaaaaatgttggggggagttgatgaattcctgttaaaagctgttcttgttcgttacatgtaacagacatggtaaatatttgtttacagtctttgtttaacaaaccatgcatttaagtttaagtgaagtcgacaaaaaggatataggtgtatggat

SEQ ID NO: 22424 - DNA, 1314 bp, Zea mays
  Clone ID: MRT4577_120452C.1
tacgaccccaaaagcatcatctctcttcagcgagataccaaacatacgagtagtaacaatcatccgatgatggggtggtgcgaggtaggcatgatgaaggttctcgtcctcagcctcgtggccggcgccgtcgccgccgtgcggccgagcaagctgctgccggcggcggtgcctgcggtgtacgtgttcggggactcgacgctggacgtcggcaacaacaactatttgcccgggaaggatgtgcccagggctgacaagccctactacggcatcgacttgccgggctccggcaagcccaccggaaggttcagcaatggctacaacaccgccgacttcgtcgcccaagctctgggattcaagaagagcccccttgcttatctggagctgaaagcgcggaagatgctaatcccgagcgctgtcacgagaggagtaagctatgcatcggcaggagctgggattctggattccactaacgccggaaacaacatcccgctgtcgcagcaggtgcggctgttcgagtcgaccaaggccgagatggaggccgcggtgggccagcgcgcggtgcgcaagctgctttccgcttccttcttcctcgtcagcgccggcagcaacgacttcttcgcgttcgcgacggcaatggcggagcggaacaggacggcgacgcagggcgacgtcacggccttctacggcagcctcctctccaactactctgccaccatcaccgagctgtacaagctgggcgccaggaaggtgggcatcgtcaacgtgggcccggtcggctgcgtgcctcgcgtgcgcgtgctgaacgccaccggcgcgtgcgccgacggcctgaaccagctggccggcggcttcgacggcgcgctcaggtccgccgtggccgcgctcgccgcggaccagctgccggggctggcctactccgtggccgacagcttcgggttcacgcaggcgtcgctggccgacccgctggggctggggttcgcgagcgccgacagcgcgtgctgcgggagcgggcggctgggcgcgcagggcgactgcacgcccgcggccacgctctgcgccgaccgtgaccgctacgtcttctgggactccgtgcacccgtcgcagcgggccgccatgctgggcgcgcaggcctactatgatggcccggcccagtacacctcgcccgtcagcttcaagcagctggcccgcatgaggataggctgatttctcattttttgttgtattcttgtggcccatatagcggcaataacggtaataaagtcagtgtaacaagtgaaaaaggattaaaaaaaaaaaaacttccaacaaaaa

SEQ ID NO: 22425 - DNA, 696 bp, Zea mays
  Clone ID: MRT4577_120453C.1
attccagaatacccgacgcgaagggcctcgctgcacccaccacctcatctccgtgacatatgcagtccgttcgctccgctatctgcactgcgctgcactgcacgcactggccaccactcctaccgaggcgggcaaggctgcaccgccgcacgagcaagacgccaacggtcacggcgacgacgagcagaatacgcgccactcctaggtcgtacacagagagcctgctcaagagcgacgacctgtaccagaacatcactggacacgagcttggtacccgacgtcgagccgagatagcatgagatgagctgcgacgagatcactcgccaagcacccatgtaactcgtgatgaccacctccgccgacgatggctcagttcctctacatgctcatcaagctcatcggtgcctataagaccatggaagatcggtgtgtacaccggctactcggtcctcgacaccgcgctcagcactcccggaggacggaacagatcttggtcatggacatcaaccgcgagaactactagctaggtcttccctgcatcaacgaggccggcgaacgccacaagatcgacttccgcgagggccccgcgctccccgacctgaacgaccgtcttgtacgtgacaaggtctcgagcacgaggtcgtgtcgacttcgactttcttggacgccgaccaggactactacctcaactaccac

SEQ ID NO: 22426 - DNA, 106 bp, Zea mays
  Clone ID: MRT4577_120454C.1
cctgtgagcaaaaccactacccgagtgcagattcacacgatcaacctgtgtcgaagattctactcatattgaacagcgacacacacgtcggagcctgagagtgtcc

SEQ ID NO: 22427 - DNA, 215 bp, Zea mays
  Clone ID: MRT4577_120455C.1
agggggccggaccggggtttttttctcttcttcggcattccccaccttgacagggttttgggggggggatttcttcttgggttaattggaaagaatatgggagacacttgttccccacaacaacttttggttctttcggggcttatggtttaagggggtggggacaaaccaccccttgtttttttaaggacttttaaagaacctggggtggttct

SEQ ID NO: 22428 - DNA, 378 bp, Zea mays
  Clone ID: MRT4577_120456C.1
ggaaaagtgaaggaattttgaaggattgaaatctaataagaaatttttctatgtgactctttggaacaaaggattgatctcctataaatcctataaaattcctatagaatggaccattttagtaagattttggagaatttttaacacgagatccaaattcttggaaatttttctatggaatgcaagtgtcatataacactattcctacattttttccctatccctatgttttagcaatcctgcaatgcaaaggaggctgaagggagtttgtctatattccgtgaagatccaaaggaggccgaagagagtttgtctatattccgtgaagtcgttcgtctaaacgatgttaagttttggatacaaggaccggttttccgg

SEQ ID NO: 22429 - DNA, 176 bp, Zea mays
  Clone ID: MRT4577_120457C.1
cgaaacaaaaaaaaaaaaaaataaattcttaaactcccggaaactggcaaataattgttcacgcatgcattcatgtttaaccgacccgctgcggccataataccacacccggatcacgaaggatataaaaacctagtatcccttgacacaaaccagcggaacgtataccttagaac

SEQ ID NO: 22430 - DNA, 249 bp, Zea mays
  Clone ID: MRT4577_120458C.1
caccaccaccacacacggggagatagctatagctagcatagcaagccagccagtcagcgacttagcagcagctagctagccatgctgccgtccttcgtggagacgaaggcgagcgccggcaaactgaaagaagatagagtagaattgaggagagagaataggtgcgagagtcttgtgtaaggaaaaagaatcaattgtgtggggggagaaaaaattttttttttaagggaggaaagtaagaaacaggag

SEQ ID NO: 22431 - DNA, 108 bp, Zea mays
  Clone ID: MRT4577_120459C.1
gccaaacgttcttaagctcgttatagtatatcgatcacgaagcaatacagattttggtctaagctcacttgctgaatgccacagacaagactgtctactccaaacata

SEQ ID NO: 22432 - DNA, 432 bp, Zea mays
  Clone ID: MRT4577_12045C.1
atgaagaggcagtggagccatcagtcggtcgtgctcccgctgctcgtcgccgtcttcctgctcctcacgttccggtgctccctgcgccacgcgcagcagcaggcatctagcctccacgccgacgacgcgggaacaagctacgccgtccacgccatgcttgtcgagcttgcggccgtggacccggccgcgtcggcggtgctgcgggccgccgaggcgctgctacaggccaacctgacgagggctcccccggagcgccgggacgccgtggtgcgcggcctccacgactggctcggcaagcagcggttcgagccacaggtgatggccgagctcgtggacctcatcaagtgccccatggacctttccatccgaaaagccactaaaagcaggtttgcactaagagaaagtcggcttttagaaaaagctgcttcctag

SEQ ID NO: 22433 - DNA, 893 bp, Zea mays
  unsure (1)..(893): unsure at all n locations
  Clone ID: MRT4577_120460C.1
aaatagtgagtggggtaatcaaatcagcagcacactcttctctctcccctcccctcatacacgatccattttttttttcataattcaaaacacaatttgtttttctctccctacctaccacaggcacaggcacagcccacccacgggagggaaggtctctccctctttctcttcgtcttcttcctccttttggtttccttttgattgattgatctagtagaacacagaaaggagagagaaagagaggagaggcaacacagaaacaagagaagaagaagaagaaggggagatcgagatcgatcacgcaccgggggagcagatccttcgcctcgccatcagggataaggattcatgcgaaatgccacctgaacttggaatgtcttctagaactgttgctggtgctgttgtaaataggaggcctcgccgcctgtttgggagatcatcagagaggaagaacccactcaaccttcagtttgagcgtcaagtagctcgcctcgaggcaaggcagcagcaacagaggtgtgttattgtgacagttattcccttcaatttctgttacgacttcaaatcactatcgctcaccgagagtgcaagtgaggatccttcatctcgacctacatctccagaagagaaccctgaaacatcgtcctcaccatcgattttgttcctgcaccttaatgctcaagatgtatctcacagaagatggcaggataattcatcaaggctactggaagataagcccacaacatccaatagcacgtctgattcagatttcttagtcaacagctttaccaagccgagtgataatgcaaggccatcaagaaggaagagcanaaagaaaagcagaaacacagggcacgctgtaggaagccgactgatgggatctgagctaa

SEQ ID NO: 22434 - DNA, 544 bp, Zea mays
  Clone ID: MRT4577_120461C.1
cctcaagccggccgggccgggtctatcccctctccgcttccagctccgatcgaacctgctacctcccaccaccgagcccatgccggcccagctcaccgacgaccagatcgcccgagtcaaggagggcttcagcctcttcaaaaagccggggacccgctgcctccccaccaccgagatgggcactgccatgcgctcgctgtggcaaaattcctactgaggctgagctccacgacatgatcaacgaggaccgagctgatggaaacggaaccatcgatttcccaggagtctctcaaccttatggctctccagatgaacgacaccgtctcctgccggaaggcccagggaggactctccgcgtgtttgacatggacctgaaactggtttcatcatcggccgtgcgacttccggcctggtcttgacaaaacgttgcgccagaacctaaactgataaggaggtggaccaaaacgatccccgagggttgaatgccctatggtgatcggccccacctactaccaggccgcttgtccagggtcattgatggccc

SEQ ID NO: 22435 - DNA, 161 bp, Zea mays
  Clone ID: MRT4577_120462C.1
acggttgtgtgtgtgtcgtcgtgaacaggaggcgcatcccgagatccgttgattcaaggtctggtcctgaggggatccgcttacgcgcgcggacaacaagccgatgcacgtaacgagccgtgcgatccacaaaacgatgcggctggcgtacatactgtact

SEQ ID NO: 22436 - DNA, 261 bp, Zea mays
  Clone ID: MRT4577_120463C.1
aagcaacaaagctgcaaaccgactgcgcttcagggtgtgtttggatggagggacgaggaaggatgaagaggatgagatgagatcattttaatttgacccgcgtttggtttggaggtccagagtcagggtcaagcaatattgttcaaaaatggtggatggggctatccctcaaaaaaataagggacagagtcaaccaagggttgatctcgtcccatccctcgttgacaccgaaccaaacactaccttacctaccggtcccgg

SEQ ID NO: 22437 - DNA, 1152 bp, Zea mays
  Clone ID: MRT4577_120464C.1
atcaactccacaaagaatccgaccgccgtaatcctccataccgaagacgtcggcgacttcaagccggcgccggtggtggcgtccttctcggcgcgtggccccggcctcaccgagtccatcctcaagcctgatttgatggcgcccggcgtcagcatcctggccgccacgatcccgtccaccgatagcgaggacgtgccgccggggaagaagcagtcggcctacgccatcaagtccggtacatcgatggcctgcccgcacgtcgccggcgccgccgccttcgtgaagtcggcgcacccgggctggacgccgtccatgatcagatcagctctcatgaccacagccacgacgacgaacaacctcgggaaaccactggcgagcagcacgggcgcggcggcgacggggcacgacatgggcgccggggagatgagccccctgcgcgcgctgagcccgggcctggtgttcgacaccagcacgcaggactacctcgacctcctctgctactacggctacaaggagcagcaggtccggaagatctccggcgccgcgcgcttctcctgccccgcgggcgcgccctcgccggacctcatcgcgtcggccgtcaactacccgtccatctccgtgccgcggctgaagagggggagacccgccaccgtggcgcgcaccgccatgaacgtggggccctcgaacgcgacatacgcggccaccgtcgatgcgccccccggcctggcggtgcgggtctcgcccgaccggctcgtgttctcgaggagatggacgacggcgaggtacgaggtgagcttcgacgtggccgccgccgctgccgtgagcaagggctacgtgcacggcgcggtcacctggtccgacggcgcgcactcggtgcggacgccgttcgcggtcaatgtcctctgatctggtggagtcatcggcgtttttgcttctttcataatcatgttcttggttgcatgagtgtttgatttttgtgtcccccctcaatttggtagaaggggaataatttcaaattcagttttgttgtagcacccctgcttcgtgtaggttcatctcacagttaagattgtgatggccaaggctagaaaactagccatcatatttgtttgaaacctcttcttcttgatacaaacatgtgtaatgttcatg

SEQ ID NO: 22438 - DNA, 467 bp, Zea mays
  Clone ID: MRT4577_120465C.1
ccggccgggcctgactccgcctgcgctcttcctcccagctcaccttcccattcttgtcgacctcatcttgaatggctcctgacagctcctctacagcatggctcaaactcacctgatggaatgctgctgacatgtccaaagccaccacaccaaacaacattggcctgaccttcaatatcaaaaaagacttctcccctgagaatgaaaaaaacactcccatggagaatcccatgcccttgcgattgtgctgtgctggatcgatatgggcctcaagcatgccaactcctactatctatgactagtctacgtggtcctattggtatgaatgattatagagaatgctcgtctgtcttgccaaaggatcgctgattactcatacattgacgagaatgatgaattatctgtatgactcgtgttaggacttcgtctgctgcccgtggaagatatatcctcgatgtgcattataa

SEQ ID NO: 22439 - DNA, 656 bp, Zea mays
  Clone ID: MRT4577_120466C.1
aattcggcacgaggcacggatgagatcgtcccatgtagtagtagccgtgtaggctaggccgtcagttgctgccgctcgctgtcctctcccaagtccgaatcgctcgcttcaatcacctgctcgctgttgctgcttactccgtcttcctccaggatttagagtcagtcggtctccgacagttccaactccatttccacgaccacacgcactcccgagtcccatccactccccttcggtccttccccttccagttccagcttccatccctttcccttgcctgcgctactgctctctctcccccggctaagtcgatttggcttctcctccgtgtcggacgcccgctggtcgctgactcgttgctgttggggcggcgtcgacgctgcaaagttattgctgctggcattgcggcgcggtaagagaagaggaggagggatcggcggagaatgaagatgaaggcgctggcgtgctgccggcggcggccccaggacttgagcatcgacatggaccaagagcccgacagggtgatgacatataatggcctggagacctgcattatcaactgttccgcctatgacgatgatagtggcatcagtgcaacaacaggcggagatggctgcgtcaccactgattcccttgatgatgaagtctctagctgc

SEQ ID NO: 22440 - DNA, 307 bp, Zea mays
  Clone ID: MRT4577_120467C.1
gctttaaatttttcaaggactgataaggaggaaggcattgaaccaggtggtggagttgtccttctttatgccaccaacgttcttgacaagattagcacagcaaactaggactaaaagatgggatttaaaattatcatgaattcattgaaggatccctagatgaccatagctgcaaatgctgacattgatggagctatactcatatggaaactgatagaacaaaaagacctaactttgggctatgatgcaacaaaaggggagtacgtagacatgatcaatgacggcatcatgtatcccttgaaggtga

SEQ ID NO: 22441 - DNA, 518 bp, Zea mays
  unsure (1)..(518): unsure at all n locations
  Clone ID: MRT4577_120468C.1
tcnnnatattattgattgattgcattcctctgaggtacacatgcaaatggattcaaatttgatacatttcaannnnnnnnnnnnnnnnnnnnnnnnnnnacgtaaaactgtgaaactacttgatctagtatacaacaacgtatcctcctaaacccanaaaccgnccgaaggtgnnnnngantgtgttacccnaaacgaatattttcagtgccgttgtacggnnnnnnnnnnnatgctcaagtctcagacctatcttgccttgcccgatggcacgacaaatccataccggcactatacacgagcacccaatgcctggagctggctaacaagaagatccacctgctccctgtacatctcttttaggtcaacaatatcatttcttagctcctccagctcttcatcacgttnnnnnattagttctagagcttggaagtgcctttgtttcagagcttccaattcagcccttaagccaggcacagcagcggcctcgtgccgaattcnnnnnncccggggatcca

SEQ ID NO: 22442 - DNA, 192 bp, Zea mays
  Clone ID: MRT4577_120469C.1
atgggtgagttgaactacttccttgggttccaagtgaagcaactcaaggacggcaccttcatctctcaaatgaagtacacgcaagacttgctcaagcggttcgggatgaaggatgccaagcccgcaaagacacccatgggaaccgacggacatgttgacctcaacaaaggagtagaccggatattatgctaa

SEQ ID NO: 22443 - DNA, 406 bp, Zea mays
  Clone ID: MRT4577_12046C.1
cccacgcgtccgccccacgcgtccgcgggcgcgtgggcgacccacgccttccggcccaccccttcctcgtcttgccttgcgttgtctgggcttgcgggttgtcacaagtgaagtcttcgcgggagagagggcggcggcccgtccctgtccctgtccctccaccggtggttctggaatggcgcacgcggtggtgcccgcgatacacagcccggtcggagtgaatgcggcggcggggagggtgtggagcgccgccaggactagtaccggccgcggcggcgcctcgccgcggttcatggtcatggccgacagcacgggcagcaccgccgtggtgccgcgcctccagcagctgctcttttggacaccacgccctacttcgacaaggtcatcgccgagtacatccggctcg

SEQ ID NO: 22444 - DNA, 233 bp, Zea mays
  Clone ID: MRT4577_120470C.1
gttctgaaagaaacaaaaagtgcataccattcagagcatcacaggggtatgaagctacctgagatacatgaacaaagggatggattaaatcggcatgcacaatgaaaagttccgtattctgggcttgatagggtcagaacagtttctactgacgctagaaagctaaattaactaaagaccagattccatagcagttatgaacagggactcactctgtatggtgaatggcatgc

SEQ ID NO: 22445 - DNA, 300 bp, Zea mays
  Clone ID: MRT4577_120471C.1
gtgcctccgacgatgacgtggcgctgcacgcgaagaagctcatcagagacctcaacttgttccccgacgctgacgtcaacatcgttcccgttgctaattgcaccctccaaccccgcaggatcgtcgagaagcgcctgaggttcccgaagctgctagcttcggattccgagccttcggttgaggatttgggtcaccacgctggctattaccccattcagcattcacatggccgcaggatgttctactttttcttcgaatcacgcaataggaaggaggatcctgtcgtatttggttgactgg

SEQ ID NO: 22446 - DNA, 409 bp, Zea mays
  Clone ID: MRT4577_120472C.1
aattgtgagccttggctgtatttgattttaagtttgaataatccacctgctgtaggtagtttggttaaaagacattgctatttttctgcttagtgatactgatattagttattcatttctcgtccatctatttttgaagtgtcagtagtggtttgttaaacttgttttcctgagcttgcttctgattctggcaagtttttgggctcctggcacttcacttttatgatcttattttgatttgtttattacaggaaagtggttctggactggagtatgtcctacatgagtatgcatagttcattagtgcgtgagcagtgatcgtggaagaacctgtgttgggagatggtagagaagatgtgagagatggtagagaagatgtgctcaagattgtttttcggtcaaagtcttt

SEQ ID NO: 22447 - DNA, 684 bp, Zea mays
  Clone ID: MRT4577_120473C.1
gggtcatcgccaacatcatcaacggcgacgccgagtgcggccgcggccccgacgccggtggccaggaccggatcggcttctacaagcgcttctgcgacatccttggcgtcagctacggcgacaacttggactgcttcgaccagaagcccttcggcgctgccaccgccgccgccttagctgaaactaccagcggcccgcgtcacgctgacgcgtaaaagaataatgcatgcatgggcaccgcacagggcacaaatcaataacagctctcttttaaataatctgcatgcttattcgcttgcataagcatgcacacgtagtagatcgtgcatgtgtagggcgagcatgtttactttcatcccgggcggccggggttgtgtcgtcgtgcgagttgccgtgaagatgtactatgcctcatgcatgttttctatgccatatattatataaataaatgcataaaaaaactgagctgcaacgatggcagcgccaaaaaaaaaaaaaaaaaaaaaaaaaaaaaaaaaaaaaaaaaaaaaaaaaaaaaaaaaaaaaaaaaaaaaaaaaaaaaaaaaaaaaaaaaaaaaaaaaaaaaaaaaaaaaaaaaaagggggggggccgttttaaaggacccaagtttagttccgcgggctggcaaggtaaaagtttttttttggggcccccaaaattaaa

SEQ ID NO: 22448 - DNA, 445 bp, Zea mays
  Clone ID: MRT4577_120474C.1
gggcccccacaacaaacggcataggggggattttttcgcccctggttgggggggggggggggtccggccaaaccaacatttagtttcccaaaggggggggggcccacaaaaaaaacaccggcgctggtgaaaagcaaagcaagggtaccccggggggcccttgaaaggctggccaaaaaaaaaaaaaaggggggggggtcccttccgggcccggagagacttaaatgggccccccccaagcgggacaggatttttcctcgccccaaaaatttgctgccctggggggcaagggaatgcttttatatgacccaaacagcttggggaacaagatgcaatcaaagcctccagggcctagctcaggggggagcacaatgttaaaggggggatccccccgggcacaggggggggaccacagactggtcctcctttccttggggcggaattt

SEQ ID NO: 22449 - DNA, 432 bp, Zea mays
  Clone ID: MRT4577_120475C.1
gatttcctccggcgagagagaggaaccagtattaaaacacaagatacatagatgctgggactgtgctagtgagctgtgagatcgagagaacacactctccagcagcacggcaacatgtcttgcataggttcctcttgcaccgcaaccaacaagggaaaggagactgtggtggaggtgcatggagcggtggcggaggagaagcagcaggtgaggaacggagaggagactgcagcggaggacgactccggtgggtcggatccggattcggactctgaatcggatttagattcggagtcggactgggactcgtattcggaagatgaagaggagcgacagcagcagagaaagaaaaaggagaaacccaaaaacaagaagaagaagaagaagcagcggctgcggcaacagcagcagcagccggcatggctgatcaca

SEQ ID NO: 22450 - DNA, 145 bp, Zea mays
  Clone ID: MRT4577_120476C.1
aatgaaaacatcaaagcgcctgtcaataacactcatgacccatgtcgccttcaaggcgctgaccatcaaccccttcggcgagctcttcagcgaccgcttcaccgacatcgatctgatcaccatcatcgaccgcaaggccatgttc

SEQ ID NO: 22451 - DNA, 807 bp, Zea mays
  Clone ID: MRT4577_120477C.1
cctcgaggccggccgggactaacaggaaaaaaggcccagaggcagtgccgtgaccgattcgagacgcaagagaaggatcgagacgaggcggcggttttccgggggcagcatcgtctcggccacgaagatgtcttactcaagaggctcaagtgaaaggtatggatctcgcttgccttactcgagaagcacaaggtaccgaagtcgctctaggagtgtcgactctagtgatgctgaaaaccctgggaacaacctgtatgtgactggtttgtcagctcgtgtaacggatcgagatctggagaagcacttctccactaagggtgaggtgattgatgcaagcgttgtatatgatccttggacaagggaatcacggggttttggttttgttaccatggctgctgttaaagatgcagatcgctgcatcaaatatctggaccgttctgtgttgcaaggtcgggtcataactgttgagaagcaacagggtagatgttggtagctgctctgcaacaaactgatacaacccaacaccaaaccatgccaacctcagccaaagggcaaagagaagacgaggtagaaccccaacacctgggaagtatcttggcacaaaatcatcccgtggacggaggtactccacaagctactcacctgatcggaggggccgtcatggtagagaccggtcatactctccatatgacagaaggcgatcatactctccctacagcagggatggatcatattccccttactatggccggcgatcatactcaccttactatagcagacggtatcgttcaaggtcccatactgcta

SEQ ID NO: 22452 - DNA, 1554 bp, Zea mays
  Clone ID: MRT4577_120478C.1
cccacgcgtccgcacaggcggactcgcggactcggggctcgtaccaacaggaaaaaaggcccagaggcaggcacgagggcccagaggcagtgccgtgaccgattcgagacgcaagagaaggatcgagacgaggcggcggttttccggggcagcatcgtctcggccacgaagatgtcttactcaaggggctcaagtgaaaggtatggatctcgctcaccttactcgagaagcacaaggtaccgaagtcgctctaggagtgtcgactctagtgatgctgaaaaccctgggaacaacctgtatgtgactggtttgtcggctcgtgtaacggatcgagatctggagaagcacttctccactgagggtgaggtgattgatgcaagcgttgtgtatgatccttggacaagggaatcacgggggtttggttttgttaccatggctgctgttaaagatgcagatcgctgcatcaaatatctggaccgttctgtgttgcaaggtcgggtcataactgttgagaagattttgttgacagcaacagggtagatgttggtagctgctctgcaacaaactgatacaacctaacaccaaaccatgccaacctcagccaaagggttgtatgccctacattgcatattatttttcttaaatatgtttattcagattgtagatgattgctctcttgcagtcttgcttttggtatcaaagacacttccttatttggtcccctattacacaggcaaagagaagacgaggtagaaccccaacacctgggaagtatcttggcacaaaatcatcccgtggacggaggtactccacaagctactcacctgatcggaggggccgttacagttcccgctactcacctgatcggagggactgtcatggtagagaccggtcatactctccatatgacagaaggcgatcatactctccttacggcagggatgaatcatattccccttactatggccggcgatcatactcaccttactacagcagacggtatcgttcaaggtccccatactgctacagaagacgcaggtcaccttctgtttcgccatactaccgccggcacaggtacagatctgtctccaagtcatccagttcatctccaagggccagaggacggagctattcgtgcagtttatcaccacagagaagctactcgcgcagccattccccagaatccgagagatcaacaagctattctcctaagaaagggagtaaaagggaaccctcgcgtagcagatactctggcaagagtcgtcattcaagggaaagccactctcatagccgcagttcgtactccaggtctgtgtccagggagcgctcagcttgatctgcgaggtgtgtcgtcctaggtggttataagatatgcgctgtatttgcatctatcagaacttgtgtacttcgtatattacgaacttgagaactgtatggatgtgtgcattgtgccaaattatgttcaaaaaaaaaaaaaaaaagcggccggcaaaaaaaaaaaaaaaaaaaaaaaaaaaaaaaaaaaaaaaaactcgagaggggggcccgtgtacc

SEQ ID NO: 22453 - DNA, 241 bp, Zea mays
  Clone ID: MRT4577_120479C.1
gtcccgagggcgcctgggtcctcccagctgacggcagtaaatccacagtgagttggggcgactgtgaaactggaatgctgttactttgataattactttccagcaggtgttttccttcacaatggttttgtttctttccttctgatctgagaagacatgaacgttttctcttcaccgccgtggggtgtattgactggtcccccatgggctgctggaaaggcccggagatgcatctgtggcc

SEQ ID NO: 22454 - DNA, 219 bp, Zea mays
  Clone ID: MRT4577_12047C.1
tcgtttctccgtccagacgccctcttacctgatcggtgagttcctcggcgactactgctgggacggcgccgggctgtccgcggacccggatgcattctcgcggaacagggctctgaggtgatccacgggcggtgggcgatgctgggtgcgctgggctgcattaccccggaggtgctggataagtgggtgctcgtggtcttcaaggagcccgtgtggttc

SEQ ID NO: 22455 - DNA, 821 bp, Zea mays
  Clone ID: MRT4577_120480C.1
attggtacctcgagccggcggcggtactaacaggaaaaaggcccagaggcagtgccgtgaccgattcgagacgcaagagaaggatcgagacgaggcggcggttttccgggggcagcatcgtctcggccacgaagatgtcttactcaagaggctcaagtgaaaggtatggatctcgcttgccttactcgagaagcacaaggtaccgaagtcgctctaggagtgtcgactctagtgatgctgaaaaccctgggaacaacctgtatgtgactggtttgtcagctcgtgtaacggatcgagatctggagaagcacttctccactaagggtgaggtgattgatgcaagcgttgtatatgatccttggacaagggaatcacggggttttggttttgttaccatggctgctgttaaagatgcagatcgctgcatcaaatatctggaccgttctgtgttgcaaggtcgggtcataactgttgagaaggcaaagagaagacgaggtagaaccccaacacctgggaagtatcttggcacaaaatcatcccgtggacggaggtactccacaagctactcacctgatcggaggggccgtcatggtagagaccggtcatactctccatatgacagaaggcgatcatactctccctacagcagggatggatcatattccccttactatggccggcgatcatactcaccttactatagcagacggtatcgttcaaggtccccatactgctacagaagacgtaggtcaccttctgtttcgccatactaccgccggcacaggtacagatctgtgtccaagtcatccagttcatctcca

SEQ ID NO: 22456 - DNA, 1375 bp, Zea mays
  Clone ID: MRT4577_120481C.1
aattcggcacgagggtgccgtgaccgattcgagacgcaagagaaggatcgagacgaggcggcggttttccgggggcagcatcggcgcggccacgaaagatgtcttactcaaggggctcaagtgaaaggtatggatctcgctcaccttactcgagaagcacaaggtaccgaagtcgctctaggagtgtcgactctagcgatgctgaaaaccctgggaacaacctgtatgtgactggtttgtcggctcgtgtaacggatcgagatctggagaagcacttctccactgagggtgaggtgattgatgcaagcgttgtatatgatccttggacaagggaatcacgggggtttggttttgttaccatggccgctgttaaagatgcagatcgctgcataaaatatctggaccgttctgtgttgcaagggcgggtcataactgttgagaaggcaaagagaagacgaggtagaaccccaacacctgggaagtatcttggcacaaaatcatcccgtggacggaggtactccacaagctactcacctgatcggaggggccgttacagttcccgctactcacctgatcggagggactgtcatggtagagaccggtcatactctccatatgacagaaggcgatcatactctccctacagcagggatggatcatactccccttactatggccggcgatcatactcaccttactacagcagacggtatcgttcaaggtccccatactgctacagaagacgtaggtcaccttctgtttcgccatactaccgccggcacaggtacagatctgtgtccaagtcatccagttcatctccaagggccagaggacggagctattcgtgcagtttatcaccacagagaagctactcgcgcagccattccccagaatccgagagatcaacaagctattctcctaagaaagggagtaaaagggaaccctcgcgtagcagatactctggcaagagtcgtcattcaagggaaagccactctcatagccgcagttcgtactccaggtctgtgtccagggagcgctcagcttgatctgcgaggtgtgtcgtcctaggtggttataagatatgcgctgtatttgcatctatcagaacttgtgtacttcgtatattacgaacttgagaactgtatggatgtgtgcattgtgccaaattatgttcattctgtgctatctttctgatgctatcttgctattgttggtttgaacttggtaatttagtttacaaaatcattcgacatgtggagtccctttttatggaacatttcgttcattattttgggatactagtggaaatgtatgtggcacgcgtgtgtatgtgaaaacatcatatgtataaaataaaaggcataatgttagtgtc

SEQ ID NO: 22457 - DNA, 606 bp, Zea mays
  Clone ID: MRT4577_120482C.1
cattgggtacctcgaggccggccgggattcgtgtcccggggcgggggcggggcatcatgagcgcagcgggtggagccggtgatcggtcggatcgggacgagggccaccgccgccacccgtttgcccgcttcgcgcatggccgcagatcgcgcactgcacaagcgtgcagtgatcctgatccgtcgtcgctgatgatctcaggccaggaaccttcgggcatgggatggagttgtacatgatatgaaaagcacggttcgggagaagaatgaaccagttccaaagctacttgtagaagagcttcggctcagcggtggagaatggaaccgacttaaagggaaaaaggttgtttagtcctcggtagattatccctaagtcaatagtaaatatcaggggcatgattgtaattttacacaggctgcgtcccgtgtctatgaatagatgaacagtaacaccgtactgttcacgctaactggtattcactcgcacgtcacacttggacttttgccttctaagtcgaaggtataaatgtaattcaatattatttgtgttaatttatgataacataatgaaggtatattgaggaaaaaaaaaaaaaaaaaagcggcc

SEQ ID NO: 22458 - DNA, 2605 bp, Zea mays
  Clone ID: MRT4577_120483C.1
aattcggcacgagggaaaaaaggcccagaggcggtgccgtgaccgattcgagacgcaagagaaggatcgagacgaggcggcggttttccgggggcagcatcggcgcggccacgaaaggtgccgcacccgattttctccgtgttctatatatcaggaccttgatatgatagtcgtgcggtgcgagtttgtgtgaggaaaatctatctattttcagtttttattctgttggttttgcggcacatgtctgatctgatggtttcaaatgccactggaactttgacttgcgatgtgtttgtttaggaacatctgaacgaaggtttacaacattagacccatgatctgctatcctataactgtgatgatgccttatccatgaggcagtaatataattagggttggagattggttgatctcatttcggtggttgtttgaggttgaagacgtactagatttctagattttcgagatgatggaagaaattgaactaagcctatccgcattcatactactctaaatccctactctaaaggatattatgtcctcgtcataaaattctggcttttcctccccctcttatggccgatcaccgtttttgtggaggggcgatggcggcggctgatgtggagtaccgttgcttcgtcggcgggcttgcctgggccaccagcaacgagtcgctggagaatgccttcgcctcctacgagatccactcctcatcaccgaccgggagacggggaggtctgcttcgtaccttctcctccgagaaccatgctcgacgctatcgagaacatgaggagctcgacgtaacactggatgctggctcgagaaaaaaggcccagaggcggtgccgcgaccgatgcggggggcaagaggaaaaaaggcccagaggcagtgccgtgaccgattcgagacgcaagagaaggatcgagacgaggcggcggttttccggggcagcatcgtctcggccacgaagatgtcttactcaaggggctcaagtgaaaggtatggatctcgctcaccttactcgagaagcacaaggtaccgaagtcgctctaggagtgtcgactctagtgatgctgaaaaccctgggaacaacctgtatgtgactggtttgtcggctcgtgtaacggatcgagatctggagaagcacttctccactgagggtgaggtgattgatgcaagcgttgtgtatgatccttggacaagggaatcacgggggtttggttttgttaccatggctgctgttaaagatgcagatcgctgcatcaaatatctggaccgttctgtgttgcaaggtcgggtcataactgttgagaaggtaaaatcataagattgggagcatctaactttcttatttaacttggctactaaatgatatttatatcattccttagtactctacactgaacattttagtgctctgtccattgaagattttgttgacagcaacagggtagatgttggtagctgctctgcaacaaactgatacaacctaacaccaaaccatgccaacctcagccaaagggttgtatgccctacattgcatattatttttcttaaatatgtttattcagattgtagatgattgctctcttgcagtcttgcttttggtatcaaagacacttccttatttggtcccctattacacaggcaaagagaagacgaggtagaaccccaacacctgggaagtatcttggcacaaaatcatcccgtggacggaggtactccacaagctactcacctgatcggaggggccgttacagttcccgctactcacctgatcggagggactgtcatggtagagaccggtcatactctccatatgacagaaggcgatcatactctccttacggcagggatgaatcatattccccttactatggccggcgatcatactcaccttactacagcagacggtatcgttcaaggtccccatactgctacagaagacgcaggtcaccttctgtttcgccatactaccgccggcacaggtacagatctgtctccaagtcatccagttcatctccaagggccagaggacggagctattcgtgcagtttatcaccacagagaagctactcgcgcagccattccccagaatccgagagatcaacaagctattctcctaagaaagggagtaaaagggaaccctcgcgtagcagatactctggcaagagtcgtcattcaagggaaagccactctcatagccgcagttcgtactccaggtctgtgtccagggagcgctcagcttgatctgcgaggtgtgtcgtcctaggtggttataagatatgcgctgtatttgcatctatcagaacttgtgtacttcgtatattacgaacttgagaactgtatggatgtgtgcattgtgccaaattatgttcattctgtgctatctttctgatgctatcttgctattgttggtttgaacttggtaatttagtttacaaaatcattcgacaaaaaaagtccctttttatggaaaatttccaccagttttcccgtttgaaggtgaaaaaaaaaaaaaataagaaaaaggggggaaaaaaaaaaaaaaaaaaaaaaaaaaaaaaaaaaaaaaaaaaaaaaaaaaaaaaaactcgaggaaggg

SEQ ID NO: 22459 - DNA, 509 bp, Zea mays
  Clone ID: MRT4577_120484C.1
ccggccgggaacaccgccgtcatctcccctgtccggatttacgagacttgcttcgctcctccgggcacccgagctctccgaaaggggcacccacaggttccctctcgaccacgcgccgactcgcgcgctgccgaccccgaccgatgagcaccccacgatctaccgcatgaacctctgggccactaaccacgatcaccccaagctcaacatgtggcacttcctgagatcgctgaacatagttgaacaagaccaatgaccagatgctcgacatcaacgagatcttcaagcgcaacccgaccaccatcgagaactacggcatctggttgctggcaccagagcatgacgggataccacagacatgcacaatgagatacactgtcgacgccagcctgaaacgtagtctgcggagtagatgtacgacgaaaatgcactcgcggcaccgcgtgatgaccccctggatgcacgagcatcctaaccgagacggtgcacttctatgctgagcacgaggg

SEQ ID NO: 22460 - DNA, 426 bp, Zea mays
  unsure (1)..(426): unsure at all n locations
  Clone ID: MRT4577_120485C.1
gccggccgggtcggattcctgaaccctgtgtcgctcactgaaccacggtcctagcgccgccgcgagagtcgtgacgacacatggcggccgcactcctgccggagacggcgccacggctgctgacgccggagacgctccgcacggcggcgaagcagtcccagggcatccacctcgtccccctctccctccgccgcgccatcaagcgctacctccgcgaccaggacagggcgcacatgaaccgcaaggtgctgctgctctcggcgtccttcgaccgcgccaagggcaccggagccgagctagccgcggccgccactcgcgccgcgctcctcgacgaccccaacgcgccgtcgggcgccgagcagcggtcggcgcgctggaaggtgcggncggcctacggcgatattggactccggtaccgtgaggacg

SEQ ID NO: 22461 - DNA, 152 bp, Zea mays
  Clone ID: MRT4577_120486C.1
ctcaaaccgtcgcagccgccaaaccgatggttggtggatggattatgatgatacgcaataggtacggcatgcgttctacacacgcaggacgtagggagccgagctttaagcacgaatgcggacatgctactcacaagacacttgcctatcta

SEQ ID NO: 22462 - DNA, 439 bp, Zea mays
  Clone ID: MRT4577_120487C.1
ggtcaaaagggttttttagaaggagaggataaccggtggtcttggtttaatccggggggtttttggagggggggccggaaggcaggggatttggtagaaccaccgccaacggaaaacaaccccaggcttttttcctaataacagggaacggaggcttacgtaggtttaatggggaaccactgaccaccgttggtttcggataatcctaatgctttccaccacgggtcctggccggccctgaagtcggcttccacccacggaacaaaaaggaccttgccgtcgtcaacgtcggggggaaccagggccagggacaaaggccccggtccacggaccaccttgccctggttgtggaattggaatccggggcatggccaaataaacttgttttgggggccgttccacggaacaacccagccgaggggagggccacggggttgat

SEQ ID NO: 22463 - DNA, 210 bp, Zea mays
  Clone ID: MRT4577_120488C.1
cgaggccggctggggccccctctcagcatgcggagctgaccactgcatatcgcgcggagagcacgggcgtcgccgccgccgcgcgtgcacccaacggtgctgtgccgggatatcgtctaggacgacgacaaggacgacgacgtccctcgatgcgtcgcctgcatatcacctatgctccaccgcgtcggtagcgtggcgagccaccgcctc

SEQ ID NO: 22464 - DNA, 362 bp, Zea mays
  unsure (1)..(362): unsure at all n locations
  Clone ID: MRT4577_120489C.1
ggcctgcgactgtaccgcaccgtccaataanaccctcacccaccctcgactcccactctcgccgccggagtgaggggctgagcacagaccgggcaatccccccccccccccccccccnnatttttttttnccgttgccnnntgctcccccnctncctccccnntgccnnnttttttttccnccnnctctttttccncntttcnnccnnggccggggggggtgccggtttctccgggtctgtccgccttttgggcgtncgggttgtgggcggnccggccctgtttttccgggtgccttgcgcccttggcgttgtcttcggggtggggggggctgggggngggtttggggtttccttgccggtc

SEQ ID NO: 22465 - DNA, 362 bp, Zea mays
  Clone ID: MRT4577_12048C.1
ggttgaggggaaaaaccaacacttttttttttcattaacctcacaggctaacatttaaaccaattttttaaacacaacaactctttttttacaccttccaacatttcattccaacaaatgcaaattcccacaatcacaagttccaagttccctttggacaaaaaccattttcattacccgatcctaattctcaccacccttaaaatttattcttaaaaagacaccttccccccattcaaacctatttttttttaaacaccccccccaaccccaattccttaaactcaaatgatttggccaccccgaaaaaatatttcctttggttaaaattaattcgaagcctaaaaaccctgttttttcta

SEQ ID NO: 22466 - DNA, 279 bp, Zea mays
  unsure (1)..(279): unsure at all n locations
  Clone ID: MRT4577_120490C.1
ggcgcgacaagtcgaggtcggcggatgccaaggaggagacgtggatgctcgtcctcggaggcgacgctgtcggcaaggagagggttgcgagggaactcgccaggtccgtgttagggtcacgcagcagcgttttgtccagcaggcctggcggtgtcgtctccgcctcgtcgccgccgccggcctcgtcaggctcctccgtggtgcacaggagtaggaagcgcccacggatgccggatgttgtgccggctgnctacctagagcggttgcacgaggctgtct

SEQ ID NO: 22467 - DNA, 439 bp, Zea mays
  Clone ID: MRT4577_120491C.1
ttgtgctcgacgcgcacatgacggcgctggccactggggtctgggccgcggagtacgccgcgatggcgggaacaatggagcgggagctgctgtccgtcgagctgcgcgccgcgcagcggtggtgcgcggtttttgcgcgcgctcggttcggccgagtggagaaggagcgccacaccattgttatccagcaccagttcgacacgggctacagggagaaccacctattacacgcggcgcgcgcgtacgtgggcacccggatcgacccgcgcgccatgcgccgactctgcctcgcgcgcttccgaaccaaggagcctgacagcagctgaaggcggaacacgttcctgtgcatggagtccgggggatacatcgacaacgtctccggtggcgttgagtttacgtggaactgagtccagaccgagggtgacgacaagaaggggaa

SEQ ID NO: 22468 - DNA, 424 bp, Zea mays
  Clone ID: MRT4577_120492C.1
aaacaagcaaagtgttgtgccctttgcattacggtattccattcaattttaagtaaaataaggggggtgtgtacccgcaaccggatttacttaaaaaaaccaaatttgtattgtttccaattccaaaaaaaaaatttgcaaacttttaataaccaaactggaaacaaaaaatggacccacttacttaaaatgaaaacaaaacaaggtttaaaaataggtcgtaattttcaaaaattttttttccaaaaaaagtccccataatattattaaaaaaaagcatgccctttttttccttttctcctcttaaattttaaccttaatgtaaaagtacatagcaacaccatctattgcaatggacctgccaattccaatttgggtgctaattttgttaccaaaaacaattattgaaaaaccgatgaccaaa

SEQ ID NO: 22469 - DNA, 286 bp, Zea mays
  Clone ID: MRT4577_120493C.1
gagcctactagtcggcggccgcccttcctgttttcgtttttgtatacgggaactgaaggctcaaggaagagcgccagagcgggaaggcagaatagcatccagcaagactcagccaatccatggcgaggaaccggaaaagacaaggtcctgaatatcggaccaaccataaggggaggcaaactccaggggcacgctgattgctaagactggggagacgacagataacgcaaaagcagagggtaggaaagcgatgttgatatctaggatccgtcacactaccttcaaa

SEQ ID NO: 22470 - DNA, 386 bp, Zea mays
  Clone ID: MRT4577_120494C.1
ggaaccccggcggaccaagccttccaaaagtaaacccaccaagttaaaaactttatgttgaatccctccgttttacctctgggagcgtccttttccagaagccagggggttttttttaaaaaggctggtgggtttttggacccagtaaaaaaggttgtccaaaattaaaaccgccattggcccagttgaaataaccttgccttgcagaaaagtggtgtgtttttccttagggtttgaccatttaaaatccgtggtcctttccttttttcccctttttctttttggaatatagggagaactccagccgcttgtaaaaaccgggctggagttaggccgttccctattgtggtgaagttggcttggctttccctgggttctgcttttgc

SEQ ID NO: 22471 - DNA, 398 bp, Zea mays
  Clone ID: MRT4577_120495C.1
gggcccctgtcggaagggaatgtccccaaattcccctgaagcacggggaagggggggaaaccccagctgggcgggttttaatatacaggaattttttcatggcccgaaaaaatccaaatcacattgccccccccggaaaacagggggggggccgttcccgaatcccaagtaacaagagcctttcacattaaccccagcaaaagctcaaacccaggggaaaaacttattcaaattgaatgggggggaaaaaaacccccccctttttgtatcggccccgtaccacccgaatttgccccaccaatgggagccccgggctctcctgactgaagcttcatgcctggcaaaaggggtgcccaccaaatattccccgaagcccgcaacaaaccccttggacgaaa

SEQ ID NO: 22472 - DNA, 593 bp, Zea mays
  Clone ID: MRT4577_120496C.1
cattgggtacctcgaggccggccgggagagattaccgatgtggtggaaaagaaaaaatatcgtgtgagatcagtagcatgcccctgcagtgttggtcacataatgtggaataagtccgctgtcgctgccattctgctcgtcgccgacgtgatcggctgccttgtctcggcgtaactcggcgaccattgtaccgacaaatactacaccgaatacactccgcggtggggctacggcatacctctacaaagtcacgctagatagtcgcgaggagcgatgcgctctggaacagggatctacgtgtgggatagcatgtatgcagcgacctgaggtggcggaaccaatcagagcacaaacccctgcaaactatgggtactagcctccggcaatatcgaagaacgctgaccacttcccggatgaccaggccaagctagagatctctgagcagatgcttcatcgactcatcggcaactgcggctgcgatcacataggcctggactacagtcaggggtaacagatatacatgcgtggtgtgggtaaaaagcacggactaggtacatgaatgcaacagcctcatttacgcttatatcattatc

SEQ ID NO: 22473 - DNA, 305 bp, Zea mays
  unsure (1)..(305): unsure at all n locations
  Clone ID: MRT4577_120497C.1
gccgccctttttttttcaaacncatcaaaacaaccgagggggggtttttctttcatggggtggattcattacaccaatcagcggccacaccgcagaaacaggccctataaagtcaacaaacattacccatggttctacacagacgatagccccaaacccgaccaccatataactcccgaccacaagaaaccatttccaaccgcgcttaagcacaaaaaaccaccaaaagcttcttactgaaaaaaaaggccactttaggcagaaggcttctcctacttgagtggctttaccacctcccaggtgaa

SEQ ID NO: 22474 - DNA, 549 bp, Zea mays
  Clone ID: MRT4577_120498C.1
cccaggcctcacgcgctcgaggactatggcctacagggcggcgggcgaccggcggctaggctcctatcatcaaccggagatgcaagatctacctaaaccactgacctagagctcgcgagcgctcatggctagccagcgctccaccttacccatacgggctacagtgctacaccgaccggaagccaaagcctgctgcatggcccacgggtggacgggggcactcacggggcggtggaggaaggacgagcaggtcgatctagagtgacctgacatgcagcgtgcacagagccagttgggggtggctgacatcttcacagcactgcatgacgcagcaacaattactgtgggagatcctgggaaatgctgagcttattctaccaaacgacaaaagcgacgacctcgggtaggtgcatgtcatgatcaaacatagaggacaccgtgacatgcccatacatcggtgtatatgcgaagacaggtactccaactgccttgccatggagatgcataaaagatgtgaggtataagaccgtattgtagacgaaggccagt

SEQ ID NO: 22475 - DNA, 367 bp, Zea mays
  Clone ID: MRT4577_120499C.1
aagcagggaacggttttggagttttatggcattatcatggatcccattacatatcacctgaaacagggattaagccgaggcgcccggggtttaactgatccacacctaaaccgctaaattaaaaccgagagggacaccgacacaaacgacttggaaactcaactaaaaccaccactaagatcgccattatcttattcatatcgaaggaaatgaaatgggacagaccctgtccgagtccaccatctccgcgggagggcacccggccagaccagagatctagagctggccacagtcagcgaccttgacctccttggagagggacaccgtgcgggagcccatcttctggatggccttgacgacctacatg

SEQ ID NO: 22476 - DNA, 690 bp, Zea mays
  Clone ID: MRT4577_12049C.1
ttgggtacctcgaggccggccgggttcggctgcgaagagcgacgtgtacgccggatcggcgttcgctgtgtctccgtcgccggaagcgcttcctctgccgtctttttcgacgaagaagcaggcctcggcggcggttgatgactccgccacgcgagatctgaggcgtctgctccggctcgaatgaaaacgagtcgggttgctgtcccggatttggatcgggtcggaccccgacaaatgatccatattacagtctctctttctcaccttattattatccagaatattctctttctcgtcttctctccgtaaccgttaactttaagcccgtcccggtttgaagttctgacccgattgtgatttttttaaacgaaagggtggatgatctgaactagggggtgaaatgtttaaaggtttggagtagcgtttgaagccgtgaggctttgatgatgtaacatgtaacttgtaacatatttctagggttgcttattaaaacattaaaataaattttagtttttgtagttcaaaggggtggggaaaaaaattgagtaagaaggggggataactagaggaggaactggaacgtagttttgtaaaatccagaaagtgtttgaattttgtgagggttgggctttcagtttcagccatgaacagtgtgaagtgatcaacaaaaaaaaaaaaaaaaaagcggcc

SEQ ID NO: 22477 - DNA, 795 bp, Zea mays
  Clone ID: MRT4577_1204C.1
accccccatccccatctcgctctcgcggccgagagatcgaatcggagaagaagaaggagcggagaggcctctgctgccctagctccgccgcccccgcaccagccatggcgctcgccgctcgcctcgtatcccgctcccgccagttatattctgtccaagctgctttggccaatggaggtctcactcaagtccgctcatttgccaaggaggcagctcctgtcagcggagacgacctattgaagggcatcttttttgaggtgaagaaaaagtttgagaccgcacttggggtccttaagaaggagaagatcacgattgacccagatgacccaacagcagttgctaactatgcccaagtcatgaggactgtaagagaaaaggcagatcttcttaacgattctcagagaattaaatatactattgagactttcacgaagggcatccctgatgcaaggacgtacttggatacccttcagcaactcaggaaaaagagtggacttatagatgatatgggtattgaggatatgatgatggaagctctcgagaaagttgagaaggacattaagaagcctcttctgaggagtgacaagaagaacatgaatctcctcttggcagagtttgacaagataaacaaaaagcttggcattcggaaggaggatcttcccaagattgaggagaatcttgaaatggaacttgccaaagctgagctgacggaacttcagaaggaagttgttgaagcaatggagggtcaactaaagagggaggagtttaaagatgaggtgatgcctgacgtcagga

SEQ ID NO: 22478 - DNA, 665 bp, Zea mays
  Clone ID: MRT4577_120500C.1
cgtgccgggggaagtcgtaaccctagcaggccgccacgagcacgaggtgcatccacgagaggacatcgaaggagacgccaattccagtcgcccccatccgttgctcatctcaccagaagcgaagccggaggagggaggaaggagatcgcgagcagccggagccggaggccgagaggatgaagacgttcgacccgtggccggtcttcttccgccgggagtggaagcgcaactggcccttcctcacggggttcgccatcaccggcttcatcatcaccaagatgacggccaacttcaccgaggaggacctcaagaactccaagttcgtccaggaacacaagaagtgctgaccaaccgggtggagtcgtccgaatcgcctgcggatgaaaaattagccctctatttttcttgtctttttttttatctagatgcgtgcactctattgtaataatgtaataagaggcaattggattgatccaacagcaaccggcttctgattttgatccgcttcgctgacatatgcatgcagcaaacgaatatgtgccttttttttttcttgatgttggattgcatctaatcctgttgaattggtgagctgggtcctctgtgatttcatctttccctgataaagtcctgaagatagattggtctacaataaaaaaaatagg

SEQ ID NO: 22479 - DNA, 177 bp, Zea mays
  unsure (1)..(177): unsure at all n locations
  Clone ID: MRT4577_120501C.1
atccacnagaagacgggccgacagnngngcnaggaattncggcacgaaggcacacattctnccctttggcggatccgaagggaaggannaggaggagacgcggcggcaggcactggagggcgccacaaaaacccggtnggatncgaaagagtcggaacccgccggccggaggagaac

SEQ ID NO: 22480 - DNA, 1003 bp, Zea mays
  Clone ID: MRT4577_120502C.1
ccccgcgtccatggaatgaaaacagaacagaattacgtctgttgccggcccacagaccataggattgtgggcttgtggctgccactcaccacggcccatttagtcgtaaccctagcaggccgccacgaccacgaggtgcatccatgagaggagatcgaaggaaactccaattccagtcgcccccatccgttgctcatctcaccagaagcgaagccggaggagggaggaaggagatcgcgagcagccggagccggaggccgagaggatgaagacgttcgacccgtggccggtcttcttccgccgggagtggaagcgcaactggcccttcctcacggggttcgccatcaccggcttcatcatcaccaagatgacggccaacttcaccgaggaggacctcaagaactccaagttcgtccaggaacacaagaagcgctgaccaaccggaaacatttttagtctattagctcagcgggagctctcacctcgaacaaaaaaccaagcaaaaaatctttggaccaaacctccaagacttgatgcttgtcctattgaatcgaaattttggggcacctatgctcagcatgatctcctttcttgggctgaagcagagttcttgcattggtggattcccaaagattgccctctcacgccttcttcgaaggcaactgttgcagctgcatttagtacagatgggagagtacttgcatctacacagtagtggtgaccatactgtcaaaataattgattggcaaactgggaaatgcttgaatgtactgcttggacatcaccgcactccatgggtggaagaggagctggaagcaaggatcagattgcttgaagtgtgaaaaaacgattactcgcatgcatggtagctattggcgtaacacccaaccggtggagagaatttagtttgctagatgaatcgttatacttttgcatgtaatagaactgaaatatcacttcaaaatttaggaaacatgtatgctattatttttatatgtccatc

SEQ ID NO: 22481 - DNA, 589 bp, Zea mays
  Clone ID: MRT4577_120503C.1
ggccgcttttttttttttttttttctttgtttttttttttctttttttttttttttttttttttttttttttttttttttttttttttttttgaccccaaatttggttcaaaaagatccccaaggggaaccgggaggggccagggggaaaccaaaggaaaagacgaggaaaacaggggccggaagggggggggaaaataaacgggggggaaccaaattgggaaacccgggaaaaaaaaaaaaagccccaaggcaaaaacacattggaaaaaaacccgaacccgaaccccccccccaaaggggggggccaggaggggggaggaaagccccaaagaaagggccccgagaaagacaaggggaacagccctggggggccggaccggggggccgttaggggggggaaaacctgaggggaaagcccaaaagccgagttcaaaaacaaggggttaaacaataaagtaaaacgggaaaagccaaaggggcaaacccgggggcccaagtttaggccccggggcgaggcaaagaaaaagagggcccaaaagaaaagacctagagtggaaaccaggaaagggctccccggaaaccggggc

SEQ ID NO: 22482 - DNA, 110 bp, Zea mays
  Clone ID: MRT4577_120504C.1
aaaaaaaattttgagccttatggactccgcagttcgggccgactccggtcgaccaccgtcgtctttgaagagatatcggctgtcggatggtgtgggaacattggtttggc

SEQ ID NO: 22483 - DNA, 353 bp, Zea mays
  unsure (1)..(353): unsure at all n locations
  Clone ID: MRT4577_120505C.1
cggggcgaggaggacgaggggggggcagcgagcaaggaaggacacgaaccgggggcggccncccgcccgacccggacaacggacgaggccgcagcgcgcagggcggcccaggaaagcggnccgccccacccacgaacaaccagggcgccaacaccgccaagacgggcagcgccagggggggggggaggngcnnacgcnggcggcggccgagaccacccccggcgccacggaggaagacanaccacaggcgcgccgcaagggcaccggcggggnagaagggggagcggggcccaacaagaaagggcnacgggccaccaaaggnacgcaagacgagcggcgccgnagaacccaac

SEQ ID NO: 22484 - DNA, 1603 bp, Zea mays
  unsure (1)..(1603): unsure at all n locations
  Clone ID: MRT4577_120506C.1
ttttttttttttttttttttcttaaagaaaataaagatatccaattctcgtggcctcttgtatgaatgaacaaccatcgacaactaataatgctcccatcattacgccagaccagagcccacgtgcattagacagacggccaactcacacccagcatcacaacgaaaattaattaccgcgcaaaagccaaacaaattttataggaaaatttaaacaagtccgtctatactcgtcgaatcgcgcaggcacgcgcaacgcaaaccacggccggacttgtctgctcccatcctcacctagtttcaaaatttcctctgttaaaccctacccacccgacgaatccctcgccagatccaaccagctcgccggaggaatacatcgggaggttagcgtggagagagagaagtaggcggctgagggagggttagagctgggcgacgccgtcgctgtcatggaagcgcaggcgacggcgacggcgacggtgaaggaggcgctcgcggcgctgtatcaccacccggacgacgccatccgcaccgccgccgatcgctggcttcaggagttccagcacacgctcgacgcctggcaggtagctgacagtttacttcatgatgaaagcagtaatttagaaactctcatcttttgttctcagaccctcagaagcaaggtacaaagggacttcgaagagttaccctcagaagcttttcgatcattacaagattctttatatgtattgctgaaaaagtttaataagggaccacaaaaagttagaacacagatttgtattgcaattgctgccctggctgtgcatgtacctgtagaggactggggagctggtggaattgtgaattggctaagcgatgaaatgaaagctcatccagaatttattccaggcttccttgaactgcttatagttttgccgcaggaaacttctagctataaaatcgcggctcgtcctgaaaggcgcagacaatttgagattgacctttgttcatctgctaatgttgctattgatttattaactgcttgcatggccattgatcaactgaaagaacaggttntggagggtttttctaattcggcacgaggctgtcatggaatctctgcctctgaactcgcatcacatcctttggtccatttggcactctcttcattgaactctgatcaattcttggaggcagctgtaaatgttacatctgaactgatacatgctactgtatctcatggctctggtgctattgctgagcgaatgccgctcattcaaattcttgtccctcatattatgggtctgaaagagcagctcaaagatccatctaaggatgaagaagatgtaaaagctattgctcgtttatatgcagacatgggtgaatcctatgttgacttgattgccacaggttcagatgattcaattcaaatagtgaacgcattgctagaagttacttcacttttggaatttgatatttcgtctatgacatttaatttctggcaccgtcttaagcgtaacctgatcaagagggactcttatgtatcatatggatcagaggtggcaatcgaagctgagaaaaacagaagattacaagtatttcgtccaaagtttgaactctggtct

SEQ ID NO: 22485 - DNA, 749 bp, Zea mays
  Clone ID: MRT4577_120507C.1
caccactcttggcgaacgaaatccaccgtacaccaccactcttggcgaagcgaaatccaccgtacaccgctgcctccctctccctgtctcgtctcgtcgaaccagccgaggaagccaacgcagacccagcgatcctcgtcgcgcgtcctccactcctcccccacggagggaaggatggcggagcccaaagcggcggcggcgaggaagacgcgggtgggcccgtacgaggtcggcaagaccatcggcgagggcagcttcgccaaggtcaagcacgcgcgcgactcccgcaccggcgccgtccgcgccatcaaggtgctcgaccgcaaccacgtcctccgccacaggatggtcgagcaggtctgtccgtccgtgatccgtccctcccgcctcccctcgcccgcccgctgtggaacatatgtaatgtaacctcggggaaaatttttaaatatactggagctgccatagaaagatcgcctccgcgattcataatttgttcgcagacagtcacgtgggatggtccccttgacgtctctgtcgtgtcgtggtcgacaggaacggctgtgatgggaaataatcggtctgtttggttgctgcacggtgatatcctggtccgtacgtgaggagccatgttctttgtatacaggctagatccacgcacatgtttgttagatccacgcacatgtttgtgtttggttgtttgtattagtacatttagatcaaatatagctcgtgtttggttgtctgtatca

SEQ ID NO: 22486 - DNA, 631 bp, Zea mays
  unsure (1)..(631): unsure at all n locations
  Clone ID: MRT4577_120508C.1
ccgnngccgggccgggaacaaaaaaaaaaaaaaaaaaaaaaaaaaaaattacaaaaaaaaaaaaaaaaaaaaaaaaaaaaaaaaaaaaaaaaaaaaaaaaaaaaaaaaaaaaaaaaaatttggggaaattatatccccggtaaaaaaccctttgggggggtttttgttccaagggcaaaaaaattggggaaagggcaaagggaatgtttgttgaaaggaaaatttttaatttggttgggctggccacccctttttgggtggaacaacgttttcccccggttgtttcctttttttatccaaaaactttgaaaaaattggaacaaaactttttggggggccaaaaaaaaaaaaaaaaaagggccccaaggccccccaagccccattttttttcccttttagggggggtaattggccccttggggaaaaccagggcaaaagtttttcccgggggaaaattgtttccccttcaaatttccccaaaaaataaaaccggaaaaaaaaaagggaaaacccggggggccctaagggggggcctacccccctttattggggtggcccccctggccccttttcaaggggaaaaacctgtcgggccatttgattaaataaatcgcccaccccccgggaaaag

SEQ ID NO: 22487 - DNA, 371 bp, Zea mays
  Clone ID: MRT4577_120509C.1
gagcttctagtcggcggccgcccttttcttttttttttttttggcgggcagagtcttcggtcgctcggcggaccacattcaccagcctctctcggagctcacaggtactgtgcctgcgagcacaacgtgctgtcccgccgatggtactgacaaacgctgacacaacagcccgctattagaacacttcagtctccggacatgattcaccgccccttcccttcgctgagatggcagatcaccatgctgtcaacggcaccgacccctgttacacacgaagcttgtggttcttccggggaaatgaatctggcctaggagggcccccagggaggaacgccaacagcctgggtgaactgcgggcccacggctacact

SEQ ID NO: 22488 - DNA, 309 bp, Zea mays
  Clone ID: MRT4577_12050C.1
acaagaccggcgtcatgcatgttttgattgaaatacttttggttgatgtctaggatactcacaccaaaaaatgggttcattaaatactcaaatatcatacaaggctacaagaccgagcccacaaaacaaatactagccggtaaccaaccgaaaatattggacacaacgggggtaaaaaaaggaaattcaccaggggggtgaaaccgcaacgttaaaacaagacatccaactgtaacaacaaaaactattaggggtaaaaggatcaccgggtctacaaataagaaacggggtttcaacggcctgaaccat

SEQ ID NO: 22489 - DNA, 304 bp, Zea mays
  Clone ID: MRT4577_120510C.1
ccttttgccacccgaacaccccaccgacaacgcggcgaatttgaacacactcggggctaactaaaacacgacccaaaccgaaaaatcgaatcaccccgatccgtgcccctcccgctacggcacaacccttggatacgccaatcacactcccatattaaataaaactaaaagcacgcgaacctcaaaaacgcgcacactccggagatacacacacgtgaaaaattaaccacgcgacctcagcactcgccatcatgacatcccaaaccaaacacacgacaatgcccaactaatcgctaaagttgag

SEQ ID NO: 22490 - DNA, 485 bp, Zea mays
  Clone ID: MRT4577_120511C.1
cccacgcgtccggatgcactagcagagctaccctgatagatatggggcaaactataggctcatctgttgcgacctacaccactatggaatgcaatgggaacagctgagcattcactgctacatacatatggtggattaagctccgctctcagtacaactttatcgggaacttactagaacggtaactgcaacgtttaggctagcttttagacgacaatttatgaggacagtcactaggacaggcactcacaactgtggacagtactgaaagggggactattatgcatgctactctgcttgctggtgcagacaatgacttacccaatatcactcccgttccttatccacgtcatgggaccagctgtggcaccagatacgtcacagtaaagcagaagggcctacatgtagtcacagctgttgcttctttacatgatgcaagaacaagaggaagaacatgaggctgagctacagcctgatgtcattcc

SEQ ID NO: 22491 - DNA, 736 bp, Zea mays
  unsure (1)..(736): unsure at all n locations
  Clone ID: MRT4577_120512C.1
ggccgcggggtttttttttttttttntgttttttttttttttttttttttgatgatgatcgaagaccggtggtcgattgcgaaaggcagctaattggcttgccatttaatatacatcccagctgtagaaagcatgttccaagcgaacgccttaattatcccctaaccgtgatatccctcatgtcaaagcaaaaagtcgtgatccctcccagatactcatgtgagatcgcttagttgcgctcacctcggaggcggcgggccagctggatatccttggactggatagtgacacgcttggcgtggatggcacagaggttggtatcctcaaagagggagacgaggtaggactcaacagactcctggagagcaccgatggcggaagactggaagcggagatcagacttgaagtcctgggcaatctcgcggaccaggcgctggaaggggagctttcggatgaggagctcggtcgacttctggtatcgtcgaatctcacggagagcaacggtaccaggcttgtagcggtgaggcttcttgacacctccggtggatggggcggacttgcgggcagccttggaagcgagctgcttgcgaggggccttgccaccagtggactttcgggcggtctgcttagtgcgagccattgttgatgattcttgtgaagatgtggatgaagttgttgatgatggttgttgttgtgggggtggaaggctgaagtgtgggtgtgtgatcccggccgg

SEQ ID NO: 22492 - DNA, 206 bp, Zea mays
  Clone ID: MRT4577_120513C.1
gtggtatcgacaggaggacatgcatcatgaagaggagggattttattgggatgatgcgttaacgaaacaacaaaagattacatggccaagaatgataaggctgttgcaccgactgaacaggctcatgatgcagaatcatatgatcccattggtaggtaagcaattattggaatgagaacatagcacaaagggtacatgatcatgga

SEQ ID NO: 22493 - DNA, 581 bp, Zea mays
  Clone ID: MRT4577_120514C.1
cgttgctgtcgggttccgccaccttaaaaggctctacttccaccttaagaggcagcagcttcacgaccttactttcggaagcacaactttcctcatgaggtgttgctgtcagttttgaatcccgtgtggacgtaggtagctggtgcggcatccacattcatgctctgaaattgtgttgtgtcaggtagacactggacctttgaaggttgtggttgtagctgtgcaccgatgttttggtcaatgtatttctcctgagacacacagtgagattgttagaagcacaataataaaggaaatcactattactgcaagctaaggatttttttaaaaaatgcacatacagcatcaaaataaccaatcttgggtgtgggcctccgaagcccagatggcttaaaaccttttctctggttggtcatttcagaagtagcttttaaattaacttcaggtgctgctgttccagatgaatgtccctctgtgacaacaggaggcctaagctttggagttggagggcagtcattgctcttcctgagggaggggggacagcccatttaaactctcagatgtatggctcatcctcccta

SEQ ID NO: 22494 - DNA, 485 bp, Zea mays
  Clone ID: MRT4577_120515C.1
cgacgtgaaaagagaccgtctgttccgaggttttgcttccatgtcgacgagaggcggcgaggccgcgaggcaggcgacggtgaagatcatcgagacggtgcacgtggaggcggaccggtacagcttcaagtccatcgtccagaggctcacggggagagacgcggtggtcggcggcggcggcgactactcggaaggggcgcccgaccgtggatcatatgaagaggcggcggcgcagcgggctgctgggtttacgagcaagcaagcgagcaggcccttcgctgatcgccacgcgtgtaaagacgagagctgttgatgtccatctgtaatttgttttcttttttttttggaactttgaatcagcgctccatatagatactagggtgtatttggttcaaccaaccaattgtagatttatgaaaacctatatattccactagttcaattgagaatcaaaaaaaaaaaaaaaaaaaaaaaaaaaagtccac

SEQ ID NO: 22495 - DNA, 2161 bp, Zea mays
  Clone ID: MRT4577_120516C.1
cggccgcgtggaaaagtatcgcatactggtcaagatgcagacactgcatgttcagcatatcttcatctcaatggattttgccttctgatgattgcacatgatgaagcaaatattattttgagagaatccaaggttcatgatgctatccgatgctttttcagggctgcatccgggtatgaagctccaaaggctttggagaacttttcattggaaacagggtttcaagtttctggggaatctagatctatttctttgtggagacttaactactatgagtgggcaatgcaaatttttgagcaacactccatgagcgagggggcgtaccaatttgctcttgctgcactagaactagttgatatcgtcgacgggatagataatggaattgaagctgagggtcttccagagaccgcagcaatgattaaaggacgactatgggctaatgtattcaagtacagcttggatttgaaacactttcacgatgcatattgtgcgatcgtctcaaacccagatgatgatagcaaatatatctgtttgaggcgtttcatcatagttctttgtgatcttggggagacaaaggttctttgtgacggagagattccattcactggcttggtagagaaagtggagcaagagctcttctggaaggctgagcgctcagatctgtcgtctagaccaaatctctataaggttctttattcatttgaagcacataggaacaaatggaggaaagcagctgcatacatgtacagccgatgataaaatttctccaagtaaaagaccccggaatcttttgatggagaactcggcttttggcacaaactcagaactttctagattgcaattttgtgttgacattgaaatccttgaaaaagaatacatattaacagaagcacagtatatgctcagcactttgaaatcaagttttgatttttcagaaagccaatctattgagtccctgatggatattcttataaatgagaaattgtatgatatagccttcacaattgtgctaaaattttggaaggagtcagaaataaaaaagcaattggaccgtgtattttcagtcattgcgcagcaatgctgctcgaacagatcagacaacaaatcaagtaaacaagtgccacttctgccttcttctgagaatgatgcatgggagatcaacaataggagtattgctgtgacccaacaattgcaggggagcaaccactgggaaacccttgaactatatttggataaatacaaagacctgcatcctaggttgccagtcattgttgctgagacgcttctttatactgatcctgagattgagctaccactttggttggttcagatgttcaaggctaataaggcagggaacaagatctcatggggcatgtctggaaaagaggcagatcctgctgctttattcagattgtacataaactacggacgccacgcagaagccaccaacctgctggtggagtatctagagtcgttcgcatcgtcgaggccagtggacgtcctccaccgcaagaagatgtccgccgtttggttcccctacaccgccgtcgagaggctctggtgccagcttggtgagatgcaacgggcagggcacagcgtggatcagtgcgaccggctcaagaagctgctgcacggagccctgatgagccacctgcagcaggtcgtggtcgactcggatgatgtgctgtcgtcagttggagatgggcaggggatggaggaccagagcagctgaagtcctgaagatcgtgttgttggcatgtgtagaaaacgatgtgccaccgctggatactgtatgtgattgtttgtgtggtcagctgaccaagagttacgcctgtgtcttttatatagaattattattagatgaaaacaaagacggagcgatggctccatttgtaacgtgagcatggaactgtcgctgatgacgagctgttcacttcccatgtgtagatgtagaaggtggattgacgcatccattacagcactgctgcactggtattgtatcggttctgccttcggggtgtgtaatggggttgttgcgatcgggttcagattagtgttgagcgtcgtggcattagggcatgtacaataccattcaatatatggtcttttaaggggtttctaaagagttaattaaaaaaatacaacagattacccctttacc

SEQ ID NO: 22496 - DNA, 556 bp, Zea mays
  Clone ID: MRT4577_120517C.1
tagtcggagaatccgatccgtgcgagtgagtgtgtgtgagtgtgctggtggaaatggccacacatttcgctcccatggcgagacaggtgatgaagagtagactcgtcgtgctctcgaggccaagggcctgtctgcgctgctgagctcacgaggcggccccggatcacacgttaaggccatccatatgcgagaacgcgacgttccatgtgaggcacaccatccacggacacccggtcatcgtcagtctgaatactccagacacctccatgccgctctgggagaggtacgtctccaatgtaccgttctatctaagagccgtgaggccagtgctgcggagtgttaagatcatatcttgctcacggatagcttctcgtgtagccgcgtgggactctatgcaaccgctccaaagaacgtctcaagcaagcacaggccggaaccgatctgctactgcggtctgattaccatactaagagtctgcctcaccatgtacaatatggcctccatttatgagtgtgaccaaaacatcgagccctcatctgctttcacctcgagaaat

SEQ ID NO: 22497 - DNA, 361 bp, Zea mays
  Clone ID: MRT4577_120518C.1
tcatcctcccactcgtccgaaaaaaaaaaaaaaaaaaatataaaaaaaaaaaaaaaaagggaatatgaaaaaacaaaataaatgatttatttaatttcaactcactcacaatttaaatggcttccatctcttctatagtttctctgattcttcctttttctacttcttcactttcatctaatgtcataacaaaaatcttcccacacagccttttattctctacatcacaactttattaacacattattcacacaaattcattttcattcgcaccatccttctttctcattcctttatttattacccctaaacccatttttgcatcctataaatactatacctattctttatttcttattct

SEQ ID NO: 22498 - DNA, 742 bp, Zea mays
  unsure (1)..(742): unsure at all n locations
  Clone ID: MRT4577_120519C.1
acccacaccgaccncgaccccgaacccgcnncacaccccggggcacaagccccccggccgggcaaggatcgatcccgggcaagcgccgaccgtcccagggcagccggctgctgctgcctcctgccgtccccgatcccgccgaaggccccggagcggagccggtggtgcgaggagcgccagtcctccttggacaggaacggcggcgggaggcgggggttgaggtgcgcattggagtagtagtagctctggtacgccgggtcggcgcggaggtcgtcgtccacgagcaggtcggcagcggccgcggcggcgcccagggcgccctcgacggtgggcggcgcggagccgctgcggaagacctcgaagtcgccgcggtcggtctccgcgccgaacgccgccgcctcgccgccgcgcgccgccatctcggtgaccatcggtgccagcgaaagaaaagaggcagaggaaacaaaatagaaaggctagatctttaagtccgacgcgctagaagcccgccattaccgcgctccagcgaaggcggcgggggcggggaccgggttcgtctggtcagagcgggcggatcggggggcgggcgtccatctgcgggcggtgcgagcggcgtccggattcgggacggattggaggagctccactccgcctccgagtggggggtggtctgtgtgagcagtggcgtgctggggagtgggggaagagtgggggagtctcgtgccgaattagaagaagaaat

SEQ ID NO: 22499 - DNA, 2391 bp, Zea mays
  Clone ID: MRT4577_12051C.1
atggccagagtacgctccactgctagggttgagcgtgatggggacgagaccgaagccgttgaaactgttccaatttctgaagcaatgaggcgttccgggctagttccatcagaagacactcctgctgccgaagcaacgcaagctgatgttgaagaagttggttccgaagatgagtacaactgcgggatgccaagcaaacctagtcatttggactttggaaagtccaccatctctgaagctgatcttccaaaaatggtgaaactgggctactttagtgaaacaaaaaggagctggttcgttttggcggggaggagattactccgaagccggaaaagaatgaagtggttgtgttcaaaaagcttctttaaagcaggattaagatttcctttgaatgggatgattgctgatgtgttgaagaagtttggggtttaccttcatcaactaacccctaacgctattgttagattaagtgtttatatttgggcccttcgtagccagggagtggaaccgttcggtgaaggtttctgccgagtccatgaactacactatcagactaaagccagaggagatggtcttcatgagaattttggatgttacaactttgcttatcgtaaaacctcgaagtttccagtgataagctaccgaagcaaatggccagccggatggaaatctgagtggttttatgttaaagttgataaagatgaagataaattggtccagagtccactagagctaaccttcggagaaatgaggccccgatgcaacatgataagtggaagcccgagccaaattgctttggctgaatttcgcgtgattttagatcatattggcactagagacttggtgcaggaatttctggcttttaaagtgtttccaacaatgagggattgggagatgccgaagctggagggagaaaagaaaaagggagaatttgttcgattgtcgaaaagaaaaggtacacctccaaaacctgcatctccaaaacccaagacgtcggcccaggaggaggaaactcctgcgacaccttctgctgtcgaagtggaagagattctgaagaagggcaaagaagcttcggcagcagaaagtcccgcaaagccgaagaaacgaagaatgatgcaagtggccgatgtcattcatcaaacaccgccaccgacctcggcgtcgaaaattattactgtcgaccccacagccatcgaagctgaaaccgccggagccgaaaccgaaggggctgaagccaccgaagccgaagccgggaccaacgaagatcctaacctggaaactacacttgaagatattgacaatatgcttctgagaatggctgaagaagagactgctgtggttacagtgaacacggcaacagaaaaaggaaaagagcagattgaagatattttggaaaaagaaaattttaactttcaagatatacttggacaagagttgtcagacgctgaaaaagaagagctgaaaaaatatgctatatcctgtggatacaaaccagggtccctgctatttggtggagtcaatgaagggaagctgagatgccttcggaaccgaaccgaggccaaagttgttaggaccttctccaaaagcgttggcctgccgaagattgaagcaaacctctgtagataccagcgacagcatattgctggtagtttgctctacgctaatttcaagagtatacttctaagtaaagtgctaagaatgcaacaagatcttgaggatgaaaagaacgaagctactatcaaagatctagaaagcaaagtcaaaaattatgaagctgctctgaaggaaaaagactctgttgttcaggatcttaaaatcaaagttaaagatcacgaagcggccttggaaaagaaggacttcgtcattcaatctatggaagaaaaatcagagcaggaaaagaagaacctcgaaacaagtctcaagaccgaaatcgagaaaaattcaaatttgcaaaaatcattgaaggagcttcaggagaaatgcttaaacttcggcagccgatgcgtgcagcggctgaaggatgtgtttcactcaatcggagccagctctgatatatttacaccttcagctgagaacctgcctagcaccctagaatatattgaaggcgaggttgatgctcttgacgaagttattgctgggcatgctgacttctgcgccctgctagcttctcgaggcacagccaccgcttttctgaaggctggttgtacgcacggaaaaattgtaaataggccaaacttcagcttgtcaccagcagacttggttgacatcccaagcctagcccgaagcattggaaatagatttatgactcagatttgggtaaatggcggacgaaaaatggctggtgacgaagctcggagccaccttaagccggatgatgaagctgaagaatga

SEQ ID NO: 22500 - DNA, 257 bp, Zea mays
  Clone ID: MRT4577_120520C.1
tttttctcttttttttttttaacaaaattgggggatggggtaattaatattgagcatttaacccccccccagcataaaattgaaatgctaaagaactatacatatacactccatcaaaacattaaagggggcaaattacaagtgaaactaaataaaaaacattctaaacttgaagaaaaaacttgtgctctgaaaaaggaaaactaaatcaaacagagatcatatatgaactcaattcatttttcccggacacgtgg

SEQ ID NO: 22501 - DNA, 391 bp, Zea mays
  Clone ID: MRT4577_120521C.1
ggcacacgtctgctgcctcgtgttcttgcttgcgatggaggatgcagttgggctaccgatggatggtgcctgcgctcggctagacaccagtggcgctaccacggccgtctacattaccgtccatcacatcgccgtgttcatagaggccatcgaccttttcgacggggacggtgacaggagcatctcagccagagacctcgaagctgacgtgcgatcactgggtcagaactccaccgaggatgatctccatgacatgaccatcgaaggctatactgacggctactgcactatcgatttcactgagttgatgcacctcatggtcagcctgatgaaggacacggacttgtacgaggagctcaacgacgactgcatggtgatcaccgacgaccac

SEQ ID NO: 22502 - DNA, 362 bp, Zea mays
  Clone ID: MRT4577_120522C.1
ggccgctccttttttttttttttttttttttttttttcttttttttttttttttttttgtttggttttttttttttttttttccataaccagccaggacccttccttttgtatttccaccccacacaccaacatgacaaactttccaaaccaatcggactaaatccgagcaacccggcaaaatcaaactcagctcgaaaccggcttagcgcggaggcaaaccaggcccaagggtttcaagcccccttaggcaacaaaggacaggacaggaacaggaaaggcgaggcacttggacattggggcaaagaggggaaaaccagtttgcgaccagggtttttacggccgttaatgcaatgctccacg

SEQ ID NO: 22503 - DNA, 276 bp, Zea mays
  unsure (1)..(276): unsure at all n locations
  Clone ID: MRT4577_120523C.1
tggtaatgaaatactcattgcagatgctattggtagtactggaatggatcttaagcatgtcgaggagtctctattgtttatgatggctccggtcagcttatgctaacgacctgcattagctatgtctcagactctcagatatgggcattcgaagatgcaagtacagtggtngttggaggaaagacaaattgcgccacacttgaattttgtgaagacatgaancggctacttgataaagtagcagagctcatgagngnngatgagaatgtattagat

SEQ ID NO: 22504 - DNA, 359 bp, Zea mays
  Clone ID: MRT4577_120524C.1
cagatgtggccgccttcaaattccgaggtgcatgggctccctttcccaatgaaccggggctggagtacccttttatttattagggctttgtactttggtgtctgggtctttcaagtgctactcatcttgttttaccgaggagagagggtgagaataatagcgcccggacaaggataaataagtttgggttgctttaaatttgttttaaagtagtattaatcaaaaatcattttttttttgtttcctgactatgtaccttggacttgtttatgtactgatgcataaggctatcttcgacagctaattatcataattattttttttatcattactttgttattatatttattttaattatt

SEQ ID NO: 22505 - DNA, 358 bp, Zea mays
  Clone ID: MRT4577_120525C.1
ttgtggttatgtaatgttactggatactgtatagctagttggtgcatcctcctcaacttgcttttcatttctgttagtttcgtcaccaagttcgttctcaattgctatttggttgtaacccagctgtaggatgcctggcttgcctgtaaccgcctgagcgtgatttggttgggaactgacggtttcacctggtgagacatgcctgcgaaccaaatctgcccccttggctgccgtatgtgtgataccaaaatctgttgttgtcttgtaggtttaaaaaaaaaaaaaaaaaaaaaaaaaaaaaaaaaaaaaaaaataaaaaaataaaaaaaatataaaaaaaaaataaaaatataaatat

SEQ ID NO: 22506 - DNA, 350 bp, Zea mays
  Clone ID: MRT4577_120526C.1
aaaccgggggggaaaaaaaaccacccttttgggaaaaacaggggttattttaggggaaaagggcaactaataatttggactgggctatggaagggaacgggaaaaaaaagaaaaacatggttttgggaggataaaaaaatccagggggggacacccttttggatccgaaagaaaaggaagggggatagaatagccggggagcttaattggcggggacaaaattgggggggtaggcccatgcgttgttgttgactgggtaaaaaatggggtaaaggagggttttgagggggcccttgccggggacaatgggctggaaaaaaaaacccaaaatggaaaacatgggggggggg

SEQ ID NO: 22507 - DNA, 263 bp, Zea mays
  Clone ID: MRT4577_120527C.1
gaaaaagaaaagccaaaggcaaagtcaaaggaatcccaatcaggcaagcaaaagcaagaggcagctgctgctgccggatatgtcgtcgcagctgatcgaggagcacctgtcgggcgctgatttgcacgtcgggcaggagctgttctagcgctagtcgcgcgagtgcatggtggagctggtcgcgtccgacgggctcctcccgctgaccagcctggactaggtgggctacaagctgtcgacgggtgtcgtgtgtctgcggcagg

SEQ ID NO: 22508 - DNA, 417 bp, Zea mays
  Clone ID: MRT4577_120528C.1
attttgcttaaagactgctaggttcaggcagttttgggatgacgcagcaaacaaccgccacatattggaagcagttccaggtaaatatacttcttgagccattgagtctgagatatgcagtctgttacatattgtaatgtgaacttgtctcatcaatatgagacttaatgcccagagtaattcttatgaatgttaaaagttttaatgttttcactggatttctagtagaaattgaaatgatgttccagttgtcagacttaggtgcaagtgtttttttgtcattggtgttggctgaagtgttacattgcttattcatgcccaataggcatgaaagtgggtatccgaattgttaggacaaatttaatattttaaaatagatatgtatgaaattcggtgctaatcttttcttatgatatc

SEQ ID NO: 22509 - DNA, 432 bp, Zea mays
  Clone ID: MRT4577_120529C.1
aaaccaggaccccccacaatttgccccctgggggttttttttaccgggggttggggaaaaacaaaaaaccggggtggggggcggttctccccggggggggctacgaccccaacccaacacaaaccggccacaggaaacagaggacctttgtttcgaccaaccaacttgtttaaaaaatctaggggggtttttttggcacccagaaccttgttttgggggggcgggaaaaagggctcccccccaagagggaaagggggggtgaaaccccaaactttcccccggggggctttaaccctcgggaaacccccctcgggatggggcccggggatttccgcgccgaccccccgggggggggggccctcggggctaacggggggcttccgggttttttcccgcggggcctcttcggggccctttcccccggcgcgcggg

SEQ ID NO: 22510 - DNA, 208 bp, Zea mays
  Clone ID: MRT4577_12052C.1
ccacaggccacagcccacctccttctccaggtctctccccggcggcggcgggtgcggttctccggccatcaccgtgcgcaccaggaaaaactatgaggagggacagtctttccttatcggagcgggcgcaggaggggatatggtgccataggaataagaccccctcctcccaggaggcgacccgcaggacgcaaggaggcccggggga

SEQ ID NO: 22511 - DNA, 473 bp, Zea mays
  unsure (1)..(473): unsure at all n locations
  Clone ID: MRT4577_120530C.1
ggaagcaacaacgtaaacagccataattattctcaataacccggtagcaatgcagggggaattaacgactcttacaacatcaggggttgtaaaccacacaatactttataacgggcacacataacacgatagcaggagcaactcacgggagatcacgggataagggcagcacactggcctgatgctgcgtcatcagcaaacttttttagtactcgtcacccttgtggccatcctcgcccttatggaactcagggccgacctcctcgtagtcctttttgagcgccgncaggtccttacgggcctgagagaagtnaccttngtggatacccttaccgacgtaccagtgcacgaagggacgtttggggtacatggaggtggaagttgtggggctatgtcgggagaacaccttttacgacatttggtgggaggtgggggattattgtagagggggtcggtttggaactttggtacgg

SEQ ID NO: 22512 - DNA, 283 bp, Zea mays
  Clone ID: MRT4577_120531C.1
gttccgccatggttgccatccatccgtcaatcctttatcagtccttttactgcaagaggaagtcctttcccatccaggatgttccttgaacggggagggcttctcccggggccatcgcccccaagggaaccatggagcctttgtttttaatcggccagaatctgctcaccaggccatttgctagggggaccacttccccagggctgtcctagcccggcaaggtgtagggcccaaaaccacagtccttagctaactttgccaagcagttttttgccaggcccag

SEQ ID NO: 22513 - DNA, 554 bp, Zea mays
  Clone ID: MRT4577_120532C.1
cagttgagttataatgttacatagatcaggcataaagaacatcaccaatcaccagcttcctcgaggggcttgtggcacttgttgaacagcagctagagggttcatctggacagagaacgcagctgaagtgcatcaaaaaatgctcgtcgcagggaagcagcttgctggaacacagccctcttcaagccagcagttttccttcgcagcacgtacatggctgagaacagcagagagaacagaaacactaacttaccactgggtagaacaatatgtattttcccaaacttcaggcgaattgaatgaaaccaccagaaaaacggatcaaaatgatttgcaacatgctgagcttgctgagcagacttcagcaggacctttttgagcccatcgcacgcaggaactatctttggaggatcctcatgtggcgatggtgttgagtcatttgtagaagtagaaaggttcctctctgctgttggttttaccccttcaacagtggacagttttttatttgcagctaattgcactgcatgaagcttttttagtaggtcctgtagaaa

SEQ ID NO: 22514 - DNA, 436 bp, Zea mays
  Clone ID: MRT4577_120533C.1
cggacgcgtgggcgcgagtcctgccgctgccatgcctccgcccgcgccccccgagcccgcgtcccggccctggtctttgtcgccagccgccgccgtcgtcttcatcgacgtccacgcagctcccgacgcggacgctgtcccaggggcatccaaaggtcctaatctactgcctgccgaatcgggacattggcgctaattattgctgctagttcttgacgacgaatgcttctctcacacatcttcgaacgcggtgtatattagatactgtttatttttcgagaagcaactgtacttttgaaaatatattattttgtgctttattacggctatatttatattctcgaatatttagaatttgggcaatgaatagcatgtgatttgtaatataattcttatagaggagaaatatgattttcataatatgctgattgatatt

SEQ ID NO: 22515 - DNA, 888 bp, Zea mays
  Clone ID: MRT4577_120534C.1
agtttccgcacgacctcgcaccggcctccgcctctatataaggcgcagccgggatcttggtacaacgccgtgcatacattccgcctcttccctccctccttcggttcctcggcctcccgatcgagcagtagaagcagcgcaagggcaccgctagcactaaaggaatggcggccgagacgttcctcttcacgtccgagtctgtgaacgagggccatcccgacaagctctgtgaccaggtctccgacgccgtcttggatgcctgcttggcgcaggatgccgacagcaaggttgcctgcgagactgtcaccaagaccaacatggtcatggtcttgggcgagatcaccactaaggccaccgtcgactacgagaagatcgtgcgcgacacctgccgcaacatcggcttcatctctgatgatgttggtctcgacgccgaccgttgcaaggtgctcgtcaacatcgagcagcagtcccctgacattgcccagggtgttcacggacacttcaccaagcgtcccgaagaggtcggcgccggtgaccagggcatcatgttcggctatgccaccgacgagacccctgagctgatgcccctcagccacgtgcttgccaccaagctcggagctcgcctcaccgaggtccgcaagaatggcacctgcgcctgggttaggcctgacggaaagacccaggtcactgtcgagtacctaaacgaggatggtgccatggtacctgttcgtgtgcacaccgtcctcatctccacccagcacgacgagaccgtcaccaacgacgagattgccgcggacctcaaggagcatgtcatcaagccggtgatccccgcgaagtacctcgatgagaacccatcttcaccctgaacccgtctggccgcttctcatc

SEQ ID NO: 22516 - DNA, 565 bp, Zea mays
  Clone ID: MRT4577_120535C.1
gcgtcgagtggggaagaccggaagattttgaatgtgattaactctccggcggctgcgacgtagaaaacctagctcacgccctcacgcctgggcctgacacacgcgtctgatttgggcccaatttaaaaaaggccgaaatttttggtcgataggtaaaatagatggggcccagcgataaactagaaaatcgggtttatcgggtcgtgtgtcggcggtaaaattttccctactctagcccagaccactgtttggtgctgtgcttaaactgaagttcaccattgctggcccccactctgctcgaaattaaaagcctgaaagcttgcttggatcttgtcgtgagttcctgacactacctgccaatagactaccaaccaccaccatcatgcatgctcaactcaaatgctcatgctccgaccagttacaagtaggccattaataataagaaaccaaacaaaagcggcccccaaccaatccatgccgctgctccgtggcacttttcatcccttgcattcacatcccttccgccccttgtacctacctacctactgtacctaaccaaccaaca

SEQ ID NO: 22517 - DNA, 273 bp, Zea mays
  Clone ID: MRT4577_120536C.1
gattgccacagctgtcatcacgttatttaatgaacctagtgctgaagacagtacaaagggtccattgacagttgcacagaaaaaagcccagaacatcatggagtcctttgaaaatccatttaggatgtttctgccctcactgggacaccgtgtcacgtctctcaggcagcgaagttcgatccatcaaccaaaatctatgaaatcagcaaccgttggaagctggcccaggtacaagtacaaaaagactctaagaagctgtcaagaagaaggcag

SEQ ID NO: 22518 - DNA, 785 bp, Zea mays
  Clone ID: MRT4577_120537C.1
accgtgcatacattcgacctcttcctttcggttcttcggcctcctgaagaatagcatcagcacaactgcacaagagcatcgctagcacggaagaaatggcggctgagacgttcctcttcacgtccgagtccgtgaacgagggccatcccgacaagctgtgcgaccaggtctctgacgccgtcttggacgcctgcctggcccaggatcccgacagcaaggttgcctgcgagacctgcaccaagaccaacatggtcatggtctttggcgagatcaccaccaaggccaccgtcgactacgagaagatcgtccgcgacacctgccgcaacatcggcttcatctctgacgacgtcggtctcgatgctgaccattgcaaggtgcttgtcaacatcgagcagcaatcccctgacattgcccagggtgttcacggacacttcaccaagcgccccgaagagatcggtgccggtgaccagggcatcatgttcggctacgccaccgatgagactcctgagctgatgcccctcacccacatgctcgccaccaagcttggagctcgccttaccgaggtccgcaagaatggcacctgcgcctggctcaggcctgacggaaagacccaggtcaccattgagtacctaaacgaggatggtgccatggtacctgttcgtgtgcacaccgtcctcatctccaccagcacgacgagaccgtcaccaacgacgagattgctgcggacctcaaggagcatgtcatccagccggtgatcccccaaagtacctcgatgagaacacatc

SEQ ID NO: 22519 - DNA, 343 bp, Zea mays
  Clone ID: MRT4577_120538C.1
ttttttttttttttttttttttggtttgtttttttttttggttgttttttttttttttttttttcaacaaggcaaccaaacaacattttttttcaaaataaaaaaaaaccaccccctttggaaattaaaaggaccaaacttttcatggaaaacaataccactcggttcctttcctgctgaaaaaaaattcaggtgttccaacggaagtctaaaatatatcctggttttcaactaaaataataacttcccctcctggaataaatagctccctctatcccttcttaatatttgcaatcaatcttcctcccttgaggttaaaaaaccccccccaccaggaggcaac

SEQ ID NO: 22520 - DNA, 466 bp, Zea mays
  Clone ID: MRT4577_120539C.1
tggcttggaacctttgggctgatttatgtgcttgtttatgtgcttgtttatgtgcttggagatcgacgctctatacgaataaatcgacgatggtcgtggtgggtagattattcccagtcgtcattgtccggcactaaaggacatcgatgtcgcgaatgggactgatgataggtgtgatagagatacaccaggcggataacgagcctgagattgagcacggtactgattaaagaggagacgcatgagttgctaacgccgaagtacgagccgtggaataagaaagtcgcctccccgcgaatgcatatgtatggtcaggcattatctaaagtttctgtgccgtgtacttatagtcgcagcatagtaactctatcacgtctgccatatggacgtgcgactattagtagtcccacatgcgagccgaacatctctcactcgtatatgacctgagtgtgccacacacaccatc

SEQ ID NO: 22521 - DNA, 615 bp, Zea mays
  Clone ID: MRT4577_12053C.1
atcactctccttccgttaagaaaaggattcacatcgtgaaaggaaacccgacaactcaagcgctggtacgacaacgtcgtgctcgatctagggacatgaccgtatgatcctccatcaccgtgaagatgaaggatagatggcgctgcgaaaccgccaccggaaaataacgttgtaatcgcctgcgttgcactcgctgctaggactacaacattgtctgctgcgcggataatgacaagtgcatcattatgaaagacacacgtgcacgacgtttgacgatgcctgatcgtgatgcgctatccctggatgtcctaagataactacccagcatgctctatcaataacaaagcatgaaaaactgtgtactataggaacctaatctataaacctgccactgccgaatgagtgcacctttcccacaacccccttgatgaactgacctcgccgtggacccgtgcggggtgttacgctcaaactgcatataaagtacagataccgccccatacacttgtatctgaataaatctctgatctatgcctaaaaatacctagtctactgtgcgaccatgatattcctgcacgatacttgacatgatagaactcccgagcataaagcgcc

SEQ ID NO: 22522 - DNA, 397 bp, Zea mays
  Clone ID: MRT4577_120540C.1
gagccggccgggacaatatttcccatacgcggtggaatcacagtgcattctcccttcgagaccttcttgccaagcgcaaggagtctcaacaccctggccattctattcgtgagggcggcctagatgactatggctatgccacataacgtttgggtgaaggactagaaaatccactccatgcactgtgatatgtggacgacatactactaccctactctctgatctcaaagacatgtcaatgaagtttcgtgtgtcatcaggagaggattttgataaccatctataagaacaacacaaggagattcccgatcatcgtgagccgaatttggataaagaagttcacctatacctcaccactgctgctgcatatgagggagaattcatagaaccaatgaac

SEQ ID NO: 22523 - DNA, 459 bp, Zea mays
  Clone ID: MRT4577_120541C.1
atttccgcaatttccgctgtccgcaatccactccctcctcccacgaaactcttggccatggcttggcgcggcgccgcctcccgctcaatcttcgccgccgtccgtgcccgcgccgcatcctcctcctcctcctcagcggccacgcgcctccgctcggcggctccaattgccgccaccccgcgccgcaccgtccccgcctttgctttcgcggccgcgaggccgttggcggcgatggcggggtaccccgcggcggtcgcggtgaggctcaccgggcactcggcgacgagcgtgcgggcgtgctgtgagctctcccagggtaccctcttctgccgcacttgtcaggatcgttagcaagttagtgatcatgcatcatgatatgtcatcatcgtatgtactgtatatccgtgggcacctatggttgctcattttgtccaagatttgtaatccttatatttgttc

SEQ ID NO: 22524 - DNA, 244 bp, Zea mays
  unsure (1)..(244): unsure at all n locations
  Clone ID: MRT4577_120542C.1
ctcaatattcatagcaaacactattttttcggtgtggtggttttaccttgaggtggacattaaaccaccatctaaggggatgccattgatatagacgggattatgtggaaatccaggtttcacanaaagggtcattagctaggcccaataactgtcttcatccactagtttgtactttaatacccctttagtgtgaattccaatgcccacaattttcatagaaacgtcattttgaggtttaaaa

SEQ ID NO: 22525 - DNA, 661 bp, Zea mays
  Clone ID: MRT4577_120543C.1
gagcgatgtgttaaggattctgcagaagagttatgcagtaaaacgtcaagtaatcatcgtgccaatggttctgagttatctaagctacttctagctgctgaaagttctttagattcttcttgtttggaggtgcaaggtaccgctctggaaattcttgtggaaatcttttgtattctcaaggaagttgggtcagataacatatcagttctcaagggttcgtcatttgcacatgctgagtggcaaggaataacgaacaatgtaccattaactgaagataatagtatgaacggacctctgtgtaagatcattgcaatgattgtgaatcatattatatccctggccaatgaagttgctagcagagatatctgcatatcatctgcagtggataaggcatacaaaactcctttcagacttatgctaaagcttgtttcatgctacccttctgctgctgctgtaactcttcatatactgaaaagccttgtaaaagaactgtttctaattaatggaagtgattactctgaagtttctgttacatctgttgaaccattccagacaagtgttgcccttaaagaattgagtacttcagatgacaatgttcaactgttagctacatgcatcaaagcttcctgcattggaacacttattggcaatggaaaactgc

SEQ ID NO: 22526 - DNA, 415 bp, Zea mays
  Clone ID: MRT4577_120544C.1
cccaggggccaaaataccttggaaggaatttaggacaaaaaaatattttttttaccgggggcaaggattaaaacccaaaaatggcttaatccggaaattcgaacccccccttttattggaaaagaaacccaggccaattttttacaaaagccccaaaaaggcaaaacccccggaaggatccaaaaccccccgaccttttcaaaaggtttttggagaaccttggtggggttggaattggtggttgtggttgaaacctaaaacctgggggaaggccccttttttgccctgaacaaggggcgggggccccccctgttttataatttggccgccctgaacaaccaaaataacttggggttttttaaccgggaaaagccggggccccaccttaacgggggcccggggaaccctgggttca

SEQ ID NO: 22527 - DNA, 437 bp, Zea mays
  Clone ID: MRT4577_120545C.1
gtttagtagcctgctctttgagaaaactacgtggaaaagatgatggaatcaatgcaggagtcgcaggctgttgcactggccttgctctgagctttccaggtaaagtttcagaaaatgtgcaatcaatcaatagccttgaactgttttattttacaattgctgaacagtctgttccttaatgctctggtgaggactaagattacataaataatagccatattatttatttggccctgaggcaattactctttttttatatatttgctctttgcaattctgacaatgttggaaattgaaaacacgatgtttgtgtttatacttgatgatatcttgctcataagttgtggttcttgtactggacctctgcttgcaacccttgatctggttgacctttagagcataacatttaaacccttatattgctagggactagagga

SEQ ID NO: 22528 - DNA, 1199 bp, Zea mays
  Clone ID: MRT4577_120546C.1
ttgggaccctcgaggccgggccgggattccgtcgtcgtcatcagcagcttctgcttgctctggggggaaggagagagagagagagcgagagagagatctagtagagaggctagtaggtggtcctcgaacgaagatgttggcggtgttcagcgggcaggtggtggaggtgccggcggagctggtggcggcgggcagccggacgccgtcgcccaagacgaaggcgtcgcagctggtggggcgcttcctggccgcgtccgagccggccgtgtccgtgcagctcggcgaccacggccacctcgcctactcccacaccaaccaggcgctcctccgccccaggtcgttcgcggccaaggacgaggtgttctgcctgttcgagggggtgctggacaacctgggtcgtctgagccagcagcacgggctgtcaagcaagggcgccaacgaggtgctcctcgtcatcgaggcctacaagacgctgcgcgaccgcgcgccctacccggccagcttcatgctcgcccagctcaccggctcctacgccttcgtcctcttcgacaagtccaccaactccctgctagtcgcatctgaccccgagggcagggtgccgctcttctgggggatcaccgccgacggctgcgtcgccttctccgacgacatcgacatgctcaaaggctcatgcggcaagtcgctcgcgccgttcccgcaaggctgcttctactccaacgccctcggagggctcaagtgctacgagaaccccaagcacaaggtcaccgctgtccccgccgacgaagaagagatctgcggtgccactttcaaggtggtggaagggtctactgtcctgacggcgctgcactgatcgatcatcagctggcggaggcgatgcgacgatgatgcagaactttgtacatgcgtggtgggtgtgtaacatagtgtggctggcaacaagccatgctcatgcaaaccgatgaatctatctctgtatcatgcatcgatctcggttgcttgctagtcccgactccagactccagacatggctatatatagctggtgctaataaataggagtataatcgtcatatcgatcgattgcgtgtggaatgccaatcaagtgtgtaatctgttccaaataacaaacctctgttcctccaaaaaaaaaaaaaaaaaaaaaaaaaaaaaaaaaaaaaaaaaaaaaaaaaaaaagcggcc

SEQ ID NO: 22529 - DNA, 550 bp, Zea mays
  Clone ID: MRT4577_120547C.1
tcggccgggacggcacgatcctcaactgctcccggcaggagcacgtactcccggaaactgacgacgttggcgaggctgcgcctagtcctacagcgtcgagcggcggctccaaagaccccaccacggccatcttcgtcgcgtcgctgtacgctgactactacaggcggctgacgtcgaggtactccgcggcgaagggcggcggcgcgacgaggagggtgggcgtgttccagcggacgcacgaggagcggcaggcgacggagagcctggcgcacaaccagagggcgctggcggagatctacctgctcagcttctgcgaggagctggtgacgtccgggctgtccacgttcgggtacgtgagcagcggcctcgcgggcattcggccggcgatcctgctcaccgcgttcgaccacgtggtccccgagacgccgtgccggcgggctgcgtccatcgagccgtgcaacctcacgccgccccggggcgtggagtgccggagcaggcccgcggacaaggatgacctggcacgccacgttagggtgtgcgaggatttcaa

SEQ ID NO: 22530 - DNA, 524 bp, Zea mays
  Clone ID: MRT4577_120548C.1
actctcgcctgctcgcctccgccgccggagcgagctccccatcttcatccgtcaaccatggcgacccagatcagacagggtgttctcggtatcaaggtgaagatcatgcttgactgggacccgaagggcaaggttggcccgatcactcctcttccggacctggtgaccatccacaccccgaaggacgaggacgagccgcgccctccggtcttggcacctcctgaggtgtaaggtcccaactgtgtccttgaaatggcagtttgatcgggtcctagataggtttctatcttacgataaggacaatgctaagacagttggttaccttaatctttatggacagatgctatgtgttgcttctgtggcacttttgtttaagctaagttttgcggagacaagatacttatatatgttccggatgaaattatggttcaaaaaaaaaaaaaaaaaaaaaaaaaaaaaaaaaaaaaaaaaaaaaaaaaaaaaaaaaaaaaaaaaaaaccaaaaaaaaaaaaaaaaaaggggcc

SEQ ID NO: 22531 - DNA, 1674 bp, Zea mays
  Clone ID: MRT4577_120549C.1
ttgggtacctcgaggccggccgggcattccgtcgtcgtcgtcagcagcttctgcttgctttgtgggggaaggagagagagagagagcgagagagagatctagtagagaggctagtaggtggtcctcgaacgaagatgttggcggtgttcagcgggcaggtggtggaggtgccggcggagctggtggcggcgggcagccggacgccgtcgcccaagacgaaggcgtcgcagctcgtggggcgcttcctggccgcctccgagccggccgtgtccgtgcagctcggcgaccacggccacctcgcttactcccacaccaaccaggcgctcctccgccccaggtcgttcgcggccaaggacgaggtgttctgcctgttcgaaggggtgctggacaacctgggtcggctgagccagcagcacgggctgtcaagcaagggcgccaacgaggtgctcctcgtcatcgaggcctacaagacgctgcgcgaccgcgcgccctacccggccagcttcatgctcgcccagctcaccggctcctacgccttcgtcctcttcgacaagtccaccaactccctgctcgtcgcatccgaccccgagggcagggtgccgctcttctgggggatcaccgccgacggctgcgtcgccttctccgacgacatcgacatgctcaaaggctcatgcggcaagtcgctcgcgccgttcccgcaaggctgcttctactccaacgccctcggagggctcaagtgctacgagaaccccaagcacaaggtcaccgctgtccccgccgacgaagaagagatctgcggtgccactttcaaggtggtggaagggtctactgtcctgacggcgctgcactgatcgatcatcagctggcggaggcgatgccatgatgatgatgcagaactttgtacatgcgttggtggatggtggtgtaacatagtggctgccaacaagtcatgctcatgcaaaccgatgaatctatctctgtatcatcgatctcggttgcttgctagtccagactccagacatggctatatatatatagctggtgctaataaataggagtataatcgtcatatcgatcggttgcgtgtggaatgccaatcatgtgtgtaatctgttggcaaataacaaacctctgttcctccctaaaaaaaaaaaaaaaaaaaaaaaaaaaaaaaaaaaaaaaaaaaaaaaaaaaaaaaaaaaaaaaaaaaaaaaaaaaaaaaaaaaaaaaaaaaaaaaaaaaaagggaaggaaatttaaaaaaaaaaaaaaaaaacgaaagggaatgaaggagaaggaaaaatttttattttgggggaacggtaatttaatttgcctgggccggactttttaaacctggggggaaaggggaaaattctggggggttccccaatttaatcgccctgtcccacattgccccttttttccaatgggggaaaaaaacgagaaagggcccccgggtattccccttttaaaaggttggcaagcccggtgggggagggggctccccccggccgggcccctttaaccgccccgggggtggggccctcctcccctgggggaccttttcctttcggcctggccctttaaggcccctttttttcgggttttttttctttggttgggcggccccggttgggcggtttttcccggggcttttttgaaagggggggcc

SEQ ID NO: 22532 - DNA, 620 bp, Zea mays
  unsure (1)..(620): unsure at all n locations
  Clone ID: MRT4577_12054C.1
gcaagcanagcancaccggagcaagcggagaggcagcgaccgccaggagaggcggcgcgaggggggagaaccaacgcggcccgancagaggggggaggaaggaaacgcgccgggccccaaagagacccacagcgaccggacaagagggaagcacaaccggcgcaacaagggggagccgcgcaggaacccacncggacgggggggggagaaaaagggnccaaagggngaagagaagaagcnggggagggcnaacaggaccggcacccacggggaggaaaaccangccgcggcgggagnnggaaancagagggcaancccgacaccccgggcggaaaggcgcgaagacacgaccgaagaagaagcggccaagcnggaagagaagggcgggggggncnngccgnaccgagacagancancnancaacaaannccaganggccaagancacaagggaaggancaaccancnacccaccanannccnggaagaccgacgggggcnncacncacnacgaaaacccagcccagggcgcngngggancanggnagannaaagcncngcangccgcgngncaggccaggaacnnaggggagagcaancngngcngcngaaancaaaacc

SEQ ID NO: 22533 - DNA, 397 bp, Zea mays
  Clone ID: MRT4577_120550C.1
accctttcaatctagtacgtccagtatttccaattcatctcgtccccgtttccgaaggcttgcatacatgccgaagcagtagccgcgaaagaacgcaacagaccggcctgacagtttggcaaatgcggcatcccgctggttttaacgctattgctagataacgtaacacacacatgcatacagacacagtggcccagtgcggacagcctaactctgctgcacacgattggccttcaaatctaatgccaaagcagcaaagaactatatatctgtcgtcaccggttcatgttcatcgcactctggtaggcgtggtgctcttcagatcagcactcggatcgtcaccttacctttcgaccgagatctcttcgccgggagcttgtttacggctccccgggcg

SEQ ID NO: 22534 - DNA, 465 bp, Zea mays
  Clone ID: MRT4577_120551C.1
ccggccggggtcgcgccgccgctcccctcccacccactagctcaaaccctagagctctcgcctgctcgcctccgccgccggagcgagctccccatcttcatccgtcaaccatggcgacccagatcagcaagaagaagaagttcgtcagcgacggtgttttctacgccgagctcaatgagatgctgacgcgggagctggcggaggacggctactctggcgtggaggtgccatcgcgcaggccgagtccctccgttacaagctcctcggtggccttgccgtccgcagggcttgctacggtgttcttcgttatgttatggagagtggtgccaagggttgtgaggtgattgtgagtggaaagctcagggcccaaagagccaagtccatgaagttcaaggatggctacatgatctcatctgatctgccagagaactagtacattgactccacctgcgaaacactcccttc

SEQ ID NO: 22535 - DNA, 1431 bp, Zea mays
  unsure (1)..(1431): unsure at all n locations
  Clone ID: MRT4577_120552C.1
gggtacctcgaggccggccgggattccgtcgtcgtcatcagcagcttctgcttgctctgggggggaaggagagagagagagcgagagagagatctagtagagaggctagctaggtggtcctcgaacgaagatgttggcggtgttcagcgggcaggtggtggaggtgccggcggagctggtggcggcgggcagccggacgccgtcgcccaagacgaaggcgtcgcagctggtggggcgcttcctggccgcgtccgagccggccgtgtccgtgcagctcggcgaccacggccacctcgcctactcccacaccaaccaggcgctcctccgccccaggtcgttcgcggccaaggacgaggtgttctgcctgttcgagggggtgctggacaacctgggtcgtctgagccagcagcacgggctgtcaagcaagggcgccaacgaggtgctcctcgtcatcgaggcctacaagacgctgcgcgaccgcgcgccctacccggccagcttcatgctcgcccagctcaccggctcctacgccttcgtcctcttcgacaagtccaccaactccctgctagtcgcatctgaccccgagggcagggtgccgctcttctgggggatcaccgccgacggctgcgtcgccttctccgacgacatcgacatgctcaaaggctcatgcggcaagtcgctcgcgccgttcccgcaaggctgcttctactccaacgccctcggagggctcaagtgctacgagaaccccaagcacaaggtcaccgctgtccccgccgacgaagaagagatctgcggtgccactttcaaggtggtggaagggtctactgtcctgacggcgctgcactgatctatcatcatcaggcggaggcgatgcgatgatgatgcagaactttgtacatgcgttggtggatggtggtgtaacatagtggctgccaacaagtcatgctcatgcaaaccgatgaatctatctctgtatcatcgatctcggttgcttgctagtccagactccagacatggctatatatatatagctggtgctaataaataggagtataatcgtcatatcgatcggttgcgtgtggaatgccaatcatgtgtgtaatctgttggcaaataacaaacctctgttcccccccaaaaaaaaaaaaaatccacacacacacaacacagcagagagattactacgatccaacagttctagagcaagagagaggaagacacaccgcagagttagcaggctaataacttgcaggagcagcaggaatggcggcgacgcgtcgcctctcttgctttctcctcgccgtgcttnctggcaggagtggccgctgccaccgccttcgacgaagcggctgctgccggcttcggctttggccacggcgcgcgtttcgcgcgcaagcatggacgtgctgccgctgagatgcccagccggag

SEQ ID NO: 22536 - DNA, 433 bp, Zea mays
  Clone ID: MRT4577_120553C.1
agcccagggcccaaaaagccaagtccatgaaattcaaggagggctacatgatctcatctggtcagccagtgaatgagtacattgattcggctgtgagacacgtccttctcagacagggtgttcttggtatcaaggtgaagatcatgctcgactgggacccgaagggcaaggttggtccaatcacccctcttccggacctggtgaccatccataccccgaaggacgaggatgagctgcgccctccggtcttggcacctgaggtctaaggtcccaaaagtgtccttgatatggcagtttgatcgggtcctagctaggtttctatcttatgataagggcaatgctaagacagttggttaccttaagctttgtggacagatgctatgtattggttctgtgttacttttgtttaagctaagttttgccgagccaagct

SEQ ID NO: 22537 - DNA, 1557 bp, Zea mays
  Clone ID: MRT4577_120554C.1
cctcgaggccggccgggtcgtcgttacttgtgtagccatctgtatatttgatttgatttgatctcatggatgtcattcaggttgaggtgcaaaaaaaaaaaaaaaaaaaaaaaaaaaaaaaaaaaaaaaaaaaaaaaaaaaaaaattccgtcgtcgtcatcagcagcttctgcttgctttgtgggggaaggagagagagagagagagagatctagtagagaggctagtaggtggtcctcgaacgaagatgttggcggtgttcagcgggcaggtggtggaggtgccggcggagctggtggcggcgggcagccggacgccgtcgcccaagacgaaggcgtcgcagctggtggggcgcttcctggccgcgtccgagccggccgtgtccgtgcagctcggcgaccacggccacctcgcctactcccacaccaaccaggcgctcctccgccccaggtcgttcgcggccaaggacgaggtgttctgcctgttcgagggggtgctggacaacctgggtcgtctgagccagcagcacgggctgtcaagcaagggcgccaacgaggtgctcctcgtcatcgaggcctacaagacgctgcgcgaccgcgcgccctacccggccagcttcatgctcgcccagctcaccggctcctacgccttcgtcctcttcgacaagtccaccaactccctgctcgtcgcatccgaccccgagggcagggtgccgctcttctgggggatcaccgccgacggctgcgtcgccttctccgacgacatcgacatgctcaaaggctcatgcggcaagtcgctcgcgccgttcccgcaaggctgcttctactccaacgccctcggagggctcaagtgctacgagaaccccaagcacaaggtcaccgctgtccccgccgacgaagaagagatctgcggtgccactttcaaggtggtggaagggtctactgtcctgacggcgctgcactgatcgatcatcagctgctggcggaggcgatgcgatgatgatgcagaactttgtacatgcgttggtggatggtggtgtaacatagtggctgccaacaagtcatgctcatgcaaaccgatgaatctatctctgtatcatcgatctcggttgcttgctagtccagactccagacataactatatatatatagctggtgctaataaataggagtataatcgtcatatcgatcggttgcgtgtggaatgccaatcaagtgtgtaatctgttccaaaataacaaacctctgttcctccagctgctgctgctgctgctgctcttgtccgtgcgatcatgattcagaactggcgtgggcgccaataactcagaagatcgagagacttgctagtagtacgcattgtccctcttttgtcgtccatgcttgtaatccaactctattatgaaaaccaaaacgagaatccaaccaaacgctggttattttttccaactctaaactagcaaaactgagaatattataggcatcaactcttgttcggtcctgcatccagccgggtcgtagaaaatgtaagggctcctttgaattaaaaggattgttttct

SEQ ID NO: 22538 - DNA, 1172 bp, Zea mays
  Clone ID: MRT4577_120555C.1
ctcgcctctcccaaccctgaagcgcatatccaaaccctacccggcgccccagctataaattcctccgctccccttcgccgcttcctgtcgcgccgccgctcctctcacaacccagtcgctcaaaaccctagagctctcgcctgctcgcctccgccgccggagcgagctccccatcttcatccgtcaaccatggcgacccagatcagcaagaagaagaagttcgtcagcgacggtgttttctacgccgagctcaatgagatgctgacgcgggagctggcggaggatggctactctggcgtggaggtgcgcgtcacgccgatgcgcacggagatcatcatccgcgccacgcgcacgcagaacgtgctcggcgagaagggccgcaggatcagggagcttacctccgtcgtccagaagaggttcaacttccctgagaatggcgtcgagctttacgccgagaaggtcgtcaaccgtgggctctgtgccatcgcgcaggccgagtccctccgttacaagctcctcggaggccttgccgtccgcagggcttgctatggtgttcttcgttatgttatggagagtggtgccaagggttgtgaggtgattgtgagtggaaagctcagggcccaaagagccaagtccatgaagttcaaggatggctacatgatctcatctggtcagccagtgaacgagtacattgactcggctgtgagacacgttcttctcagacagggtgttctcggtatcaaggtgaagatcatgcttgactgggacccgaagggcaaggttggcccgatcactcctcttccggacctggtgaccatccacaccccgaaggacgaggacgagccgcgccctccggtcttggcacctcctgaggtgtaaggtcccaactgtgtccttgaaatggcagtttgatcgggtcctagataggtttctatcttacgataaggacaatgctaagacagttggttaccttaatctttatggacagatgctatgtgttgcttctgtggcacttttgtttaagctaagttttgcggagacaagatacttatatatgttccggatgaaattatggttccttgtatgctctggaaattttattttcggtaaaaaaaaaaaaaaaaaaaaaaaaaaaaaaaaactcgggactagttctctctctctcctcgtgc

SEQ ID NO: 22539 - DNA, 2346 bp, Zea mays
  Clone ID: MRT4577_120556C.1
atttgtgccgccgcctcccccgaagccatccgcatccccacgctcgctcgctcgcccgacgcgatggctcccaccaagaaggcgaagaagagcggggagaacatcaacaacaagctgcagctggtgatgaagagcggcaagtacacgctcggctacaagaccgtcctcaagacgctccgcagctccaaggggaagctgataatcctcgcaaacaactgccctccccttaggaagtcagagattgagtactacgctatgttggcgaaaattagcgtgcaccatttccatggaaacaatgttgatcttggaactgcctgcggcaagtactaccgggtgtgctgcctcagcatccttgaccctggtgactcggacatcatcagcaccaccaccaccacccagtgaagagaagagaagagagctctccacctattttatttagtcgagttgtagggtcctgttgtgctctcgaaaccactcttgttatcttcggtttgtgtacctttttgcgacgctgagttggagctgtcatacagataatacttcatatggttgttctgctggacattcatgtggttttgtttgatgagatgattgtacttgttctcttgttgatgttgatcggatcaggtcaatcgatgggctgcttggttacgctgtttgtctttaaaaaaaaaaaaaaaaaaaaaaaaaaaaaaaaaaaaaaaaattccgtcgtcgtcgtcagcagcttctgcttgctctggggggaaggagagagagagagcgagagagagatctagtagagaggctagctaggtggtcctcgaacgaagatgttggcggtgttcagcgggcaggtggtggaggtgccggcggagctggtggcggcgggcagccggacgccgtcgcccaagacgaaggcgtcgcagctggtggggcgcttcctggccgcctccgagccggccgtgtccgtgcagctcggcgaccacggccacctcgcctactcccacaccaaccaggcgctcctccgccccaggtcgttcgcggcgaaggacgaggtgttctgcctgttcgagggggtgctggacaacctgggtcgtctgagccagcagcacgggctgtcaagcaagggcgccaacgaggtgctcctcgtcatcgaggcctacaagacgctgcgcgaccgcgcgccctacccggccagcttcatgctcgcccagctcaccggctcctacgccttcgtcctcttcgacaagtccaccaactccctgctcgtcgcatccgaccccgagggcagggtgccgctcttctgggggatcaccgccgacggctgcgtcgccttctccgacgacatcgacatgccaggcctcgctcggcctcctcaggttgggcttcatcgtggacctgctgtcgcacgcgacgatcgtggggttcatggccggcgcggcgacggtggtgtgcctgcagcagctgaagggcatgctgggcctcgtccacttcaccacctccaccgacgtcgtctccgtcatggaatccgtcttcagccagacacaccagtggcggtgggagagcgtcctgctcggctgcggcttcctcttcttcctcctcgtcacccgcttcatcagcaagaggcgtcccaagctgttctggatctccgcggcggcgccgttgacgtccgtcgtgcttgggagcgttctggtgtacctcacgcacgctgaaaaccacggcatcgaagtgatcggttacctgaagaaaggcctgaatccaccgtcggtgacaagcctgcaattctcaccgccctacatgatgctcgcgctcaagactgggatcatcaccggcgtcattgccctcgccgtaaggctcctttaatcaccacaccctgcttccttcctttctcccagtcactcgatcgccgtaagactgggggattaaacgtgtcactcactgtgtgcaatgcgtgcgtgcgtgcgtgcgtgcaggaaggcatcgccgtggggaggagcttcgccatgttcaagaactaccacatcgacggcaacaaggagatgatcgcgatcgggacgatgaacgtcctgggctcgctcacgtcgtgctacctgaccacggggcccttctcgcgctccgccgtgaactacaacgccgggtgcaggacggccatgtcgaacgtggtcatgtcgctggcggtgatggtcacgctgctgttcctgacgccgctgttccactacacgccgctggtggtgctgtcggcgatcatcgtctccgcgatgctgggcctggtcgacttcggggccgcgctgcacctgtggcgcgtcgacaaggtcgacttctgcgtctgcgcggcgcgtacttgggcgtcgtcttcgcagcgtc

SEQ ID NO: 22540 - DNA, 269 bp, Zea mays
  Clone ID: MRT4577_120557C.1
ttaaccaatttcaacttaataaactatctcattaaaatacacagcttaataaaactctctagtatctccaacatacattattattctgccataacaatcatcactctttaaatattatcatatattaatagaccatacaatttaccttaatatactataaatatcctaattttaacccaatcttattccacatttcaaatcacttatgtgaaatatctttttattaccatacatcaacaccacatttttttatattttactaaaatatt

SEQ ID NO: 22541 - DNA, 144 bp, Zea mays
  Clone ID: MRT4577_120558C.1
cggttccggcaggttcccgccctcgatcccacgcctgccgcctagcacgcgatggctctgttgtgagctggtcagggacattatggcccctgccgtggaatcctgcatgggctatctggcactctagaggcgcagaaacgtacg

SEQ ID NO: 22542 - DNA, 406 bp, Zea mays
  Clone ID: MRT4577_120559C.1
cccacgcgtccgcagtctaccttttaatcctgctacggcttttagggctgcttatgaatccttgtctattgatgccattggcacaaagtcagtgagtatgcagaaagtgtggcatctaattcaggcattggttggggaagggttgactcatcgaaatgtttcaagaaaaatgtcactagtggtaggtgcaaggcaccatcttgagtggggtcatgaaaagtacatacttgagaccatcaacagccatccagctcttgctgcccttggtggatctgttggcaatcttcagaagatccgagcatttcttcgggtaaggctgcgggatcaaggtgtgctagactttgacgcaaccgatctacgcagacagcctccagtggatacaacctggcagcagatttacttctgc

SEQ ID NO: 22543 - DNA, 686 bp, Zea mays
  unsure (1)..(686): unsure at all n locations
  Clone ID: MRT4577_12055C.1
tttacatatgcctttccttgcattatctgttacactcagacactcactatatttaagatgggttggataatggtactaagatctaccagtaagttttgacctttctagccccctgagttttgctgtttctgctgggctagaaacatgctgctcttatcttgtgcaagtgtgttgtctgaagtctgaactttaaagtacataacagtgacttctaaacatacacagatggaggaacacctttggtaattgatttttttttattcgttgaaaaaatatattggaaatctaagggattagtggcacgtcagaattgaatataaatgttttgtaatcggtttgagcaaagtaacatatttaccttactgtcctactggttttgaaaaaagtaatgtctatactttgctgtcctgcgagtaaagctttgtacccatctttgtattttagatgcataagcaccagattactctatcttggttttgttgatcacttgctatggtagtcgtttgtttaccatgttacctntaccatcgttgttttattttaagattttaaatccttcagctattgacatccatatccatgccccttcaggttctcggaaatgcaaagggtgcggtggcagttgtcgtctcgattatgatattcaggaatcccgtgtccataacaggaatgctcgggtatactct

SEQ ID NO: 22544 - DNA, 711 bp, Zea mays
  unsure (1)..(711): unsure at all n locations
  Clone ID: MRT4577_120560C.1
gagcgaacggcgagggcgaatgtgggactgctggcgcgcgggtgggcgcggcanatgcggatcctgtcgcacccgtccaccggcgcgttcctgagccactgcgggtggaactccgtcctcgagagcctgtcccgcggcgtgccgctgatcgggtggccgttgggcgccgagcagttcttcaacgcaaagctcgcggtcgagtggggcgtctgcgtggagctggcgcgcgggaacctggagagctccgcggtggagagcagggcggtggtcgaggccgagcggacggtgatgggggacacggcgaagggtgatgagatgaggagggtggtggcggcgatcgcacgcaccatggaggccgcgtgggaagcgcctggcgggtcggcggcggaaagcctggaagggttcctgcgatgcgttgaaccctgagatgccccgcttttagatggttgcccgaggaatctgcaactaagtacgcgcgcgggaaatctgtgttaagaattcctcaactacaaaggacgacggattgatgggattacggctcctgttgcattgtaacagaaacggatttgtttggttcattaacgtgtagcctgcaggattggatagcgcttctgggtagagataacgagcagacagtggtgcaaacgtttacgggcataaaaaacggtgaaccaaacaacaccttaaaatttgtcatgaaaacttcagatt

SEQ ID NO: 22545 - DNA, 268 bp, Zea mays
  unsure (1)..(268): unsure at all n locations
  Clone ID: MRT4577_120561C.1
ctcttacacacgnnatatcgcgccacatgcgttnaaggtttatttttaaaacacaattagggtctatttacacagcatttattctgagtggtcatttccattccctcatagcatcatgcgataacacatagttcgccattggatctttgcttacagaacctatattgctatcatgcaattacataacactaataacctgcacaatcatgcttcaaatttcacctgagattgtatggccgtgcacagattgtcttgctatgaatgtgca

SEQ ID NO: 22546 - DNA, 198 bp, Zea mays
  Clone ID: MRT4577_120562C.1
tttctctttcgacgccagcacctctaaaagggccaaggtgtactaccaatgcatgcgacgatataaacctcctaatgtctcaactaaatttaatacactctccgacgcttaacaactttccgactatgaaaaccacttctatacccaacttaattaccttgcaacacataccacttgtgtcatctgtctttataaaca

SEQ ID NO: 22547 - DNA, 420 bp, Zea mays
  Clone ID: MRT4577_120563C.1
aaaaaaaaattttttttttttttttttttttttttttttttttttttttttttttttttttttttttgggttccaccaaaagacccgccccgggaaatacggacccggaccagaagggggaccaactttttttgggggggggggggttaaaacttggggaaatcatggccatagctgaaaaaaaggaaaaatgggtctccggtcaaaatgccacacaacaaaaaagccggaagcaaaaaagggaaaggccggggggcctaaaggggggggtaacccaaaaaaaagggggcgggcccaatggcccctttccagggcggaaacctgggggggccggggcattaatgaaccgcccaacccgcggggagaggggcctcgcggaatgggccccaaggggcgttcttttctcccggggggacgggc

SEQ ID NO: 22548 - DNA, 215 bp, Zea mays
  unsure (1)..(215): unsure at all n locations
  Clone ID: MRT4577_120564C.1
attcccaactcgacgcactcatccaatttanaccaactatcaacatataaaattcattactacaccaacactcacaaccaacataggctttctcaaatatggtcggtcttactactctaactactactacattgaccattttaacccactacttacattcatctataactcccacttttcacatctacctctacacaatcacacacttacctatt

SEQ ID NO: 22549 - DNA, 500 bp, Zea mays
  Clone ID: MRT4577_120565C.1
ggaaaaccgggcggccacgcgtccgactagttctagggcgtgtgtgtggcgtttctcctccgtcgtctgtcgaggcgtggtggggtgtatcttgcggggcgcggggccgctcgtccgttaggtgcagcgtcgttggcgaggccggtccgtgcgccgtctgcggtcgtttgtaggacccttaccggacgcttcgtctgctccggttggccaccctatgtttggtcaatatgttctttcgtctacttttgcttatttaccatttcgtcgttctcaattagtggtataggtttatgttttttcttcttttctattctttgtcttattttctatagtattgtatgttttacttttaattttttattttatttatttttatatattattataacttttttttttttattttcaaatattcttatttttattttatttttttttttttactcttctatatttttatttcttctatagcattcgcttttcatattcttttatttttt

SEQ ID NO: 22550 - DNA, 493 bp, Zea mays
  Clone ID: MRT4577_120566C.1
gcctcataaataattttgtttcccttcaaaggggggtattgtaataaaccaaactgcctaaagggcccgcccccccacacgaacaaaccagacgggggggggggggggcgggggcccacaccccacacacacaaacaaggacgaggggggaaaggggcccaaccaggccccccaaagcaaacacccccaccccgcgcgaccaaataaaaaaccccacacccccaccaccctttccaagggaggggaccccccaaaaaaaaaaaaggaccaggggggcgagacaacgaaccgccccccgggaaaggggcccggggaaaaaaaacaaacaaaaggccggcggcgccccccgcccaggaaaaagaaaaacccgcccccgcccccgggggcccccaaaaaaaaaggccccctgacgccccaccagggaggggaggctccccgccaagcccccgaaaaggccgcccccccccctgggggccctggggaggaacccccc

SEQ ID NO: 22551 - DNA, 2485 bp, Zea mays
  Clone ID: MRT4577_120567C.1
gacgcaggttgacaaactaaaagcatcattgggaacaacaaacatatgggagttctgggttcaattggttgatattatgcagcacagagaaaaatcaggagaagagcgcttgcaacgatcgactgatgaaatgcattcacaaattgaactttatgaacactcaatagtggagtttcatggtactctcagcaaactaataaatgaaagtgagaaaaagtcaatggagcattatgcagaaggcatgccatcagagttctggagtaggatctctcttctgattgatgggtggtcgcttgagaagaaaatatccattaatgatgcaagtatgttgagagaaatggcttggaaaagggataatcgcctccgggaagcttacttgtcatccagaggaatggaagagagggaactgatagatagttttctaaagatggcactaccaggaacaagttctggtttgcacattgtccacatagcagcagagatggctcctgtcgcaaaggttggtggtctggcagatgtgatctctggtcttgggaaggcacttcaaaaaaaggggcaccttgtagagattattcttcccaaatatgattgcatgcagcataaccaaataaataatcttaaggttctagatgttgtggtgaagtcttactttgaaggaaatatgtttgccaacaagatatggactggaactgttgaaggtcttccggtctactttattgaaccgcaacatccaggtaagttcttctggagggcacaatactacggagagcacgatgacttcaaacgtttttcgtactttagccgtgttgcactggaattgctttaccaatctgggaagaaagttgacataattcactgccatgactggcagactgcatttgttgcacctctttactgggatgtatatgcaaacctgggcttcaactcagctagaatttgttttacctgtcacaattttgaatatcaaggaatcgctccagctcaggacttagcatattgtggtcttgatgttgatcacctggatagaccagacagaatgcgggataattcacatggcagaataaatgttgttaagggtgcagttgtgtattccaacattgtgacaactgtatcaccaacatatgcacaagaggttcgctcagagggtgggcgtgggctccaagatacactcaaagtgcactccaagaaatttgttggaatacttaatggcattgacacagatacttggaatccgtctacggataggtttctcaaggttcaatacagtgctaatgatctatatggaaagtcagcaaacaaagcagctcttaggaagcagttgaagcttgcttccacacaagcttctcaaccattagttggttgcattacgaggctagttcctcaaaagggtgtacatctcatcaggcatgcaatatataaaataactgagttgggtggtcaatttgttctgctgggttcaagtccagtacagcatatccagagagagttcgagggtattgcggaccaatttcagaacaacaacaatgtcaggctgcttttgaagtatgatgatgctctggcacatatgatctttgcagcatcagacatgttcattgttccttctatgtttgaaccatgtggcctcactcagatggtagctatgcgatatggttctgtgccagttgttcggagaaccggcggtttgaatgacagtgtcttcgatttggacgatgaaacgatacccatggaggtgcgaaatggcttcacctttttgaaggctgatgagcaggattttggtaatgcactggaaagagctttcaactactaccacagaaaacctgaagtttggaaacagttggtgcagaaagacatgaagatagatttcagctgggatacttcagtttctcaatacgaagaaatctatcagaaagcagccactcgagccagggcagcggcataaacagcagagacattgagacagttccctgctgtctccatgaagtctcctagatgctgtgcttaaccgtatggtaaagaaatatggtctgtatcagctcagaattaagcatctgccgaggaagcgcggtgcatccggactcgggtgtacaaggggcgacgtggcgttacgtgcagtccccaacgaagcaaagagacagaagtacagctgtacagaacggatatcttgtgaagcacacattgggatcaggacgtttggtgctgcagctactttcggtgcagaagcacatatatacgagacctgccagggcgagcaaatacccagttatacacgcgattgctcagctctatcaagctgtgaattgaaagatttctatagtgtattcacgcgacgttttcataaactagtgtgagttatgtactctgaccagtgaccagtgcgaagtctgtgttgtctcaacaatgttgcttggtataaaatgctaaaatgacgtttaagacgagaggggtttttagaaaagagagaaaataagagttttatgggttcaaa

SEQ ID NO: 22552 - DNA, 392 bp, Zea mays
  Clone ID: MRT4577_120568C.1
ttttcgtgaaaccctgcaatcagcaatcatatctggtggagaacaatcaactttaattgagcctgtcatttcccccatcatactagagatgtttgggcacagtcacattgctgacccgttcattcagcattgatgctgcgaagtgttagaggtatgtttttgtcagaactggaaagggggatgtcgtgacatatattataaaaccactatgtacagaattctttttgactgcattagggagccgaccagaagaagaataatcagatgaattaacattgatgtatatgtggtagcgatatactttgttttttctaagaacttaatgccatcgttgataattttagtacggcctcaaagcaattcctttacttttggacggttatgtacttatg

SEQ ID NO: 22553 - DNA, 465 bp, Zea mays
  Clone ID: MRT4577_120569C.1
gggtcgagcacgcgtccgcccacacgtcagcccacgcgtcagcccacgcgtccgcggacgcatggggttcgagggtattgcggacgaatttcagaacaacaacaatgtcaggctgcttttgaagtatgatgatgctctggcacatatgatctttgcagcatcagacatgttcattgttccttctatgtttgaaccatgtggcctcactcagatggtatctatgcgatatggttctgtgccagttgttcggagaaccggcggtttgaatgacagtgtcttcgatttggacgatgaaacgatacccatggaggtgcgaaatggcttcacctttttgaaggctgatgagcaggattttggtaatgcactggaaagagctttcaactactaccacagaaaacctgaagtttggaaacagttggtgcagaaagacatgaagatagatttcagctgggatacttcagtttc

SEQ ID NO: 22554 - DNA, 2427 bp, Zea mays
  Clone ID: MRT4577_12056C.1
atgccgcgtacaaggaaaaccgcacgcaagtccactggaccgattggtgtacctcgtcatcagttggctccaagacatgaagggagcagcagcggcagcaacaatccaatcggagacttggaatcccaagtggaacagcttcggatggagctacgtcaccgaaacaaggtgtgggcacaagacggtcaacgtataaatgagttggcagctgacgtcagacgcctgcatgacgagcttgctgaacgggatttggcggtcgattgggccatcaactcacgttcggttgcttgggacttggaagccaaagctcgtgctcgtatgaccgagcttagtgtggcccttgacaacttgcagatgccatcaaggactcgtgcgcatgacggtgcgggtacttcccgtggacgggaagatactcctaatccaccacctataccaccaactctggccgaggctatcgctgccttggtcaacgtgactgccgatagtacccgctttttacgcgagatggcgggtaatcaattccagcagcatggccgaagggctcctccacagggaccgcgtgaaacctcatatctggacttctttgaaacacgtcccccactctttgttaaagctgaagaccctcttgaagctgatgagtggataaggaagccattgttcgctgcccaacaactgagatgccctgctagtacgtggtggggaaattttatggaagttcaaccagtcggacatcaggtcacttgggatgaatttaagctcgcattccgtgaacactatattccagaaggagtgcttcacatgaaacaagaggaatttattcgacttaaacaaggagcggatactgtgatgcagtatctcaacaaatttaatcatttatcccaatatgcgattgaccaagtaaacattgacctgaaaaagaagaattgcttcatgagaggactcaacgaccggctccaaaggaaaatggccacctgcctagatcttacttacaacagagctgtcagcacggcgctggcagtagaagctaagaatacaggccaaggaaaatcaaagggatttgggggtgacaggtccaatcagggacctgagaagcgaaccaggggacaaatatttactaaggaagtagccttccatgtgccagtaacattggctgaacgggattttcccaccaatatgattgttttgaaaggccaagatatagatcataaagctatcctcaacactgacttaaggactatcaagttgagccatggccatggagaggttctcttgtccatccctatagctgtcccagccaaaccatttggatgggtctatgaagctatcatacttgaaatccaggatattccggtaggatgccccgcaatctttgtcaagaagaaggatcaaacacttcgaatgtgcatggactacagaccccttaatgaggttacgatcaagaacaagtaccctcttccccaaatcgatatcttgttcgatcaacttactggagcccgggtattttccaagattgacctcaggtcgggctatcatcagatccgtattcgacccgaagatatacccaagaccacatttactacatgcaaatgcgcgttttggttggaggaaattcaatttttgggacatgtattgtctgcaaatgggattgcggttgatcccagcaaggtcaatgatattttagagtggaaaccaccaaccactgtacatcaagttcgaagtttccttggactggctggctattaccgcagatttatcccggatttctccaagattgtgaagccaatcacaagtctattgaagaatgatacaaaattcaactggtcctcaagatgcaacgaagtcttcgagcagttgaaggaaggtcgagttatagcatatgcttcaagacagttgcgccgacatgaggaacattatccaactcatgacttggaattagctgctgtgattgagattgcacgctatgtggcgaaatgtgacacctgtagacatgtcaaagccatacatatgaagactgctggtccattgcaatctttgcccatcccaacttggaaatgggaggacattagcatgaacttcattgtgggattacccaggacaacaaaaggatttgattctatctgggttataattgatcggcttactaagatagcccattttgtgcctgtcaagacaactcacccagttgctgtctatgcccagttatatattgctcgtattcttagtctgcatggagttccaaatatcatagtgtcggatcgcgggccgcaatttgtatccaagttttgggaagaattacataagtccctgggtactaagttgctccacagttcgacctatcatcccgaaacaagtgggcagattgagagagtaaatcaaatacctgaagacatgttgcgggcatgcgttctggaattcctacaaaaatag

SEQ ID NO: 22555 - DNA, 410 bp, Zea mays
  Clone ID: MRT4577_120570C.1
aaacaaatatggtctgtatcagctcaaaattaagcatctgccgagaaagcgcggtccatcccgacacgggtgtacaaagggcgacgtggcgttacgtgcagtccccaacgaagcaaagagacagaagaagtacagttgtacagaacggatatcttgtgaagcacacattgggatcaggacgtttggtgctgcagctactttcggtgcagaagcacatatatacgagacctgccagggcgagcaaatacccagttatacacgcgattgctcagctctatcaagctgtgaattgaaagatttctatagtgtattcacgcaacgttttcataaactagtgagttatgtatgaccagtagtgcgaagtctgtataaaatgctaaaatgacgtttaagacgagaggggtttttag

SEQ ID NO: 22556 - DNA, 382 bp, Zea mays
  Clone ID: MRT4577_120571C.1
cagagggtgggcgtgggctccaagatacactcaaagtgcactccaagaaatttgttggaatacttaatggcattgacacagatacttggaatccgtctacggataggtttctcaaggttcaatacagtgctaatgatctatatggaaagtcagcaaacaaagcagctcttaggaagcagttgaagcttgcttccacacaagcttctcaaccattagtatgctttctatcctcacaaccttgtacttgtttgaacatcttcctctctccaagatttattagagaactgaagtttcctcaagcaggttggttgcattacgaggctagttcctcaaaagggtgtacatctcatcaggcatgcaatatataaaataactgagttgg

SEQ ID NO: 22557 - DNA, 233 bp, Zea mays
  Clone ID: MRT4577_120572C.1
cccacgcgttcactgacacgtcggcggacacgttaaacctgaagcatgtgggcactttcagggctttataatcctaagccgtggacaccatgcaccttgcatgaactaacaagctttgaacactgatacgactattctcatcatctcctgcgctaacaagcacttcactgatcgtaatctaagcatcttcataggcatactactactagtacttgctactgctgattttacac

SEQ ID NO: 22558 - DNA, 104 bp, Zea mays
  Clone ID: MRT4577_120573C.1
aaagaggctctgccccatccagttgtttgccctctgtgtgatcagagccgaggaaaccatacaacatgttcttgtctcctgcgtgatagctcggcacatatgga

SEQ ID NO: 22559 - DNA, 215 bp, Zea mays
  Clone ID: MRT4577_120574C.1
ggtcgaccctctaaattgagtcatattacgccatcctccccacgctgctctccgtcaccgacaaaaaactcggcttcttcaataacacaagggccaacaacgggcaaatgtacttcggcgctccgggagccccctgcgtggccaagctcgtcaaggtcgtcgcagcgcggccgtactctgtgtccatcatggagatcagcgagcccattttgccg

SEQ ID NO: 22560 - DNA, 346 bp, Zea mays
  unsure (1)..(346): unsure at all n locations
  Clone ID: MRT4577_120575C.1
aaggctgggtacacgttcagcaacccggtttttaagatgttgaatgggtgggtaaaagactccagacccgacaaccgccaaaagtatgcgcgggggggggggggggctccntcaaacaggccaagggcaggttactaggttattttttcacaaaacttacagggggaggggggggtacccccaaaacgagcgcaaaggtcttcctcccgttgtcagactcacgccctttcgccacggatccttcttgccaggtgaatgtccttgggcctggtggtcacccccttggcctgggtcgcgcacagattggtatcttcaaagtgccccaccaggggggcccttgttggct

SEQ ID NO: 22561 - DNA, 527 bp, Zea mays
  Clone ID: MRT4577_120576C.1
cttttatactccaatctttatttaaccatctaatctgccagtttagcgttttccaccaactcggggagccgaaactttcacaggcttcacaatcttttgcttaggtgctgcctttgtaggtgccttagcagcagccattgcagtctttttagatgcttgcttacccgtttttgcttccttagcagccctgatagcttgttctcgttgagcctttctaacttcaggtttctgattcctcttggccattatatcagcaagagatgcaccagtaatggccctctggaatttgactgctcggcgggttcttttcttttgaatttcttccgactgtccctttttgtgcttccttctgtagaggacagtccagtttatctgccgaggattcctcttggaaaggaaagccgactcgcatttcgcattaagaaactggaaaaccttcccgtcggtcctggcgtagcgcctcccgtgtccggggtagatcttgtacccgctaaaactgctcagctcgaccttcatggcgacagctc

SEQ ID NO: 22562 - DNA, 116 bp, Zea mays
  Clone ID: MRT4577_120577C.1
agtggcatgggcgtctttcctctgcaagtcggaagccaccccggagaagtgagcccttccctgcacccccagaggacgacgcagccacagcaaaggaggcagcaaagcacagctct

SEQ ID NO: 22563 - DNA, 261 bp, Zea mays
  Clone ID: MRT4577_120578C.1
ttttggggccaaaggcggccccctcattccagaggcgccggaggtggggttccaggactacccggacgctgaaaacgggctcgacatggggacggcaagcaacacctgggcggctgactactgcgccttgtactacgcctacgacagctccacgggcccggaccgggtgctgaaggggtggtgcagcgtgctcctgaacgtgttgcacggggacctgtccaacctcgccgggaagtccgccagggactgagtcgccctccg

SEQ ID NO: 22564 - DNA, 944 bp, Zea mays
  Clone ID: MRT4577_120579C.1
cggcgtcgtcgcccggttcctcttctactacctaaagtgccgcgtcgccggtgcgagcgccgaggagaagaaggcgatgctgcaggcctcggtcgccgtcatggcgaagctggaccgaagcgccgtctcctgcaagggcctcttcggcatcctgaggatcgccgcgccgctgaggctggccgacgcgtgccaggagcggctcgtggccatgatcggccgcaagctggaccacgcgacgctcgataacctgctcgtcccggcgccgcccgggacgggcagcctgtacgacgtgagcctggtgctgaggttcttggccgcgttcctccgcggcggcgccagtgacgagccggcgaggctgaagaaggtgggcaagctcgtggacctgtacctggccgaggtcgctccggacccgtcccttcgcccggccaagttcctggagctcgccaccgcgctgccggctcacgcgagggactgccacgacgcgctgtatcgcgccatcgacgtctatttccaggttcacggccgcctgacggacgaggagaagatgaagatctgcagggggctgagctacgagaagctgtcgcccgagagctgcaagcacctggcgcggaacggcgagttcccgacgagggcggcggtgcaggcgctggcgtcgcagcacacggtgctgaagagcatcgtgctgcgcgagcccgcgggccaactgaagcccgtgtcgctgtcccctcccccgtccacgggtaagcaccgcgacgtcggcggcggcgagaacgacgagggtcaggtggtcctgtacgcggggcggctggacctgtcgctggagaaccagaacctgcggtcgctcctggacgggatgcactggcgggtgatggagctggagaaggtgtgtagccggatgaagacgcagatgagcaagatgaagcagcccaggcgcggaggcggtc

SEQ ID NO: 22565 - DNA, 332 bp, Zea mays
  Clone ID: MRT4577_12057C.1
gtgaaacgttgttcgtgttatccaggtcttaacaacaacgttttagaacaatcttttttgaacatggcacacggtaatggccagggggtctagccttggttcgataacatgacgaacatttcttgccggactaatttcaaagaatgtatgtgaaattttgcgtaaaaactacaaaagtggaaatcactcggcggaaattagtatgagaggactctgataaaggtggggtgacagagaccgattaccgttcaccaccgttggctcatgattgtctacgtcagaactggcaaggcctgttttgaaagggtccccaggaacctgaccggaggctc

SEQ ID NO: 22566 - DNA, 373 bp, Zea mays
  Clone ID: MRT4577_120580C.1
attcggctcgtgcgagcacctagtcttcgttggctccatcatcaatgtagagcgtcagaaggtgactgtcactatcggtggctgcaagcaacggccatggcgacgtacggtcgacaggtgccctagctgctgctgagcctgggcgtgctgggagcctgctcctgagctgggggcaggttggaccaggaactggacatcacatgagaacgacgggcagggcaaggtccttgacaacaggcgcttgctgaccctgtcgatggaccacacgtacagctacgggttccagtcccggcacgagtacctgtacggcaagatctacatgcaactgcagctggtgccaagcaactacgccggcaccgagaccgactactac

SEQ ID NO: 22567 - DNA, 362 bp, Zea mays
  Clone ID: MRT4577_120581C.1
cagcgtcagacctgctgtctcgacacatgatggcgcagctgtactgcacgctgcacaggatgtagcagggcagccgcgccaccacgcagggcccaccagcctgcaggcacggacctttccatgcaccgtgggagcctcctccacacaggccctgtcctcagcagaactcggattctgcagcatgccgtctgaccaccatgaactagcacggaagaatcttcacacttgggaacacaacacgcacactttcacacgacacctgggccagagaggaggtctcaagggagacgatgcgtggagctgagtgaagatgcagtgcagcctaggaaagcccagggcccatcaggcagtgtggagacacc

SEQ ID NO: 22568 - DNA, 930 bp, Zea mays
  Clone ID: MRT4577_120582C.1
ttgggtacctcgaggccggccgggctctgcttcctagctagctcctgctagaatggaaagtgcaggaggggaagctcagccggtgctgccgcagccgccgccgccgccgccggtgcaagagctcgccggcgctgcaaacgacgtgccagctcggtacgtcgcgcgcgcaggcaacgagcccaaggtcacggtaaccgcgccggtccccgtcatcgacctcgcccgcctgtgcgagccgggcggcggcgccgacgaggcctcgaagctccggctggcgctcgagtcctggggtctcttcctggtgaccaaccacggcatcgaggccactctcatggacgccatgatggacgcgtcgagggagttcttcaggcagccgctccaggagaagcagaagcacagcaacatgatcgacggcaagcacttccagctccaagggtacgggaacgaccgggtggcgtcggaggaccaggtcctggactggtgcgaccgcctttacctcttggtggagcctcaggaggacaggagccttgacctatggcccgcatgtctaagggacgttctgcacgatttcaccacagagtgcacgagagtgaaggactgcctgcttcgagaaatggcgaaggcgctagatgagctcggcgacgacgacgactacttcatcgaccagttcggcgacagggccgacacccatgccagcgtcggcgggcttcaggttttccgggacggagtctggtacgacgtgcgcaccagacctcacaccctgctcgtcaatctaggagaccaaatagaggtaattcatttattgacgaactatcattagaatctttgttatgattgcaaatgggagattaaagtttgattggctaattttgtgaagcttatattccttccgtttctttttagttgtcgctggataggtcaattttgcac

SEQ ID NO: 22569 - DNA, 1533 bp, Zea mays
  Clone ID: MRT4577_120583C.1
cgtcggttcgtcgggcgtagcggcagcgatgatattttagtcgtactcgtacagaagccacagccctctgctagctagctagctcctgctagaatggaaagtgcaggaggggaagctcggccggtgctgccgccgccgccgccgccggtgcaagagctcgccggcgcagcgaacgacgtgccagctcggtacgtcgcgcgcgcaggcaacgagcccaaggtcacggtaaccgcgccggtcccggtcatcgacctcgcccggctgtgccagccgggcggcggcgccgacgaggcctcgaagctccggctggcgctcgagtcctggggtctcttcctggtacgtacgtgctttaacgcatacgcacgaacacaccgtgtatctatcatgctacagagcactctactatataccgtagatctggactggagcacgtacgtaatggatgtcgagtactatataccgtagatctggactggagcacgtacgtaatggatgtcgagcatgcaggtgaccaaccacggcatcgaggccactctcatggacgccatgatggacgcgtcgagggagttcttcaggcagccgctccaggagaagcagaagcacagcaacatgatcgacggcaagcacttccagctccaagggtacgggaacgaccgggtggcgtcggaggaccaggtcctggactggtgcgaccgcctttacctcttggtggagcctcaggaggacaggagccttgacctatggcccgcatgtctaagggacgttctgcacgatttcaccacagagtgcacgagagtgaaggactgcctgcttcgagaaatggcgaaggcgctagatgagctcggcgacgacgacgactacttcatcgaccagttcggcgacagggccgacacccatgccaggttcagctactaccctccgtgcgcgcggccggacctcgtcttcggcctgaggcctcactccgacggcacgttcctctcgcttctcatgctagacgacagcgtcggcgggcttcaggttttccgggacggagcctggtacgacgtgcgcaccagacctcacaccctgctcgtcaatctaggagaccaaatagagataataagcaatgggatcttcaagagcccagtgcaccgggttgtaacaaacgcggagaaagagaggctatcagtggttctgttctattctatagatcctgagagagaaatccggcccgctgacaaactgatagacgagaaccatccagcactatacaagaaggtgaaagtcaaagaatatactgctggactctacgaacatttctctcgagggaaattggttaaagagactgcaaagatatagcttgttcgctttggattaaatccatggactaatccttagagacaaaaacactgtataagtagtaaaagtcggtacgaattaaagctcaagctagtcgtatctatgtaatgaataagggtgaaacctttgcgatcctagataataaatgaaattaatttttaataaaataaagtgtatatagttcgttgccccccc

SEQ ID NO: 22570 - DNA, 394 bp, Zea mays
  Clone ID: MRT4577_120584C.1
caagaagggacataagaatgaagcattttagggtgtcattcatcgtcacggcgctgtgcctgctgggctcggcatggtggggctacgaacatgccggcgtggccggcgcgctgacggcgatgggtatcgccgcgattctcgcggtcatggaagtctcgttgtcgttcgacaacgcggtggtcaacgcctccgtgctgaagacgtgggacgagttctggaaaaagctgttcctgggcgtcggcatcatcatcgccgtgttcggcatgcgcctgctgttcccgctcgtgatcgtcgcggtggcggccgacctgggcctgatggacgtgtggaacatggccttgcaggatccgaagcagtactcgatgcacctgacgaaccaccacgcggaagtggc

SEQ ID NO: 22571 - DNA, 600 bp, Zea mays
  Clone ID: MRT4577_120585C.1
agctacaaaaccggccgcctcagcttctgctccttttcctttccagtgcatcagggaggcggcgattcacgctggtgatgacgaacgcggactacgatgcacgagcggacatacctgtggtgtagatggatgcgaccgcaactccacaacgaagggctgcctacctcaaggtctgtgaagctcatgagcccgaagaggtcgtgttgctgaaaaaaactaccccgatctcacctccacaaccttcttccatagccgctggaactacatcatctctggtcctgcgaaggccatgggcaggaaggcgaagagagccgtcacaactggccgcaagatcattgcaaggcaccaaccccctggcttctgagcccggcaccatccgtggcgactttgatgtccacattggcaggaatgtcattcatggaagtgacagccttgagagagctactgaggagattgccctgtggatccccgagggtcctgctgattggcagagcagtcagcacccctggatctacgagaagtaaacatggaaagtttcgcgtcaaaccttgagagccataggaaccatgacaccatttgtgctttagcaatgttttcgaa

SEQ ID NO: 22572 - DNA, 711 bp, Zea mays
  Clone ID: MRT4577_120586C.1
gtcctattgagaatagacagtgcgatccttagcgtccgtttctgaccagacggtcaaacatttcccgcccaatcaaacccgaactcaaaccctcaccgctcagtcggacgccgcctcctcgtcgccggcgaccccaggttcaacatccgcatgctctaatcgggcgcgcagctcggtgaggaaggagatggaggagttccaggcggagtcgcggcggttcgaggcggagactcgcgaggaagtgcggaggctgagggtatatatggtcccgatacttggcaaccataaagaggtgcagagcagtgcgatgtactcgaagtctcgaacaacacagagattgctgcaggagaagctaggaagcctgatctgactgctaagaaggcaaagctgggcgagagcatggcttcagcccgccagttcagagcactgcttcagcagcagctccagaaaacttttcagtcacatgggatcagaaagcagctcaagctaccattttaagcagataattttcgtttccaggacaccaagaaagccttgttttgtgggtagcacattacaaaattcatcttaatctggtggacactataaaaaggtgcatttatgtatagcacaccatatcaattaataaaactccttttggtgcatagagggaggaaggcatttcccggtaaaagggggctgaaatatctttagaattggtcccactcatcg

SEQ ID NO: 22573 - DNA, 224 bp, Zea mays
  Clone ID: MRT4577_120587C.1
ccacaggctatatggaatttggaagagatctcgctcctttagaccacgacggcaaagatgtctctggactagcggatcaagctgcggcctgcggattaaggtgcaagggtgggacataaaactcggagctgtaggagaataatacctccacgcgggacaagacaagcatccgtcgggcacgcgacaaaaaagcctcgccctagccccaagaggaagaagggcac

SEQ ID NO: 22574 - DNA, 629 bp, Zea mays
  Clone ID: MRT4577_120588C.1
tgggctaccctaggagcctcgcgcggtacacagcacatcttcaatctccccgagcaaagcaaagctctagccttccatcctcactcgctcgcatggcccgcaccaagcagcacggctaggaagtccaccggcggcaaggccccgaggaagcagctggcgactaaagcggcccgcaagtctgcccctgcgaccggcggagtgaagaagccccaccgcttccgccccagcaccggcgcgctccgggagatccggacgtaccataaaagcacctagctgctgatccgcaagctcccgtcacagccgccggggcgaggagacccgcaggcactccacacccgacctcgcatcaaggcgctcaatgagtccgagagggaccggaagaaggtcaagcaacattaagcacagtggtaacatcggcctcgacgacgtggtcgagatcgccaggaccatgaggaacagggccatggccaaggagttggccggcaccgtcaaggagatcctcggcacctgcgtcagcgtcgggggcaccgtcgacggcaaggaccccaaggacctgcagcaggagattgatgaccgagaggtcgagaccccccccgcttgatactagccatccaggggacttccattgg

SEQ ID NO: 22575 - DNA, 645 bp, Zea mays
  Clone ID: MRT4577_120589C.1
ggtaccctccggggctggccggggccctatcttcctgctctgggacaggcgtgagtagaaggcagaaggatccagagcccggcggtagctatggtttagctgaggtaagggactcaacgcgactggcgagttcttctgaccgctgggaccagtggatgacgcaccgtatggtggggaaccatgtgcaccacgccacacccgggctcggcataacgcatagtgcactttggaatctacctagctggagaggacgactacaaccggctttatcgcccctacgatgaccaccacgactaaagagacagcaggatcccagactggggctagaacttgcagccacctttaccaaacactgaggctgcctgatgattgaacggcgatgcgctaattatgatagccatgaccatactgcaaagggtgaccagaagagactggatccactgatatcctacaactattgtcctgcgaccctgtgataagcctggctctatgggcctgcccgagctcatgttattcaagaggtctgaactatcttcaatgtgcactattagcgctctgatgcgagtgaaatcagcctgcgtgcgatcaacgttaggtcacgctaggtgcaccgacgtcgaaaggttcatgatcacgcatcatgga

SEQ ID NO: 22576 - DNA, 1302 bp, Zea mays
  Clone ID: MRT4577_12058C.1
atggccatgatgggttcaacatcggaaaagatgtacctctgtcagactaataccagaaaggccaacacgcaatggaagtggagagatggcgagagtagcgtgaaccctccgtggcaagaggctggacggtggtgtatctgtgctctcggttggcgtgaacccagtctggtcttaagagccccggtggtgaaacgctcttgggcgaggaaaagtatacagataccgaacttgtcgagttattatgtgcatctacaggggtgtccaaggtgtactacaatactttacatgaggaagtacatgtactgtatgcacgactgcacccggacgtgtctgccgaccctgttgcaatgggagccggaccaccaaggacagcagatgccatcacagactcgtgcacacgacggtgcggggacttcccgtggtcaggaagatactcctaatccgccacctataccaccaacgctggccgaggctatcgttgccttggtcaatgcgactgtagataatacccgcttcttacgtgaaatggcgggtaatcaattccagcagcatggcggaagagctcctccacaaggaccacgtgaaacctcgtatctggaattctctgaaacacgtcctccgctctttgttaaagcagaagaccctcttgaagctgatgagtggatcaggtatctcaacaagtttaatcatttatcccaatatgctattgatcaagtgaacactgacctgaagaaaaagaattgcttcatgaggggactcaacgaccagctccaacggaaaatggccacctacctagatcttacttacagcagagctgtcagcacagcgctggcagtagaagccaagaatataggccaaggaaaatcaaggggattcagaggtgataggtccaatcagggacctgagaagcgaaccagttcatcaccttggggatgtcccgcaatttttgtcaagaagaaggatcaaacacttcgaatgtgcgtggactaccgaccccttaatgaggaaatccaatttttgggacatgtattgtcacacccagttttggaaggcaaaccgaatgcgaaccatcctgggttgtacagacccgatcttcactaccaaggtgaatggccagggatacactatgtagcctttacaaagactcccctggtgcatagctgctcgttaggttttgacagtcgtataaacgcagtacacctccccaaggtccttacggagaggtactcaggaaaaaggcttgagccccctaaggtatcacaatatcatccacaatatcaggataacagtatcgtatcataa

SEQ ID NO: 22577 - DNA, 552 bp, Zea mays
  Clone ID: MRT4577_120590C.1
atcaaatttccttcactcctctcttcttttctagatcacatactcttccatttctcccactcggcagtagcacctgtacctgtacatggccatgcaacgccagccggaaccaagagcaaggaagaataagggtcgcggcgcaagggaaaggcacccagccacaagaagaagacgctgacccgcaacgttgaggttgagctgcccgtcccccgcatccggatctacctctacatcgagaaggacccgcacgccgagcgcgctggcactgccgcctacgtctacctcgtcgtcggactgctctacctcgacgcccaggatctggaagtgaacgcgaacacagacaacgacaacacgaacatcatcatgatcccgcggctcctggtcatgcggatccacaacgacctcgagatcgtgatggtgcgtggtcgccatcaccatcggggacggcctcgccatcatcaacttccagttcctgctcctgaacgagaaggagaaggagaacgaggccagcagcaacagaaccgagtccccctccaccgagaacgaggcccc

SEQ ID NO: 22578 - DNA, 426 bp, Zea mays
  Clone ID: MRT4577_120591C.1
tatagggcgaattgtgtaccgggccccccctctaggcgcgcgctatattttgttataggtctgacccgatcttggacagggaccaaatcggattgatgtgttatatgcgccacaccggatacacaggccatgctcaagctgaactatctgtgaacccattattacctccgctctttttgcattgctaatcatttcataaatcaacctattcttattgcttatactcaaacaatagcttcttcctcaaatagccttgctttaaacaaacagtaagtttcagaagtcataccaagtcacgagactcagatttttaaaaagtgccacaaagtgtctcttctgtgtcaatgttaatagaaccctttgtttaaatgatccgtgggcaaattaagaatcttccgataaagaacaaactctggaaaaacaaag

SEQ ID NO: 22579 - DNA, 247 bp, Zea mays
  Clone ID: MRT4577_120592C.1
aaggtgaaaccttaaaattcataagggtctaggcccttttgatgaaaaaaaattttgggtctcaacacaaggatggaactggttctttaaatcacggaattcactccccctatttttgtcacactaaccacaggtggtttttggacaagtcctttcgtataggggctccccaagagggaccaaaaacaccctataccctgtatcctccctggcataaagaaaccagggcttacgtgcccccacgggg

SEQ ID NO: 22580 - DNA, 2622 bp, Zea mays
  Clone ID: MRT4577_120593C.1
ccccgcgtccgcccagcgtccgcccagcgtccgcggtcgcgtgggcggacgcgtgggcgaggaattcgctcttctaacaagtcgtcgcctcggcccggcccccttcgctcctctcggcgcgacgacctctgcccccgtcctccccctttctcaatccccgcgcgacgaggccgcttcatggcgggtcggggctggcctcggccgggctcgctccaggctctcgtcgtcgccgccgtcatccttctcctggccgccgcgtccggggccggcgctggatcccccgatcggcccgtgccgcggccgccgctgttcctcccgctcacgcgctcgtaccccaacgccagccggctcgctgcctcgctgcggcgcggcctcggcgacggggtccaccccaacgcgcgcatgcgcctccacgacgatctcctcaccaacgggtactacacgacgaggctgtacatcgggacgcccccgcaggagttcgcgctgatcgttgactccgggagcaccgtcacctacgtgccctgctcctcctgcgagcagtgtggcaaccaccaggatccacgatttcaacctgacctctccagttcatattcaccagtaaaatgcaacgttgattgtacttgtgacagtgacaaaaaacagtgcacttatgaaaggcagtatgctgaaatgagctccagcagtggggtgcttggtgaggacatagtgtcttttggcagagagagtgaacttaagccacagcatgctatttttggctgtgaaaattctgaaactggagatttgttcagtcagcatgctgatggtataatggggctgggtcgtggtcaacttagcataatggatcagcttgttgaaaagggtgtcataagtgattcgttctcattgtgctatggtggcatggatattggtggcggtgctatggtactcggtggaatgcttgctcctccagacatgattttttcaaactcggaccctctccgcagcccatattacaacattgagttaaaagaaatacatgttgctggaaaggcactgcgggtggaatcaaggatcttcaacagcaaacatgggactgttttggatagtgggaccacatatgcttatttgccagagcaagcttttgtggcttttaaagaagctgtgacaagcaaagtacattctcttaagaaaattcgtggccctgatccaagttataaggatatctgctttgcaggtgctggaaggaacgtctcaaagctgcatgaggtatttccagatgttgacatggtatttggaaatggacagaagctctcactcacacctgaaaattatttattccggcactccaaagttgacggggcttattgcttgggtgtattccaaaatggtaaagatccaacaacactattaggaggtatcattgttcgtaatacacttgtgacctatgaccgtcacaatgaaaagattgggttctggaaaactaactgttcagagttgtgggagaggttacatatcggtgacactccttcaccagccccttcaagtgatacaagttcagaacatgatatgtcgcctgctcctgcccctagtaatttgccagagtttgatgttggtctcatcaccgttgatatgtctataaatgttacttacccaaatttgaaacctcatctccatgagctggccgagctgatagctaaagagctggagattgactcacgtcaggttagagttatgaatattacgagccaaggaaattctactctgattagatggggtattttcccagcagaatccgataatgctatgtccaacgcaacagcaatgggtatcatatatcggttaactcagcatcatgttcagttgcctgaaaatcttggcagttatcagttgcttgagtggaatgtgcagcctttgccgagaaggtcatggtttcaagaacatgtagtctctatgctgcttgggattttactagtaattttggtcactttgtcagcctttttagtagtacttgtttggagaaagaaatttagtggtcaagcagcctacagacctgttgattcagtggtccccgagcaagaactccagccactataatccaaattaaagctgtttgacggaacaacatatagatgattctttggtagagatacccttgtgcgggggggttacgcatcacagcggcacgcatctgctgctggagtaagcccttctttgtatgtaacacaagctacaagtttacagaagaagcactgtatgattacatgacttctccattcaaaacttagaggtgttcataaactgtctagtgattcagatcaagagctcctctcttgtgcttacagtagaagaaggttttgttcatgtaatgtagattaagtagggggtagagaagaaactaggcacagccgcggaacgaaatggtgtaatatttattttagtgccgagggtatttgtcttcaaagcttttcaaaaaaaaaaaaaaaaaaaaaaaaaaaaaaaaaaaaaaaaaaaaaaaaaaaaaaaaaaaaaaaaaaaaaaaaaaaaaaaaaaaaaaaggcccgggctccaaagctttacagggcacgcttgatgctcgtgcctacaatttttattataagtaaggccgttcttgctcaaacaaaa

SEQ ID NO: 22581 - DNA, 883 bp, Zea mays
  Clone ID: MRT4577_120594C.1
agcaagcaaatgagatttattattactagtaagataagataaacaacgaatgcctatgaaccaattcatcatcagcggttaaaagggcgagcagacaagctcaatacaagtttggagcacgcaccaccacacacgctttttttgtgtcacgacacgattcacgaatccccgggacttggcctctgccacggcagcctgccgttcatggccggcgagtcatcggacgcgagcacgggaagcttctccttgccgttccgcggccactgccaaatcttggacaccgagaagctgtcgcctttgctgcccgcgccgatcctcttcccctctgtggcgccggcgcggttggagcccacgccgacgcctctgagccccgccccgcccctgccatggccgtcgccgtgcctcctgtggacggacacctggaggctcgcctcggcgaggacgtactggtaggagcccatggagtagcaccgcctggcgtccaggctgctgctgctcgtctcgccggcctccctggtcacaatggccggcgccggcgcgcacggggccaggcgccgccctggccaggttcttgaacttgccgaggcgcacggggagcacggcgtcctcgtgctcccacatgccttcctcgtcgaacagcgcggcagcgtcggcgccgagcgcgcaccggcacagcgggcacgtggagttggagagcagccaggtgtcgatgcagccgatgtggaacgcgtgcccgcacagcggcagcagccgcagccggtcctcgccggcgaactcgcacaggcagaccgcgcagtcgaacggctccttggcgccggcgccggcgccgaccacctcccggtacaggaacaccgggagcgcgtcgatgacgtcctggtccagc

SEQ ID NO: 22582 - DNA, 242 bp, Zea mays
  Clone ID: MRT4577_120595C.1
ctcaccagcagcaagtagttttggaggcagttacaaaacaaccatgttttgaaactccatttgtagattatttaagttttggaggcatattggagtagaaacaattgaatttttaacgagatccctccctcagttaatgagtgcaagactatgttcaggaacgagactatgttcaggaacgaaatttctctgttgtgtcatcgagtcaagtctaatcttaaggagtaacttttcatttgatt

SEQ ID NO: 22583 - DNA, 387 bp, Zea mays
  Clone ID: MRT4577_120596C.1
acgcgcgccgtatcataacgcgggcaggccgaccgcacggggcgcagcacttggcgtccgggggggggggcacacgctgatcccggaacaacacctgcctggcgtatgggcggctcacgtgctcgtatgcggagggctagctgaatgacggcatatacccctaaacgttcatcttacagatagtctactgatcaatacaggagcagactgtattgtgggacttgtctgatacccatacgctacctgccagcttgcgactgctgcttgctaactatgaccccgaccactatcgcaccataactgctctaggtgaaatcctcacggactcacacaccatgcctgcacactccaacgagcagtaatggttcatactccgaacaagaacgc

SEQ ID NO: 22584 - DNA, 469 bp, Zea mays
  Clone ID: MRT4577_120597C.1
attcggctcgagctgttccgcgagaggaagacttctacttaattgacacattttaggtttgcagggggaggcaaataaaaaacctgggaggcgattcgccgaaggattggaatcatcatccgtatatacggcaaacagggatggtccaccatggatcctgtcttgcccacctaagaggatgctacagctttgaaggaacgctcatcgcacacgtcggcttgtggacaagccgtatctgaagaccgaggacaatgcattggactgcatatccacaagagaaggtcacataatagctgaacactgaccaaggcgacatggcacgactccaaggattgaggcgcgacagtatttgttagtcggggcctgaccatcagcacatgttgactgatcaaccggctggtacctttattgtgagcgccggttggaagcaacgcatattagcggcctcctgagagaaggtaaatcatgg

SEQ ID NO: 22585 - DNA, 268 bp, Zea mays
  Clone ID: MRT4577_120598C.1
gggtgtttttttttgatttttttttgggtttatctcaacaacaacagcccggtattgtatgggctaaagaactcaggtgtgggcaggaaaatccacgttcacaaagattaccagcttaacggacccattcgcgatcaaggaaacccggcgattggtatgggggtgttatacaaagcaaaccacactaatgcgttttcgcaaaacttggtacaaccaccttgaaaggacccaagattgggcattcatgttaaaggactaaaatattatt

SEQ ID NO: 22586 - DNA, 478 bp, Zea mays
  Clone ID: MRT4577_120599C.1
ggccgcttttttttttttttttttcttttttttttttttttttttttttttttttttttttttttttttttttttttttttttttttttttaaggaaaacgacggaccatttaacgcacaggggcaaattactaataacgggggggaggggaccaaaaaaaacccaggggcaagacaacaggacatcacaaaggtagaaaacggggaagccaaaaacccggctcagggggacccccataaatagggcttacccaacatagccaacatgcaaaacatttttgaaccgaccagatgcagaggcaggaaaattctcggaggggggctacacaagggggcaccgggcactggaatgcccaacaacaagattggagcaccaaacatggaaaaaaaaggcgcggggggcaaggcaaaaattccgcatgacggggtaccgggggttaaaatcttcctgacaccaaccggagggaaccccccctaa

SEQ ID NO: 22587 - DNA, 1797 bp, Zea mays
  Clone ID: MRT4577_12059C.1
atggcgggtaatcaattccagcagcatggcagaagggctcctccacagggaccgcgtgaaacctcgtatctggacttttctgaaacgcgtcccccactctttgttaaagctgaagaccctcttgaagctgatgagtggataagggtaatagagcagaagttcggattaatccgttgcacagaaacacagaagtcgttgttcgtcgcccaacaactgagaggccctgccagtacctggtggggaaattttgtggcaattcaaccagccagacatcaggtcacttgggatgaatttaagttagcattccgtgaacactatattccagaaggagtgcttcacatgaaacaagaggaatttattcgactaaaacaaggaggggatactgtgatgcagtatctcaacaagtttaatcatttatcccaatatgcgattgaccaagtaaacactgacctaaagaagaaaaattgcttcatgagaggactcaacgactggctccaacggaaaatggccacctacctagaccttacgtacagcagagctgtcagcacggcgctggcagtagaagctaagaatacaggccaaggaaaatcaaagggatttggaggtgataggtccaatcagggacctgagaagcgaaccaggttggtaatccgaccatttaatcagaatcattcttctcctcgtccaccctcctatccattcaaacaacctgttttcattcgtcctaccactgcccccgcttctacaaatcagctgagtgcccctggtgctcgtttccccgcccaccctagttcctcaactggctgcttcaactgtggaaagtctggtcattttatcaaagattgtccatatccgaagctgaataagttcaacaatcagcagaactctgggacttccaatcaaggcaaaggaaacatggctaataattcagtgggcaaaaatgtcaagaagactgggcgaatttattatactcaagtggccactacaccggaaggagagccgataatgatggatctacctggattacctctagaaagggatgtagagtttgtgatcaacctgaagcccgatacagctcccatttctagaaggtcgtactggatgccaccaaatgaattggcggagctcaagatgaaactacaagacttgatggaaaagggattcattcggcccagttcatcaccgtggggatgtcccacaatttttgtcaagaagaaagatcaaacacttcgaatgtgcgtggactacagaccccttaatgaggaaatccaatttttgggacatgtattgtctgcaaatgggattgcggttgatcccagcaaggtcaaggatattctagagtggaaaccgccaaccactgtacatcaagtccgaagtttccttggactggctggctattaccgcagatttatcccagatttctccaagattgtgaaactaatcacaagtctgttgaagaatgatacaaaattcaactggtcctcaagatgcaacgaagccttcgagcagctgaagggcttcaaagggtgccatcttcaggctggattgataactgttgttatgagcaaactctgccaaagggagtctgggggtggtaagccaaacttcttattagcttggttcccaaagactcttgcaattgctcccaaaatctggcaactaattgggctcctcggaaccgccaatctgtcttcaagcctgtcggggaccataattaggggtaccctcaagacgcctaattctcagctggtaacccccatcagcataaagctgcaaaggcctgatgggtacgattaa

SEQ ID NO: 22588 - DNA, 318 bp, Zea mays
  unsure (1)..(318): unsure at all n locations
  Clone ID: MRT4577_1205C.1
cattcaagcaagattatataatctagaatgtaaataagttaaaaatcaaacgaacgataccaattatttttttaattatataanccagatacctagattataataaatccataaccaggtcactatgtgcttacataatccataatctggattatatgatcctggaaacaaacaaacacggccaactatcttacaattttccttgtttgccatgaccttncggtaataatttatgtacctccagaaattaaatcaatacagcactgctggctaaaatatttattgacgatatttatcttggcattttcattttcaagc

SEQ ID NO: 22589 - DNA, 606 bp, Zea mays
  Clone ID: MRT4577_120600C.1
ctccgttctcgcggctatcgtgatgtacgacgccaacgtcctggccgtcctgtcggtggcccagtctgcctcctactcggaatacgccaacagcatgccgtactgcacgtaatacgtgaatcacatagctgtagcaccactcgtagtccatagaggccgcagctattatggagtacatcctgcagggcatttccttgatgaagcaggctaagaatgtgaatgaccttgacccgctgctgaagcccaagcaggacacatacgcgctccgcacgtcgtcgtaatggatgcgcctgcatatcgaggtcatgcgggccgccaccaagtccatcgagcgcgaggtggactactgtaacgacaacccggtcatcgacgttcaccgctgcaaggggtctggcggcggcaacttccatggcacccccatcggggtgtccatggacaacgcccgtctctacatggatgacatcggcaagctcatgtaagcgcatgtctacgagctcgtcaacgagtgctacagcaacgggctcacctccaacctgaccggcagtcgtaagcccagactggactacgggttaaagggcaccgagatcgccatgggctcctactgct

SEQ ID NO: 22590 - DNA, 110 bp, Zea mays
  Clone ID: MRT4577_120601C.1
gcgctgatggtccgctccggcgcccgagctctggattcaccgttcgccgtggggcttctgtcgttggccaacgtgctgacctgcggcgcgctatatgacaactttataaa

SEQ ID NO: 22591 - DNA, 167 bp, Zea mays
  Clone ID: MRT4577_120602C.1
gggtacgaccacgcgtccgtacaaacgtcagaaaacattcggggatagctgaaggtcagcaactaacggcaatgatgccagacaaatggtagaccacggatgtcacagctgaatcaaggtagggataatgccacatttcatgcaccacgggatccagtcgactccgg

SEQ ID NO: 22592 - DNA, 2470 bp, Zea mays
  Clone ID: MRT4577_120603C.1
caggccggccgggccgggagtttcacactgccaacgtgaagaagacaagcagaaagatcgcgcgcggaagagcgcaaaagccataaacgcctccctcttcgtcccctcctgatggagctctggccgtttcaaaaccccctaccccctgcccggtgccacgcggccgcgtccccgcagcctcagtccccggcccgcgtcgcctcgcgccggacgccgcgctgcttctgatttccgaccgttcctactcggtgtcggccggattccctagtccttgtcgtacgggagggtgcggtttcctggcgcggatgtaagtgaaggccgtggtaggggcagggaacgaatgcagaggtcgcggcgagcccttctgcggaggacggcggcagcccaggagcagagcgcggtggcggaggctgccgctaacggaaggaggaggcgtttgtacggcttctccgcctccctcgtcgtcgcctcgtggggtcgccgtgctcctcctccactccctcgtcggacacggcgacggccaacgagatggaggaggctctactgtagatcttactgttgtagagcctgctgtaaatgttggtccgattaatccggttgtacaagaagagcatggagaggatttggagatgccaggtgatagctgtgttaattctgacgaaaacgctgtgctttcagaggatacactggtgcaagcagatcaattgtgttccagtgatgaggtgcagaatgagaacacagaagctgtaaccatagacagtcaggttgagctttcaggagatcagggtgggtatcttcctcagtcgggtgttgattctggagttcaaccaggggagaaggtagagagtaaagatttgcctagaccaccgagactatcacgggttgctcctcctgatctcgatgaattcaagacaagagcaattgctgaaaggggacctggtatttctagtcaacctggtaatatcatccaccgaagggagcctagtgggaagttgtataattatgctgcagcttctaaaggggccaaggttctggatttcaataaggaggctaagggtgcttccaacatcttagataaagacaaagacaagtacctccgcaatgcttgctcagcagaggggaagtttgtcatcatagagctttctgaagaaaccttagtagatacaatcgcaattgcaaattttgagcattattcttctaatccaaaagaatttgaactgctgagcagtctgacatatcccacagaaaactgggaaactcttggaagattcactgccgcgaatgcaaaacttgctcaaaatttcacttttcttgaaccaaagtgggctagatatttgaaactgaacttggtaagccattatggttctgagttctactgtactctcagtgtgcttgaagtgtatggaatggatgctgtagaaaagatgcttgaaaacttgattccagttgagaataagaaaacggaacctgatggcaagataaaggaacccattgagcaaattcctttgaaagagtctgctggaggaaaggaatcctcacaggaaccacttgacgaagatgaatttgaactagaagatggtaaaccaaatgggcatggtgattcatcgaagaatggtgctaatgatccagtttcagagacaaggacacttcaggctggcaggattcctggagatactgttcttaaggtgctaatgcagaaagttcaatctcttgacgtgagcttctctgtcttggagaggtacctagtggagttgaacaacagatatgggcaaatatttaaggatttcgatgccgatattgatagcaaagatgccttgttagagaagatcaaaacagagctgaagaatcttgagagcagcaaggacagcattatgaatgaaattgaaggtatcatctcctggaaagtagttgcttcctcgcaactaaaccagcttgtcctagataatgctctactcagatcggaatttgaaatatttcggcaaaaacaggctgacatggagaacaggagtcttgccgttatattcctcagttttgttttcgcttgcctagctcttgctaagctgtctataggcatcatgtccagattttgtagattctatgactttgagaagttccataatgtaagatccgggtggcttgtgctgctgcttagcagttgcatcatatccaccattttgataatacagtaacacaagcattcaacctcacatggtcacgcctgtacatcctagttacatgaggtttctgatgcaaaatgaactatacacctctttcagatcttatgcaattttacagtgcagttgtttcgctcctccccacctcacccgctggccctcggcgctgctcttccccgcccggagttgctgtctctgcgccgaggtccgtctgccgccgcggccgcagcagcagactactgcgagtagaatatttttcttgttccgctcaaaggtttggggaatgtaaagcaaat

SEQ ID NO: 22593 - DNA, 759 bp, Zea mays
  Clone ID: MRT4577_120604C.1
cgatgaaccctcccatgatgccgggctcaagacctcctagcccagcgtttccataccctctcgtgccacccgggctctggggctgtttttccggatggccacccacggcttggaacgtagtctgcgtgtcgccgccgccgccgccgccgctgtcgccgtcgccatcaagcaacagcagcagctgctcgggcaacgggtctcctactctgggcaagcattccagggacaccaatccgctgagagaggagaaaagagagaagtcgctgtgggttcccaagacgctccggatcgatgaccctgatgacgccgccaagagttcgatatgggccaccctcggcatcaagcccggagaccctggcactttcatcaagcctttccagtccaaggtcgagagcaagggccagaggtcggacgctgctcaggtcttgcaggcgaacccggcggcgatgtcgcgctcacagtcgttccaggagagctcttgacttcatacgcaaagtctgccttatatatagttttggtactgtaatccttacatgctggtagagttttgtggcatgcgaaaagtgacttcgtacctgaagcctatcttattgtttgtttcggtactgtattccttactacatgctagtagagctgtgcggtatgtggaaaggacaacagagagcttcttgtatagccaattagccacctagtggaacttgcaaagagcttccatgagaactctcgagatacttatgtattgtaaatacttgacataaa

SEQ ID NO: 22594 - DNA, 1033 bp, Zea mays
  unsure (1)..(1033): unsure at all n locations
  Clone ID: MRT4577_120605C.1
ccccgcgtccagagttcattcaccgccggctccttcatagttcattcccgaggcagagattttttttggggggtgaagcaccgcgcaactccttctcagttctcagcggcagacatgcagcggaacaactcgttcgggacgtcgtgggcggaccagtgggactacggcggcgacccgagcccgagggcgccgcgcgacggcggcgtgggggagaagaccaaggcggccgcggccaccggcatgaggaaggtgaaagagggcacgtcgcaggggttccagtggatcaaggacaagtgccagcggaagaacggcggcggcaacaagaagcagcagggctccgaggtccctgggtactgacccctcctgtcctcgtcacgtcagtgctgttgcttggcagacagcagaattttctaaattttttctcggttcttgctgttggtacgaatagtatactgcgtataggttgtgatctgatctcggtgctggttgcagttgtagagtagtttcatcgtacctgatatgtctccttgatactgaattggtcacttcgatatatataaaaggatatttatatcgaagtgaccaattcaggatcaagggcaagtacccccgggagaacggcggcggcagcaagatgcagcagcgctccgaggctcctcggtactgaccgctggtcacctcgacacttcagtgctgttgcttggcagacagcagaattttgtaaattttttctggcctctggctgtgggcacgaatggtatactgcgttgaggtcggtggctgatctcggtgctggttggagttgtagactactgtcatcgtgcctgatatgtcgccttcgtactgaatgggtcacttcggtatatataaaaggatacttatggatggcggtggcgacaggacgaggcccggctcccgggccccggtgcactcacccagcagctccgccccacgtcaccggtgtccttgcccctccacccgtcgtctcgctgccgcttcagggatatttataaacttatatttttgtnctcgt

SEQ ID NO: 22595 - DNA, 712 bp, Zea mays
  Clone ID: MRT4577_120606C.1
aagcctccggccttccacccgacctcccctcttttctgttcgtcccccctccccctatcgcaccgtctttcttctcgcctactggttccttgcctcctctgcccccatccttctcttccctccgccgcgttctcccttcctcctcttaccccgtatccgcatcacgcgcctcgccgccctgtcggtgccttacaagccggtccaccgtcagaggaggaggattcgtggaggacaggatggaggtgggtgagatggacgacgtgcaggcggtgggagagcaggtcatcagcagcaggggcggctccgtgctcgggaagaagaccatcctcaagagtgaccacttccccggctgccagaacaagcgcctcaccccgcacatcgacggcgcgcccaattaccggcaggcaggatcactgcgtgttcacggtgttgcaatgccgacaatggaaggaattgtgaatgtgctaaatcacattggggcacaaaagaagggaaagcaaacccgagttctatggcatagtcttcgggaggaaccagttatctatatcaatggtcgcccttttgttctacgagatgccgaaagacccttctcaaaccttgaatatacgggaatcaaccgggagagagtcgagcagatggagtttcgtttgaaagaagatattcttcaggaagcttcaagatatgggaataagatcctagttactgatgagct

SEQ ID NO: 22596 - DNA, 447 bp, Zea mays
  Clone ID: MRT4577_120607C.1
aattcggcacgaggccgcggtcaccggcatgaggaaggtgaaagagggcacgtcgcaggggttccagtggatcaaggacaagtgccagcggaagaacggcggtggcaacaagaagcagcagggctccgaggtcccagggtactgaccccccctgtcctcgtcacgtcagcgctgttgcttggcttcgacacgctgtctgtctgctgcttccggcacacagcaattttttctatatttttttctcggttcttgctgttgcctgttggtacgaatagtatactgcgtataggttgtgggagtggccggtgatctgatctcggtgctggttgcagttgttgagtagtttcatcgtacctgatatgtctccttgatacttgaatggtcacttcgatgtatataaaaagatatttataaacttgtatgttcctgcttcgtaaaaaaaaataa

SEQ ID NO: 22597 - DNA, 287 bp, Zea mays
  Clone ID: MRT4577_120608C.1
ctgggaaatatttctagctagaggaaaaatgcctggattctgcaagcagggatggtggagtggaaatgacagcacaccagtctcagctcagccattatccacacgtgttcatcccagcaagttgcttcatgcttctaggctttgtgtcatcatccatagtatagagtgtttctagattgcctgatgtcactcacactacgtcactgggcaggtgtgtggtacactagctctaacatcaagcagacctgagtttgaatcctgggctcgtcttcaagcaatgggctctt

SEQ ID NO: 22598 - DNA, 142 bp, Zea mays
  Clone ID: MRT4577_120609C.1
cttatgtaatttttctaaggtgggggccatataattcaagtgggtggcctttcaaaagacattacactttggtgataacagttgcaacatcccaaaaagcgctgtcttctgtccttagcaagccaaacatatttacctttac

SEQ ID NO: 22599 - DNA, 320 bp, Zea mays
  Clone ID: MRT4577_12060C.1
tctgaatcgcgagcgcccttttttttttttttttttttttttttttttttttttttttttttatcaatatatatttactacattatcataaatatacagaaacaatattgaattacatttataccttcggctaactggcggaaaaggaaccgacctaaaggggaaaaggctatttagctctcattggttcatccataaggcaatagtaaatataaagggcatgaatgtaaatttacacaggctgcgccctgtgcctataaatagatgaacaatatccccgttctgttcacgctgactgttactggcttgggcataaaact

SEQ ID NO: 22600 - DNA, 1384 bp, Zea mays
  Clone ID: MRT4577_120610C.1
gcgatcttgttccctcattgtcatcttgaaagattcctcgtcttctgacactatcaaaggttataagctatgggactggaagagcagagagcaaccaagtatggaaaagcctgttattgtgtccaaagatgaaagaaaaatacttctttatgaccttaccccatgcacagaatattctttcagagttatatcattcacagatgatggggtacttggccattcagaatctagatgccgtactgaaagtaaggagatatttgtcatgcgtgcaccaaagaatgcagtgggaggaggggctacacatgcgcaaaaaaaagacaggaaccagtcttgtaagtcaactgggttcaagatccgagatatttggaagaactttcaggaagctttagatgcagaaggctgttttgaaggattttctgaagatgtacatgaaggttcctgcagcagaagtgttacagagacagagttatctggagcttgtcgcaaacttcatttcaactcatcttctgtccccgacctaaacgccgaggttcctgtacccgtggactacactgagaaccattattattctaagaagggacttgtgaggtcaaatgacagtggcgactctgagacctgcgccgttggccagactgcagagccgcctgcagttgaatctcggcaagtaagcaaggtgaatagcgtaccagttaataaatgcgagcagaatggtgcttctgctatttgccatgaaaagatgctctccggatcgacgaggcaactggatggggattatgagcactgcgtaaaggtagtaaggcagttggaatgcgatgggcacatcgaaaatggtttcaggatgaagttcttgacatggtatagtctaagatccacagaccaggagcgcaaggccgtgagcacatttgtcagaacgttaagcaacgaaccaagcagcctggccgagcagctcgtcgattctttcggagaaatattaaacagcaagaaggccaaaaccggtttctgcagcaagctatggcattaggacaaaaaggactagatctcaagatactgctaactcactgattatccatatttttcactgaccggtgcagtgaaattctagtttattccatcaaatttgacagcgatgaaaagggggcatctgtgagaataggagattattttgggcagcaagtagcctgctctgaaataattcttttccatcaggaagtagtggaaacttgattttcattggattacctgggtgaatccaggaattattgtagaaggttgtctttttttcccctttgttgttgtggttcgctgagaaattctttggagatagcagtccgttggttattctgggttattatatatatcatggtaaatggaatgtgatggtacg

SEQ ID NO: 22601 - DNA, 177 bp, Zea mays
  Clone ID: MRT4577_120611C.1
cccacacgtactcctacatgtacaactattttaccactaccaacataccttatccatgagtatagatttaatcgccaataactacatacctatacatactatcgaaaatcattacattcacaactatctcccatatactatgatccaaagaaaaattcacacttaccatcctgtcac

SEQ ID NO: 22602 - DNA, 291 bp, Zea mays
  Clone ID: MRT4577_120612C.1
gggggcgagatctagatagcctctactgtaccaacagacggtgtatatcaaggacagaggaagcatcctgagtacagaaacgaattggagtaagcacctccaccctttggatcgaacaggtgcaacaaaagcgcatgattcgcccacctctatctatacgccgattatctgtaatgtcagacaccatgctgggactgtcggactggacctccgtgtactagggactcctgagggctatgacaggtctcaactacatgatgtaggcggccagcaccgtcagaaaattgtcat

SEQ ID NO: 22603 - DNA, 269 bp, Zea mays
  Clone ID: MRT4577_120613C.1
cttgactacatgttctttgagaagcgaggcggcgctgggccctctgccatcaccagttagaggccaccatggtgtgaggcgaccatcacctcgaccagacactccagatggtcacctgccctggcccctcctctgggcagcccctttcctccatgtacactgcaggggacagaaggggggccccatccctaccctactccctggccgcctgcccctgtggttcccaaggaggggtatgtatgagagccgctctcctgctacctcccacc

SEQ ID NO: 22604 - DNA, 585 bp, Zea mays
  Clone ID: MRT4577_120614C.1
cgggtattaaactttgtttaggcctcgttcgttttggacgtttcagcccgtttctggcttgttccgggtggaaagaaacggtcgggattagaatctagccattttataatgagctattcgtttagacccaaatcaaaaacgggagtgacctggtttggagttttttctatcttttatagcccggtacgaatcctgaccaactatcctccggatcggatcttggcaacgacgcggaacatcactggtttgagtgaaccgaccggattcactgaatccttgccttggaatcgttcaggttggaaccgaagcccatcgtaccgaatgagcccttagccggaacgattccgggtgcaatccgacacaaacgaacagggcctaaggagaagaggaaggggtttcaactttcaactcagtggtaactattgtgtcttgtggcttggttgttatggaagcatcgtaatgcctgtttttttatagaatctcccctagtgtgaccagggatccttgaagacatcaaggaagaagctaggctgtggtgcttggcaggggcgtcgggtttgagaaagatttggcctttgggggggg

SEQ ID NO: 22605 - DNA, 328 bp, Zea mays
  Clone ID: MRT4577_120615C.1
tttttcttttattggtgttttttttgatgggatgatggaagcaccaccgccaaccggattggccgctcaagctatgagggggtacttatttacagctcatggctgggccatggcgatgctgaaagacagttttctatcgacacacaaggtgaacatactacctaaccaggttaggaggctcgcctggtcgttgttatttgcaatcacaaacttacctatgctgttaaaaaggatcaccatcttacaatggcgattttgatgaatcatatacccagccattccccttttggggataaatgggagcaaggcggggcttgccttggtgctt

SEQ ID NO: 22606 - DNA, 630 bp, Zea mays
  Clone ID: MRT4577_120616C.1
ttttaattttacagtcatgctgtttatattactatctgtttagtttcaattgttcagtcattttatatgtttatcatatttatatgatttatatgattcatatgctttgtgttcttattatccacattgttatggatatttttgagatcttgatttctatgattaattatcttttatatgttatcatcataatgttaatttatagaattaaaatgatacggaaaatgcctataattataacacggtcaagggctgctgtcaccgggctccgtcgacgataccaggaggctggttctcggcaacgcgctcacttcagaggagcctgggcgaggaagctggacgcgtcggaaacaagagacggcgagttccacctcctcgacgggagctcggtcgaggcgccattcatgtccagcacagacgacgaccagtacattgcatcgtacggagacttgctcaggctcccgtacgagcaaggcggtgacaagcactcaagcagaggcagttctccatgtacatcctcctcccggaagcacgagactgcctccgggccttggcccggccgagaagctgagcgccgagcctgggttcctggacaagcacatcccaacgaggaaggtcccagttggggag

SEQ ID NO: 22607 - DNA, 428 bp, Zea mays
  Clone ID: MRT4577_120617C.1
ggccaatatccctttttttttttttttttttttttgtgtttttttgagggtttatccccgttatttccccccaccagaaaacaccaaaaacaaaacaaacaaaaaaccaaaaaaaaaaaaaacccaaaaaccccaaaagcaaaaagaccaaatcgcccaaaaagcccaacacgcccgccaagcaagaagcccaaacccaaccgaacccaatgccccaaacgactaacatgtagtacaactagaccgactcgggcactatgtgaaggccctgaaagccctcaaagtagtccgcgacaaccacgcaagcagagccgacaacccacccagccttgccctcctagccaacctagcaaagcccacccaactcgccaaagagctcaagagcgggaacagtgacaacgggaacaaggcggacagcgcagaaagcc

SEQ ID NO: 22608 - DNA, 391 bp, Zea mays
  unsure (1)..(391): unsure at all n locations
  Clone ID: MRT4577_120618C.1
aaacaaaagncnganncgcagaaacaagagaaaacagaaacaccgcgaaaaggaaggccanaacaccgaacaaagggggggggggaacnanaaacacnnncnaancaaannaaaaannacacaacccngaaaagggnngagcgaacacaaacccaagaacggaagcgcccaccaggcaaaccaccaaacaagaacgcagcagcaggcacccaaaacccgncgaacaacgagagcgcggggnggaccgacgcccgggcaaaaccgagcggcacaagcgaagggaaaagcggngcaaaaaagacacacagaggaggaagagcagaaggagccccagaaggaggaggaaagaagnagcaaaangggagaacccagaccccggccaggaagacaa

SEQ ID NO: 22609 - DNA, 779 bp, Zea mays
  unsure (1)..(779): unsure at all n locations
  Clone ID: MRT4577_120619C.1
ctcgaagccggccgggagatttcttctttccccaactgcaacaaacaaaacagttgaagaagcaagatcaagcactgcatacagctctgctttgctttacgtctacttcttctacttacttgttcagcttcaaccccctccactttcccttatcgtcgaatcgaagaaacatgccgtcaagttctggtcgagtagcaaaggcgctcgccgtcacttcagctttcctgggatacacagctgctcagtcgcagcctgcataccagacccgcaatctcacccccgatggcttctggcacaacagataccatgctatcctgtctatggctgcctacggagaataccaagatacctgccctgtgcagcattcactgaagcaaacaagctcaagaacttcccagacagcacccgccctgcctggactgttctcgagacatgggacactccatcaggatgctctggcttcgctgccatcgtgcccgagatgaacaaggccttgctcgtcttccgaggaaacgccgacatggaacaaaaccttccattggaagtctcttcatggaacgagcttggagaaggcatcggatcaacatgctacaactgcacagtcaactcgtatgccttgcaagggtacctcgaggctaaggaggctaccaacaattggcagatcaccagagatgcatatgccggncagggactcgtcttctccatcaccggtcacggtctaggtggtatgcactcccttattgcctctgcagacttcaactaccagcaaatctgctact

SEQ ID NO: 22610 - DNA, 326 bp, Zea mays
  Clone ID: MRT4577_12061C.1
tttatttttttttttttttttttatttggatttttgttttttttttgtttatttttttttttttttttttccctttaaacaccaaccggccttttttttctcccgatttattccctattaaaacccacagaacattacgcacaagatcttaactgcaaatgcaacgaaagcttgtcagctagttatcaagaaaaacaaaaaaaatagtttccacctttattacgcaaaaggcataaaaaaaacaaaaagtccccatggacattcaacagtatgctcacataagaaaggcttggacaaaaaaaaaccttcaaaacaaacggggcccg

SEQ ID NO: 22611 - DNA, 304 bp, Zea mays
  Clone ID: MRT4577_120620C.1
agaaaaaatgcctatgctattccacacaccaaattactcacgctagcatggagccttaggatctgttggtctcggaaacataaagcctaccatatacaaggagattgggtatacatagcatgcccaactagggagttgtacttgaactagtctcgtaacattgaagagtctggctatccatcataatgaaaagcctccaccattgcatgtcaaaagatgtaaaacattggaaccgtggaaacgaaccctgatgcattagcctttaaatcaagaacccaaaaggatgctttgaacctgaatgaac

SEQ ID NO: 22612 - DNA, 570 bp, Zea mays
  Clone ID: MRT4577_120621C.1
ggtgatcagagtgacctccatgtaattatatttgatgaaattgatgccatctgcaaggtgaaattaatttccctttatgtttatgttgtcatgtgtatcatactatttttattgtccagctttaacagggtgccagactctcaaatacgacaaggtgacagataaaagataactttgaactatcaatattcattagataagtacagggtgttcttaccggtttagattttggtggagtctccatgggtaccagtgcttttatccctaagttgcatttgagattaaaatcccttataattgtttcatgagctatcctcttaaatgtgttgctatagtgggttatcatgtattataggaaaggccctggaaaaattacgaagtttaagtagtatgggttcttctgaatacctttgattacatgaaactgaaacctattacctaggcaatatacataatctctctgaacatttttctaatatacctcctttctacgctaagctctctctctcttctaggtcttttttaataccagtttcgttctattcatgcacaactgtcagtttattttga

SEQ ID NO: 22613 - DNA, 112 bp, Zea mays
  Clone ID: MRT4577_120622C.1
gggataaaatccagttttgtaagggaatttttgatcctgacacatgtttggttcacagtcaacaacttaacacaaatttctgattttacaagaaaaaattgtactttaaaac

SEQ ID NO: 22614 - DNA, 374 bp, Zea mays
  Clone ID: MRT4577_120623C.1
gcgtttcacacgcccgggttgagaggccgtgaacaagcgcggcgagcggggcggctttcggaaggagcgccacggggtttatgatagtaatgccggagggggcccacaagaccgatcccgagaacccctgacatgcgggccaagcgatcccccgtgcccactgaggcacagaaaacgcccgcgccgacaccgagcaagctggttctatgatagacggcagtgatccgaccacaggaacactagtgcgaacaaccataggagggaagactccaaagccaaatacgactatcaggaccaaggaaaaggacgaagcgggaacaggagcaagtggagccggattgcacgcataaatggtgcagagaggcgagactgaa

SEQ ID NO: 22615 - DNA, 262 bp, Zea mays
  Clone ID: MRT4577_120624C.1
tatcttatcggtacatctatccttctatgctcattctcatcccgagacaggagagggcaacgatgctgctcctgagctcccccttcgtgaccgtgtcgacgccgccgtccggcggtcagctcccatggggatcgcccggcgctgcggatccaggcgagaagacaactgacggcgcggcaggtgacgaccaaggcgaactagacgcgcttcgcgacatgtgccactgcacgacctgcactcagaatcttccccgagatgagac

SEQ ID NO: 22616 - DNA, 396 bp, Zea mays
  Clone ID: MRT4577_120625C.1
ctactcgtgggaccaggctcgggctgcggtacagggccaatgttagggaccctttccgtgatagaggaaaagttcggggtgaaccaaaatgtgtcagccaagacactgatcctgtgtgacactacctatgtccaagggctcttcgtacatgggatgacatgattgcttatgacagctatgcaagtcatggccgtttccaagcgcagggaggaggagatcctgtttacagggggtacagatcccgctcctctagtagtggcttatgtggtcatagttctgtagactatcgaaagcgtcatcgttatcatgatggacaatgcttgataaagcacggatgatgctgcaaccttttctggctacggcataaggattatgtgcttgtgcattccctgcctt

SEQ ID NO: 22617 - DNA, 371 bp, Zea mays
  Clone ID: MRT4577_120626C.1
cccactcgttagtcgtatgcgtttttttttaatggtccagtagttcgattgaggcactactgagtctttgtagcaaacatcatttaactcatgtgaaaccaacattaaaggctggtgctgatgctgatggatatgggtggccatgctttggcctagggtgtagagtactaaggtgtgcgcagaaactgatgggagggccgtcggtgctgtttagtatattcgtctaattgggcagactgagagagacaagatatcttttgccatcacgagagacatataatttatcctttcgaagggatgggatctacacaacagattcaagtaccctgggaaagctcgcaacacgcgcgcgcgctggcgccgatatttct

SEQ ID NO: 22618 - DNA, 463 bp, Zea mays
  Clone ID: MRT4577_120627C.1
catcatcaggtttcggcgccggttacagcccgggtacgacgacgggcggcggtggcgtgcccagcggttacactccggggatgccgggcgccggttacggcgcagcgggaggaggggtgtcgggcaccacgggagggggctccggctcgacggtgctgaacgcaaacaaccccggcggcaactcgatgtacggcggctacgacaacacggcggggctcaccgccggctcggcgccgctaccctgcggcggcggctggaccgtcctgtgcctcgtctggatggtcaccttcgcatttgtcaaggagaaagtgtagtgtggaaggagcccgcctcgaggggctgaaaggaataggatcaccctgccacgtgtttgttactcagttatgtagtgttgtgttgtacaaatgagtgaaatgttttttccctttaaaggccggatatgagaagactagatgtttgtgtc

SEQ ID NO: 22619 - DNA, 475 bp, Zea mays
  Clone ID: MRT4577_120628C.1
aattcccgggtcgagacacacgcgtgcgccgacgcgtacgattgacaccaactagcaacatagaaagcacaatagtgtaccaaccgtggcagctaatatattcagcttccttatgcttctagatcactctgctatagctgctaccgtaaccattatcccacactgctcacaagctactatagcttactttcttcccccatacctatcaccaaccgcttcttcataattacgaaaacccaatcctttaaccttacacgatccaacatgcaatcaatacaacgtatttcacctttatcaaacttgttcctccaacaataccaagtcttactacagtagctacctcaaacccatttgcctactcacaacatctggttacattaaatccactaactatggctaactatgctgcgtacctactacaacgaccacaggtacttaatacattggcaattgcttacccataactctgctgctt

SEQ ID NO: 22620 - DNA, 228 bp, Zea mays
  unsure (1)..(228): unsure at all n locations
  Clone ID: MRT4577_120629C.1
agcttctactactacgtaataccttaccttggagcagaacgtaacgtggcccggccggtcgatatgagatgtgtaaagaaagggaaaaaaaaagaacgcccagttgcaccatgcangccagccgcnggcgtggagtcagaacgnagcagcagcacccggctttactgactcgttntnttgtaatgtaatacctacctgcagtctcaagtaaatgtgtgcctgttatta

SEQ ID NO: 22621 - DNA, 440 bp, Zea mays
  Clone ID: MRT4577_12062C.1
tgtttggcgatcggctgctcgacggaggaatccccctccctggagagcgtagtggcaaggcagcgctgctttcgccactgcgatcgtgctagaacgagccaaaaaaaaaaaaaaaaaaaaaaaaaaaaaaaaaaaaaaaaaaaaaaaaaaaaaaaagggcggacgaaataaaaaaaccaaagcaaaaaaaaaaaaaaaaaaaaagggcggacgctcaaaagagcgaaacttaaatacaattaaatggccggcattatacatcttatgggatagggaaaacccaatcgactgccaacttaataacaatgcagaaaatggaaaaacccggaggtgaccaaataaaagaaaaggtgcagaaaagatccgccttacccaacagggggtacaaactgaaaaggccaatgagacacgccctgcacaaaaacattaaacccggaagg

SEQ ID NO: 22622 - DNA, 325 bp, Zea mays
  Clone ID: MRT4577_120630C.1
ataaaggaaccaagcggagctcgagggccgcttttttttttttttttttgtgttgggggggtgaaggtttttcatatgtgcttaatgtagaagattaataaaaatcagaaaaggggagacgcgcaaaggaattggtcagaggttgattaaaaaaagagctgtgggaaatggacagcaaggaagaaaaaaagataaaagagttgttaagggagggggggagtagggcgcctagtgggcagggagcggatatggtaggaacaaggacctgagagccctgataggctggtagttaaaagagagagagaggccaagaccaaatggactg

SEQ ID NO: 22623 - DNA, 300 bp, Zea mays
  Clone ID: MRT4577_120631C.1
cgtgggtaagctgggaaaactttttggggtattcattcggacaaacatgcgggcatcaaaaaagggggggaattatgacacgaaggaaacggggcctaaaaaaaggtctccaggtggatcccaacgggatgcctacattatggccaaaaaaatgaccccagcaacccattcaagacgaaatcaaggggggggggccggggaagccccaacaccacacatgggaagaacgggcccacaaccacaagtctcctcaccactggggaaataagggccctgctggggcccggacccgtgggttcc

SEQ ID NO: 22624 - DNA, 1327 bp, Zea mays
  Clone ID: MRT4577_120632C.1
ccgggatccctgtctctcgctttccctaacccacaccagaataccagatcgagcaccgatctagggttgcacctcttctgctagccggctggcgaggagccgttcggcatctggacgcggccaagggagatgaagcccgccgctgaccaccgccccacggcggtgctcctcactggcgcgctcgacgagaccgtccgcgcttggctccccgacgacctcgctgccttggggtcccccacacggggccacgcgctcggagtcgtctccctcgccgcccaccccgccggctcgctcgccgccgccgtgtcgctcgacagcttcatccgcgtctttgacgtcgacacgggggcatccgtcgccacgctggaggcgccgccgtccgagatttggggcgtccagttccatcccaagggtaatgctctggccgcagccggtggtggcagtggatcagtgaagctgtgggacacggagaagtggaaggcgatcaccagcctcgccgtcccacgcccggagggagctcgccccgacaagacaggcagcggcaagttcgtcctgtcagtcgcctggagccccgacggaaggctcctagcatgcgggtccatggacggcacgatcgccgtctacgacgcggtccgcatgaagttcctgcaccacctggagggccaccacatgccggtgcggtccatggtgttctccccggtggacccgcacgtgcttttcacggcctgcgacgactgccacgtccacatctacgacgccagggagaagggcctcgtcggggccatgtcgggccacgcgagctgggtgctgagcatcgacgcgagccccgacggcctggcggtggccacggggtcgagcgaccgcaccgtccggctctgggacctcaacatgaggacctcggtgcagaccatgagcaaccactccgatcaggtgtgggccgtggccttcaggccaccaggcggtgccggagtccgagcagggcgtctggctagcgcgtcggatgacaagagcgtctccctgtacgattactcgtaggtttttgtttccttataaaccgttgcaaatgcctctgttgtaccgaccagagatttgaattcgggcatggtggttggaagaattgttgtacgcagcacagtagtcgaggtgttaaattgcaaggaaagagtttatttcgtgttagttattgtaccctggggttgttgacttgcttggttgcaccgaaaggacgtggacgctggtcgtcgggtggtggtgtgcgtgccttcttgtctcgctgctgaaagctcgttaatacttgcaccttttgcattaacaggaggcgtggaac

SEQ ID NO: 22625 - DNA, 535 bp, Zea mays
  Clone ID: MRT4577_120633C.1
atctggacgaggccaagggagatgaagctcgcggggctcaagtctgtggacggcgcccacgaggagtccatctgggcggcggcgtgggcgcccgccgctgaccaccgccccacggcggtgctcctcactggcgcgctcgacgagaccgtccgcgcttggctccccgacgacctcgctgccttggggtcccccacgcggggccacgcgctcggagtcgtctccctcgccgcccaccccgccggcgcgctcgccgccgccgtgtcgctcgacagcttcatccgcgtcttcgacgtcgacacgggggcatccgtcgccacgctggaggcgccgccgtccgagatttggggcgtccagttccatcccaaggtgaaatggagaagggtggaagaaggacaaagatgaaagaagaaggaactgagatgataaaaatagggtcgcagaaagaaataagacgaaaaaactttcttgtttatttgtactgaaaatatgtaacactctctttggatttaataaagtgtgtcaactttagacgaag

SEQ ID NO: 22626 - DNA, 573 bp, Zea mays
  Clone ID: MRT4577_120634C.1
gattcatcgctaccgcccaccgctgccactgccagcagcaaggtcagaagcgccgaaagcagcaggaactgttgcgagcgttccatcgatcgcccccagcgcgccttcgtcctgttccagaccgtaccagcgttgttcgggtttaagctgaggtaacaactatttctcatagccgtcgagctggttctcgttgccgccgaatttataacgccaggtgacccgactcggacgtgtggccaccagtcgtagtctagtccaccagccagcagctcgccggctgcctcgctcctgctctgcactgcactgcactgcactggtcgccgctcgagctacccggctgtagcaactagcaagattcgttgggtccgtgaacgtgcagacgcaacacactagactgtctagacacacattatcagattcgttctgcagtacaataatgggagcctgcaactcgtgcgaggccacggcggtggcggcggcgccggggccggcgacggcggaggcgagggtggtgctcgcggacggcgcgctgcggcggttcccgggcggcacgcgggcgtcgcaggccgtgaa

SEQ ID NO: 22627 - DNA, 171 bp, Zea mays
  Clone ID: MRT4577_120635C.1
gcgtcaattcattctatgcgctcatggggcttgcctgtgctgctggacagttcctaggtgtgttggtggagatcatacacagtctaccatacacaaatccaaaagttggcctaggagaacgccctacggttgcggacgtggtagacgatgatgctgaccttaccggtgggg

SEQ ID NO: 22628 - DNA, 265 bp, Zea mays
  Clone ID: MRT4577_120636C.1
ctacgaacccaatcgaggtcaagtaaaacccaagtcctaaatccgaacccgccaatggcgtttcctgtgcgtagctacccccacacctcgggcgggacgacaataacagttcttcctatttctactaaaacatgcaacacctgcgccatctctagagtgaaaaatgtatgtcactaggacacgcaatacctcatggtcaatgcccatgtatgcacccaagcaaatattacataggtgatccttcattctgactatagacgaacaa

SEQ ID NO: 22629 - DNA, 887 bp, Zea mays
  Clone ID: MRT4577_120637C.1
cggaaatttgttgggaactttcccccattgtttcccttgacgtacttttttatggcccccgaggttgacccctttcttttctttagggcaaggattgccttttcaatttttttagggtaaggagggttcccccccggttttttttccccggaaaattttttttcctttggggcctttttttcctttggggccttttttccctttggggccttggcccccttggcccccggggccttccctggccccttggttcccggggccttaaccccaaaaaccttcttcgttgacatttggggttccttttttttttcccaacccttttcggaaattcccttcccttccctttttttggcggcggaagcggtgggtgaaaactgaatttttttttttttttttttttttttttttttttttttttttttttttttttttttttttttttttttttttttttttttttttttttttttttttttttttaggtcttagagcattcttgtattgcaaaaggtgaaatagcaagatggtaccaaataaatagataaaagtgcacatgctaacagatctcaacagttcacacgataacagcaacgatcacaaacaaaacttgtgatgatgaaaactatgtattgctaaagcaggcgcaggatcgcatcatttttttttgggagcccccttggtcaccttggcgccggtcgggtcctttttcttcacactcttgataactccaacagcaaccgtctgttttatgttacggacagcaaacctaccaaggggaggataccctgagaatgtctccaccaccatgggcttggggggggtgatctttaccatactaacataaccgttttttaagaaatttggctgcttcttaaacaccttgccat

SEQ ID NO: 22630 - DNA, 1551 bp, Zea mays
  Clone ID: MRT4577_120638C.1
cccacgcgtccggttgttctttggcttctgatttcaacaaaaaaaatggtgtttctctaaaacccacaaagccctcctctgctctccatccctgtctctcgctttccctaacccacaccagaataccagatcgagcaccgatctagggttgcacctcttctgctagccggctggcgaggagccgttcggcatctggacgcggccaagggagatgaagctcgcggggctcaagtctgtggacggcgcccacgaggagtccatctgggcggcggcgtgggcgcccgccgctgaccaccgccccacggcggtgctcctcactggcgcgctcgacgagaccgtccgcgcttggctccccgacgacctcgctgccttggggtcccccacacggggccacgcgctcggagtcgtctccctcgccgcccaccccgccggctcgctcgccgccgccgtgtcgctcgacagcttcatccgcgtctttgacgtcgacacgggggcatccgtcgccacgctggaggcgccgccgtccgagatttggggcgtccagttccatcccaagggtaatgctctggccgcagccggtggtggcagtggatcagtgaagctgtgggacacggagaagtggaaggcgatcaccagcctcgccgtcccacgcccggagggagctcgccccgacaagacaggcagcggcaagttcgtcctgtcagtcgcctggagccccgacggaaggctcctagcatgcgggtccatggacggcacgatcgccgtctacgacgcggtccgcatgaagttcctgcaccacctggagggccaccacatgccggtgcggtccatggtgttctccccggtggacccgcacgtgcttttcacggcctgcgacgactgccacgtccacatctacgacgccagggagaagggcctcgtcggggccatgtcgggccacgcgagctgggtgctgagcatcgacgcgagccccgacggcctggcggtggccacggggtcgagcgaccgcaccgtccggctctgggacctcaacatgaggacctcggtgcagaccatgagcaaccactccgatcaggtgtgggccgtggccttcaggccaccaggcggtgccggagtccgagcagggcgtctggctagcgcgtcggatgacaagagcgtctccctgtacgattactcgtaggtttttgtttccttataaaccgttgcaaatgcctctgttgtaccgaccagagatttgaattcgggcatggtggttggaagaattgttgtacgcagcacagtagtcgaggtgttaaattgcaaggaaagagtttatttcgtgttaaaaaaaaaaaaaaaaaaaaaaaaaaaaaaaaaaagaaaaaaaaaaaaaaaaaagcggccttaaatggagaagggtggaagaaggccaaagatgaaaaaagaaggaacttagatgataaaaatagggtcgcagaaagaaataagacgaaaaaactttcttgtttatttgtactgaaaatatggaaccccccctttggatttaataaagtgggtccccttttggcgaag

SEQ ID NO: 22631 - DNA, 1081 bp, Zea mays
  Clone ID: MRT4577_120639C.1
cactcctatagggcgattgggccggtcgaggccggccgggcggcccccacatcatcgcctttcctcttctcaccagcctcctccgacacgcagctagcccacgtaaattgcaccgatcgagacacagggaacaaaggcaacagccatggcgggaacccgtgccctgtacctcctcgtcgcggctgtcgcggcgctcttagccacgcctgcggccgtggacgcggccacgctggcggagatctgcaggggaaccgcgttccccgacatctgcaccagcacggtggggagcgaggcgcagagcgccggggtgttggacgccatggcggtgttgcggatgcaggtggacgcgttcaacaagcgcaccgaggcggcgagggcgcacgtcaaggaggccgccgtgacggcgtcccccaaggcgcggacggtgctggacctgtgcaacaacctgtacctggacgtggaggacaacctgggagcctgccgccgcgccatcggcttcaaggacgccgtcaccatccgcgccaccatgggcatggcggcgcaggacatgcagaactgcgacgagcagttcaggcagatcggcgagaagaaccccatggagcagttcgacgcgtcgctcgtcgagatgtccgagaactgccgctcgctctccaacatgatctgatcgatctccttctccacggacgacaacagagagccgggcgttttgggccctcgcatcgtttgtcgccgctgctaacgttcgcatgcccatgcccgcgagcgcgctctcgcgcgacaataactgatgagttaagtttgttttgctttgaccatctcacatcgttatttcctgtagagatgcgttaatttggtctcggaaacggggaggcgaattgaggtggaatatttataattcaagaaacacagttttggttctacaaaaggatcgtcgatcatgctgctctactcgatctcctctcctcgttacgattttaattaccgttttgtatctatgagaagatctagcaattatagtctatacttttttatagcaaaaaaaaaaaaaaaaaaaaaagggcggcaaagaactagtgagctc

SEQ ID NO: 22632 - DNA, 210 bp, Zea mays
  unsure (1)..(210): unsure at all n locations
  Clone ID: MRT4577_12063C.1
ggcatcnaattagggaaaaaaacaaatagtgatcatacattttttttcacaatatcagttatgctctacactgaacagttttgatggtgttaaaattacatctataattgaacattataatagaacatattattatttgaaaaaattccattacaaagtaattaatttttaaattttttttactgggttcgttttgtcaaagagtttgta

SEQ ID NO: 22633 - DNA, 464 bp, Zea mays
  unsure (1)..(464): unsure at all n locations
  Clone ID: MRT4577_120640C.1
gttagcctttcgatttgacaatccatccaacccgtcttcctccggtccggcctgtcgcctctccacatcgtcgaagagaaccgccgctcgccgctcgcagctcgccgccgttaagttcaggctcctactttgatgcaccttggttgggagtgtatccactgacagtttcctcctaaggggatctgtttatcgccgatcacctgccgagttaagatcgggaggtaggaggagcttttgggggagtggggatggnttncggngggaangngnagntgcgggangngcagnctccatcgaaggngatacacgtgaggaacctgccgtgggagtgcaccgacgaggagctgaccgagctggggagcctcttcggcaaggtcgtcaacaccaagcgcaacgtcggcgccaacaggaaccaggcgttcatcgaattcgctgaccaaaatcaggtaattgctatgatatca

SEQ ID NO: 22634 - DNA, 237 bp, Zea mays
  Clone ID: MRT4577_120641C.1
cattaacacacggcacacgcacggaacttattttcatatagagagaggacagctattgggggcgagcatctattcaactaactaactaacttcataccattctcacatctcttagccaaccctacagctctagaaagcaaatcaaaggataacactacgcattgtctatgcttaccagatcagttcaacagactaacacatgcgtaaccacctatacgccggctctgaccttgcaac

SEQ ID NO: 22635 - DNA, 453 bp, Zea mays
  Clone ID: MRT4577_120642C.1
ctgaataataagggggaacaagctgtgctcttgttattttctttaaaaaaaaaaaaaaaaaaaaaaaaaaaaaaaaaaaaaaaaaaaaacctgcccgggcggacgaaaaaaaggaaaaaaaaaaaggacccgcccgggcggccgctagaaagggccgaactccagcccacggggggcggaaccaaggggatcccagctcgctgccaaaaatggcgaacccatggcaataccacgcccctgcgagaaaggaggctcacggtgcaatgcccggggagccaaaggcgggagccaacaagcgtaaagcggggggggccaactgagcgatctacctcacataaaccgggtgggccacctggcccaatgaacaggccaaaacccggggagacgcggtgcgtaatatgaagcgccaacccgcgggcagaggcactgactcgtttggggcgctcttccggt

SEQ ID NO: 22636 - DNA, 366 bp, Zea mays
  unsure (1)..(366): unsure at all n locations
  Clone ID: MRT4577_120643C.1
gcgccaaacagcccaggaacngcagcgaagacgncaccaagcgggcccacaaaaccanccaacacgcgcgacaagaccagggaacagccagcgaggcaaaaacagaggnnggganacaggaaacccagnacacagccgcgggggacgnaaagaagccgcagcagcaaaaccacaaaanaggcaacaaaacganaggagcccccaagaaagcnccgccgccaaanacggcaacaaaggcaccggggccaaanccagcngncaaaggcaacagcaggaagccnnncgccccgcgggggccccaanagagacncaaaagccacccgaaggccaaaccacaggaacgaaccacggaccacagacgccaaa

SEQ ID NO: 22637 - DNA, 1173 bp, Zea mays
  Clone ID: MRT4577_120644C.1
ctgtgcggcgctcgaggcggccgtcaaccgaaatccccagccccggaggtcgattcgtgcgccacaccatagggcagggcccagggagcccggcgacctccatctccatggccgagtgcgaggagctggtggagagcggcggcgacgaggacatgccccgcgtggtggccgccctcgccggcatcctggagcgcgtcgcgaaccgcaacgacgcggcgacgcccccgccgcggaggtctcggccgtagccccggcgtcggcgttccgggcgacgacgaagccgggcatctcggtgcgcgcgtacatggcgcgcatcgcgcggttcgctgggtgcagccccgcgtgctacgtcgtggcctacgtctacctggaccgcctcctgcgccgcggccgcctcctggcgctcgccgtcgactcctacagcgtgcaccgcctcctcattaccgccgtgctcgccgccgtcaagttcatggacgacatatgctacaacaacgcctacttcgccaaggtcgggggcatcagcctggtggagatgaactacctggaggtggacttcctgttcggcgtcggcttcgacctcaacgtggcgccggagacgttcggcgactactgcgccgtgctgcactcggagctgctgtgcgccgaggctgcccccgcgccgctcaggctgcagcactgctgcctgtccgaggatgacgccggggccggatgcagcgcccagcagcagctcgctgcatgaatgaaagaaacctaagcccatcatcgatcgatcgatcgatcgatcgacgactcatccggtggcttgggcgcaggagttgtaagccggtgcaaattgttccaaattattagatgttttgtcttttctagattataaagctttcgatatatacacacatctatatatacagtgtgtctagaggtgtagtggtggtgtaggtcgtcgtcggttgtaccagctgctacagtagattgtgtatacagtgctggtgtctttggtgactttctgaatatgtgtgcgtgttcgttcgttgctagtgagctctcggggtacgtagttctgattggatcttgggtggggtcaggattcttgggaaatttttgttttcaccattgttcgacggatcatgcatgcatggatcaatgagaaaatggatggatcggcttgggattctc

SEQ ID NO: 22638 - DNA, 267 bp, Zea mays
  unsure (1)..(267): unsure at all n locations
  Clone ID: MRT4577_120645C.1
tcgagccgccggnccggnagttcccactgctactcagcccattacgagctctctctagacgctgcctcgcctcttgcattccagttcgccgccgaccgcgacgccgcttctggccgcacgaaatgctcgtgccgaaccaatgggctacgccgcacgcctcgtagacaagggccacctcgccgcgacgccgcggtgcgagccgcgccacctctccagcttccgcgaatgagcactcagtcgatacacaacccgctcaacggggaaagt

SEQ ID NO: 22639 - DNA, 266 bp, Zea mays
  Clone ID: MRT4577_120646C.1
cctgcactggctagggcgcactctttgtggtcgctcatgctgacctcagtgttggtgacatcgacgacgacttcaggccgtcgccggagctgtggaggctgtttgttccatgcattgagccagcatccatcatattggccatacaggtgactttcctcaagttcggaggtgtggtgctatggcaggctctccaccacacggctagcgcatgcctcaagcgcgttcgcattcttccacacgtggtcagccttgtgcaagtatggcga

SEQ ID NO: 22640 - DNA, 621 bp, Zea mays
  Clone ID: MRT4577_120647C.1
gccggccgggtcgggaccaatctcctcagatacacctgcagagccaagatgggatcgactcctccccgggcctgccatcgcccgccgccaatggatgcgaatgtgcacgacgccaccggcacgcctgactccgcctctgacaaggccgcttacaacgcggaagccccctccggccaccaacatgaggatgccggccaggactacacgctcgacgcatgttctagcgcacagttcttacgacgccaatctagatacccgcaatcagacgctactacgcaagttccccttgaaggcctgcaacgactgaactggggtgaacaaccagaatggtaactcagcacgagatctgtgcaaacgtgcatagcagaacagatacaaccgcgccatacaccgaatgtagcttggaacgacaatgatatagcatggactggccttttaatcttcatgtgcgtatatgctaattgacgctgccactgctatcatcgtgtcaatcctgatgtcactggaccgctggtggcgcaaacatgaatatcaacaaatgcttctatggccgcagtgcatattggaagcagtaggatgccgctagtctttgccatattctgccatctagcatcatcatac

SEQ ID NO: 22641 - DNA, 194 bp, Zea mays
  Clone ID: MRT4577_120648C.1
gtccacggtaaagcccagcaactaccatcacgacttgcagtcgtcttgtcggtcagacatcgcacaagacccatctgaagctgccctttcaccttcctcccttggcagccttcgcgtcattagccaaccttgttctcgcgtagtccagggagtacacaaaaaacaaagaggaagcaccagaagcaccaccagag

SEQ ID NO: 22642 - DNA, 403 bp, Zea mays
  Clone ID: MRT4577_120649C.1
cctccgtctcctcgctcaggccgccctgctcaaccgcataacctaccccgttgcgttcaggctaagacgaagggcgacccggaggtctacgacgaggagttccgacaggtccaccggcacctcgagtcctcagtgtgcctgttccagcatcaggcgtcactgtgtacaacctcttcctctggactcggctctgtgcgaggggaaggacctcaggcaccactgcctggtccttgatcacgccgggcccctctacctggatgagctcgtggattctgccaccgtgaagggtgactgggtcgacaccaacacgcacgggctgactgcaggattcaaggctcacctcgcgcaggctggtgtaaggccggggcatcggccccttgcatactcccttggcgcgatgcag

SEQ ID NO: 22643 - DNA, 1445 bp, Zea mays
  Clone ID: MRT4577_12064C.1
ttttttttttttttttttttttttttttatcgggaggctccactggagcacatctgcagctgcagccaggaaacgagagttcacaggtaatgttgacagaaccgccaaagaagaacacgatggtaatagcctagtaggtctttcctttgctgcattctttcgtgaacaggagacgccgcagatgctacgtagtagtaggccggtggttgggtcaagggaccaagtaccaaccacacaacactcaacagctactgcctatgagtaaagatgccatatccgtcttcgccgcaagtacattgaagatagtactcacagtcacagggagagggggtggaggagacaaggcaacacagtcaaagaactcgatagaaaccagagctcatcatcaggccacagtatacctatagacgtcgctggaagcaccaggatgattgatctgtacgagttcaggctctcatggcgttccaaggatccatcgctgggtcaagtattttgctgcgtgcgctagtaagcagaccgcgaaacagtgggctcttggaaactgcgagacaactctcagggctacaacgtttgatgagagaacaaacatctcaacaatgaatataacagatgacggaaactcccaaaccatcattgtgaaaagaaacaacttgaagtagcttgaaatgatgacagcgaacagaatatccctataccttataatatcgaaagataatttgagaaaaaatcgcactcccaggagtaacatgaatataaatacgatgtttcccaataatgcatcgccaacaacctcagtgcaattggaaactgttgagaaaatgctcctggaagaagccccaccagctctgtttcctttcgaaaaagatattctgaatgtgtcaagagcaatgtgtatcaaagtagaccggtaaagtattcccttgtcaacagatgatcccatgctcagcttattaaacagaacatggcggtacgcccttgtcttgtgcaggacgagatcaatcaagatgatcatgaactcgcactcgatgtagggatcagcaacagccttgcacttatcgcatttcatcaagcggatgttgcccgtggagtactgcacgaagagcgtcttcacgcgcccgccgcagccaacgcagcgcggaccatcccctgtcgcctgcgcatcgctcatcggtgattccttccgccaccgcacagcctacctcgtgcagcccaggtccagtctccccctcaggcctcagcgtctccgccctatcccaccgggctccgccgttgagcttcggataggcacgacggagtggttgagacagtgtcggattctggtgcaggcgtcgtggtggtggcaggctggcggcggggcgtcgcccagacgccggcaggtgcgcagtggcggacggtcagatcgcggtcgccggccgaaaagcaacgagaaggaaaggaaacaaaag

SEQ ID NO: 22644 - DNA, 373 bp, Zea mays
  Clone ID: MRT4577_120650C.1
aatatggttgtttttgggtttgactttgttaacttgaaagcaactgaattgtttattttttgcgtggaacactctggccgtcacatacgggaaatgccatgaactaacacggtatggggttctgaataatggccaggcaattattggacagaaaccacgggctgacacgaaacggagtgtgaaacagatagctaagcgataggcgcttcaacaattctgaactccgggggtgcgattaatcggcgtggctccggtcaaataaaccatgatgcccggttgagtatatctcacacttggatacgtcaagaagagatgagaatacatggaggagactatgaatcctgggcatgctgcacgatcatgaggcacaaat

SEQ ID NO: 22645 - DNA, 276 bp, Zea mays
  Clone ID: MRT4577_120651C.1
ccccaaaaaggggctcaaaaaacttttaagggaattttgggcctgaaaccccaaaaccggggggggtttttcccccacgggtggaaatcgccttacacccccagttttacttttaaaattttgttccagggggcaaatttaaagttaggggggaatcctttttaatttttaaagtgggccctccaaacagccctaaagttttccaaaaattttattgccctgaaaaaaaaactcctaaatcaaaaagggggtttttaacccccttttgggccccgg

SEQ ID NO: 22646 - DNA, 378 bp, Zea mays
  Clone ID: MRT4577_120652C.1
ttgttttttgcatgttttttttctcgtcttaccatgttcgttatacgcaccgacatgttccatgttcagaaccttataaagggggttaccacaggctaccgttccaagatgaggataacgtacgcccatttacccatcaacgcgtgcatcatcaacttggactgcggcgtaccatataagtgaacttgggtacaaggacaaaaaaggttaaaatggtgtgacatgcttgacagccaaaccatcctccgatccgaaaacgccatagacgagcttattctacatggccacgacgcaaattttttttctacttaccacttcctcatgaaccaaatatgcatgtgaagtaacaagatgtgaacaaggcattggatggcctat

SEQ ID NO: 22647 - DNA, 443 bp, Zea mays
  Clone ID: MRT4577_120653C.1
acacgcgtcccaaaaaaaaaaaaaaaaaaaaaaaaaaaaaaaaaaaaaaaaattttaattttaaaaaaaaaaaaaaaaaaaaaagaaaaggtaaaaaaaaaaaaaaaaaaagggccgccccctttatagtttccaagtttactccccctggcatgcaacgttttacttttttttttgtggcccctaattccatttccttgcccgtctttttccccccccatacctggaaaacccctggcgttccccatcttattcgctttgaaacacatccccctttccccagttggcttataaacaaaaaggccccccccaatcccccttcccaacttttgcccaccctaattggcaaatgggcccccccctttatcgcccttttaaccccgggggttttggtgtttccccccatattacaccttctctttgccaggccctttacccccctc

SEQ ID NO: 22648 - DNA, 1074 bp, Zea mays
  Clone ID: MRT4577_120654C.1
ggtaccctacgattcggctcccgggtccgctccatccaaccacctcatccctctccgcccgcacgagccgccacgggccgcggccgaccgccggctccgtggcctcgacaccagttctcctcgaccgcccctacccgccggtgcctgggccatttcccgccgccgcctttggccaccccccccctttgccgtgggactgccgactccccgccctgctcggcggggtgcgcggccggggtcgttgctgctcgcccccgtgccgctccatccaaccacctcatccctctccgacacgggccgcggccgaccgccggctccgtggccttgacaccagttgacgaggagcatctctactctacagcgcaaatcggcagatgcttggtcaatatccggcggcggcatatgtcaactctccccttatgcgatggaactgccaactcgccgtgctggtcggagtgctctggatcgaggcttgctgctgcgcgccgtgttgggagggaagctgccgtctcctgccgctgggagaagccggggaccctctgtttgctgagggcaaaatctccttccttgcgcaggcactcgaggaaggtgcaatgggctatcagaaccatgtccgacgacagcggtgaccaatcaggcaacagcactcgcctcttcagcgcgatccgttcattctggaaccagttgtctgccaagctgaagaaagcaaggagagggttgccagtgaagatcctattctttctgatcgggttctactgcgctaccgcgttcgctaccgtcatcgggcaaacgggtgactgggacatattgtcggccggacttgctgttgccatcgtggaggttatcggtgcgctgatgtatagggcctcctttgcattcctcggtaggatcgggaacatgattaccgtgtttaattactggaaagctgggcttacacttgggctgttcttggactctttcaagtatgaagtggatgaatttcttgaattcttgtaacccattcaactttcagattaatatatttactgggttttgttggtgaaaaaaaaaaaaaaaaagcggccctcgagctcc

SEQ ID NO: 22649 - DNA, 723 bp, Zea mays
  Clone ID: MRT4577_120655C.1
cattgggtacctcgaggccggccgggacgaacatacaatctgactcgagcgtatctctctcatcggattcgcatcttttgctgtatcacaccaccgtgaaaccccagcaggcgcatcgatgtggcctaaggggcataagaaggcgggtgcgaagagccagcgcaggaggagcccgctgtcgcgaaggccccggcggaccaacaagcccaaggacggataagcgcctcccggcggccaagtcgaccgagaaagaacggggccaccagagggcgaagaagaacgccaagaactgctagtacacctactacatctacatcttcaaggtgctgaagtgcgaccactcgcacatctacatctcttccgagggcatgtctcgatcatgaactccttcatcaacgacatcttcgagaagctcgtcgttgaggctgccaagcttgcgcgctaaaacaagaagcccaccatcacctctcgtgagattcaaacctctgtccggcttgtccttcccggtgatgtcgacaagtacgcgctgtccgagggtaccatgggcgccactaagctcacatcatcttagatttgaggaagtagctattggcctggcgttggctagctgagtgctcaatttgcctgctactaatagtgcgatgactatccattgtgtagttgtgttgcgctaagaagtgagctacactgatgatatgtttgacattgttttttatgcatgtg

SEQ ID NO: 22650 - DNA, 605 bp, Zea mays
  Clone ID: MRT4577_120656C.1
tggtaccgggtctttccctcgagttttttttttttttttttttttttttttttttttttttttttttttttttttttttttttttttttttttacaaaaccgaaccaaaataccgttttacttaaaacgcgggccacgaaaattttgttcaccaacaaagggttttaacggggatcccccgggacgacgacaataaatcgggcagggagggggccaccccgcccctgggggagacccacgaaacctgacccaaaccggttagcccccctcctcgattttggggccggggcccccgtttccagccggggggtcctcgtccatgccgccggagcctcccatgggggcccccgccccctggtacattttggcgatgagggggttgcaaaggctctccacctccttcattttggcatcaaacccccccgcctcggggagcgggttggggtcccgccagttgggggcccgggtaagggggccctcgatttttttcttggggggggggggccggtttggcggcgattttctcgcccctggcccggggggccccccggttgtgggccttttttttccgggggggttttggacctccccccttctttttgggg

SEQ ID NO: 22651 - DNA, 370 bp, Zea mays
  Clone ID: MRT4577_120657C.1
cccacgcgtccgtccacgcgtgcgcccacgcgtccgtctacgcgtccgaatgcaagcaagcaatcagccgagtacatacatacataggcatgccaggcagccatggccgcccactcgcgattgatggcctcggtcggccaccgccagtcgatccgttccaggggctcaagtgcaccgccagcctccccgactccgcgcgatccttcataagcctaggtaacgttagcaacggcggaaggatcctgtgcatgcaggtgtggccggactacggcaccaagaagttccagacactgtcgtacctgccgcagctgacgacggaagacctgctgaagcagatggactccctgctgtgcaaccgctggatacccta

SEQ ID NO: 22652 - DNA, 443 bp, Zea mays
  Clone ID: MRT4577_120658C.1
aatcacgaccacacgcaccggatcttgaccgatcaaaccattcagtgctcgcgctcactcacgcatcatagccaaattaagcgggaaggaaggaagggagggaggaagccatgtctgccactttgaggtgacgcggttcgctctgctcgagacgatcaaggaggcgcttccggcggacatgtgggggcccgagatgaggaacgcgtggggcgaagcctacgaccaactggtcgcggccatcaagcaagagatgaagccctctgaatagctcatccattgtactcatatgccacaccacttccgtctattatccctccaacttttgttgcctggccggttcactcatgtcaccatattgtatttgtattgtgtgtttatgtgtactgacgcctatgtaaaatgagcattcaataaatgaacaaattgtggatgagattcaccct

SEQ ID NO: 22653 - DNA, 365 bp, Zea mays
  Clone ID: MRT4577_120659C.1
gaaccattagcaccctgtcggagcgatttgtcgtgagcagtggcgacgcaggttgtggccatcatcgaagacctcttggcgccgctgttggggcctcggtgttgagttgtggcgtcaccttgaacctctggggacatatctgtgaccttggcgggagttgcggtgcatcgtgaccgagttaattcctcgccgtcatcacaccgccgccgcggatccgcccactgtcgtggtccgctaaatctccggcatataccgcggaatactacgacccaaaccgttcaatgctggagttgggctttgctcctgcagacgaatggattggtcgaagtgacactgaaattatcgatgcaactatggaagagcta

SEQ ID NO: 22654 - DNA, 793 bp, Zea mays
  unsure (1)..(793): unsure at all n locations
  Clone ID: MRT4577_12065C.1
ccggccggggccttttgttttgtttcctatttcctttccttctcgtgtagcttttcggccggcgaccgcgacctgaccgtccgccactgcgcacctgccggcgtctgggcgacgccccgccgccagcctgccaccaccacgacgcctgcaccggaatccgacactgtctcaaccactccgtcgtgcctatccgaagctcaacggcggagcccggtgggatagggcggaggcgctgaggcctgagggggagactggacctgggctgcacgaggtaggctgtgcggtggcggaaggaatcaccgatgagcgatgcgcaggcgacaggggatggtccgcgctgcgttggctgcggcgggcgcgtgaagacgctcttcgtgcagtactccccgggcaacatccgcttgatgaaatgcgataagtgcaaggctgttgctgatccctacatcgagtgcgagttcatgatcatcttgattgatctcgtcctgcacaagacaagggcgtaccgccatgttctgtttaataagctgagcatgggatcatccgttgacaagggaatactttaccggtctactttgatacacattgctcttgacacatgtatccttagaattcataatttttttctttgatttggtttactataaactgtctgcccaacttaagcagtccatgactatgtaatgtaagtcagaatatctttttcgaaagaaacagagctggtgnggcttcttccaggagcattttctcaacagtttccaattgcactngaggtgntggcgatgcattattggga

SEQ ID NO: 22655 - DNA, 505 bp, Zea mays
  Clone ID: MRT4577_120661C.1
ttttttttttttttttgattcaatgcaattatctcattgaatgtctaaagtactgctatggcagtcttttcccatattcctccatccaattaatgctattagtctaatgaatgtcatggagatcgttgatcatatccgtccgtcgtcacggcgtagtcgtggatgaaaaatggtatcccaaaaaagcagagtccaactccaaaagcttgcgcttaaaaggtattaaaagatattgtcgtgaatcgcgaatgaagaacaagtgtcgtgagaatagtggcctcctacaggacagcctgcatctcgaggacaggaaccttgagctgcttctgctggcaagtgacccgacggttggagtaggccttgtcacctccggccttgtagtgagcgttcttccaggtcttctcggtacacttgggagcgaaggttgtgttgcccttggcctcgtaccaaccgccctccttcacgcaggaccagtgctggaagatggcgatgacgccggacttgc

SEQ ID NO: 22656 - DNA, 1119 bp, Zea mays
  Clone ID: MRT4577_120662C.1
tgggtaaaaaaaaaaaaaaaaaaaaaaaaaaaaaaaaaaaaaaaaaaaaaatcacgaccaacacgtaccggatcttgaccgaccgaaccattcagtgctcgcgctcactcacgcatcatagccaagttaagcgggaaggaaggaaggaaggaagccatgtctgccgcggagggagccgtcgtgttcagcgaggaaaaggaggcgctggtgctcaagtcatgggccatcatgaaaaaggattccgccaaccttgggctccgcttcttcctcaagatcttcgagatcgcgccgtcggcgaggcagatgttcccgttcctgcgcgactccgacgtgccgctggagaccaaccccaagctcaagacccacgccggctgtcattgtccgtcttcgtcatgacctgcgaggcggcggcgcagcttcgcaaggccgggaaggtcaccgtgagggagaccacgctcaagaggctgggcgccacgcacttgaggtacggcgtcgcagatggacacttcgaggcaagtcaaaaccgcccgcccaaccacatgtcaattaattcacctctaattcctgactctgacttggaaaggcaagaacgaaacgtccgcctgctagattgagattgaaacacgcttgaatacatacaggtgacggggttcgcgctgcttgagacgatcaaggaggcgctccccgctgacatgtggagcctcgagatgaagaaagcctgggccgaggcctacagccagctggtggcggccatcaagcgggagatgaagcccgatgcctagtagtggcgattgcgaccagtgtttaacccatgacgcagcgccgtcacagatgtcccgtgtggtcttgcgctttagcaatttctctctggagggagcgtgtattgttatcttgtgatcgagagcctgtgtgctgcctttgcttcttgtgattatatagctactgaataaagatgtagcgttcttcagccaaaaaaaaaaaaaaaaaaaggcccctaaaaaaaaaaaaaaaaaaaaaaataaaaaaaaaaaaaaaaaaaaaaaaaaaaaaaaaaaaaaaaaaaaaaaaaaaaaaaaaaaaaaaaaaaaaaaaaaaaattaaaaaaaccccccccccccc

SEQ ID NO: 22657 - DNA, 474 bp, Zea mays
  unsure (1)..(474): unsure at all n locations
  Clone ID: MRT4577_120663C.1
gctcactatgtcggcggtccgcccttttttttttttttatgaaactatagctattcnncatcatccaagactgtaggaaaggagtatgagggcatttcatcccaatattaaagataagataacactcaacctctcttgagactggaaactcaaatacccacaatgcacactcttgaaaagaaatatgcaaacattcaaccgaggtacctacacaaaagtggcgtgtgtgtgcaacatatggtgggccccacggatggagcacattgcaatggtcataggaaccgacaccttcggtatctttcatgcgctgtgccaccagccgtccaccccatacttgtggtgcccttaggatatcccttctaggatccgcagcctctttcgtcttgtctcccttctagggaccttggttcaccattccgtccttcttcagccttccttctcatnccttaggtcttgcttgatgtcgcttccttc

SEQ ID NO: 22658 - DNA, 448 bp, Zea mays
  Clone ID: MRT4577_120665C.1
gggcgaccgagcgccgacggacacgctagctctcctctcgagtacctggccgggcgccgctggcctgaccagtccccacgggccgcggtcaatgtttcttccggtcgactcgacgtggctcgctcgccagggggacgtcgaggctgagccgaccccgacggcgtccccgggccggggccgctacttccggggggggaccgccggcgggtgcgcgtcaccgtgcgcaagtccaccaagttgggctccgaagccggtgcttgcacctggaactccagaccatgagccccgtgtgtccaacctcttcggggtggagatctactggctgagtcgtcgcgcaaccccaccccggggcgggtccagctttaaaccacgccgactttttcaacatcgtcggcgccgcccgcaaaggaagcggaagagcggcggtggacgaggagaatggcgcatg

SEQ ID NO: 22659 - DNA, 458 bp, Zea mays
  unsure (1)..(458): unsure at all n locations
  Clone ID: MRT4577_120667C.1
acaaccaancagcnagccgaaggcggnccannagcangcagcagcagcagcagcgcnaggacgagnagacgncgncnccgggncnccacncnccacacagaaanccgcanccagaancaccgngagaacgagnccgcgcgnacggggggggggaanngngaagagaggcngngcgcacngcngcngcngcnncnncnncnncnncnncgacgcgggcgnacgngcacanggangcngcngaccncccgngancnncgancncnccacacggcggcaagcgaacgancgagaggcgnggncccgnggcgaccaccgacaccnagcngcngcngcnagcccaacgaccggcnggancacnagcngagacnacaccgagcaaaaaggcagcagccaggaacaacaagcgaggcccccacacgcagaccgcacgaccgagcgcgcggcanngaccgacccaa

SEQ ID NO: 22660 - DNA, 175 bp, Zea mays
  Clone ID: MRT4577_120669C.1
tctcctccttttgcatggttggaagggcctgctgctaagggcgcgatggcctggaatggatgctgttagcaaagatgctcaaaagatgacatttcgctagttatttaattaagtctttcaaggcgtcaatcttcctgacatgtatctttattcgaaaaaaacaaactggattatt

SEQ ID NO: 22661 - DNA, 712 bp, Zea mays
  unsure (1)..(712): unsure at all n locations
  Clone ID: MRT4577_12066C.1
gccggccggggnaaaaaaaaaaaaaaaaaaaaaaaaaaaaaaaaaaaaaaaaaaaaaaaaaaaaaaaaaaaaaaaaaaaaaaaaaaaaaaaaaaaaaaaaaaaaaaaaaaaaaaaaaaaaattttggggaaaaatgggccttttttgaatttttttcccccccggggggggaaacttggaaaaaagttgggccccctttttgaaagggggaacccccccttcccaaaagggaaaagaaattcgggtttgtaaaaaggaacggaatggcaaaggacttccccgggggttttgacgccaagggttccccacctttgttttttgggcccccggggggaaagggaacttcttaaaaagggggggggagggggaaaaaattcgccatttttttaaaaaaaaaaagggaaaccggggggcccccccccccccccccccccaagggcccccgggattcaaaaaaggaacccccccccaacccctaaagggaaaatttggaaaatccaaaggggggaacgtttggggttgcaaaacaagggaagaaaaactgggggtaaagggcccccaaagcctaattttttggggacccaaaggaaaaaaaaaaagggcccgtttttaaaaaaaaggggattctgcaccgggtttttctctgggggggattgtttgggttccccttgggggttaggaaacaaattaaccgggggcgggggggggtttt

SEQ ID NO: 22662 - DNA, 374 bp, Zea mays
  Clone ID: MRT4577_120670C.1
gccactacaggcgcaatttccggccatagccactctcccatccacgataccagaagccacaccaaacccgcgttcatcgacggacgagctcgccggcgctagagcgactgagatgtaggcggcgggagcggccgccggcgcggaactggtctcttcgaagccccctatcgccacgcacgcggagatggcggagggccgtgtgccgctcgactaccgcgacgagggcggactcctccacatccccaagaagcaacgccacgtgcaccaaccgctaccgccgctggagcggctgccccaacagccccgtgtaggacaagtgttttttctagcaccccccccagcggagggtccagaggcaaacgctgagcgctgcg

SEQ ID NO: 22663 - DNA, 2045 bp, Zea mays
  Clone ID: MRT4577_120671C.1
gtcgtcttagttaagttactgattgcatgatgacaaagatgttttgattgtggtaattaggattaaatcattgcacttcaaggtttgactaattttcaaatactttacaaagcatagaccatagagaatgtgttgtaatgttataactcctgttgatcttcagccataagttcctatcattgatccaacatgtccttatccctttttcacttcttttgcttttatgtgttgacagaggctaaaatcatatatgcatgggttcaatatgtagctgggtctatccaaacatttttggtgcttgaataacgtgcagctgaatgctggaagctttataattatttttgtaaccaatttgaacgcaatagaacaattctgattgaatagcaccagcgtgctgattatcatcatattagtgctcaagctagaagggtttttatcggcagcatttaattcacaggtggagcgggaaacttttcgcatggacctttaagcaataatgcaatgcatagggctttttacatatttagaaatggcacctgttgaaccttacttcgaatatggtacaggtgttctaaagtgcagtgtttcaatatggttgcttgcatgattaggcccctttataaatctgatcatggtactgtactaattcctatcctcttccagatatctctctgagaaagcaacatctctggcaactggtgttattagtgagctggttaaggaactgagagtaaaacctgtgccaactgttcttgcttccttttctggtggctcaaaagggtgcatgtacaaggttattcagttactagctggaatatgtgaaggagatgcaaccatgaaggactatcggttagtgagaaattgtatctgcgggcaaatttatgactctagccctgtagattttgtcagtgatgtgggcacccagtttctccaaaagcctgctgttggaaattcatctcagtcaactatattacgttcatggatggcaaagcttctagcttctggcatggatactctcttcccaagcaggattgaagctcagcgtgcagagtactggcacacactatactcagcagcaggattgggtcctgttcttatattttgctcagaagatgataatcttgctccatgccatattatctgtggctttgcaaggcgattgattgaactaggcacagatgttaaacttatgaaatggagcgactcccaacatgtcggccattacaattcacatgaaattgaatacaggaaagctgtagatgatacgttgaagaaggctcttgttaccttctgccaccgaagccaactatatgactcaaatatggctggtgaccaggagtataagatagcacactcagtgtgcagtctacacaatgccgcagccaattcaaatgagagcttaagaagggttgctaacagtcctagtgatcacttcttcttgccaagttctaaggatcatgatgaatctcgggaacccagttctctaattgaggatcagaggcgccacatctcacatccaccctgcatggagcctaaaggagtccttggccaaatcctgtttgatgtttgtgttccaaataatgttgaaggatgggacattaagccaacagtgtccccgaatggacggccaacgtttgcttctgcccggcaacttggtccattcaatcccataaggtacttccggcgctcaagactgtagttttctgcaggagttgaggtttttgtatatatataaccgaggcaaggtggctagtagcaactctgagcaagattttacctatgtaagttccctgtaattgtttctgtttctgcttttgcaccgcttggcgagagaatgcacatatgctttgtatatcatatgagtgtgtgtactagaagggagatcctggacatatagtttctaggcgggttgcaaggtgcacgctaacattgtagccaaggggaatggattattatgtttctgtagtttcctctatatttcatgtttgtgaaatataattattgggaaaaaaaaacttatcttcaaaaaaaaaaaaaaaaaaaaa

SEQ ID NO: 22664 - DNA, 1748 bp, Zea mays
  Clone ID: MRT4577_120672C.1
aaaaaaaaaaaaaaaaaaaaaaaaaaaaaacgcgttcccgtctggccgtcgccgtctcctccacccctcacctccttctctcaaccagaacaaccaagtgaaacagcgcaaacccttgctccgatccccctctcctcggtctcctcgacggaagtagtagagcaggggccgaggccatgtggcccggctgcggtgggcggttctactgggcgccggaatcggcgccgccggggcaggcgaggggtgtcgcggtcttgttcgcgtgggtgtggagcgacgaggcgcagctgcggccgttctttgagctgtactcctcgctcgggtggcgctgcctcgtctgccaccccgacctcgtcgcgctatatctctctgagaaagcaacatctctggcaactggtgttattagtgagctggttaaggaactgagagtaaaacctgtgccaactgttcttgcttccttttctggtggctcaaaagggtgcatgtacaaggttattcagttactagctggaatatgtgaaggagatgcaaccatgaaggattatcggttagtgagaaactgtatctgcgggcaaatttatgactctagccctgtagattttgtcagtgatgtgggcacccagtttctccaaaagcctgctgttggaaatttatctcagtcaactatattacgttcatggatggcaaaggttctagcttctggcatggatactctcttcccaagcaggattgaagctcagcgtgcagagtactggcacacactatactcagcagcaggattgggtcctgttcttatattttgctcagaagatgataatcttgctccatgccatattatctgtggctttgcaaggcgattgattgaactaggcacagatgttaaacttatgaaatggagcgactcccaacatgtcggccattacaattcacatgaaattgaatacaggaaagctgtagatgatacgttgaagaaggctcttgttaccttctgccaccgaagccaactatatgactcaaatatggctggtgaccaggagtataagatagcgcactcagtgtgcagtctacacaatgctgcagccaattcaaatgagagcttaagaagggttgctaacagtcctagtgatcacttcttcttgccaagttcgaaggaccatgatgaatctcgggaacccagttctctaattgaggatcagaggcgccacatctcacatccaccctgcatggagcctaaaggagtccttggccaaatcctgtttgatgtttgtgttccaaataatgttgaaggatgggacattaagccgacagtgtccccgaatggacggccaacgtttgcttctgcccggcaacttggtccattcaatcccataaggtacttccggcgctcaagactgtagttttctgcaggagttgaggtttttgtatatatataaccgaggcaaggtggctagtagcaactctgagcaagattttacctatgtaagttccctgtaattgtttctgtttctgcttttgcaccgcttggcgagagaatgcacatatgctttgtatatcatatgagtgtgtgtactagaagggagatcctggacatatagtttctaggcgggttgcaaggtgcacgctaacattgtagccaaggggaatggattattatgttcctgtagtttcctctatatttcatgtttgtgaaatataattattgggaaaaaaaaacttatcttcatttttagcgaaaaaaaaaaaaaaaa

SEQ ID NO: 22665 - DNA, 146 bp, Zea mays
  Clone ID: MRT4577_120673C.1
ttgtcaaggaacgaagcatcagaggcttttgcacgacttaggacaccaaggacaagggcagatgaactatcgaggcccggggccgttacttattaaaaaggtatgccgaatccggactacatggcttgaacaaaaggcaccggcat

SEQ ID NO: 22666 - DNA, 770 bp, Zea mays
  Clone ID: MRT4577_120674C.1
ggtagaagtggtatggaagtgtggtgagccgccagtaagcaagggggaagtgagaggcttttttttttttttttttacaaagtgtaactgatgcattccaggcttaagacttctggtctttctcaacagcttacatatatatactaacaatgctgctcaagaagacgagacgatatgatgcctaacatcacaggaattaacgagctacacgccaggaatgcgtcacttacagcttcttaatcccagggaaaatggccagcaactttgacacagaaaacaagagaggaaaaaggaaatagaaggcatgttcattccagggatcggagtgctaatactgaaactaagaacaataaatctcataagatacctagcaagagatcgagctagacatgtatatatatctcggaccatgacgcctcaattccccggccacgcgcgcacaccacgcacacccttgcaaccatgctccgcgcgcgccagctagctcgcagcgagaagcatatctgcatatgcagcagcacggcggtgcgagagctcaactaacgcgagctgctcaccggcggcggctcccttggatccccaggcggtgctggccaggccgttgcatctggagtagtagtagcgggaggagtacaggcggcgacggcgctcagctccattgggacagggtggagagcggcaagaagacggggcgttttcttgggtagtatagctagtttagtgccagggtgaggagtagaagatcccggccggcctcgagggtaccaatg

SEQ ID NO: 22667 - DNA, 698 bp, Zea mays
  Clone ID: MRT4577_120675C.1
aatcattggtttggtggtagaagacaacaaacacccgcaacagcaaaaaagcccaaaacacccacaccaaaaaaaaaaaaaccgaaaaggagaacaaaaagggggccaaaaaaaccccagaccaaaaaaaaggggaaaaaaaccccccgcccggcccgcgaaggtataaaaaaccccgcgaggggcaaaaacccggaaaacaaggaagcacggggaaaaaacacccaccggggggaaaaaaaaaagggagcagaggacaacccaccacactacggggggggggcacgcccaaaaaaaaaaccccccgggggggcgaagagggaaaaaaagcccccggaaccccccccccacaaggaaagaaccccggggagaaaaaacccacaagggggccccccaccgcccggggggggaaaaaaaaaaaacccaaaacccggaaaggggcccccaaaggggggggccgaggaaaaaaaacgcgggaaaaccctgagccacccccccaagggggggacggcggaggcaggcctcctccgaaaaaaaaaaaccggcgcccccccccaggcaaaaggggcggaggcggggggggcccccggagcgaaaacggaggccgcccaacgactaaaggggggaggacggccccaaaggggctaaaggggcgggtaaacaaaaaaacaagggacaagagcacccccacccccccc

SEQ ID NO: 22668 - DNA, 274 bp, Zea mays
  Clone ID: MRT4577_120676C.1
gcacgagatgaggccaagtgtccaagtgaccaggtgccaacctagtttgcgttctcatctccctcggctagttgttcatatcttaatctctcgaaaatcactaatcagacaactagagttctgattggcctagtcgactcggggtgcctaagtgagctgagcggactgataagccaacttaatcatgattagtcaaacgatctgattatattgctggtgtaggatgtaccactatgctcatcaatgtagtgaggtttctataggtacctgagtg

SEQ ID NO: 22669 - DNA, 696 bp, Zea mays
  Clone ID: MRT4577_120677C.1
attgggacctcgagccggcgggatatggtcactgcatctcgggagaatactgccacacttgatcccgtagagagaccgaaaaacacatacgatatatctcacttcctgaactgctaaacctgccaacttaggtgagggtccaaacaacaaggttgacacctaagatgcctacttctgtgacccccttgtgccgtggtgaagaacgcgcaccggtaccgcgcctggaactgttgcactccgagcatactagctgcttctgaaaattgcatgtagcgtgcttatgaagagtatgctactttccaatctcttgaacgaaataggactttaattatgcaatgatgcatgattcgatattcatgggcgggtagtcctgcagaagactgcacgatgcataccttgtgtggccttgcccgaagacaccaacctgagagccatccatgatatccgtgtgatcatcatgtcaaaggacattcatctggcaatgaggatccgcgtggacagagcctaatcctcacctcaaacatcatgacaatcaacatgaagccctgcgtatattgctaatctgtagccattgtaaggactatggactaaaggattgatctgagtatcataagttgctcttctgttactgtcgctgctacctttgctgaagctattgctacggtcgaatacttgaatcaactatccgctgacaga

SEQ ID NO: 22670 - DNA, 314 bp, Zea mays
  Clone ID: MRT4577_120678C.1
caaactcatccgcccaaccagacccgcacgacacgacaccaagtcgaggagctcgagggcaccaatcatggacggtgtgcactccaacgtcgtcgggctcaagcccgccgcggcagtgccgcaagccgccgccgcatcatctctggcaaaaccggtgaatgtggtcacgttccgacaggtcgacgtaccgatcagtccagtctgacggccgtcgtacacgtcccgacatcacagattcagctaatggcacaattttcaagtccttactcgaaaggattacagacacatacgagcattgcgagattaagatgctg

SEQ ID NO: 22671 - DNA, 263 bp, Zea mays
  Clone ID: MRT4577_120679C.1
cggccatggactggctcattgacctccgcaacctcaagctctcggacaactccgagaagatctgcgcggaatacatatggatcacgcggatacgatatggatctagggagcaaagtaaggatcctatccggccctatgaccgatcccagagagctgccgatgaggaactagacggctccagcacaggccagggcgacggcgaggacagtgaggccatcctgtaccagaaggcagtcttgaaggacccattaactgacgcggaa

SEQ ID NO: 22672 - DNA, 187 bp, Zea mays
  unsure (1)..(187): unsure at all n locations
  Clone ID: MRT4577_12067C.1
cggcgaagacgcagtcgncgggggcnaagatntcccaacccacattgcgcgcgcgtctnccgcccgangatcgatggttggcggcggggggcgncgcncngnntggngcgctggtgcntggtgntnctggccgtggcctangcgctaggggtctntggccccggttctantggcgctacaanaaggg

SEQ ID NO: 22673 - DNA, 2537 bp, Zea mays
  Clone ID: MRT4577_120680C.1
cggaggggattcgttcggtgaagctcactccctcacccaacgctccatagtccacactcgccgtgctccccatgcagcaaccgcttgtgctcctccttctcttcttcatcggctcggccaagtatgccgtcgcctcccgcgccgacgccggtgcggctacctacattgtctacctgaaccccgcgctcaagccgtccccctacgccacgcacctccactggcaccacgcgcacctcgacgccctctccctggaccccgcgcgccacctcctctactcgtacacgaccgccgcgccgtccgcgttcgccgcccgcctcctcccatcccacgtggcggcgctcaccactcaccctgccgtcgcgtcagtgcacgaggacgtgctcctgcctctccacaccacgcgctccccatcgttcctccacctcccgccgtacagcgcgcctgacgcggacgccgggggcccggacgtcatcatcggggtgctcgacaccggcgtctggcccgagagccccagcttcggggacgccggtcagggccctgtgcctgcgcggtggcgcgggagctgcgagaccaatgccaccgacttcccgtcctcgatgtgcaaccgcaagctcatcggcgcccgtgccttcttccgcggctactcgtcgggggccggcgacggctctcgagtcggcgccgacctaatgtcgccgagggaccacgacgggcacggcacgcacaccgcgagtacggcagccggggccgtcgtggcgggcgcaagcctcctcgggtacgcgccgggcacggcgcggggcatggcccccggggcgcgcgtcgcggcgtacaaggtgtgctggaggcaagggtgcttcagctccgacattctggcgggcatggagaaggccatcgacgacggcgtcgacgtgctctcgctgtcgctgggtggcggcgcgttcccgctctcgcgcgaccccatcgcggtcggcgcgctcgcggccacccgccgcggcatcgtcgtctcgtgctccgctgggaacagcgggccgtcgccgtcgtctctggtgaacacggccccgtgggtaatcacggtcggcgccgggacgctcgaccggagctttccggcttacgcccagctcgccaacggcgagacccacgccggcatgtccctctactccggcgatgggctcggtgacggcaagatccctctggtgtacaataagggcatccgtgccggcagcaactcgagcaagctctgcatggagggcacactgaacgccgcggaggtgaagggcaaggtggtcctctgcgacaggggcggcaactcgagggtggagaaggggcagatagtgaagctagccggtggcgtgggaatggtgcttgcgaacaccgcccagagcggcgaggaagtcgtggcggacagccacctgctcccggcggttgccgtcggcgctaagagcggggacgccataaggaggtacgtggagtcggacgccaacccggaggtggcgttaacctttgccggcaccgcgctcgacgtgcggccggcgccggtagtagccgcgttcagctcccgtggacccaacagggttgtgccgcagctactcaagccggacgtgatcggcccgggcgtgaacatccttgccgggtggacggggtccatcgggccgaccgggctagccgccgacgagcggcggtcagagtttaacatcttgtcagggacatccatgtcgtgcccgcacatcagcggcctggcggcgttcgtgaaggcggcgcacccggactggagccccagcgccatcaagtccgcgctcatgacaactgcctacaccacggacaacaccgggtcgcccctcctcgacgccgcgaccaacaccacggccacgccgtgggccttcggcgcgggccacgtggaccccgtcagcgcgctctccccgggactcgtctacgacgcctccgtcgacgactacgtcgccttcctctgcaccgtcggcgtcgcgccgcggcagatccaggccatcacggcggaggggcccaacgtgacctgcacgcggaagctgtccagcccaggggacctcaactacccgtccttttcggtcgtgttcgaccggaggtcgtcgcgcagcaccgtgaagtaccggcgcgatctgaccaacgtcggcagcgccggggacacgtacactgtcaaggtcaccggacccagcgacatcagcgttagagtcaagccggcaaggctcgagttcaggcgggccggagacaagctcaggtacaccgtcacgttcaggtccgcgaacgccagaggacccatggaccccgctgcgttcggttggctgacgtggagcagcggtgagcacgatgtgcggagcccgatatcgtacacttgggggatgtagcactgatctccacagctgatccgagcatttatcttaccgccggagtgaattgggtctcagggatgccggaaatatatatcttcaataatgatacgaattcgcttgttatttactcggcccgtttcaaaatatatatggtttaaaaaataacctgtttgcaccgcg

SEQ ID NO: 22674 - DNA, 169 bp, Zea mays
  unsure (1)..(169): unsure at all n locations
  Clone ID: MRT4577_120681C.1
ggaaaaanngggcgcgcgcacgcgttcgctcgcatttttcttgcttccgattgcctattcttctcccaacccaagaccgatgtcgcgcaaggtttatattaagcccgcgtctaataatcctttttattatgagcccgctgcttttattactacctccgttaataatccc

SEQ ID NO: 22675 - DNA, 245 bp, Zea mays
  Clone ID: MRT4577_120682C.1
cccccccccacaaaaaatttttttacaggtccataacagagcagtacccaaaatttctacaagggtttccatatataaagtatgtccatcctccttaataatttttgggggagcttggttcaagagtttattcacagtttcataaacagcctaattgggtatcctaatcccataaaaaccccccttcaggggtggatcggcctaagggtcaaacggttccggaaaaggaaaaagctcggctttaa

SEQ ID NO: 22676 - DNA, 227 bp, Zea mays
  Clone ID: MRT4577_120683C.1
cccacactgatctgttctctttatttataaagttatctgtacttatatcctcgctggtgtttgcggacattaacacccagcagtgccatggcattttgctggctcccataccacaataacgaggttaaatactatggactctttgacagccttctctttaagaacttgcattacgaccacaaaaacaataaccattatcatcatcactcggactaggatctctttac

SEQ ID NO: 22677 - DNA, 575 bp, Zea mays
  Clone ID: MRT4577_120684C.1
actgcgcgtgctcctccggtcctcccccgaaccccacccccctccacgcacgagtctagtgcgagcgcgagatccagatccgctgctagttgcgtcgcccggggccagctatgatcccgacgcgggccgcgcacgcgtcattccgcgagcgcaccaacgagatccgcgccgccgtcgagagatggtgccggcacgccgtaccttcctcgacgtcatcccccggcgcatcgagcagctgctctaccgcgaccctctactggttgatcgcagccacagcggctcggtcggagatctgcagacgcgcgtccgagatcgggctcagaatccaccaaacctcacaaatcctatcccggcttgcgaagttgtcgaagacaacaactgtatttgatgaccctacagcgcagatacagaagttgactgcatcttttaacaaggatatcgcggctttgaattctgctgcctgcagacctagaaagtctctgaaattcacagaatgagagtgccacgctctcctacgaaacatctaatgattacactacagtctggcacgacctgacgaatcgatcgtgatgagt

SEQ ID NO: 22678 - DNA, 247 bp, Zea mays
  Clone ID: MRT4577_120685C.1
ggaccatggtggtgtgcgcgacggtgcggcccttgtgttggtggagtggttcgaggttcattgcgatagctggaagattgctcccggtggaacaaggaaacgtgtgaccgaggttgtagcaatggaggacttctgccgtaataagggaagtgattgggactgaaatttctggagataagatgctcttctgagaagcctggttatgtgagtaaaattgtttgtattccggtaccatgataattaaacg

SEQ ID NO: 22679 - DNA, 423 bp, Zea mays
  Clone ID: MRT4577_120686C.1
gggaacaagggaattttgaatttttgatccggtccatttttttggcaaatggtaagggggaaacaagaggggtgggttttttagccgcaaggggcacacacttacacaccattttttgggttggtagagctactaaaaaaggttatttagcttacgggtacaacggtgaaatagctttagggattgaaatatactgaaacgggagttggaacgacttttgataattcaatagggagactttacatatagattactggtgggatctgaagggtccgggtttgacgctccttaaattttgagattttaaaaatgggcttcagcttgtttcgtttggctgctcatgcatgcatgggcacttaattaaatagcacagggcggggcttgctgatcgtgctaaaaaaagctggtcccccgggggggggg

SEQ ID NO: 22680 - DNA, 262 bp, Zea mays
  Clone ID: MRT4577_120687C.1
gaggaactcatcatgaatccactaattggtggtggtttcggtattggtggttgaatgggcctaaggcttggtttcaatgggcccggaattggtcaagggactggtgcaagacaagctggaaaaaggattggcagaccacccgaagcagaaagtaaaataagaagtactttattgcttagactaacttttatagaaactctaacaatttatggactcggtgtggcactagcgcttttatatgcgaacccttttgtgtaatcct

SEQ ID NO: 22681 - DNA, 137 bp, Zea mays
  Clone ID: MRT4577_120688C.1
tcttagccaccgatccagcactgttcgcgaggcagctttcaaaagtagcggggcccccctaaattccaaagccgccccgtcaatgtgctcgtttacataggggtttccacttctacaagggcaatatctaactcaac

SEQ ID NO: 22682 - DNA, 205 bp, Zea mays
  Clone ID: MRT4577_120689C.1
ggagaaagaatagacaaaataataataaagaagaagaagctggaaaggaaaccagccactgcaatcatctaactctagtatttgaaacgtagtcagattcaaattctataccccgagctactcaaaacgcacgaatttcattccactgatattacattttgaactcccaaaccaaaaccaggaccccgacgaaacatatcgccac

SEQ ID NO: 22683 - DNA, 342 bp, Zea mays
  unsure (1)..(342): unsure at all n locations
  Clone ID: MRT4577_12068C.1
ccaacaagcaacanagaaagnggaanccagggggaacaacagagcaacaaaggcgaccaagaaaggggccctccaaagccccnngcacanaccgcaagcgaagccaacgcgacaannnacccacaaggcacacaagacgccaaaagcaacccgagcacccccaaaccnaccaccaangacaagcgcagggggggaaaacccagcacnacagcccaaaaggcaccaacaagcaaacgcagcaagcaacaaaccgaaaacacccgngaggaaacaacaaacgccagcccaaacaaaggcgcagacaagggaacaaaccaacagggcacagcaacggacaacaac

SEQ ID NO: 22684 - DNA, 693 bp, Zea mays
  Clone ID: MRT4577_120690C.1
gtaccggcgccccttctcgagtttttttttttttttttttttttttttttttttttttttttttttttttttttttttttttttttttttttttaaaaaaagcttggccccccaataatttttttattttttctttacgggggcaaaacccccaaaagcagttaaaaggggggaaggccccccccccaaacgggaaaccagggcaaaggggggttagctacggtttaacacccctaaggggggccctcttatagtttcccccagaaggaaattggggcaaaaaacccccaccaccccccccacgggggccccaccttaagcttaaaaaaaacgggggggggagggttttttttttttcggagccaccaaagttttcccaaccctctttgggggggggccccggctacaaaaaaacccagggggggaaggggaaggttgttgttaacccccaaccgaatcctctttttcctaacccttttgggaaaaaaaagggggacccccagggacggggaggctttcacccttgggcccaaggggggggggaagcggcccttaaaatcgtaaaaggtaacggcccggaacccaccgaggccctgggccacgtttggcccatttttttaaggggggccccccccaggggggtttccttctgggccatgcccatcaaaaaaggcccccccttcacccaaaagg

SEQ ID NO: 22685 - DNA, 200 bp, Zea mays
  Clone ID: MRT4577_120691C.1
cgcgtccacacttccatactatctctagatctcgatctacaggtttcaagcatacatgctcacttcacacgggcgatacggggtcctatatcttggcatctaactccatataacagtccgcctgctcactacgtacaaactggtaacacgcaagaccctcccgtcaccatacgtcattcaccacataccacattcgcctt

SEQ ID NO: 22686 - DNA, 321 bp, Zea mays
  unsure (1)..(321): unsure at all n locations
  Clone ID: MRT4577_120692C.1
cattggtacctcgagccggccggganaaataaataagcacacctgacacctctccgtctctccacctccacccgtggtaatcaaatcgaacgcacatgcggtgcgcctccctttcccggcctccccctccccctgtctcggcctccacctaatcccgggcaccccaatccgaggagactgccgtgcgctttaagtgagcgcatcacacgaaaagcagcaggtagccagccgagaccgggagagaaggagaagcagcagcagggccgccaacgccatggcggtaggcgcgaccgccgcgaagctgcacctctcgtcggcggc

SEQ ID NO: 22687 - DNA, 1497 bp, Zea mays
  Clone ID: MRT4577_120693C.1
aagtgatacggattatatggattaaaatgtcggtcacatactcacatgatagcactaaagtattggatctacttaacgctgacgataaaaagaaaataaaaatcacctagtgcatcatataagcatgggtgttcagcaactcttgttttgtttgatcaggaggaaatagaccggctgcaaaagaaactgaaacagctgcaaggagaggagcgtaatcacgacgagaggagcttgtcacctagacaaatggctgcgtcactgaagcgaaagagtctatcagagcctagctatccagggctgcagattccgctgcacattgaacaattctcgatgtcgcaaatcgaaaagccgaccgacaacttccactcaagaaaagtcatccgaggaggaggttatggcccagtcataatcgcactgggggtgctctgatcctcaggtggtggtgctgagcaaggtggagcacccacacatcgtgaggctgattggcgtgtgcccggagtcgtgcggcctggtgtacgagcacctccccaatggcacgctcaaggacaggctctccaagggcctcctgtggaaggaccgcgtcaggatcctcggcgagctgcgctctgcgctggcgtacctccactccaggcggccccacgccatcatccacgccgacgtgaagctgaccaacatcctcctggacgccggcaacgcgagccggctgggagacttcgggacggcgcgggcggtgcacgtgaaaccgctggaggaggagaccatcggccgccgcacgaacccgatgggcacggcggggtacatggaccccgtgttcttcatgaccggcgagctcacaacggagtcggacgtgtacgcgttcggcatggtgattctgcagatgctcacggggctgctggatctcaacgtcgcggagcaggcgcgcgaggcggtgaagatggacgccgtgcacagcgtgctggacgcgtccgccgggccctggccggaggtgcaggccgagaagctcatgaagctggcgctcaggtgctgcagcctggagaggaggcggcgaccggcgatcacgtccgatgccgagtggagatcgctcgacatcctacgggctatggtaaacccagctagtaaatcctggaaatggaattcccatgccagctgaatttactgtatgtatgcacctcccagtacatgccttgctgtagcctgcagatgccatgaaacacagtaggggtagctagtgattagatatagataagcaaaaatccaagaattgatgtgcattactagaatataagtattcaggggtattacagtagaaacaagagatggagcagacagaaaccatgctacatatgaagcagcaattggttagccaagatgatgatggtgcacggttatttttgggaaatctgcacctactcatgttcagtgtcctttgcaggatgcagaaatattatgtgtatattggtagacggtaatataaatctgaccatgcacgttttgttc

SEQ ID NO: 22688 - DNA, 159 bp, Zea mays
  Clone ID: MRT4577_120694C.1
agcctcgacggccattacgcgctgccgggcgtcaaactgtgcgtagcgctggcgctgcagtacctctccgtagactctactacagacgtgagccatggaccatgtcgtcgcgtcgctgcagcagatcagtaatccccatatagcaccaaggatgcccac

SEQ ID NO: 22689 - DNA, 695 bp, Zea mays
  Clone ID: MRT4577_120695C.1
gttgaggctgacctcgagaggaccaaaagagtgctgaacgcgaccgtggcgaagcagaaggcgctggtggaggaggtggctctggagtctgtgcaggagctgcctagagccaagaagaggatgttctgttgataggacatggaggtcaacagcacgggaccccgaaccatgtcgtcgacattaaccgaccgaccaaccgaccgtgaagctgacgcgactctctgccaccagccagccggagccatttttgacctcgctgccgccgccgaagccgacgccgccgactctcacctaacaccgaaatggaagagaagaccggcggcgccccctgttggctgctgcttcccttttcatgccgccccctttttgtagtgcctccatttggccgtactctgctggcggggcccgggccgggtggcgcctttttgattggtgaatgctgcggcggtcgccaagcaccacccttgtttcttggccaggcgcgcgcgagagagagaaagatagatggtgctggttggtgtccgaatggctggagtcgttctgtacgtacttgagtactgctgagtgctgaccccgtggctggaggtgggagacagacagtggcgagcttggtgccgtcgatgcacctgtacatgccatgccacaccggctgtgattctagtggcctgctaatatacagattgttgcgacagcat

SEQ ID NO: 22690 - DNA, 690 bp, Zea mays
  Clone ID: MRT4577_120696C.1
agctcaccccgggagtccgacgtgtacgcgttcggcatggtgatcctgcagatgctcacggggctgctggacctcaacgtagcggagcaggcgcgcgaggcggtgaagatggacgccgtgcacagcgtgctggacgcgtccgccggggccctggccggaggtgcaggccaagaagctcatgaagctggcgctcaggtgctgcagcctggagaggaggcggcgaccggcgatcacgtccgatgccgagtggagatcgctcgacatcctacgggctatggtaaacccagctagtaaatcctggaaatggaattcccatgccagctgaatttacagtactgtcttgctgtagcctgcagatgccatgaaacacagtaggggtagctagtgattcttcttgtgattagatatagataagcaaaaatctaagaattgatgtgcattactagaatataagtattcaggggtagtacagtagaaacaagagatggagcagacagaaatcatgctacatgaagcagcaattggttagccaagatgatgatggtgcacggttatttttgggaaatctgcacctactcatgttcagtgtcctttgcaggatgcagaaatattatgtgtatattggtagacggtaatataaatctgaccatgcacgttttgttcaagaaaaaaaaaaaaaaaaaagcggcc

SEQ ID NO: 22691 - DNA, 754 bp, Zea mays
  Clone ID: MRT4577_120697C.1
agccttccgtggcaccaccaaatggtcctgtagaccaaacccttggttaagaatccgcttaaatggggggatcttatcaatttggaaccggagattgaaccttggcctgaaccaaggccccagaaggattcaagtcactttctgaaagacctgggaaacttttttcaagagaatgctgatcagtctgatgagatacagaatttcagaaacatatctgacaaggctgaaaaaatcatggaggaaatagaccggctgcaaaagaaactgaaacagctgcaaggagaggagcgtaatcacgacgagaggagcttgtcacctagacaaatggctgcgtcactgatgcgaaagactctatcagcctatacagagctgcagattccagagaacattgaacaattctcgatgtcgcaaatcgaaaaggcgaccgacaacttccactcaagaaatttcatcggaggaggaggttatggcccagtctacaagggaaaagtgggcagcacatcagtggctattaagctgctgaagcctcgtggtagacaaggtttctcagagtatcagcaagaggtggtggtgctgagcaaattggagcacccacacatcgtgaggctgattggcgtgtgcccggagtcgtgcggcctggtgtacgagcacctccccaacggcacgctcaaggacaggctctccaagggcctcctgtggaaggaccgcgtcaggatcctcggcgagctgcgctctgcgctggcgtacctccact

SEQ ID NO: 22692 - DNA, 351 bp, Zea mays
  Clone ID: MRT4577_120698C.1
tattgccgggtcgaccagctcattaatctgcgggcggccctttttttttttttttttttaaaaaagattggcaaggtttaattccgaccacaagttacattagcccaaattcggaaggctgctcctggccccttctagttccgaactataccgcacacgtgaggtggcacgtcggccgccaggcaagtagacgcagtcctagcacgtactatcaaacactgaaaaaatcaagcgcagggcccgtacgagggacacggcttcacttggccgtctaggccttcggcttcgtcttgcggttggcttctatcttggcgcagaccccagccgtctcgtgctaggttgcctcgagca

SEQ ID NO: 22693 - DNA, 2388 bp, Zea mays
  Clone ID: MRT4577_120699C.1
ccggccgggtgcgtggtcattgaggatcccagacgaatgatggtgccatactgccatcgccgccagctcaagccctcccttcaatccaactccacctccacaaaaatcctatccattctccaccaaacgcccccacgacgagagctcatcatcccctgctaaaaatttgcgtcttttatttctaaagattccttaccggagttttctttaataaaaaaatcccccttctgttgtccatttctcgacgcgccaattgtttttttctttctttctgatttggattcgtggatttggaccacgcgcaccaccacaaccaatcctcctccccccttcgagtccccgtcctgccccaacaatcccaatctccggaagaaggggaagcaagcatcagaaatcctaaataggggggcgcaccaagaactccactgagaatccccaatcatttctcggtgcatttggccccgctccaccatcaccgaaatctccaagaaaactcatcccgaatccgcccccgcccccaaatcggccctacaccgcaccagatcacagctcataattccagtgagaattcggaaaggaggggagcaatgacggaggtggcgctcctccggggcccgaccaacctcgcttccaccgcaagccgcgcccccgcctccccctccccctccccctcctcctcttcgctgcggtatttagccaatgccgacagcgacgtgctccaaggaagcggcagcccggagcgcactgcgggatctgcggggagccgacgactccttgaactgcgcgggcaagaggcggcggaggaggaagaggagcggtggtccttcttggcgctgctctttgagctactgcggaagtcgttgctcgggtgcaggaccgtgggcggcggcgaaggcgaacacggcggctgcgggatggagattgggttgcccacggacgtgcagcacgtggcgcacgtcacgttcgataggttccacggattcctaggcctgcccgttgaattcgagcccgaagtgccccgccgtgctcccagtgccagtgcaagtgtcttcggtgtttcaacagaatcaatgcagtgttcctatgattcccgaggaaacagtgtcccaacaatccttttgatgatgcagagatgcctttatgaacagggtggccttcaggcagaaggtatcttccgtataaatgcagaaaatagccaggaagagtttgtgagagaccaactaaatagtggaattgttccagatggcattgatgtccactgtttggcaggtctaattaaagcctggtttagagaaatgccgaggggggtactggactctatcccacctgaacaggtgatgcaatgccaatctgaagaggactgtgcttgggtagcgaaatgccttccactagctgaagcagctttgcttgactgggctgttaatctgatggccgacgtagtccaagaagaacacataaacaagatgaacgatcgcaatattgctatggtcttcgcaccaaatacgactcagatggcagatcctttgactgcactgatgtatgcagtccaagtgatgaattttctcaagatgctggtacaaaagaccctcaaggatagagaggagtcgaccccagaggatgctttgctgccccagaaggacccatctgatgaaaacgggcatcagaagcccaccgtgacacttgattctctcctcgaggaaggatccaggcgcccttctttcgccaaggaagagcccctcctgaacagccctggccacagcactgatgacaagtctaacgaaactaacaccgatttaggagccactgctgctttcactgcccagacaagcgaggtagcaacgggtgtggaggactccactagtagtggctcacagcctgcacctgctggcccagctgctatcgctgatgcttccggcacgacagccacaaattctctccaggcaggcaaggggagccgaagcctgaaccggaggaggactagaaagggcaagggccagtctggcacgcgcaccacgcctgcagctgagaaatcaagaggtgcgagcatcgtgagccgcataaactccagagttgagcggatcgaagcgtggagatgagaccgaaagccatttccatcgctgttgtgtactagatgatgactgacccagcgtttcctgaaaatagcaccccccgaactgcttgcttgcacattttacatttttctctctctctctatgcgcttatcatttcttgctgtatcatggccatggtattttgagattcgatcttcctgtctttactaacttctgtatctttcttatggttaattctgtgagtcaatgaaagatgcttgtgctttcctttgtacgttaaaaaaaaaaaaaaaagggcgaccgctcgcgatctaga

SEQ ID NO: 22694 - DNA, 1058 bp, Zea mays
  Clone ID: MRT4577_12069C.1
gcctttgaaagaagctagcatcaggttcgacgtacaaggggcacaaataatctaccagtgcgtgtgctcatccgtgcacgccggcaatggtgtcctccgcccgtgcgctcatcggcctcctcgtcgccgcggcctccctcgccgtcgcgctctcggatggcggcgggatggcggcgccggtgtacgggtacgcggcggggagccccaacgggccggagaactgggggaagctgagccccgcgtacaagctgtgcggggaggggaagcagcagtccccgatcgacatcgtcaccaagcaggccgtccccgccgccaccctcgacaccctcaaccgcacctacggcgccaccaacgccacgctcatcaacgacggccacgacatcacgctggcgctcgagggcaaggttgggacggtgacggtgaacggcaaggcgtacagcttcgagaagctgcactggcactcgccctccgaccacaccatcaacggccagaggttcccgctggagctgcacctggtccacaggagcgccgacggcgcgctggcggtcatcgggatcctctaccagctgggcgccccggactccttctactaccagctgaagcggcagctgggcgagatggcccaggaccggtgcgacttcgccgaggaggaggagtcgcgggtggaggccggcctcatccacctgcgctcgctgcagaagcgcaccggcagctacttccgctacacgggctccctcaccgtgccgccatgcaccgagaacgtcgtctggagcgtcctcggcaaggtgcgccagatcagccaggaccagctgcagctgctcaaggcgccgctgcccgggagcgacgcgcgccccacgcagccgctcaacggcaggaccgtccagttctacaacccgcccaacagcaccatctccttccagatctaacactaaaaagtactttggaatctttaatatagtgtaactctgtttatgataaatcaatattctatcatttgtattcgttccaacctaaaaaaaaaaacaaaaacgaaaaaaaaaaaaaaaaaatttgcggcc

SEQ ID NO: 22695 - DNA, 142 bp, Zea mays
  unsure (1)..(142): unsure at all n locations
  Clone ID: MRT4577_1206C.1
tcgaacgggtctacatcgcgagcggatgcccttaggtttttttcttattgttgcgtaagggtctgtgtgggatanagctcataagcttgggaccaaatctagcaggagatccgcctcatgaaactggaacgatggttcatga

SEQ ID NO: 22696 - DNA, 325 bp, Zea mays
  Clone ID: MRT4577_120700C.1
gcgcctctgcctacctactctcgcggatttcgacagacagactacgggttcggtcccggggtgcttatcctgccccttggggcatgtacaatcatggatggaaggccaacactgaagcccgaagactacagaagagtcaacgagacggatcatgcatatatgcatacgacgatagacgaggaataagcactgacagagctcaatgccaatgcacataatgtgcgcgataggatgcatgtgctctgaagaaaagcgtgcagacatgagactggtcacccgtcttcattacctagaggatgataaggcagctgcctatcagcgttgc

SEQ ID NO: 22697 - DNA, 336 bp, Zea mays
  Clone ID: MRT4577_120701C.1
ggtgtaacctggtcacctagagagcagttacctcctggcatccttggtcctattaaaaataagcctttcttgcttgaagatgggcgcctactgtgttgatcatcagttgaaagttggaattcttggggtgcatggcttgaggtattcagattgttgtttgattctatttttgcatctctttgtaccccttctgttagaatggacagtccttgtgtagtgtattgagctgtctcactgattcattaaattgcaggttcgactgctcttggtgtgcccttttttgagtacctgttccatgatgatgtaaatattccttttgattctatttagcacttg

SEQ ID NO: 22698 - DNA, 359 bp, Zea mays
  Clone ID: MRT4577_120702C.1
caaagggggggaggggcttttaaaaaacagaggggtaaaacaggaaacatgggggaccccccaattggccctttttgggggcctggctctggggcaaaaaaaacccaaaaaaaattccctgggactttgcggggggcccccgaaaattccttggggtttaattttgggaaacgtcccccccaggggggatactaaacgggttaactacaacactgcccggggggggtcccacagcccctattttccatggttaacgggtgggacaacgggggttttaaaacccattggcccccctagttttggtttttaaggggaagggggggcccaaaaaagggctttccccgggggggttttttccg

SEQ ID NO: 22699 - DNA, 270 bp, Zea mays
  Clone ID: MRT4577_120703C.1
tttttttttttttttggttttatgggggccaatttttttattacatgaaaacaattttatttgtcctaatgcattatactaagttttcttactagaattgtaaaacagtcttctttaacattatttttgggaaagggcctaaaaaaccccccccaaaaaaaaatttttttttgtgaaaaaaaaggcctcttataaaacccccatcaaacccctgggggggccggccacacttaagtgtggtgcaaaaaaaaaaaaaaaaagtttgttgtt

SEQ ID NO: 22700 - DNA, 693 bp, Zea mays
  Clone ID: MRT4577_120704C.1
atgagctatttcggcccctatcagctggtacggaacgtgcttatcgatgcatgggttacaacaaatcaacgagagtgggtccttacagctgttaagctccagcgcgcgctgaccatggaagttgacggcccggcggtaattcttcgataccggcgagaaatcgccccgcccgaaggactctccatgcccgaatcgaccaatagccatgaccaccactccccggcgcatcctcccaaccatacgcggaaggggagacggatggacgagggaaggggaggttggttggatgaggcgatgggaaggggctggccgagggagcctgccagagctagaagcgacacggctacaccggcagccaccatgtgggagaagtctgagtggcgcagctgcgagggggagaacgctgaggccttggtttatgcgggcgtgaggaggcggccaggttgtaacgtcctaaccacccaggcgacaatcgtgccaccacgcgcggggttcctattgcgacttgcgagtctgattggcgcggcgatttttgttgagattgggtctgcgtcgagcgagtgggtgaagaaggatgacgactgggccccgctggtcaaggaaggacccgacacaggcgcgcagtcatcacagattgggccgcggagggagttgagcggagtgggtcgaggaatggtttcaaaccgaatttaa

SEQ ID NO: 22701 - DNA, 261 bp, Zea mays
  Clone ID: MRT4577_120705C.1
accggttgatctgctttcttcctgcgaaaagcttgcccccatgttttaataaacatgattgtgctattaattgggtttggtttgccttgcaaaaaaaaaaaaaaaaaacagagacgctgcgggggcatccaagaatggagccaaacatagcaagactagccgtcccagcgactctggccggcgctcaggcctggacgacccggacctgaccggctcgcgtgtgggaagccgagccctgaccggatgatgatgagaggctgc

SEQ ID NO: 22702 - DNA, 518 bp, Zea mays
  Clone ID: MRT4577_120706C.1
gatgactatgtcttcaattgctcgcagataataagatgtatcaagaaaaaaaaaaccgcaaaaaattgggataactcgtggtaacaaggatgaaagcatgactggtcatgatctagttcttttatttcttctactgggcagtacacatactttaggctttactgaaactctgaagtctgtatttctcatggagacctgaatgcctcccctgcatagcgcacgttgccaagctcctcttcaatccgcagaagctgattgtatttggccagcctctcgctgcggcatggagccccggttttaatctgcccacttgctaagccaacagccaaatctgcgatgaagttgtcttcggtttcaccacttctgtggctgaccatcacacccacaatttggatatcaactgaggactgcaatgatgcccatgaactccagtcatcctgatcaaaagggtcctcaattgatacaatagggaaatccttgacaaaatctctgtacagatcacccagatgctgggctga

SEQ ID NO: 22703 - DNA, 668 bp, Zea mays
  unsure (1)..(668): unsure at all n locations
  Clone ID: MRT4577_120707C.1
cacctcgccgcctccgcccgacccaacaaaaaggcacgacgacctctacctctacctcgccgccaccgtcaccgtggcccgccgccatataagtaaaccctcgcctcgtcctcctcccaggctcgccaccctccgcctccgacacatggcccacccgcgggaaccccaccgtcgaggtcgacctcgtcgccggggacggacgcctccaccgctccgcggtgcccagcggggcgtccacggggatctacgaggcgctggagctccgcgacggtgacaaggccgtatacggcgggaagggcgtactccaagctgtgcgcaacatcaacgaggttatcgcgcctaagctcataggcgtcgatgtgaggaaccaaagcgatgttgatgcagtcatgctagacattgatggaactcagaataaatcgaagttgggtgccaatgctattctcggagtctccttgagtgtatgtagggcaggcgctggtgcaaagggagttcctctgtataaacatattcaggagctagcaggaattaaggagcttgtcatgcctgttcctgcttttaatgtaataaatggaagtagccatgctggcaacaatctggccatgcangagttcatgattttacctgttggagcaactacatttgctgaagctcttcgtatgggcagc

SEQ ID NO: 22704 - DNA, 2213 bp, Zea mays
  Clone ID: MRT4577_120708C.1
atgacattccagaaccatatgccacctgccgtccctctcccccaccggcaccgacccccgccttcttcaaaaactttggtttgttggtggccattcgccgaaaccccttgccaatgccacctcgccgcctccgcccgacccaacaaaaaggcacgacgacctctacctctacctcgccgccaccgtcaccgtggcccgccgccatataagtaaaccctcgcctcgtcctcctcccaggctcgccaccctccgcctccgacacatggcccacccgcacctcgtgctcccctccccgaagtccctcctccccgccgccgcaactccatcgcgccgcgccgtcgccatccgcgcggcgctctccaccgctttgtctccggccaaggcggcagctggagcagaggcggtgcgatcgatccgcgcgcggcagatcgtggacagccgcgggaaccccaccgtcgaggtcgacctcgtcgccggggacggacgcctccaccgctccgcggtgcccagcggggcgtccacggggatctacgaggcgctggagctccgcgacggtgacaaggccgtatacggcgggaagggcgtactccaagctgtgcgcaacatcaacgaggttatcgcgcctaagctcataggcgtcgatgtgaggaaccaaagcgatgttgatgcagtcatgctagacattgatggaactcagaataaatcgaagttgggtgccaatgctattctcggagtctccttgagtgtatgtagggcaggcgctggtgcaaagggagttcctctgtataaacatattcaggagctagcaggaattaaggagcttgtcatgcctgttcctgcttttaatgtaataaatggaggtagccatgctggcaacaatctggccatgcaggagttcatgattttacctgttggagcaactacatttgctgaagctcttcgtatgggcagcgaagtttaccatgtcctgaagagcatcattaagtcaaaatatggtcaagatgcatgcaatgtcggagatgaaggaggttttgctcctaatgttcaagacaacagagagggtcttattttgcttatggatgccattgagaaggcaggctacactggaaaaatcaaaattggtatggatgttgcggcatctgagttccttacaaaggatgggaactatgatctaaactttaagaatcagcctaatgatggagcccatattctctcagcccagcatctgggtgatctgtacagagattttgtcaaggatttccctattgtatcaattgaggacccttttgatcaggatgactggagttcatgggcatcattgcagtcctcagttgatatccaaattgtgggtgatgatttactcgtcacaaacccaaaacgtatagcagatgctattgacaagaaggcttgcaatgctctgttgctaaaggtcaaccatttactaaacaatctgaaatggagtactatatacccttaattttttttgcttccttccagttctcaacatcatgactgcaaaacagtatctagctcgagataagcttgcactgcaaaactaaatgtctttgctaaagttggtgtacctttttccaggtcaaccagattggtactgtcactgaatcaattcaagctgctctcgattcaaaagctgctggttggggtgtgatggtcagccacagaagtggtgaaaccgaagacaacttcatcgcagatttggctgttggcttagcaagtgggcagattaaaaccggggctccatgccgcagcgagaggctggccaaatacaatcagcttctgcggattgaagaggagcttggcaacgtgcgctatgcaggggaggcattcaggtctccatgagaaatacagacttcagagtttcagtaaagcctaaagtatgtgtactgcccagtagaagaaataaaagaactagatcatgaccagtcatgctttcatccttgttaccacgagttatcccaattttttgcggttttttttttcttgatacatcttattatctgcgagcaattgaagacatagtcatcatccggaaagatgcttcctgtgcacccgcgcgagtctgagaaagtgacagctttatatggacatgaccattaacatttaacaatcatgcttgtaatggtgcgttatggtcatacaataaattaagggacatttacattccacccacgaaaaaaaaaaaaaaaaagcggccc

SEQ ID NO: 22705 - DNA, 263 bp, Zea mays
  Clone ID: MRT4577_120709C.1
agagctatgacgtcacacgcacgcagtgcttgaattctgttccgtcggccgcggtccccctcattttgttttttttttttggtttttatttttttggtttttttcttttggagaaactcttaaattcatacaaaaagttttacaggcctttacaaattataaagctttttccagtgcaaatgaagagcttataggcattttatatagccccccatacgggggaaagggtactggaatacaggcaggtccaacgattttttttc

SEQ ID NO: 22706 - DNA, 1157 bp, Zea mays
  Clone ID: MRT4577_12070C.1
gcctctcaagggagctcgcatcaaccgaggccggccggccaacaacggacacacacatcgtctatcagtgctcatccaacaatccgtgcgcgaccaaggcaataatggtgtcgtcctcccgtgctgtcgtcgtcgtcgtcggcctcctcgtcgccgcgtcctccctcgccgtcgctgcctccgatggcggtgggccgacgtacgggtacacggcggggagccccaacgggccggagaactggggcaagctgagccccgcgtacaagctgtgcgggcaggggaagcagcagtccccgatcgacatcgtcaccaagcaggccgtccccaacgccaacctcgacaccctcaaccgcacctacgccgccaccgccgccacgctcatcaacgacggccacgacatcacgatgacgttcgagggcaaggtcgggacggtaatggtgaacggcaaggcgtacagcttcgagaagatgcactggcactcgccgtccgaccacaccatcaacggccagaggttcccgctggagctgcacctggtccacaggagcgccgacggcgcgctggccgtcatcgggatcctctaccagctgggcgccccggactccttctactaccagctgaagcggcagctgggcgagatggccaaggaccggtgcagcttcggcgaggaggagtcgcacgagggcgtcgccctcatccacctgcgctcgctgcagaagcgcaccggcagctacttccggtacacgggctccctcaccgtgccgccctgcaccgagaacgtcgtctggagcgtcctcggcaaggtgcggcagatcagcaaggagcagctgcagctgctcaaggcgccgctgcccgggaacgacgcacgccccacgcagccgctcaacggcaggaccgtccagttctacaacccgcccaacagcaccgtctccttccatatgtaatgtaatgtaatttaatatgattaacgagatgtatatgtcgttcgtgttatgaagtaaatatatatgtgcatgcattattattacctatatattatttggtgcagtatttgtggcagtatagtgccctaaaatgggtctggttttgatttgtaacgtacacatatatatgtctagcctagattgtctctgaaaaaaaaaaaaaaaaaatttgcggcc

SEQ ID NO: 22707 - DNA, 450 bp, Zea mays
  Clone ID: MRT4577_120710C.1
atgggcaagagcaagaaaggtggtggctcttcgcatcactcgggcgacaagcgcaagtgcgagccgactcctccctcagaggacttcggcgactcgaagtactcggaggaggagttctcctctgagtccgagggctctctggctcctgcatctccccgggcgtcgtctgatgattcagacgactcccaggggatcgccgcggaggtatgtacttacatccgggtcgtcgagcgtgccaggctcgagggctcggatgagtcagagtactcctcggacgaggagaattcctccgactcgtccgaggagggcagcggcggcgacggcggtgacggcgacgacgacggaggcgaggtgaaggcggcggcgacagcggcaagggtggcagcggcgacggtggcggcggcagcaagggcagcagcaaggccagtggctagacgccactggttttag

SEQ ID NO: 22708 - DNA, 829 bp, Zea mays
  Clone ID: MRT4577_120711C.1
atccgcttccgctccgtttggtttccaccctttccgcgtactccacgtcgccttctcccatctcctctttcctacccaccgccgccgctccagggccccgaaatgtcggacgaaggcggcaccggcgagccaaagatgtgcgcgcgctgctaggggacgacgcggtgtacgaggccgccgccgcggaggccttcccggagtacaacaaggcccgcctcgtgtccctcgagctccccgaccgcagtggcgacataatcatcacaacttatggggagattgacaagaacaattatctggaccccaggactgcgcaagttgctactatagatcatatgaaacagacttgtacgaaactgaggcccgctgaagatgaggagcttccatcggcttacattgaagagtttaggtgtgctttagatgttgaattgtcaaaatatgttgctgaagcttatcccaaagggacctgtgccgtttattgtactagtggaaaggatatagagggaccaggagcagatttcagtttcgcagcagttatttctgctactaagcgtagcccacagaacttttgcaatggcagttggcgttcaatttggactatggaattcaattatgagttgcagtttgttgatattaaaggaaatatacaggtagatgctcactattttgaagagggaaatgtccagctggatactaacattgatcgcaaggactccaccataatgcagtcacctgacgactgtgcagtttcaataactagcatcattcgacatcacgaatctgaatatttgtcatctctcgaggaatcatacttaaatttgtctgatgcaac

SEQ ID NO: 22709 - DNA, 365 bp, Zea mays
  Clone ID: MRT4577_120712C.1
aaaaaaaaaaaaaaaaaaaaaaaaaaaaaaaaaaaaaaaaaaaaaaaaaaaaaaaaaaaaaaaaaaaaccaaaaaaaaaaaaaaaaaaaaaaaaaaacctttttccctgggccggaccccccctaggggcaattttgggggttttccttccccctgggggcccctcgaccttccttttgggggccccatttcccccttttgggggcccttttacaattccttggccggggttttccacggttttgccggggaaacccctggggtaccccaccttattccccttgaagaaaatccccttttcaccccctggcgtattaccattagggcccgccccgttgccctttcccaaaatttgcccaccctga

SEQ ID NO: 22710 - DNA, 394 bp, Zea mays
  Clone ID: MRT4577_120713C.1
ggacgcgtgcgcggacgcgttggtcccaccagagtgcaggatggtggcagagtcgaatctgaacatagaggagggcaaccaatggatgacgacatcgagccctgcaagctagctgctcaagcagatgccagagcaatggccatcgatgaaccaagcaatgtccagaatgaacctgaaagctgagctaaattgcacggccaaccagatgtagtccacaagccatagcgtgcaccataactagtggctgtactgctgctcggctacttgctgcttgatgtggacagtgcacaccacagacttgaatacgtaattcgtgcctgacattcaaaaatggactaggtgacacctatcggtgacaatgttaacgttatgagaatccatggcactagtgaag

SEQ ID NO: 22711 - DNA, 1236 bp, Zea mays
  Clone ID: MRT4577_120714C.1
cctgccggggccatcgccattccctccgcttcgctccgtttcgttgccaccctttacacgcactccaccttcgctcctccgggcccccgaaatgtcggacgaaggcggcgccggcgagccgctcagcgaccgccagaaacgggagatcgccacctggttcctatccaacgcgccagccggcgagatccattacatcgccaaagatgtgcgcgcgctgctggggaacgacgcggtgtacgaggccgccgccgcggaggccttcccggagtacaacaaggcccgcctcgtgtccatcgagctccccgaccgcagtggcgacataatcatctcaacttatggggagattgacaagaacaattatctggaccccaggactgcgcaagttgctactatagatcatatgaaacagacttgtacaaaactgaggcctgctgaagatgaggagcttccatcagcttacattgaagagtttaggtgtgctttagatgttgaattgtcaaagtatgtttctgaagcttatcctaaaggggcctgtgccgtttattgtactagtggaaaggatatagagggaccaggagcagatttcagttttgcagcagttatttctgctgctaagcgtagcccacagaacttttgcaatggcagctggtgttcagtttggactattgaattcaattatgagttgcagtttgttgatattaaaggaaagatacaggttttaagtagatgctcactattttgaagagggaaatgtccagctggatactaacattgatcgtaaggactccaccagaatgcagtcacctgacgattgtgcggtttcaatcagtggcatcattcgacatcacgagtctgaatatttgtcctctctcgaggaatcatacttaaatttatctgatgcaacttttaaggaccttcggcgaaaacttccagttacccgtactcttttcccctggcataacacactggtgttcggtcttacgagagaccttgccaaagaattagcgcttggaaaatgaagtctccgctggccatgtcaccagattgtttcatctttgaacttcccaatcccagtgtaaatcaacaagatacatttttttgggggaggatggcattcaaaaaatacacattctcttcacatatcctagggcttttatttggatgccgttaggaaccaaacagactcttgttgacgtgtgtgaatcatatgtttcttccccaatgctccactgtcct

SEQ ID NO: 22712 - DNA, 1803 bp, Zea mays
  Clone ID: MRT4577_120715C.1
ctcgagcccctccgggatccgcttccgctccgtttggtttccaccctttccgcgtactccacgtcgccttctcccatctcctctttcctacccaccgccgccgctccagggccccgaaatgtcggacgaaggcggcaccggcgagccgctcagcgacagccagaagcgggagatcgccgtctggttcctctccaacgcacccgccggcgagatccactacgtcgccaaagatgtgcgcgcgctgctaggggacgacgcggtgtacgaggccgccgccgcggaggccttcccggagtacaacaaggcccgcctcgtgtccctcgagctccccgaccgcagtggcgacataatcatcacaacttatggggagattgacaagaacaattatctggaccccaggactgcgcaagttgctactatagatcatatgaaacaggctttattgttgttgttgccttctcatgataaaagacttgtacgaaactgaggcccgctgaagatgaggagcttccatcggcttacattgaagagtttaggtgtgctttagatgttgaattgtcaaaatatgttgctgaagcttatcccaaagggacctgtgccgtttattgtactagtggaaaggatatagagggaccaggagcagatttcagtttcgcagcagttatttctgctactaagcgtagcccacagaacttttggtattgtctggttcatgccttctgtcttttccttattcctgaagaaatttgtcatattttcttaaatcttgcacatatggatcagttaggtttgctctgcattagaaaaagactaaattttttaacagatcctctttagcctttaaggcgatttagggatcctctgtttctagattctctttagaattgtattcaggaaattccttatactttagtttcctatcagtgtctccttgcactcctttgagcatacaacttttagtcttcagatttttcatgggtgacattttcttgagaattgttgtttgttttgagtatactattttatcattggcttagaaccttatgacttgtttaatgcctgcccgttctttctgtttctctaccagaggaattgcttcacatcatctcaatagaactgttaagtgtgctccaaaaagatttgtctttttaatcatttagcctctgatgaaggtcaactgaatattgtgtcatccagcaatggcagttggcgttcaatttggactatggaattcaattatgagttgcagtttgttgatattaaaggaaatatacaggtagatgctcactattttgaagagggaaatgtccagctggatactaacattggtcgcaaggactccaccataatgcagtcacctgacgactgtgcagtttcaataactagcatcattcgacatcacgagtctgaatatttgtcatctctcgaggaatcatacttaaatttgtctgatgcaactttcaaggatcttcggagaaaacttccagtgacccgtactcttttcccatggcataacacactggcagtcagtcttacgagagaccttgccaaacaattagcgcttggaaaatgaagtctttgcaggccatgtcaccggatggcttcaagtgttttttttaatatctatgtgctgttctgtagtaatcagtattcttcatctctgagcttcccaatcccattgtaaatcaagaacacattattttttgtggagatgtaaaagatttcgccttccctagggtttctttggatgccgttaggaaccaaacagcctcttactgacgtgtgtgaatcatatgtttcttc

SEQ ID NO: 22713 - DNA, 416 bp, Zea mays
  Clone ID: MRT4577_120716C.1
cccgggtcgaacccacccgtttcttctcaccagacccctctacgcctcacggaaaaggcgcaggtccataggccaaggcccaacgccgcgcccgctcccttcctcctcctctccctactcctcctcctttccctactccacttctctgcgcagaccaagaggcgaggcacgagaatgcctgcggcgcggcaggatgtccttaccaggatccatgtagccgggctgctccgtcggaggtccgcctcggcgctagcggcggcaggctggctgaccggggaggcgcgtagcccgtagcatctgcgtcgtcctcggtccgacgcagggacccagcagtcagctaggtccacggtccaccacccgcggctgccggacctcagtcctcgcccgacgctccttccttctcaacgagcagcagc

SEQ ID NO: 22714 - DNA, 1080 bp, Zea mays
  Clone ID: MRT4577_120717C.1
ggacactccgccgccactgctccgcgagattcggcgtgggttaaggcaccatatcctgcctcctctctcgtctccctatttctctctcactccccacctcccgcgcattccgcaccgataggtaggctcacccggactcgtctcccgctcccccctccctttcccaaaaccctagcgggtttcgacctcccaggccaatcagatcgaccgctgccgcgcgcaattgttgagccatcgaggtttgacttcatactgccctgccccaaaggatcaagatcgcatcaccagtggaagcctcgggggctgctaagtaacgttatctgactggctgactgcgccattgataaccttgggttacaactgcacaggaggctgtgacccacaggccatccggggctcattgcagctgacgaagcccctgcagcctactccccgacgatatggcgacagcgacaatggcaaccgccgcgggggccgcggcactgctttactacacgctgaaccgccgcctgcagacagagaggctgaataaggaaggggagtgcagcgatagcagggatgtgacacccagggccgcacagggttctcccacacgcgtccgcccacgcgtgcgggacgtccgcgcccctgccacctggcttgagactatctcgacgctgtcagagacgctgcggttcacgtattcagagacccttgggaagtggccgatcggcgaccttgccttcgggatcagtttcctcctcaagagacagggaaacttatctgtagcaagcatatacgctgggaatgatagtgtggagctcaaaggagctgaagtaattgctgatttaaagtatcttctcaatttgctgacactttgctggcatttctccaaaaagccattcccgttgtttttggaggcgactggctacactacggaggatgttcttatgcaagaacctaaagcaggaattttgaagccagctttcaccattttgcttgatagagacaaaaagtctatacttctattaattaggggaactcatagcatcagagatacattaacagctgccactggtgctggggttccatttcaccata

SEQ ID NO: 22715 - DNA, 330 bp, Zea mays
  Clone ID: MRT4577_120718C.1
actttgctttctatacttttagttattaatgttgttcaagggttcagggcattttgtccacttgtctttcttctctgttcacagagcgacaaccaacagttttttttggggaaaccccggcgtcacaagccataaaaagtattttggttccctttaaaaaaaatttggggacagcgcccccaatttttttggctcaaaaccaaaatggtggggggatcctatgccccccgcgcagggtttggccttttggacgaaaaaggggtaaaaaaaaaccttgtgcatacgcagttgaaggcccccgaacccgattttaaggttttaagccccttt

SEQ ID NO: 22716 - DNA, 587 bp, Zea mays
  unsure (1)..(587): unsure at all n locations
  Clone ID: MRT4577_120719C.1
gcaatgaaccagcaaaaaggctgaaggcgacggatacaaaagataatgagaaaccggcatctgaatcatctggtggcgacctgtccgaaaccagcagaccatatctctgcacaggatttgatatctaccttgtttgggaaccatgcacaatgtgtgcgatggcgcttgtgcatcataggttcaagcgcgtgttctacgccttccccaatcctgtggccggagcactcggtggagtctacaggttgcatggggagaggagtctaaaccatcactataatgtgtttagggtttcagtacctgaggcgtacttgaatgggttgaactgttattcgaaggaatgctgatccaaccctttccgtttttatttagaaaaaaagaggatccaagactgtgttcctttttttttttatttttggcacaagggcttcatattaggcctaaacttgcccatctgtattattaaatgttttggtaacaaatgtgtttatggatgtaaacgttggtgctattttttattagtttacttaaatttaatgaaatatgatcggtttcccccctggnnnnnnnnnnnnnnnnnnnnnnnnnnn

SEQ ID NO: 22717 - DNA, 301 bp, Zea mays
  Clone ID: MRT4577_12071C.1
ttgtttcagggcaagaccaaaagaagccttagtgacattattgcaaaggaactggccacagaaagcactgggatcaaacaaggggccctcctcgaggaccacgctctgctcgtggacaggaccatggacatactgaccaagggtcagcactcacagcacactggagacgcacagcacggtgggatacaacagacctcgtgtctatcacgcccaaggaagggctggctcacatggccttgctgaccctcaaggggagctggccatgcatgatcaaatacggggaccaatgccgcatcaagac

SEQ ID NO: 22718 - DNA, 137 bp, Zea mays
  Clone ID: MRT4577_120720C.1
gctagctgcacgcagccgggcaggcttcatcacacacattcacgacacgcctgtgcgggggcaatgtgcagccatcaacgcgcccgctgtacacctactacagagattgcccctgggccacactctgatacacaccc

SEQ ID NO: 22719 - DNA, 259 bp, Zea mays
  unsure (1)..(259): unsure at all n locations
  Clone ID: MRT4577_120721C.1
tgaattgataaagagtaatgtgatgtaggaagagggtggtctttttttaagggtgttagagggggggggggggtgtatttttttttttatgagagatgggattgtgtagaaagtaaagttggagaaggttgtggttgggtactttgatcagatgaatntagaaattaagttgtggtggtgttgaggttgatgtacatatgtggtatatataataaattagtagattgttgggaggagtattgttaatgttggtggtgag

SEQ ID NO: 22720 - DNA, 521 bp, Zea mays
  Clone ID: MRT4577_120722C.1
ttttttttttttttttttttttttttttttttttttttttttttttttttggggtacaaatgcaacattttcttgcttctttaaaaagccaaccaaatgagattcagggcaacctttatgcatgggataactaaaatataaacccaaactaatgcaaattaacataagaaaccaatatacttacattatcctgggcagcttttttaatcacatcatcaaaaaaagcagctggcatgttatgctctttgcacccttgttgaagctcatccacaggaatgtaaccactgccatttttgtcaaaataccaaaatgctgcaactagatgttcctcacgttccaatttattgaggggcaatgtagcaccaatgaattctatataatcaatgggcccactggtggctatatccccctaaatgattcaaataaaacaaagggaactaattatcatggcggctaattcactctttaggattaatactaaaaactaattcttggggggaatccccactctgagaattcgt

SEQ ID NO: 22721 - DNA, 437 bp, Zea mays
  Clone ID: MRT4577_120723C.1
gtctggtgtcagatcctaaccagcgagttgatccatacgaccgagccatgagtgagccacatcaccgagtatcgaaaggatgccatctaccgaggcgttgaggctgccaaagagggacataggtagttcactgacaccgaaggacctcagctcggtctgacgctcactagcgcaaaatcgtacagacgctgagctggctctacatgagcaaccacatctccctctgatcacgacgaaggcatgcatgctccagagattcccaacctgttgacgaggccgataaaagacacctactctacatgaaatagctcaaggtctccatacaatgaacatgaccaagaccatagctgataggtttgccacgaagaactacgccatgttatgacaaaacgccatgagaaactaactgacgaggatgcttactacatgactcaaca

SEQ ID NO: 22722 - DNA, 307 bp, Zea mays
  Clone ID: MRT4577_120724C.1
ggccaaagaaccatttaaatggggggccctaacccctgcccggggggggaacaggggtacctaacccccggaaaccagaaatgggggtttttcctttcaaatttcctttggatttaacccccctccgtatggggaaaaaaaaaatttttaccattttaaaatttttaaacccccgggggggggggaggcttcctttgccccctggctcccccatttttcccaaccggttttttgggttttttccccctggccggttggaattaggggtgctacccccttaagggcccttacccccgggacctatccg

SEQ ID NO: 22723 - DNA, 944 bp, Zea mays
  Clone ID: MRT4577_120725C.1
gcctccacctatcaccacccgggacgtcttccatggcctcctcgtagtagaatagctctatctcaccgcaacaactcctcattacatcctttatgagaggctgatcgattggtagatacgtactcgggtggagcagaacaacgagagacatggcgacgacgacgcgtgttgccgccaccgccgccggcgtgctgctggtcctgtcggcgttggcgaccctggcgcgggccgaggacccgtacctgttcttcgagtggaaggtgacgtacgggaccaagtccctgctgggcgtgccccagaaggtcatcctcatcaacggcgagttccccggccccaggatcaactgctcctccaacaacaacatcgtcgtcaatgtcttcaaccagctcgaccatccgctccttttcacctggaacgggatgcagcacaggaagaactcgtggatggacgggatgccaggcacgcagtgtccgatcctgcctaacaccaacttcacgtacaagtggcagcccaaggaccagatcggcagcttcttctacttcccgtccatcggcatgcagcgggcggcgggcggctacggggccatcagcgtggtcagccgcctcctcatcccggtcccgttcgaccagcccccgccggagaacgaccacgtggtgctcatcggagactggtacaccaaggaccacgaggtgctagcccgccgtcctacgcccccgcgcgctaagacgacgaaggcctcgttttctcctcgtggtctgaccatccaatccaaactcaaaagaacaaatacgaaagaagcgtagtgaaggggaacaaatgaatggatatatgtaatcttgagatgcatgccctctcaaatcactgtactggggttctcaaaaaaatcattgtaatgggagttatatatataactttatctcaccatttatttacaccaacaagtc

SEQ ID NO: 22724 - DNA, 387 bp, Zea mays
  Clone ID: MRT4577_120726C.1
aatgaagaatcatacatagtggtatccactttcttcatattactacaatggcgaccagggagctgtcctctcttatgctccttgctcattgctgcatgtcttgcttacgcgacacttttaccttaatgctgacaagctcatatagcttgaatgcttgacccataccctccatcaatgatagctactgtctgcgaaaacccagctattgaaccctataggctacaacaagcaatctgatgaagcagacatacatttatcacccttgtttcaacaatagacatgccctatctttggagcacacattggtacataccatcatggcacatgactttcagcatctcgtgctacctgagatcaaccctgttgctgtggcaaaaccttctgcct

SEQ ID NO: 22725 - DNA, 952 bp, Zea mays
  Clone ID: MRT4577_120727C.1
ccggccgggcggccggctgggcctggtccatcaaccaggccaggtcgttccgctggaacctgacggccagcgccgcgcggcccaacccgcagggctcctaccactacggccagatcaacatcacccgcaccattaaggtcatggtctcccgcggccacatcgacggcaagctccgctacggcttcaacggcatctcccacagggaccccgagacccccgtgaagctcgctgaatacttcaacgtcaccgacggggtgttcagctacaaccagatgggcgacgtgccccccgccgtgaacggtcccctccatgtcatccccgatgtcatcaccgccgagttccgcaccttcatcgagatcgtcttcgagaaccccgagaagagcatagactccctccacgtcgatggctacgccttcttcggcgtcgggatgggccccgggaagtggtcgccggaggtgaggaagacgtacaacctgctggacacggtgagccggcacacgatccaggtgtacccgcggtcatggacggcaatcatgctgacgttcgacaacgcgggcatgtggagcgtgcattccaacatctgggagcggtactacctcggggagcagttctacatcagcgtcgtctcgccggcgcgatcactgcgcgacgagtacaacatgcccgacaacgccctccgctgcggcaaggtcgtggggctgccgctgccgccgtcctacgcccccgcgcgctaagatgacgaaggcctcgttttctcctcgtggtctgaccatccaatccaaactcaaaagaacaaatacgaaagaagcatgagtggatatatatagtattgagatgcatgccctctcaaatcactgtaccggggttctcaaaaaatcatgtaatgggagttatatatataactttatctcaccatttatttcaaaaaaaaaaaaaaaagccgacgcggccg

SEQ ID NO: 22726 - DNA, 1042 bp, Zea mays
  unsure (1)..(1042): unsure at all n locations
  Clone ID: MRT4577_120728C.1
ccggccaagctgccggagggccccagcgggtgggcgtggtccatcaaccagtgcaggtccttccgctggaacctgacggccagcgcggcgcggcccaacccgcaggggtcgtaccactacggccagatcaacatcacccgcaccatcaagctcgccatgggccgcggcaaggtcgacggcaaggagaggttcggcttcaacggcgtgtcgcacgtggacccggaaacccccgtgaagctcgccgagtacttcaacgtcaccgacggggtgttcagctacaaccagatgggcgacgtgcccccccgccgttaacgggccactccatgtcatccccaacgtcatcaccgccgagttccggaccttcatcgagatcgtcttcgagaaccccgagaagagcatagactccctccacctcgacggctacgccttcttcggcgtcgggatggggcctgggacgtggtcgccggagatgaggaagacgtacaacctactggacacggtgagccggcacacgatccaggtgtacccgcggtcatggacggcgatcatgctgacattcgacaacgcgggcatgtggagcgtccggtccaacgtctgggagcggtactacctcggggagcagttctacatcagcgtcatctcgccggcgcggtcgctgcgcgacgagtacaacatgcccgacaacgccctccgctgcggcaaggtcgtggggctgccgctgccgccatcctacgcccccgcgcgctaaagacgacgaaggcgccgttttcacctcgtgttctgaccatccagtctaactaatccattcctgtgctgctcggcgaaataaaatcatcaaaaagaacaaagacgaaggaagcctagggaagggagaagggacngttgggtgggggtgagccaaatgagaacgcacggatatatctattgatgtaatcttgagatgccctctcaaatcactgtaatggggtttaaaaaacaatcattgtaatgggagttatatatacttttatcttagaaaaaaaaaaaaaaaaaatttgcggcc

SEQ ID NO: 22727 - DNA, 1188 bp, Zea mays
  Clone ID: MRT4577_120729C.1
ccggccgggctgcagaacatcgtacgactcgctcgacgtccacgtcggccactgcctctccgtgctcgtcgacgccgaccagaagcccggcgactactacatggtggcctccacgcggttcatccacgacgccaagtccgcgtccgccgtcatccgctacgccggctccagcgccccgccgtcgccgaacatgaccgagccaccggccggctgggcctggtccatcaaccaggccaggtcgttccgctggaacctgacggccagcgccgcgcggcccaacccgcagggctcctaccactacggccagatcaacatcacccgcaccatcaaggtcatggtctcccgtggccacatcgacggcaagctccgctacggcttcaacggcatctctcacagggaccccgagacccccgtgaagctcgccgagtacttcaacgccaccgacggggtattcagctacaaccagatgggcgacgtgccccctgccgtgaacgggcccctccatgtcatccccaatgtcatcaccgccgagttccgcaccttcatcgagatcgtcttcgagaaccccgagaagagcatagactccctccacgtcgatggctacgccttcttcggcgtcgggatgggccccgggaagtggtcgccggaggtgaggaagacgtacaacctgctggacacggtgagccggcacacgatccaggtgtacccgcggtcatggacggcaatcatgctgacgttcgacaacgcgggcatgtggagcgtgcattccaacatctgggagcggtactacctcggggagcagttctacatcagcgtcgtctcgccggcgcgatcactgcgcgacgagtacaacatgcccgacaacgccctccgctgcggcaaggtcgtggggctgccgctgccgccgtcctacgcccccgcgcgctaagacgacgaaggcctcgatttctcctcgtggtctgaccatccaatccaaactcaaggaacgtcggctggggggcagccgggcggatgggaacgcatgagtggatatatataaccttgagatgcatgccctctcaaatcactgtactggggttctcaaaaaatcattgtaatgggagttatatatataactttatctcaccatttatttacaccaaaaaaaaaaaaaaaaaaaaaaaaaaaaaaaaaaaaaaaaaaaaaaaa

SEQ ID NO: 22728 - DNA, 495 bp, Zea mays
  unsure (1)..(495): unsure at all n locations
  Clone ID: MRT4577_12072C.1
gtggttgtttgtttttttttttttttttttttttttttttttttttttttttttttttttttttttttttttttnaaaaaaaaaaccgggttttacccggcccacaaaaaaaacaaattggggcgttgggcaacacaaaaaaaaaattttgtggccgagaacgctttgggacaaaagggcctacacaaaccaccgcacaaaaaaaacttgaaaagccgttttaacactactttttcgccgcccccgctaaaagcgaacaaacagcaaaaaggtacaaaagggactcctccatccccccccccccactggggccgggcgcgaaaaaaccctaccccccctccccggggatgcggggggcaaactggatgtctttgggcatgaaggggaccccctttgcggggatggcgcaaaggtgggggtcctcaaaaggcccacgagggaggccccggggggttcctggagggccaagacggggggggtttggaaccccaaaac

SEQ ID NO: 22729 - DNA, 529 bp, Zea mays
  Clone ID: MRT4577_120730C.1
ctcacgggggggttactggctccacaaagcagacatatagctgtgggaaatttaggctggtgcattgcccatcctccaccttcgccagttccccattggaaggactcgatcgaaagaacgcctaaaatcttgttgaaggcaccaggggggaagctctggacgaactaaataactggctcatcgcacatatagttcctcaattgagagtgtcgacagagacatgatcgtatactatagtcatcatgataagcagcttcttgataccatatccgactgggacaagcttgtatgctccccagagcagcccttccatttggacactggtaacagctccctcaagcttggtcatgtcagtctcatcgtcccatggcttcacatcgcgtaaaactgatgacttcccagattctttcttcttgccagaagccttggtagttgtatcactctttttattatcctttttttcatctttagtccttctcatcaaaaaggtccacatcatcgatcgtgctacttcctcatcaactggggg

SEQ ID NO: 22730 - DNA, 301 bp, Zea mays
  unsure (1)..(301): unsure at all n locations
  Clone ID: MRT4577_120731C.1
ccccctccttttttttaataattaattcataaaaaatttttttttttcaaacattttagagaacatacaatcattaattttttcnactaactttaacaacacatnnaatgcattttatttcattcaagaaggcccaacaaaaacataaattccaccgaaaaaaaaacccccccccccaacaataactggagtgtacctcatcatgtataggggtttattcattcccattccaaccaaatccattaccaacgctaaacctaccattcttaaggaaagaaccaaccaacttgcgatttttccc

SEQ ID NO: 22731 - DNA, 1471 bp, Zea mays
  Clone ID: MRT4577_120732C.1
ttcaccttcgaggccggcaagacgtaccgtctgcgcgtctgcaacaccggtatcaaggcggggctcaacttccgcatgcagggccactacatgaagctggtcgagctggagggctcccacaccctgcagaacacgtacgactcgctcgacgtccacgtcggccactgcctctccgtgctcgtcgacgccgaccagaagcccggcgactactacatggtggcctccacgcggttcatccacgacgccaagtccgcgtccgccgtcatccgctacgccggctccagcgccccgccgtcgcccaacatgaccgagccaccggccggctgggcctggtccatcaaccaggccaggtcgttccgctggaacctgacggccagcgccgcgcgccccaacccgcagggctcctaccactacggccagatcaacatcacccgcaccatcaaggtcatggtctcccgcggccacatcgacggcaagctccgctacggcttcaacggcatctcccacagggacaccgagacccccctcaagctcgccgagtacttcaacgtcaccgacggggtgttcagctacaaccagatgggcgacgtgccccccgccgttaacgggccactccatgtcatccccaacgtcatcaccgccgagttccggaccttcatcgagatcgtcttcgagaatcccgagaagagcatagactccctccacctcgacggctacgccttcttcggcgtcgggatggggcctgggacgtggtcgccggagatgaggaagacgtacaacctactggacacggtgagccggcacacgatccaggtgtacccgcggtcatggacggcgatcatgctgacattcgacaacgcgggcatgtggagcgtccggtccaacgtctgggagcggtactacctcggggagcagttctacatcagcgtcatctcgccggcgcggtcgctgcgcgacgagtacaacatgcccgacaacgccctccgctgcggcaaggtcgtggggctgccgctgccgccatcctacgcccccgcgcgctaaagacgacgaaggcgccgttttcacctcgtgttctgaccatccagtctaactaatccattcctgtgctgctcggcgaaataaaatcatcaaaaagaacaaagacgaaggaagcctagggaagggagaagggacgttgggtgggggtgagccaaatgagaacgcacggatatatctattgatgtaatcttgagatgccctctcaaatcactgtaatggggtttaaaaaacaatcattgtaatgggagttatatatacttttatcttaacatttatttacaccagcaagtcctggtgtatgcatgctgtaccgtgtttactagtgaacactacactggcggacgggtccgcgccaccgcgatcagattaactcgggaaattattgctatatcgtgagtggttatctatttaatcacgtgagatttgtaaaaaa

SEQ ID NO: 22732 - DNA, 2109 bp, Zea mays
  Clone ID: MRT4577_120733C.1
cccacgcgtccggttaccccttcggcctccacctatcaccacccgggacgtcttccatggcctcctcgtagtagaatagttctatctcaccgcaacaactcctcattacatcctttatgagaggctgatcgattggtagatacgtactcgggtggagcagagcaacgagagacatggcgacgacgacgcgtgttgccgccgccgccaccggcgtgctgctggtcctgtcggcgttggcgaccctggcgcgggccgaggacccgtacctgttcttcgagtggaaggtgacgtacgggaccaagtccctgctgggcgtgccccagaaggtcatcctcatcaacggcgagttccccggccccaggatcaactgctcctccaacaacaacatcgtcgtcaacgtcttcaaccagctcgaccatccgctccttttcacctggaacgggatgcagcacaggaagaactcgtggatggacgggatgccaggcacgcagtgtccgatcctgcctaacaccaacttcacgtacaagtggcagcccaaggaccagatcggcagcttcttctacttcccgtccatcggcatgcagcgggcggcgggcggctacggggccatcagcgtggtcagccgcctcctcatcccggtcccgttcgaccagcccccgccggagaacgaccacgtggtgctcatcggagactggtacaccaaggaccacgaggtgctagcccgccagatcgacgccggcaagggcgtgggccgccccgcgggcgtgctcatcaacggcaagggcggcaaggacctggaggccgcgcctgccttcaccttcgaggccggcaagacgtaccgcctccgcgtctgcaacaccggtatcaaggcgtcgctcaacttccgcatccagggccactacatgaagctggtcgagctggagggctcccacaccctgcagaacacgtacgactcgctcgacgtccacgtcggccactgcctctccgtgctcgtcgacgccgaccagaagcccggcgactactacatggtggcctccacgcggttcatccacgacgccaagtccgcgtccgccgtcatccgctacgccggctccagcgccccgccggcgccgaacatgaccgagccaccggccggctgggcctggtccatcaaccaggccaggtcgttccgctggaacctgacggccagcgccgcgcggcccaacccgcagggctcctaccactacggccagatcaacatcacccgcaccatcaaggtcatggtctcccgcggccacatcgacggcaagctccgctacggcttcaacggcatctcccacagggaccccgagacccccgtgaagctcgctgaatacttcaacgtcaccgacggggtgttcagctacaaccagatgggcgacgtgccccccgccgtgaacggtcccctccatgtcatccccaatgtcatcaccgccgagttccgcaccttcatcgagatcgtcttcgagaaccccgagaagagcatagactccctccacgtcgatggctacgccttcttcggcgtcgggatgggccccgggaagtggtcgccggaggtgaggaagacgtacaacctgctggacacggtgagccggcacacgatccaggtgtacccgcggtcatggacggcaatcatgctgacgttcgacaacgcgggcatgtggagcgtgcattccaacatctgggagcggtactacctcggggagcagttctacatcagcgtcgtctcgccggcgcgatcactgcgcgacgagtacaacatgcccgacaacgccctccgctgcggcaaggtcgtggggctgccgctgccgccgtcctacgcccccgcgcgctaagacgacgaaggcctcgttttctcctcgtggtctgaccatccaatccaaactcaaaagaacaaatacgaaagaagcgtagtgaaggggaacaaatgaatggatatatgtaatcttgagatgcatgccctctcaaatcactgtactggggttctcaaaaaaatcattgtaatgggagttatatatataactttatctcaccatttatttacaccaacaagtcattgggtatgcgaaaaaaaaaaaaaaaaaagcggcc

SEQ ID NO: 22733 - DNA, 414 bp, Zea mays
  Clone ID: MRT4577_120734C.1
ctcctcctactcctccgcccctggtagtttcggcaatcagcttggtgccgacggcttacaacagcagcagatgcagctggatgcaccacacgattcacaaaatcaacagcagcagcaacagcaaatgccaatgacatataatcagcagcatatgatgccacaaactcagcagcagcagcagcctgcagtgaagctggagaatggaggcgtcctgggtggggtcaaactggagcagcagatggggcagccggatcagagtgtttccacacagatgcaacgcagttcgagtggcggtgtgaagcttgagccgcagttgcaagcgctgaggagcttgggtgctgtcaagatggagcaccaaagctccgatccatctgtggtcctgcagcaacagcagcatcaacagcaacgacatat

SEQ ID NO: 22734 - DNA, 2365 bp, Zea mays
  Clone ID: MRT4577_120735C.1
ccggccgggaaaccgaagcctccccggttatcccccggcctccacctgaccactaccaccacccgggacgtcttccatggcctcctcatagaataagctctatctcaccgcaacaactcctcattacaatccttcaagagagcagcactacactacactacattagagagaggtcgagcgcccctcctccgatccgccggcccgccgagagctagctgctgatcggtcgaggagagtcatggcgacgtcgacgatgcgcgttgccgccggcgtgctgctggtcgtgtcggcgctggcgaccttggcccgggccgaggacccctacctgttcttcgagtggaaggtgacgtacgggaccaggtccctgctgggagtgccccagaaggtcatcctcatcaacggcgagttccctggccccaggatcaactgctcctccaacaacaacatcgtcgtcaacgtcttcaaccagctcgaccatccgctccttttcacctggaacgggatgcagcacaggaagaactcgtggatggacgggatgccaggcacgcagtgccccatcgcgcccaacaccaacttcacgtacaagtggcagcccaaggaccagatcggcagcttcttctacttcccgtccatcggcatgcagcgggcggcgggcgggtacggcgccatcagcgtggtgagccgcctcctcatcccggtccccttcgaccagccgccgccggagagcgaccacgcggtgctcatcggcgactggtacaccaaggaccacgaggtgctggcgcgccagctcgacgccggcaagagcgtgggccgccccgcgggcgtgctcatcaacggcaagggaggcaaggacctggaggccgccgcgcccatgctcaccttcgaggcgggcaagacgtaccgcctccgcgtgtgcaacaccgggatcaaggcgtcgctcaacttccgcatccagggccacgacatgaagctcgtggagctggagggctcacataccctgcaggacgtgtacgactcgctggacgtgcacgtcggccactgcctctccgtgctggtcgacgccgaccaggcgcccggcgactactacatggtggcctccacgcggttcatccacgacgccaagtccgcctccgccgtcatccgctacgccggctccagcggcgccccgccggcgcccaacatgaccgagccaccggccggctgggcctggtccatcaaccaggccaggtcgttccgctggaacctgacggccagcgccgcgcgccccaacccgcagggctcctaccactacggccagatcaacatcacccgcaccatcaaggtcatggtctcccgcggccacatcgacggcaagctccgctacggcttcaacggcatctcccacagggacaccgagacccccctcaagctcgccgagtacttcaacgtcaccgacggggtgttcagctacaaccagatgggcgacgtgcccccccgccgttaacgggccactccatgtcatccccaacgtcatcaccgccgagttccggaccttcatcgagatcgtcttcgagaaccccgagaagagcatagactccctccacctcgacggctacgccttcttcggcgtcgggatggggcctgggacgtggtcgccggagatgaggaagacgtacaacctactggacacggtgagccggcacacgatccaggtgtacccgcggtcatggacggcgatcatgctgacattcgacaacgcgggcatgtggagcgtccggtccaacgtctgggagcggtactacctcggggagcagttctacatcagcgtcatctcgccggcgcggtcgctgcgcgacgagtacaacatgcccgacaacgccctccgctgcggcaaggtcgtggggctgccgctgccgccatcctacgcccccgcgcgctaaagacgacgaaggcgccgttttcacctcgtgttctgaccatccagtctaactaatccattcctgtgctgctcggcgaaataaaatcatcaaaaagaacaaagacgaaggaagcctagggaagggagaagggacgttgggtgggggtgagccaaatgagaacgcacggatatatctattgatgtaatcttgagatgccctctcaaatcactgtaatggggtttaaaaaacaatcattgtaatgggagttatatatacttttatcttaacatttatttacaccagcaagtcctggtgtaaaaaaaaaaaaaaaaaaagaaaaaaaaaaaaaaaaaaggggccctcaagctccaaatggccctccaactcccgatttttattcccttaatgggggttaatttggcccttggcggaaccagggtcaaaacgggttcccgggggaaattggt

SEQ ID NO: 22735 - DNA, 1046 bp, Zea mays
  Clone ID: MRT4577_120736C.1
cgtgaattcggctcgagttcactttgttcgagatactttattcctgagtctagtcctgaagcacaagagaggtcgtatgcaggagatggtgacttttctcctcgccccctccagcttttcttcccctccctcctcttttctctccctttccccccttccccctccttccccctcccctcttcctcttctcattcccctctacctcttccccttctccctctttccccttttttcccccttctcctccctctctcctcccctctctcacctcatttctcctccttcttcttcctcttcttctcctcctctctctcccctttcactcctcctctcctttccttctccctcttctcccctctcactcctcttcctttctttctctcttcttacttctctttcctccctcccttctgcccactctctccccttacttcttctcctcaccctcccaccttcttcccttctcttcctccctccctttcctcttttcttcccctctttctcctccttctcctcctccctaactctctctttttcttccctctctcatttcctcctctttttctatctcctttcccctttcttctccctctctcttcctcccttctcctcctccctttattctcttccctcttatctattcctttttccttctctcccttactttctccttactctctctctctcccttctctactctcctccttttctcctcttctctctccttcctttctctactcttctcttctttctctctctttcctcctttctctccttctctcttcctcctcctttccttcttcctctcttctcctctcttctcatcctctcaccttcttctctcctcctttctctttcctctcctactctctttactccctccttcccttctcttctactcttccctattctcctctctacccatctctcttttctcttctctcctcctctctccctctctctttctttctcctcctctccctctctattctttccttcctctcttcccctctcctacctctctctcttccacctccttctcttta

SEQ ID NO: 22736 - DNA, 218 bp, Zea mays
  Clone ID: MRT4577_120737C.1
caaacttcagcagtgcgtcaccaacagctcaaccttcctgtcagactccttttttagtaggtaatgttgtattcatgccgtgctgcagtatattaggatctgtatcttcttaagaaactatgatatgcttggtcccttatagaaagctggaaattatttaaggttcgtttcatatttgtgcatccttgatggtttttagtttgtgttcaatgtcacat

SEQ ID NO: 22737 - DNA, 266 bp, Zea mays
  Clone ID: MRT4577_120738C.1
caagatttgcttagcgaattagctattgctcaatatagggagagagttttacccctcggtagttaaagcgcctgatgtcttagtaaagaaggaagttgttagcaagttttggatagttagatgagttctaagagtgcttagctccctgtatctatagcttgtaggtttggtctaggagtaatctgtgttgtctcctttgcaagttacatatcccaacatacgcaagcatcatattcataacatcatgtagaacaccaggaagaaga

SEQ ID NO: 22738 - DNA, 427 bp, Zea mays
  Clone ID: MRT4577_120739C.1
gactctagatatttttttttttttttttcaaattcaaaacttaattaatcttttattccaaaattctcccgaaattccaactaaatttttcaatggggttaaaggagctagttcttaatattattagttaacttaacggacagattccgcaacaaatctctggattaggatttagggactcatgttccgcctgatgaatcgattttctattttttttacacttttgtttctcactctatctggctttttagtattatgtaaaataaccgatgaataaagaactgtccataacttaaacttaggtaagggcttaaccaacataggtggtgtaccaaaaaaaggggagtggaaccccataatgcttactaaacccagttatttcggttttctactggttgctttacctataaccgcgggtttatttatt

SEQ ID NO: 22739 - DNA, 177 bp, Zea mays
  Clone ID: MRT4577_12073C.1
gggacctcgagccggccgggacctactccacgaatcacgaagaaacagaccattcggccgctagagcgtgtcgaaatgcgctcccggagctgggcagagacccggaatggcctgccagacgaggatgaacgccagcggcgagaagagccgccgacggacgcaagctatggcacatga

SEQ ID NO: 22740 - DNA, 793 bp, Zea mays
  Clone ID: MRT4577_120740C.1
cacgcgtccgaaccagagaaaaaaaattacattgaatgtgtatgaaagttttttgattgagcccctctgtcgcttcagtaaatatgtcttgattctggtatagtgttgttgactgtccgagcttcagactcttcacgtgcgtcgcattgttgctggatttgacggtgcccttctggttgttgattgcgagacgaagttggagccatgattggtggtggtggtggtggtagggcccatgcagctgggtagtggcttgctgaagctactgatactgtgggttgttgattgcccacatactcagaaatgtacggggaatagcacgaagtagtatgcaggacctgcttcggctgattctgccgtgcttcggcctcggctatttcgttttgcttctgtatcgtgacttggcatgtcctagttgtatgccccttctccacagaacaagcaaaacaaccttcttggttgcaagctgaatcttcctccgaagcttctacctcctctgcctcttggggctggtcgcctaaaggagctgtgttgtgttcctgatgattgggagctgtgttgatgcccttgagtgtgatttcccctgtcttcacttcagctgggattatgtatcgtcctgacatgcatcgagtagaatcttcctccaaagcccctagtcatcttagagtatctgtaggcttcttcccttctttgccggaagtcattgtcggctctgatgtactcatccatcttctgtagaagcttctccaaagtttgtggaggcttcttggcgaaatacgacgctgttggtcct

SEQ ID NO: 22741 - DNA, 863 bp, Zea mays
  Clone ID: MRT4577_120741C.1
caagtgtggagagtagggtgctgtggacgaggcgagctgaggaagggaagggaaccctcttgaccgccggcggcgaggggagatgccgccggagaggacgaggaagtcgaggacggaggagctgtgggagcgcgaggtcggcggtctcccacccaagcgcttcgccaactccgtcatggcctccaaggagtttgtgcagtctctcaacatccaaaagcggctacggaagcacaggagttgcgtcaacacgataagcttcagcgcggacgggaggctgctcctctccgggtccgacgaccggaccctcgtgctgtgggactgggaggaggcggcgccggccttgtcgctccacactgggttcagcagcaacgtgtaccacgcgctgttcatgcctgtctccggtgacaggagcatcgtctcgtgcgctgctgaaggggatgtgatccattcacagatacaggaaggggggcgtgtggttacacacacacacaaacttgttgagttgggctttgcagtacacaggttggctgttgagccagcaagtcctcacacgttctactgctgctgtcaagatagctccgtgtggctttttgatctcagggcgcgaaatgccatggaattgtttaaatgtagggctgcgaactatcacactgctgaaaatatcgcactctatgctatttccttagacccaaggaagccctgttgttttgcagttgctggatcagatcagtatgtaaggatatatgatacccgtaagatttttgtggatgggaattctagtttcagtcgcccaactgagcacttctgccctccgcatttgattggtcgagtggaagaagaaataactggtttggcctactcac

SEQ ID NO: 22742 - DNA, 1544 bp, Zea mays
  Clone ID: MRT4577_120742C.1
atggctgatttccggacctccacccaacgggagaggtggatcttccagtcgcacgatttgtatgggacgacccggcttaatgtggacctgcttgatggctcggtatcctacccagagtccatgccggatcatgttgagggtagctcggttgtaaagcctctttcttacgaagaggagcaattgacaagggtattttacgagcagaagattcaggaagtatgcgctgcattcaagttccctcacaaaatccaggctacagcaataatatatttcaagagattctatctacaatggtctgtaatggagcatcaaccaaagcatattatgttaacatgtgtatatgcttcttgcaaagtggaagaaaaccatgtttctgctgaggaacttggtaaaggaattcagcaggaccaccagatcattctaaataatgagatgattcttcttaaaactttagattttgatctcattgtttatgctccatatcgatcgattgaaggatttattgatgacctagaggatttctgcagggcaggtaatggtccattccagcgtttgaagtgtgcacaaactgaggtaaaccatgttcaacaacaacaaagctcgttagttctaaacaagttggggccaacattctacaccatacaacatagcatgtgtcatatttttgtaggccaacattctacaccatacaacatagcatgggtagagttgcgccaggctgctatatcccatgttgacaaaatgatgttgactgatgcacctcttctctatacccctgggcagttggcactggcggctcttcacaagtctaatgatcttctcagggtcgtcgattttgaaagatacttggaaattatcttctcaaggcaacattctgattgtccaatcgaacagtttgttcagtcgatcaacgaaatcaattacttagtcgaccagcttaatatacctactgtcaaagacatgagacacgtggaccgcaagctgaaacattgctgggatccaagctcacatgacgagcataacaagaagaaagaaaagaagtcaaagcacaaatcgaaaagaacatctaccgatgcccaactataggaagcatatggtccagcagtggctttgtgtaagagtacaacgggcctccaaatgatcgaaactgaactcaggcatctaagcacagcagctctaagacagctttctacaccagctgaggcatacctgaggtcaagcaattttgtgacgatgtgggctatgcaacttcattgctccaatgggagagttgcagcaaagatacaagctaagagatgtaacattggatgcctatctccaaagtacggagaacttcaaattttatatggccgactttgtgtcagccacaattacttgagttccttttgttacggatgctacactttgtgtcagccacaattacttgagttccttttgttacggatgtagcattgtttattaagtttaaacgccgaatccaagatgatccacctgctgttgtgaatcgttttttaactgatcagtgattttgaatctggattgtg

SEQ ID NO: 22743 - DNA, 389 bp, Zea mays
  Clone ID: MRT4577_120743C.1
acagctgagctggtgaacccggactagaacttaggcctgttactttgacagacacacttagaatatatatgacttctctaaaactctatgaaccagaggaggaacatgtacgctgtgtgaataggctctctgtaacggcttcacgcagaccacaagacattctgacaaagctaaagatgtggggaggctattgacagaacgatcatacagaacttgatgaggactctctgcccgatcccaatgcgatgtgcgtagtacatgcgacacaggcttctgttccgatcttgccacgttgaaagcgggacatattctgtgcgccaaagtgttcaaaggctgatagagctagacgatctacatctgctggcgctccatcctctgtgactgatata

SEQ ID NO: 22744 - DNA, 1746 bp, Zea mays
  Clone ID: MRT4577_120744C.1
cattgggtacctcgaggccggccgggctcaccgaaaaaaaaaaccatcaccgccttcccggcgctcgccgctgccacccgtcgccgcgcgcctttccgccacccgccgccgctgttggcgcccaaacatcgcatctgctgttgctttatcccttttattccacagccgctctaagtggtgggtgtccctctatattcgccgcttataggaatcgagggttcgatcggctgtggtgcgtggtgactgtgaacgaggaggagcgcaaagatggctgatttccggacctccacccaacgggagaggtggatcttccagtcgcacgatttgatggagaggtgggcggcggcaaaccagcgggccgctcagacccttgcgcagtatgggacgacccggcttaatgtggacctgcttgatggctcggtatcctacccagagtccatgccggatcatgttgagggtagctcggttgtaaagcctctttcttacgaagaggagcaattgacaagggtattttacgagcagaagattcaggaagtatgcgctgcattcaagttccctcacaaaatccaggctacagcaataatatatttcaagagattctatctacaatggtctgtaatggagcatcaaccaaagcatattatgttaacatgtgtatatgcttcttgcaaagtggaagaaaaccatgtttctgctgaggaacttggtaaaggaattcagcaggaccaccagatcattctaaataatgagatgattcttcttaaaactttagattttgatctcattgtttatgctccatatcgatcgattgaaggatttattgatgacctagaggatttctgcagggcaggtaatggtccattccagcgtttgaaggagttgcgccaggctgctatatcccatgttgacaaaatgatgttgactgatgcacctcttctctatacccctgggcagttggcactggcggctcttcacaagtctaatgatcttctcagggtcgtcgattttgaaagatacttggaaattatcttctcaaggcaacattctgattgtccaatcgaacagtttgttcagtcgatcaacgaaatcaattacttagtcgaccagcttaatatacctactgtcaaagacatgagacacgtggaccgcaagctgaaacattgctgggatccaagctcacatgacgagcataacaagaagaaagaaaagaagtcaaagcacaaatcgaaaagaacatctaccgatgcccaactataggaagcatatggtccagcagtggctttgtgtaagagtacaacgggcctccaaatgatcgaaactgaactcaggcatctaagcacagcagctctaagacagctttctacaccagctgaggcatacctgaggtcaagcaattttgtgacgatgtgggctatggaacttcattgctccaatgggagagttgcagcaaagatacaaactaagagatgtaacattggatgcctaactccaaagtacggagaacttcaaattttatatggccgactttgtgtcagccacaattacttgagttccttttgttacggatgtagcattgtttattaagtttaaacgccgaatccaagatgatccacctgctgttgtgaatcgttttttaactgatcagtgattttgaatctggattgtgtatatgtgtagagcttatcatggcaccagattgttgaataatttctgttatttctaaaaaaaaaaaaaaaaaaaaaaaaa

SEQ ID NO: 22745 - DNA, 402 bp, Zea mays
  Clone ID: MRT4577_120745C.1
gcgcctggacttgagcaacaatttcatatctgggagcattcctgattcgctgtcgagaatggagaatctggaggttcttgacctttcatccaataacctcagcggcgtgattccgtcgtccctcacggagctcaccttcctgtccaagttcagcgtggctcacaatcacttggtggggcagatcccaagcggagggcagttcctgacgttctccaactcgagctttgagggtaatcctgctctgtgcagatcaagttcctgcaaccacctgattttgtccagtgcaactcctaatgacacggacataaagcccgcgccacgtatgacgaacaagaaaaacaaaatactcggggtggccatctgcatcggcctggcccttgcggtgtttttagctggtattct

SEQ ID NO: 22746 - DNA, 745 bp, Zea mays
  Clone ID: MRT4577_120746C.1
atctctgcacctctacattgcttctctctctgatcctccgcctccgcctgatccatccaagacagggatcgacatgctccgactcgcaggagcaccacttcgaatcgaaggccgacgctgctgcgtgcaagacctacccgcagcaggctggcaccgatccgtaagaacggcttcatcgccatcgagaaccgtccctgacaaggttgatgcgagtgattcgtacctccaagactgacaggcatgaccacgccatatgccactttgtcgccatacacatattccatgcgaaaaagcttgaagatattgttcctgtcatcacacaactgggacctgccgcatgtgaaccggactgaatatcagctgattgatatttctgaggatggatttgcgagccatcttacttcagatgacaacactaaggatgatcttagactcccaacgtgatggagacctcttgacgtgccctacatctataggaaggcttcgaaagcgagaaggatcttgttgtgactgtccagtctcgcgatgacatgaggagcatatctgcgcgtggaatgatgatggcccccagtaacttccttgcactatgagagacgggaaccctactgtatctcaacttatatcgtgtccagaagtgtatcaactggaggattgctaccgagacattcacctggcttgagctggcttttgctatagcgtgcaagagtatgctgagaggtcgtacctacctgacttatcattatct

SEQ ID NO: 22747 - DNA, 759 bp, Zea mays
  unsure (1)..(759): unsure at all n locations
  Clone ID: MRT4577_120747C.1
cctgccggaactaagacttacctcacttgcttctccgtgttcctccttgttacccagcaaatcattctccaccacatcaccaacaatggcttcttctcagctcacaaagtcggtcatcgaggccatcaaggagcgccgcacatactaccagctcaacaaggaggcgcccatctcggacaagaagatccaggagctcgttgagcaggcccttctccatgtcccctcctcgttcaactcccagtccacccgccttgttgttctcctgaacaaggaccacgagcagttctgggactacgttatcgaggtcctcaagcctctcactcccgaggacaagttcgacggcaccaagcagaagatcaacagcttccgcgctgcctacggcactgtcctcttctacgaagcccccgagcccgtcgagaacctccgcaaagccttccctctgtacgcacaccacttcggcgactggtccgagcacaccaacgccatgcaccagtacgcgctctgggttgcgctcgaggccgagggcttcggtgccaacctgcagcactacaaccncatcattgaccagaaggctgctgagcactggagcatccctctcgagtggaagctcaggtcgcagcttgtctttggtggccgcgcgggcgagcccggcgagaagcagttccagaagactttcggcgagaggctgtttgtccacggctccaaggagtaaatgtccatggcattgcattagatagcgaattgagcattgaaccttcc

SEQ ID NO: 22748 - DNA, 681 bp, Zea mays
  unsure (1)..(681): unsure at all n locations
  Clone ID: MRT4577_120748C.1
tctctttctccaccaagacgtgttgagctgtttgagggtccttcgtcgctttccctccgctcaggcctcagcagcatcagctccccaccccaccccacgcctcccctcctcttccttcataagctcactctcaaacggaggtggagcggagctagcttctgcagggtaccactagtaccagtaacctctggggattttcctgtgagaagagggattggcattggactggactggagcttgggggggagccaaaagcaaaaagaagcccaggattagcgtgtggcggattgcgtggctatttcgggaggcgagagaacgagaggcgtggggcctaggccgggggaggcggcggctccttggaccggccattgatggcgccgtggagcggcttctggggcggcaagcccggcggcgacgcctaccggggcacgccggtggtggtcaagatggagaaccccaactggtccatctccgagatctcctcgccggaggacgacgacgaggacatcttggccgccgccgccgccggccgccgcaacaaggggggccgcaccaagaacgccaagcagatcaggtgggtgctgctcctcaaggcgcaccgcgccgccgggtgcctcgcctcgctggnctccgccgccgtcgcgctcggcggcgcggccaggcgcagggtggccgcgggga

SEQ ID NO: 22749 - DNA, 430 bp, Zea mays
  Clone ID: MRT4577_120749C.1
aaaagacttaagtttttaccgattgattgattgatgtgtaacatctggaaaccaggtacctaaacatggtacatggcacataaacccgttccattgattgaacgatggatgtcatcattatggccctttattggggggtactcatatatatgggggcgcagacctcctgggctgtttctaaaaaaaaaaaaggtgcataaacgggtacctgggccacaaatccccaaggggtcgaacgaaatacttctaatggggaaatggcacaaagcggatccgacaaatacctgggaggaaacactattaacagtcttttaaaaggcgggagcctacccctggggctgcctcacattggggacgcggtcattcaagggcccaccctttgatttggcttgaacagccttacaggcattccacttgggcccgacctttt

SEQ ID NO: 22750 - DNA, 384 bp, Zea mays
  Clone ID: MRT4577_12074C.1
aattccaccaaaggggtttcttttcttttcgatcttccttcctggagcgggggggggctcagcgctgaggcgaggccccctgttattgaggcgagggcggcattaccgcatcactggtctccgaggccccgtgtaggtcaagcctcctggggggcccctcctttgctgcgccaaccaccctggccccgacgtttccctccctcatgaacaggaatgccggcttggcctccacgctgaatggctcagcggtggtcttcattccatccacgtggactttcaggaaaacaacttttggggactttttggccgtaccaccccaaattggagccctggcccccccctgaggacaccatgttgcagggaagtcaatcaccaccaccttct

SEQ ID NO: 22751 - DNA, 339 bp, Zea mays
  unsure (1)..(339): unsure at all n locations
  Clone ID: MRT4577_120750C.1
tgnctagnaagtccacttccanatcttgacccggatcctgacctggcacacgcgcgcgacgctggtggccgcggcgggcggcgccggcgcgtcgtcgacagccgcggaggcggcgggtgccggggcgtcggccgccggcgccaccgctgccgctaccgccgccttcgcaagcttcttcttgctcttggccggcgccgcgggcgcgggcgcggccaccttgacgccgtcgcagtgcaccaggatgccgatcttcttagtcttgagcgcgcccaccctgacgccggccctggtctccaggtccagcgcgatggtgaactcgccggacctcttgacgtcgga

SEQ ID NO: 22752 - DNA, 241 bp, Zea mays
  Clone ID: MRT4577_120751C.1
aggtgacattacattgtgtttttatctcgtcttaattcatgacattaaattattctactaacagtaataatgctgtaataaacatcattatagattttgcttttttatatcttgtttgctttttcatatttccttagaatttacttgaaaaaattgagttactgggtaaagcgctttatgcaaagtattgttaaattcctcgagttgcatttttggaaaggggacgtgaatattttatcaa

SEQ ID NO: 22753 - DNA, 402 bp, Zea mays
  unsure (1)..(402): unsure at all n locations
  Clone ID: MRT4577_120752C.1
tcgcccacgcgtgcggcacatgacagtgatcaggaggaagcagaactaggttcagacatcagagggatacaaaaaaatgcggtggatggttaaagtcatggagagagcacaacagaagacagctgccttctgaagcacaagatagatgaagaatccaagggtgatgaacaacaagaattaggtgttacagtggatgatgacttggtgcatgaagacacgcttgaaactgacaatgctatcgagcatacagatgatggtcaacacgaccaggatcaaagaaccctgaaaggcaaacgaggacacaaaacctgcaagcatcgcanacaatgacgatgttgagattgtaactgagacacctactggactccaagctcctgtggagtcacgtatgactgattctga

SEQ ID NO: 22754 - DNA, 304 bp, Zea mays
  Clone ID: MRT4577_120753C.1
ggagaagcgcgagggcgccgaccgtctcctcaagttgcagaacgaacgcgggggccgtgcactcttccaggatgtgcagaagccatctcaagatgagtggggtaaaaccctggaggccatggaagctgccttggccctggagaagaacctgaaccaggccctcttggatctgcacgccctgggctctgcccgcacagaccctcacctctgtgacttcttggagagccacttcctggataaggaggtgaagctcatccagaagatgggcaaccacctgaccaacctccgtagggtggcagggcca

SEQ ID NO: 22755 - DNA, 1749 bp, Zea mays
  unsure (1)..(1749): unsure at all n locations
  Clone ID: MRT4577_120754C.1
agaacatatacccgcgtcactgaaccgcgcgggcagccgacacacggcatcgcaggcaccacccaaagcaaaactccatttgttcgcttgtctttctctagatccacccccgaagaaaatggcctcctacgatggcgacgaggactccggtcgccgccgcccttcccagcaccgcccgtccggcgggggcagcggcgaccttgcctcgagcgcgaagctcgtggcggaggcggcaaagctggccctccaggaccacagcctggagaaggtggacaagggccgcgtcgccggcgcggcggccgacctgctccacgccgcctcccagtacggcaagctcgagggcaagcccgtcggtgggtacctcgagaaggccgaggagtacctccaccagtacggccgcaaggacggggccggcggcaagcatcagggggacggggaaggcaagtacggtaagaatcccggcggtggccacggagggggaaggtatgaggaggaggnaggggtacaagaagaagcctagtggcgggaggtatgaggaggatgagtacaagaagaagcctggtggtggtagtggtatggaggtgggaaggtacgaggaagaagaaggctacaagaagaagccaggcagcggtggctatggaggaggaaaatacgaggatgaagatgactacaggaagaaaccaagcagtggtagctatggtgggggaaggtacgaggatgaagatgattacaagaagaaacccacaagtggtggctatggtggtgggaggtatgaacaagaagataattacaagaagcctacaggtggcggctttggtgacgggaggtatgagcaggaagatgaatacaagaggcctctgagtggtggtggcagtagctatggtggaggcaggtatgaagatgatgaatatcggaagaagccgagtggtggtggctatggcggaggaaggtatgaggacgaagatgattataggaagaaacctagtgctggtggatatggaggtggaggaagatatgaagatgagtacagcaagaagccagctggtggtcatggcggagggaggtatgaggaagatgatgagtacaggaagccgagtggtggtggatatggttatggagcttccagtggtggaggtcatggaggaaggtacgaagaagaggactacaagaagaagcctagtggacactcagggggacgctatgaggaagaggaggggaacaagaaggctagtggctatagtggagggaagtatggcaaggaggaagacgacaagaagaagaagcatggcgaggatggatcagagagtggtggtattggagattacctgaagttggcacagggtttcatgaagaaacaggatggggaaggggacagtgggggcggcatgggagactacttaaagcttgcagaaggtttcttgaagaagcgctgattaatcttccatatcatgattcaggaaggacttgtttggttagtcacttgtcctgtttattgtctccaagtagtgacattttcgaggtttccatcataggatgtaatacaagtgcattgcttatgttgtctgtgtgttgtgacatgaatgcttaatgtgctgctgggataataaaagcttggatgctctgctattcatgttgtatattagttctgactaaaataatatgtatcctatgttatcgtgcttacaataagtgaaactcttgaatacattttcattgattatctattgctgttaaaaaaaaaaaaaaaaa

SEQ ID NO: 22756 - DNA, 335 bp, Zea mays
  Clone ID: MRT4577_120755C.1
gagacgcttcctgctggacgttaatccacacgatttgactctgagcttacaaatgcgggaggctatatctgacaatgcagccactatgttcctgtttatataccagagaatactgacctgacaagtgtgctcaattgtctaggtaattacctatgcctatctaattcaatttaagccactgttatacctctcacttaacataacactgctttcacacttgactttactggtttaggactatccggccatgattatgacagcttgaattggcatgagaaagaatacctcaaatgtgcattgtcatgtcttccggacaataaacacgtttacactat

SEQ ID NO: 22757 - DNA, 155 bp, Zea mays
  unsure (1)..(155): unsure at all n locations
  Clone ID: MRT4577_120756C.1
gctcactactcgtttccgactcaccggcgcctgtggggcctgggtcccggacccattcgtcgaccggggggcggncgaaagcncnnccactaagnntncaacctccnnccgntgaagcgacagngccgaagcggaggaacganagaannnagaag

SEQ ID NO: 22758 - DNA, 423 bp, Zea mays
  Clone ID: MRT4577_120757C.1
cgaccgttggctatataatcgccgacgccaatggtggacttaaccaaatgagactgggaataagtgacatggtcgcggttgctaagctcatgaatgccacactagtaatcccgaccctggaccacaaatcgttctggactgatccaagtgatttcaaagatatatttgacgtgcaacacttcaagcaaactctagaggatgatatcatggttgtggactccttgccgccagatttcaaaaggttcaaaccctacactagagcacccaagtcctgggccagggcttcttattatagggcattcacaaggatactgaagaaggccaaggttgtgagattcacacatacagattcacgcattgccaacaacggtctccctccttccatcccaaggctccgatgccgggcaaactacgaggcgctta

SEQ ID NO: 22759 - DNA, 154 bp, Zea mays
  Clone ID: MRT4577_120758C.1
ttcctacaggaaaaaccgataacaggggctgacattaagagcttctcgcggatgtaacacacacaaacttacatctgcttagcttttccaaggatcaagcaggaatcagctaaaaagaataagtcagttatccgaaacccctgcaagatggacc

SEQ ID NO: 22760 - DNA, 330 bp, Zea mays
  unsure (1)..(330): unsure at all n locations
  Clone ID: MRT4577_120759C.1
ggccgccatgtgaggatactgcagaatcgccctttcgagcggccgcccgggcaggtcaagctttttttttttntttttttttatttttattggttttttttttttttttttttttttttttttttaaaaaaagaacaggggaaaccggtaataatgaaaaaaacgagacaccccccaaggccagtaaacccaacctggggggccgccgccccaaccccccaaagggccaaacccaccacactggcggccggaaccaggggaccccccccccggcccaaactggggggaaaaacgggcaaaggtgggacccggggaaaaggggaaaccccc

SEQ ID NO: 22761 - DNA, 511 bp, Zea mays
  Clone ID: MRT4577_12075C.1
atcacagagtacgtgcatgcaccatcagctgcatatacgctaataataaagctaattaaggggtagtgatggatgagtgacagtctacaaaaaaataacgtacgacatcaggggaggataataatcagcactactgatgagtgatgactccagtttgaagtttgccagctgagggtggtcggaggagagcattgctagctgcttgaccttgaggttaacgaacggactgtgacgggtttaccacctccgaccccccgtcagcggcagcggcacccactcgaagcgcccctccagcgggcggtcgagggcgacgtcgtaattgtacgcctctgcgaatcgccggcgctcggccagctccgtgttcgtgaagaaggcctctatctcggtttccgacggcggcggtggcggtaacagcaacggacacggctactggctggcgacaccgacgacgacacggtagacgaactcgacaatcacatgtttattcgccttattaacttttaacacgccc

SEQ ID NO: 22762 - DNA, 272 bp, Zea mays
  Clone ID: MRT4577_120760C.1
cccacgcgtccgcccacgcgtccgaccacgcgtccgcgaccgggtggctaacaagagtaaaagacagctaatatgatcatgaagcaagccaccaaactagttaaaaataagggtgcaacagctaaacttttcatgccagacaacccctttgcatccgactcaagccatgcatgtcgtgttccacatccagtttgcgcccaccacttgtatttgagcccccacatcgctctggcctctggcacaagtctactttaaattgcattatgcttggt

SEQ ID NO: 22763 - DNA, 381 bp, Zea mays
  Clone ID: MRT4577_120761C.1
tttagagatacccaaatgacgacaatgttcggtggctggtgtaaaccatgaacatgggggcatacagttatatctacttgagattgtatactgatataaacgctatcggaggtgttccgttagaagacatcaagtacattggcagctctccttaaactgatacagcaacaggcttcctgtcggataatgcgcaaggagcagtcagaggtcgtgaagaatgcactgttcaccgagaccatcaaattcctctgatgcttgcaccgtatctacaggaacaacttgcctgaatggatgcacgaacatgacagggattttctttgtaaccaccatgtcttaggctatttagaatgggaactaatgacgacttctttccttgaagac

SEQ ID NO: 22764 - DNA, 216 bp, Zea mays
  Clone ID: MRT4577_120762C.1
ccatgatgaagagcatggttgaaaatggagcaaaacaaggcttaaaggataactatgttcaattctctgagctgctggctaaaaattttaggccagttgatgcaaaagatacaacatacagtaatgaagtcctttcttctgtgcaaccagagcaagaatctgactggaagctagcgtttcgagtatttggaaatttcacacttttttcctcagttt

SEQ ID NO: 22765 - DNA, 548 bp, Zea mays
  unsure (1)..(548): unsure at all n locations
  Clone ID: MRT4577_120763C.1
cggacgcgtggngaaaaaaatcaatgtcgtcgtttcctagaagggcatgtcaatactcaataggcaccgcgtgcctagcgccggctaccgcgactgtggcgtcggcggctgggaccagcggccctagggtttcaacgcatctgtcgacgggagctagggcgtcgccgccgtcaatgtcgcggccctcccactctttttcgtcaaccgcatcgagcggagggccacctgtgtcgccgctttcttgcatttgttttgcttcgcatttcgaacaggttcagagatggacccttgcgcatcaaagaaaaaccagacgccaaatcttttaggaactgaagattttctcagatcatcagcaaccttttaagttgtggaatgccctctgtataattatatatacctgctcaactcttttgaagataatgtaaatatagcaactagcttcaaatattgcaacaactatattacctcttgccgctgctcacttaactctgttttatattattatataagcctattatgctcaaaanaaaaaaaaaaaaannaaanna

SEQ ID NO: 22766 - DNA, 926 bp, Zea mays
  unsure (1)..(926): unsure at all n locations
  Clone ID: MRT4577_120764C.1
aacggccgccagtgtgctggtaacctgcccttaagcagtggtaacaacgcagagtacgcgggcattagtgcaagtgagagccacctagagcacacaccgcatgtattaggcttctcttgatcaagtgaaagtctacgacttgttactcttggtgatcggcatcacctagacggcttggtggcgttgggagcacagtgatcaccttggaggacttgttggtgacccggctcgagattgtaagcggtcgtgtgggatccaccgcgccggagtggcaaaggatcatctcatagtgagcatttggttcttgcgaggactagggaatagtgccgactcttcgatacctcaagaaaaaattgagccttctaaactttgctttacattccgcacttaattcaagcgttttactttgtgcatttgtttagcaagtagttaaagcattgtcttagtattgttgtatttctagaagtattctcttattgctagttgttgagtgaagttgagctcttgcttagggtttaattgttgttgatttttagaaaaacccaattcaccacccctcttaggcatcgtgattctttcaatttgtatcagagccttgttgctcttagattagcttaaccgctagagtagcgatgtccggcggngatggacctcctcccgttttttatggtgacgatttttcatgatggaaaattcgtatgaaagcttatttagaggcgacatacattggtgtctacaaagccgccacacaagggttccccgaaccaagagatcacacaaatcttgtaagagaagagtttaattatgaaaagtggaatgctaaggccaaaacacactttttagaggcctttgcaaagatgtctttaatagagtaagaaaccatagaaatgctcatgatttgtggatggatatatgtgctctacatg

SEQ ID NO: 22767 - DNA, 346 bp, Zea mays
  Clone ID: MRT4577_120765C.1
tgccaccccctctttgcaagggatgctttactacactttggtacacaccatcatgtgacaacaacattacatagctcctagactatttcacaaggctcttacactattttgaaagtgaaacgcacaacatgacaatacccgaaacgtggggctccatatgttttagtctgtatgtctagtctagaacagctaaaataggcagcacgcttttctaacacctcaaaatggtaaaatccacgctcagctcatgtttcctggtaatttccatctccacgtgttaacagatccaattttgccataaaaaaagcgcacatcataaacctgccaagatgtaggcttttagaag

SEQ ID NO: 22768 - DNA, 412 bp, Zea mays
  Clone ID: MRT4577_120766C.1
gcaagggatgctttactacacttttggtacaccatcatgcgacaacaacattacatagctcctagactattttacaacaaattcagaaagaaaaaaaaaacacaaggctcttacactattttgaaagggaaacgcacaacatgacaatacccgaaacgtggggctccatatgttttagtctgaatgtctagtctagaacagctaaaataggcagcacgcttttctaacacctcaaaatggtaaaatccacgctcagctcatgtttcctggttatttccatctccacatgttaacagatccaattttgccataaaaaaagaccacatcataaacctgccaagcttaagaaggcgaagaccggcataaagagggattgccttatgtaggcttttggaagaaaccttttacagtt

SEQ ID NO: 22769 - DNA, 307 bp, Zea mays
  unsure (1)..(307): unsure at all n locations
  Clone ID: MRT4577_120767C.1
ccaacagnngatggaaacctgnnnttagagatattatgtnatgtcacagnttangttgatgcctcanttggnagcgctccancaaaggcagacacttagaaaagttcagnnatttacaaacgntngganncaggaagaggttagaaggggccccgcnnaatagtttaatncctgggaccaccatatccctgttactggcccatangaggacnacgngaaaaaatcnaaaggtgnaggtcnacnaaccggtgccttctttgcanccctccagcttcaagnaccttgggccngagccagttcaccaagt

SEQ ID NO: 22770 - DNA, 985 bp, Zea mays
  Clone ID: MRT4577_120768C.1
tagttgattcactattggatattatgaaaacatctaggaaacctcaatataaaatggcgccagagcttccattgattttgcaatcttgtctatcccacgcgtccgactttatgtgttcagcagatgccagccggtctctgactgagcacttaaatgatgaatatcgtcaccatatgctccaagctgaaatatttcacatagcgtcatcctgtttaccttttccagaaccaaattcatcagaaacgcctcagaagaagaggaaccatattcctctcctgtcacgagagacagagccttcttacgaggagcgcatatcgaaagtcaaagcgaagctggctgataatctcaagtagagccaccgttttcaattgttacaccaatacttggaagagaacttatggaactgtagaaggtttcttccaaaagcctatatgtatgttcagttggtttcactattttatttcactctggagccatgcgtttgttttttttcccataaatactttggtgctgcaggaggcaatccctctttatgccggtcttcgccttcttaagcttggcaggtttatgacgtgcgctttttttatggcaaaattggatctgttaacatgtggagatggaaattacccggaaacatgagcttagcgtggattttaccattttgaggtgttagaaaagcgtgctgcctattttagactagatatacagactaaaacatatggagccccacatttcgggtattgtcaagttgtgcgtttcactttcaaaatagtgtaagggccttgtgttttttttcttcttctgaatttgttgtaaaatagtctagcatcccttgcaaagagggggtaatgttgttgtcacatgatggtgtgtaccaaagtgtagtaaagcatcccttgcaaagagggggtggtagtgtcctgtatgtttttttaagcaaatgtgacaaactatataagaaatgaatatttcatgtgagttatgt

SEQ ID NO: 22771 - DNA, 250 bp, Zea mays
  Clone ID: MRT4577_120769C.1
ggatcagttcagttcctcgccgccggtctcctactgcgtgcacttctgctgcctgctgtcctagccctgtaccgccgactctactgtacctcatcattcgccttgctgcatccgccgcctcggtcgcgcaggtacggtacaactccggcgtttgcttgctcgcagtcgcatcgcctattcgcctgcgccgcgttgtttctctctctcgataggtgtgtgtatacagaatatacatatacttactcacgta

SEQ ID NO: 22772 - DNA, 177 bp, Zea mays
  unsure (1)..(177): unsure at all n locations
  Clone ID: MRT4577_12076C.1
ctctatttgtttataggaaaaattgagtctgtatagtcatagtcttattctgtcagaacatccaacctnnaaccatctcactctacatatacaaactctatttttcctttaaacaaatagtactcataccgatttctatgctttctttcacaaacttaccacttcataactcttcaa

SEQ ID NO: 22773 - DNA, 290 bp, Zea mays
  unsure (1)..(290): unsure at all n locations
  Clone ID: MRT4577_120770C.1
gccgcacgctctcccgtctccttccgccctggacngtgccggtacggtgggtctntnatcctccccgtgcctgacttataacagctccccgccgccacccacgcgcgtgtagacccttcttctcgatcccctccttcctcctagctaggtcgtcctgcgcctataaacgcacatacacaggctctgctttgcctgcctaccctcccctaccgcttgtggcttcgtgcttcggtgcttctcgttttaagagtgaggcatccaacggggactgctaaaggcacaactagcga

SEQ ID NO: 22774 - DNA, 457 bp, Zea mays
  Clone ID: MRT4577_120771C.1
ctccaacggttgatgaagatgagggttggacttgccgtcgtaacgggaaaggtccatcttctgaaactgcggcggacggtcgttatggtggtcgcccgtgcctgggcgaggcccattggaggacgacgacgagcgattggccagggtctggatcgctgcagcattggcttggacgatggactgcagtgtctgcatgttggccatgagcgtctccaaggtggtcttgatgtcgtcccccatggtactggtggcggacggcgatgtcgccaaggcggcggacggtggagagtgggcggcgggctgtggctgtgaagcattggctggtggtggagaggaggagcgagcggaggaggatcgccgggatcgcgataccaggttgtctagggcgtcggcccctagggtagctggccctcgactacggatattgttgtctcggtccgtcttttccggccaggtt

SEQ ID NO: 22775 - DNA, 638 bp, Zea mays
  Clone ID: MRT4577_120772C.1
cattgggtacctcgaggccggccgggattggggtgttcacacgcagctgacggacgactgaaccttcgacagacaacatggccgactccgcctctaccgtctccgggctctgcggagtctccgtggccagacgccatgggatccccaccatcttcacgcggcgcagacgggagtggaaaaggaacccgcctgatgagaaggagcctggataggaatgatacgatcacctgcatgacgcatccccggatactgtgctgcaggaggtgaccgtgaccagttatcgtgctctcgggtgtcatcggatcggatggaggctctcaccgtcccggtcatcaactgtaacatcttcacagggctcttcttctccatcatcgcacaagagctgttccacttcccctcgccgccatccgatacctcccagctctggctgtgggtagcgaccggggacatgctactgtacatctagctctccttcggacagatctcattcaaggtcaggaccgatgactacttcgacaactgaaggggtgaagatcctatccatcatccccgttgctgcgctgcgatgcgctgcgtgggtgctcgccgcaatctaaccattgctgtatatgactccgatttcgtcgatgtaatgtatg

SEQ ID NO: 22776 - DNA, 548 bp, Zea mays
  Clone ID: MRT4577_120773C.1
ggggggtttttttttttttttttttttttttttttttttttttttttttttttttttttttttttttttttttttttttttttttttttttttttttaccagggaggcccccaatttggttaaaaaaaattaaatccgtattacaccaggggggggggggggggggtaaaagaaacaattttgaactaataccccaaaaaaccgaaacctttgtcctatccaaaaattggccccccccaaacaaggaattccttccatcccaggaaaggaaaagcctccaaaccaggagcctaaagaaaaaatctcaatcatagggcaaaacgaacaaaaatttgctcccccccgttattaaatggtttaacccccttggtgggggggggggtccgggggaaaattgaaaaccgcccctcccctaactggcctgaacaaccaaagggggaaattggtttggggaaaaaattgggggggcagcccgcaggggaaatgcattgaaagggaatttcattaccgggcaaaaaccacgggcacccgcaaaaaaaaaatattgg

SEQ ID NO: 22777 - DNA, 402 bp, Zea mays
  Clone ID: MRT4577_120774C.1
cacgaatgtacatataataccacgtgataatgaggcagcacagccatttcacactacatttacacacataatcaacaggcataaagatgcggaccaccccgaccgaggcatacaatacatacatgtctaccaacgccgtaagcacaaactacgacacgcaaactatagcgccagaattaatcagtcgactagcacacacgcgcatactattctaccagtaatagggcgagcaaaacgcagacgacgctaccgggcattacagggcctcggttgaaatgaatagactacttgctgtgcagagtgacgatgcatcagcgaaccaaccatccatagcttgcagtgccacgcaatgagatgagcgatcggcaccacccagcatggttatggatgcgccaacccaaa

SEQ ID NO: 22778 - DNA, 2157 bp, Zea mays
  Clone ID: MRT4577_120775C.1
caactttagaggtttgacagacggtagcatgaaggatcagattattggcctattactggaggttctttcaagatgctcttggcttggctgcacgaaattatgctcatgccctatcgtaattacatcttacttgcgggtattggatctcatgcttgatgttgcaaggacagggaaaagcagacatactgaagtcattcaggcattgctgctagagttaacttcccagtgcttgagcaacacagcatcaacccagtacgcattccatgatccaacccgtattgaactaaaacaacaagcaactgaatcatttttgagctgtgttggtctttctaagaaaaccgatgaaactaacgatgatgatgtgcagttgcaaatactcggtgaatccactttagacatctctaaagttgattactcccttcatgaagtacacaaggagatcctgtcatgtctcactgatccttcatatgatgttagaattacggtgctgaagaggattctttggctcacaaaatcaatcagacatggttatgcagataacattttgcaccagtgggcaggagttaatctgcagcctgctttaatggaacggttgtttgtggaagaacaccctaagtgcctttattataatctgaagatcatcttttcatggaacatggaattcccattcaacaatggagaagattctagcacacttttgtccttgtgggataggttagttcatttaaacagcaccatgtcacatgcaaaaacgagagaaatagttctatgttgcatgggtatgtgcatgaaattgttcactaaacaatctaggggtggtatttcaatggattgtcttaagaccagtgagatctctgcatcctttgtcagaatcaatgaaggggatggattatctgatgccatgcttagattaaacttgtttgtcacacttgtcaagaaccaaagtgaaccatcagaaagcatgaatgctcgacgggctgctgctgaggcaattgttgcttctggtcttcttgaagaagcaagctacgttgcttcatctgtgtccaacatgtactctccttcagaatttgatgaagaccataccaaagagaaatgcatggaagatagcgtttttgaatttgttagtctttatacatgcaagatacttgacttgtggtttgtatgtattcagttgctggaggatgaggatgcatatctgaggcaaaaacttgcgaaggatattcagaaaataatcgctaagggttcagctaataccttctgtgtttctgaatatcctccacaagttgatagagtcattgaattaagcttggactatttaacttctttgtttggcctctggctgaaatacgttgaattcttgttaaggatagtcttgggcactggaaacgctctgaactcccgtggcgatttggtccgtcagatatttgataaagaaattgataaccaccatgaggagaagctattgatatgtcaaatctgctgttcaaacattcagaaacttctgaattcaaaatgccagatggaagcaggagcagagactaaactgttcctgcagaattggagggagatatttctaaagcagctcacatcgctgactggtggctatattgagaaagaggggaagaacgattggattggcggcataggtaaccccaaggacgtgttcatatcagtgtatgcagtcctactcggtttatacgcgctcacgcagtctggctctctggatcaattggaggaccactgtgcagtttatttgcaggaatttgcaaaccttgaaaggtctatcacaccattcctcaagaacccgttgatttctaatctttacgctctggtaaaattgtcacacgagaggttcatatcatcagataagcctgaggaccaagtgggtgattcaggatcaagttttgacccatattttcttatcagatgattttcgctaatgtactagtaattcttcattgttattcctccgttgtaagactcaatactaattgcttttttatacaaattaccatactatagattctttacttgatgccccttctctgtgtatcagtgcattttaagtgccttgggttttctagcactcaaaaaatgtatgacaaggttgtgactaacgtccgaacaactggtaatgatataaatattttcccgatt

SEQ ID NO: 22779 - DNA, 390 bp, Zea mays
  unsure (1)..(390): unsure at all n locations
  Clone ID: MRT4577_120777C.1
atcaccgttaaccaggcccagtnttgggcggtggcggtggcggcggtggctactgcggcggtcgcggctgtaatgcngnnatggtggcngncgccgtgactgcggttatggcggcggtggcggctacggcggtcggcgcgaatgtggcggcggctgctactgaggcggtggcggctactgcggtcggcgctagggtggcggtggcggctactgcggctgtggttgcagcggctggagggactgatgtgtgggcccatcctggcttcggcccagttatcttatctatttttagtatcgtgttacccgatcgctttctggcaccgtgtttttgtccctgtctaccttttggattatggtgtttggttcccttgttttttcgctttttggttg

SEQ ID NO: 22780 - DNA, 282 bp, Zea mays
  Clone ID: MRT4577_120778C.1
aaatattcttttgggttttttttaaattttttgggggtttttatttttaaaactaaacgcttcatggaaacaaaaggggcccaaaaaggataatgttagcagtacaaacgggattcaaatttttttttgcctacaaaacaggggccaaattcttgcctgacaggcaaacaacaacgggaccccctgctgggggtacatttggtagggaccaatggctaaaaccattcccctgctctacaggacggactaccctgcttcatgagcagaaaacaaacctgccct

SEQ ID NO: 22781 - DNA, 469 bp, Zea mays
  Clone ID: MRT4577_120779C.1
cgtagctaggatcctctatagcggccgccctgggtttgttttttttaacatattttcttctgttttggtgtgtcgaaacaaaccaaatgatctctggtactgaaacatacgactcgaataggatccatatatactcacggcagtgtcactgcccacacaaagcagacatatagctatgtgtatatattatagagggtgcattgtgcactctccaccatcggaagaaccccacgggtaggactgatgcggaagtcacgcctaaatcttgttgaatgcaactatgccgcagctgggctcgtactcgttaattgaatcatcgcacaaatagtccccagtgacagtgccgacagacacatacgggcccacgatgggatcatgattccattttctgagtaccatatgcgactgggacaagcttggatgcaccccatagcagtccttcaatgtggacactcctaacagcctcctc

SEQ ID NO: 22782 - DNA, 334 bp, Zea mays
  unsure (1)..(334): unsure at all n locations
  Clone ID: MRT4577_12077C.1
ccatctctctttattcctgcctccananaagcgattgggggggggggggggggctccgccttcgctccggtcgccgatcccgaccactccgatctagatcagatcgctggtcctgcctgtgcacttggttcattgatgtgatccctagactcttgactgtttttgtttcctatgcgacgcggacaggacgggggggggggggctgnntccaggcggngtgggggacgcataagcgggggctggagaggaggcggatgcgccagcgaccgtgtcgcattggtccgcgatgtggctccggggacactgtcatcctgctccatgtgcgccccacctt

SEQ ID NO: 22783 - DNA, 787 bp, Zea mays
  unsure (1)..(787): unsure at all n locations
  Clone ID: MRT4577_120780C.1
aaccggccttgccctgtcgccagtcccctcccgtcgtcgggtcccaatgctgtccgccggccgctgccgtctctgcctcttccccttccccttccctctccgccacttcactgcggccgtttccaccaccaccaccaccacctccgacgctgccgctgccgaccccactgtcttctacctggaatccacctgcgcgctctcccccgccaccgccgcccgcgctgcggactccatccgcctcgcctccccggagtccaccgcgcaggccgacgccgtcctcgacctcctccgccggtatggcttcaccgacgccgagatatccaccaccgtccgcaagttccccatcgtcctcgtctccgaccccgtcaagacactccagcccaagctcgacttcctcgcctccgtcggcatcaacgcgccgctcctccccaggctcgtctccctcagccccgtcgtcctccaccgcagcatccaggaccacctcgccccgctcttcggatctctccgcgagctcctcggttccaatgcccgcgtcgtcaccgcgctccgccagatgccgttcgttgtccgctgcagccccaacagtaccgtcaacctcgtgctccccgcactaagagatgtccacggcttgcccccggaggacgtctccaagctcgtcgccgtccaccccggcgtcatcatgcagggcccccaccgcttggncgagattgtccaggccgtcaaggacgtcggcatcgaaaccggcgagtccatgttcgtccacacatttgccatcatttccagatga

SEQ ID NO: 22784 - DNA, 481 bp, Zea mays
  Clone ID: MRT4577_120781C.1
taaaaaaaaaaaaaaaaaaaaaaaaaaaaaaaaaaaaaaaaaaaaaaaaaaaaaataaaaaataaaaaaaaaaaaaaaataaaataaaaattataaaaaatataaataaaatttgaagaacatataaaacattcttatacctttccccatttggtcttttaggggcctttttttacattttaattggcgcgtttttttacaacgggtgggacctttttaaaccttggggtttcccaaattaattttggttgcacaatattatttttttgccaggttggttaatttttaagaggcccgaaataatcgtttttcccaacattttttcatttttaatgggtaatggaccccccttttgccgtattattaacctctttgagtgtgtttttttctcgcagtttggcggtttcacttaggagcgccctaacaccctttccttccctttttttccctttctttttttccattttccccgttttttccc

SEQ ID NO: 22785 - DNA, 267 bp, Zea mays
  Clone ID: MRT4577_120782C.1
ctccgacacgccggatgaggccgcggagatgctcgctgacatcaaggccggcgtggaagcccgcagagctcgacggggacgtggtggccgtgccaaagaagcgggacagcgatgaggcgcggatatggaaggagttcatcctgtccccgacacgggcaatgcgtcgcatccacctctcgggcatcggcatgcacttcttccatcaggggtccggcatcgacgccgtggtactgtacagcccgcgcgtgttcaaggccgccggcatca

SEQ ID NO: 22786 - DNA, 272 bp, Zea mays
  unsure (1)..(272): unsure at all n locations
  Clone ID: MRT4577_120783C.1
cgggnccggaaaacccggccgaccacacgcgtccgactagttctagaaccggcaatgtggtttgttttaacccaaacccctttggggtggtccgggggataatctaaaacggggacggcaaagaaaccataacctggtcactaaactagctaggtccctactgcttttaaaagtctggataataaaccgggatgtcatgaccggtatttcctttttaatcttgttgcttgcttgtctgtccatctatgtaataataaattaataattgatcc

SEQ ID NO: 22787 - DNA, 200 bp, Zea mays
  Clone ID: MRT4577_120784C.1
atattggattatatttactttttcgccagaggacccaaacaaaggcaaggcgggccctttgacatatatatccaaaggaaacatcaaccacgaacaccctaaaatggtgaaagaccccaaacaggggtgggctccaacaggaccattgggggggtccccatggaaccaggaaataagacaccccccaggggggatgacaa

SEQ ID NO: 22788 - DNA, 2046 bp, Zea mays
  Clone ID: MRT4577_120785C.1
aagcagtggtaacaacgcagagtacgcgcgagggtcgggccggggctcgcggccgcattagcgcggagatcgagagacaagagagggaaggcggcggcttgccggcttaagccttctctccctccgtcgtcgcctcctccttacgtccgcttcttcctcctgaatggagacgtcagcgccgcccaatgcccccgctccgccggcgcagccacggaggcggttgccggacttccagcagtcagtgcggctcaagtatgtgaagctggggtaccactacctcatatcccacgggatgtacctgctgctgtcgccgctgatggcgctcgtcgccgtgcagctctccaccgtctccccgcatgacctcgccgacctgtgggagcagctccgcttcaacctcctctccgtcgtcgcctgctccacgctgctcgtcttcctctccaccgtttacttcctcacccgcccgcgccccgtgtacctgctcgacttcgcctgctacaagccggagtcggagcgcaagtgcacgcgcgagaccttcatgcactgctccaagctcaccggatccttcacggacgagaacctcgagttccagcgcaagatcctcgagcgctccggcctcggcgaggacacgtaccttccccccgccgtgctccgggtgccccctaacccgtgcatggacgaggcgcgtaaggaggcgcgcgccgtcatgttcggcgccatcgaccagctgctcgagaagaccggtgtcaggcccaaggacattggcgtcctagtggtcaactgcagcctgttcaacccgacgccgtcgctgtcagccatggtggtgaaccattacaagctgagggggaatattgtgagctacaacctcggcgggatgggctgcagcgccgggcttctgtccatcgacctcgccaaggatctgctgcaggtgcaccccaactcttacgccctggtgatcagcatggagaacatcacactgaattggtactttgggaacaaccggtccatgcttgtgtcgaattgcctgttccggatgggtggcgcggccatcctgctctcgaacaggcggtctgacaggcggaggtccaagtatgagctggtgcacacggtgcgcacgcacaagggcgccgacgacaagtgctttggctgcgtgacacaggaggaagatgagattggcaagattggcgtgtcactgtccaaggacctcatggcagtggccggagacgcacttaagaccaacatcaccacgctggggccgttggtgctcccattatcagagcaacttctcttcatgggcacattgattgccaagaaggtgctcaagatgaagatcaagccatacatccctgacttcaagctggctttcgagcacttctgcatccacgctggcggccgcgctgtgctggatgagctggagaagaacctggagctcactgactggcacatggagccatcgaggatgaccctgtacaggtttggcaacacatcaagcagctcactctggtacgagctggcgtacactgaggcaaagggtaggatcaggaagcgcgacaggatctggcagatcgcatttggttctggattcaagtgcaacagcgccgtctggaaggcactccggacggtgaacccggccaaggagaagagcccctggatggatgagattgacaacttcccggtggatgttccaaagatttcaaaggttggtggcgcttgaagaaccattcttcttattattaggtggcaagtggagttgggtgattgtcaggggctgggcagagatttattccatcgtttccaccgttggttcttgtattcagttgtagcatggcatctgtgaaggaacttgagtagatgattcggttaggtagaaagggtgtgttcttcggctcgctagggttgtctgaatgcctgatatgtcctatttattcagattggagagagcaatcgatttgcattctttgctgcctgattgagatgttcacattgcaggccaacttaaacttgtaattccccaaaaaaaaaaaaaaaaaaaaaaaaaaaaaaaaaaaa

SEQ ID NO: 22789 - DNA, 253 bp, Zea mays
  Clone ID: MRT4577_120786C.1
cttcggccaagccgtcccccaacccgtccgtcaccccgttcggccacgcgtccgcccacggggtcctggtgccctatgtccaactcgctttgacagacccagcggtctgctaccaacaacacatgattggtggtgccctcttttagattgctcatttggtggacctcaatcataaagtgctctcgatgatgcatgtgggcaaccacaaatgcgcacgtgcatttgcagatcttaacgtgaaaaaaaaaagaag

SEQ ID NO: 22790 - DNA, 332 bp, Zea mays
  unsure (1)..(332): unsure at all n locations
  Clone ID: MRT4577_120787C.1
aaaaaaacaaaaagggtggtacatcnncnttgctcagttgccactgggcctccaaaactgtgctttttctacaccagaaataaatattgaaggcatatctttttttttttttttttaancnnnaaaaccangcggggggggggggagcgtttttttttnaaancnncncttcttttnnaaggaaggatactcaacccccgntnccgctctaccangnaanncatggcaatggatgggaagggggccnttttcttgctggaacaacgggtttttgcaaagcctcgggctttgaattgggcggcatattngccggaagagttctttttttctga

SEQ ID NO: 22791 - DNA, 394 bp, Zea mays
  Clone ID: MRT4577_120788C.1
ggggggaaaaacaatttttggggtcaaattccccaaacttttggggccttgggggggttttaaaactttcccccattttcaggggggggaaccccccccccttttcaaaaaaaaactggcccctcccccaaccctttttttggggggggggcaattacccccttacccctttttggccctgagaagtttttcaggccccccctttttgcttggggggtttggtttcaaacttggcccaaagcttgggggggtgtttccccccgggcccactgggacaatttgcccaaaaaccccccctgcccgtgcctttggacccttttggggccctttggaaagcccaaaaaaactttgggcttttaaaaatgcccggggcccaaggggggggcccccccca

SEQ ID NO: 22792 - DNA, 642 bp, Zea mays
  unsure (1)..(642): unsure at all n locations
  Clone ID: MRT4577_120789C.1
ttccggaaaaaaaaaactacgccgccatgttctgcttctacggcgagcgcctccccagccagcgcaagttcaacttcccggccgcgccacgccccgccatccccgaccacctccgcgcgcggctcaccgtcgccaacatcaaggccatcgcggcggactacggtcggagctgcgccgccttcttccttgcgccggctcagctgtgccctagtgcaccagctgccgccgccgcatcaacgacgccacctctgatggtggtgccgccagccactgaaagcgccgccgccgccgcctcccgggctgaagaagcagtcgtctccacaacaacagatcatgtcgtccctgctgctgctggcaacgccgggaaccatgtggatggaggcttcatggaaactgctgactgcctgctctcctgcaacccagatgatttcgtcggggtgttggaggacatggacgacgtggatctctttattggccagcagcacaactgatccatcgatcctgcctgctggctagggtagtagctgctgtgccactgcgtgtgaaactagctagccatgcctgttgttcgatcgatcgactggatctgtcttaccaatactagaatcgtcccgtataatatgntatagnattataattttt

SEQ ID NO: 22793 - DNA, 601 bp, Zea mays
  unsure (1)..(601): unsure at all n locations
  Clone ID: MRT4577_12078C.1
cccccctgccttctcttgcccgattccgccgccgccaaccccgtcctcaccctcgccccacgccgccggatgtcgcgcgctctcctctgccatctctctcaacatcttgcctccagagaacgcgatatgttctgttgttcccaatctccgccttcgctccggtcgccgatcccgaccactccgatctagatcagatcgctggtcctgcctgtgcacttggttcattgatgtgatccctagactcttgacggcgactggttcctatgcgacgcggacaggacagggttcgagaggctgggtccaggcggtgtggggtagatctacttcatgctgccctccgtcacggcctgcggcacgaggactcatctctcttgtcgtcagggtccgccactctctcctcccagcactcctgagttatgcttgttccattccctccagggacgcataagcgggggctgtagaggaggcggatgcgccagcgaccgtgtcgcattggtccgcgatgtggctccggggacactgtcatcctgctccatgtgtgccccacctccgtgctctaggngccgactagagtgacatcgacgtctcctacccatcccta

SEQ ID NO: 22794 - DNA, 119 bp, Zea mays
  unsure (1)..(119): unsure at all n locations
  Clone ID: MRT4577_120790C.1
tctaatancaaaccctagccccaccgcgcgaatgggcgaagtgctagagcgggccggcgactccccacacgcacgccgaaagccgccacctcccccggatagcccggaggaccgcacgc

SEQ ID NO: 22795 - DNA, 942 bp, Zea mays
  unsure (1)..(942): unsure at all n locations
  Clone ID: MRT4577_120791C.1
cccgacccgttcctcgtcgtcgtcctcttcggatcttcgcttcatccacacacatcgcatcccttttttctctctctcaggggaggggcggcgcgtagaggcncgccgccgngcttcgggcntcccatctgacaccaccggcattcnnncaccccgctgccccccctnntgcccccccccgctccctncccctccnnccactnnggaggggggggggtctncctccctccccccccccncgnnnnnncccccncnccttcccccccnnnnnnncccnncccccccccnccccnccnntccncccccnacccccnccccccccccnccccccccccccncncnccnccaccccccccccccccccccccccnnncccnnccccccccccccncnnnnnannccccccccccccccccccccncccccccccnacncccncccccccccccccccacccccccaccccccccctccccccccccccacccccccccctcctccntcnnntncccctttcctcccnnnacccattaccttnnncctctccccccccccccccccccccccccccacccccccccctcccccccacactcccccccccccctcctnnntcttccnnncccccctccnnnccctacacaaccccccccnnncccccccccgcccccccccctcaaccnccaccctcccacccacccaataaccccnccccaccacacccccnnccccccccccccccccaccccacacataccaccacaacannnccccccccccacccccccccncccaaccccaccccccaaccacnnaactcccccnccncccccaccaccccacgacncaccccacacccnacaaaacacacaacaacccccccccccctccaaacacccaacaccaccaaccaaaccaacacacccccccccgcgacgcccc

SEQ ID NO: 22796 - DNA, 400 bp, Zea mays
  Clone ID: MRT4577_120792C.1
cgtgccgggccggaaaccccatctacgactcattacaagaacaacgtgaccccccactggggcccctggggcggtacttgaaccccatccacttttcacgactctagaccccttgggagctctcacaactcgacttttctggacaatacacttagttgttggtgcttttagaggagggggaggagggtacccttacctaatttacagaagatagtattaagacccgacttttctggacaatccacttagtagtttgtcctcttagaggagggggaggggggtactattacctaatttacagaagatagtattaagctccgtacccccgagggtaatactatgaacgagagggtaggtcaggaggggggggacgatcttagcaaggagggcgtaaagaagg

SEQ ID NO: 22797 - DNA, 293 bp, Zea mays
  Clone ID: MRT4577_120793C.1
gggaaaacggatggaaacccttccctaaaaggcaatcaatggaccctaataatcatgaaatagagtgggataaaataaaagccttaaacaagaaaaaatcccggaatggattcctgggccaaggggcaggcaggatcattgcataaaccaaaagctgggttcctcccccaaaaaaaaaaactcgttaaaaccctcccaaatattttgttgcgtggtcggggccaaccccacttgcaccgggaacccggggttggatccccaatttttgcggaggctccaatcggacccctggg

SEQ ID NO: 22798 - DNA, 339 bp, Zea mays
  Clone ID: MRT4577_120794C.1
atttcggcacgagggcttcctgcggatcattgggccttcatgaaccatcctgacatgggtgtcaagctgactcgtcttcacagacttctcgaacgccttgacgccagcttgtctttccatctcaatgaactgataccactattctgcacggatgttcaccagggcaagggaatgctgagagccatcgctgcttgctagtttgacgccctgtttgataaaagacaagggacgaaccatgcaccctttgaacacattcttcgtgctgctcaggaagcacttgtgctccacccatggcgtgcagttgctatcagggcaaggcctggtgtgtgggattacatt

SEQ ID NO: 22799 - DNA, 328 bp, Zea mays
  Clone ID: MRT4577_120795C.1
cggacggtgggcggacgcgtgggcaaaggccgagctagaagcaaaatcacttgaatttgaacaggaactcacaagggctggcgctgagaatgacgcactacacaagagcactccaagaacgggcagaactgccgatgaaaaccgacgaggaaaaagcccaagcagaagccgagatcgaaaccttaaagagcacaacccaatcaggcgaaagggaaacaaacccacttaaacacgaaccgcatgttgcctccaaagagctcgacatccgcaatgaagaacagaacatgagtgtgcgctcagctgactgtagcaactaaacagcaccagg

SEQ ID NO: 22800 - DNA, 233 bp, Zea mays
  Clone ID: MRT4577_120796C.1
agcaattattcggaggccgtttagtacgcgggcctctgtgcggaatctctctacaatctcattgtccttaagaacgtcaccgtgctcatgaggatcaacggcatattcaataaatgattgctttccggcagttgaccgggggacacgaatagggctggcctgatctgtaacctcgggtctctctggtgtaattgtttttcttaaagggcggatgaccctatggatgaagaaaa

SEQ ID NO: 22801 - DNA, 441 bp, Zea mays
  Clone ID: MRT4577_120797C.1
gctgcgcagcgcgagcgcggaaggcgcgatgcggcgcgcggtggaggccgcgcgcgcggccgaggcagacgggatgctcgcggtatcggtgctgccgggcttttcgctcgcggacattcccgcaccctgcatcagcgtggtcgtggtggccgatggcgatcgggccgcggccgatgcggtggccgagcgcatcgcgcggcagatctgggatgagcgcgacgcgttcgtctaccgcagcgcaccgctggcggaatcggttgcgcaggccgcggcgctcgcgcgcggcgcggaccgcccggtgctgatgctcgatcacggcgacaactgcatgtcgggcggcccgtgcgacacgatggacctgctcgaagccgcgctcgcgcacgggctcgacggcatcgtcagcgggccgctgtgcgacccgcaagccgtcgcggcgctgat

SEQ ID NO: 22802 - DNA, 429 bp, Zea mays
  Clone ID: MRT4577_120798C.1
gaccaccaaataaagatggttacaaagtttgataaggggatgttacacagatgactatataaaagacgaccaggcctgaactctccatgagttaaggccacaaacctttccgccctacaggctgcaagcccagctagacaccacatcttggcatcgtccctaatgtcttgagtaatcttagagatgtccggagtagccccatcaaagacacaagagtttctgtgtttccacaaccaccaggccactaggatcacaactgaattgaatcctttcttttgtgccttttgaattttcgttcctgacctatgccaccagtcttgaaaactagattctgcagttcctggagtgaggcactgcagcccaataagagacagggtatgaaaccaaacttccctagcaaaaacacattgtaacaaaatgtgttgcatg

SEQ ID NO: 22803 - DNA, 190 bp, Zea mays
  Clone ID: MRT4577_120799C.1
tgtttttacatgcgtatatagaaaggaagactacatcttctgtaaccatgaagaggaaaatacacttggttctgattatgtgctatgtaattggcatagctctatgttactaaaaactggtaaaaaataaatacttataattgaaatgaatttggtaatcaacaaaagacgtaaagtttattatgaaata

SEQ ID NO: 22804 - DNA, 383 bp, Zea mays
  Clone ID: MRT4577_12079C.1
cttggctctggataggcacaaagcgttagtggtagacagaaggtaaactgtagatggaaggcggatagtgtatgtttcaacattaataagatattttttggtacattgtcgtttactgtcttttattatcccattcagtctgttgttattcttagctttttcttgtttaggtggtggcgctgcatgttagtttcttttccccttcatatttctttttactagagcatcaaggattctgactgcccaactgagcttgtgccggctgatgagaaatctatagtgaatgtgaatcttgtccggacggaagaagaatttactgagccagtcaagcgtgctgctccttttgaaggggaaccaaaaaacctcatggaaccttctgataa

SEQ ID NO: 22805 - DNA, 452 bp, Zea mays
  Clone ID: MRT4577_1207C.1
aaaaaaccacaaggcaacccactttggaccaataaaacatccgaattcagatttataaaatttttttgggaaaccaccccagccccgggaaaagctaaaagggggggggggtgggttattttaaacaaatttaaatttttcaaaaaaaaaccccccctttttttgggaggaaccccccgtaaaaaaacggggccccttaaatttacggaaaatccccgggcggccagtcagggaaagacaaattttcttgggttgagggccgaaaaaggaaagggtaaaaattccagcccttaagggttcctttggcccatttaatcctaacgggggaaaaccccaaaccggaaatttgctccaaaataaggcccccaggttgggggttaacaatttccgggcacccaggccggaaaaaaaaaagcccccccggggagttggcccaacccttgggggaaagg

SEQ ID NO: 22806 - DNA, 317 bp, Zea mays
  Clone ID: MRT4577_120800C.1
gaccagatcatgataccatatcgacgcgtagcgcgtcatctttctgcactacccactgaccgtgctcaattgccctctagcaagcgaattattgatctgaccttaacttataagtgcacattagcagatgatacagaactgtagctccatgtggcactgcttcacaacagactatatgagaataaattgcagtctcagttttagagcatatcggatacatacgagcgtgatttactcgtccggagacgagtaccctagcgatctcagacttgccataggagtatacacgttgcaactgtacatatggcatgagcatg

SEQ ID NO: 22807 - DNA, 256 bp, Zea mays
  Clone ID: MRT4577_120801C.1
agaaagagagacaatcgtcctatgcgcgttggccgggggagtctccgtatcctttccattccagcgatgccatcatcgccagatacacgatccactccgcaccatagagacctcaccaacctccttctcgcatgctggggcgcgccgggtgtgatcagaggtcaggaggctgccgcagctggcgctccaggagatgtgggagcacgtccaccagcctgctgagatgctgcgcgatgccaacgctgatcttcgcatc

SEQ ID NO: 22808 - DNA, 2211 bp, Zea mays
  Clone ID: MRT4577_120802C.1
attcggctcgaggggcagccagcagggccgggcgggcaccgagcgctgttgtgtcggtgcccaagctgggaaaaaaatcgccggagggaagagaagccccggcggctcccttggttggcacttggcaagcaagcagcaacccatacccgtctccagccgagatctgtctcgagctccggccgcaagccggcaggcgaccgcagaggcgcagattccggatcgaccggcatggacgcgggggacaccatggagaggggcgttcgtgctgtgctccggcctaagctgctcgctctcccgtcaggtctcacgcgctctatctcaatgggcactccacgcctgccgacgccctgcacgccgcgctctcccttcctgatcactccacaccggctggcatccttcacgccggatcgtcagcgatccattggagcgaggagccatggagacatggaaaagactcaggggccagagactcaggacggcgacttgcaagtgccgctccttgatgataagaactgcgccggcagcaaggcgccattggtagttcttgggttcgagtgcttggagagcacagctttcaatggcatctcgacgaacctggtgatgtacctggagaccgtcctccacggcagcaacgtggccagcgcctccaacgtcacgctgtggttcggcaccagctacctgacaccagtcttcggcgccatcatcgccgacgccttctggggcaactacaacaccatcctcgtctccctcgccatctaccttcttgggatgattctggtgaccttatcggcgttcctgccgacggacacggtgctcggcggctcctcggtgttcggcgcgcacacggtagcgttcgtggggctttacctcgtcgcgatcgggagcggcggggtgcggtcatcgctgctgacgttcggcgcggagcagttcgatgacgacaatgcggcggatcgcgagaacaagctgtccttcttcagctggttttacctatgcgtcgactttggcccgatcgtctccggcctgttcatcgtgtggatccaggagaacatcagctggggcctcggctttggcatctctaccgcctgcatcgcgctggccttgggcgcattcgtgctcgccacgcccatgtacaagcgctcgacgcccaccgccggcaaggcgtccgtcatctccgactccgagacgggcttggaagcgatatcggaggaggcgggctcgtcgcagaagctccgcgccgcgacgaaggcagaggagttcaagaccctgctgggacttctgcccatctgggcgaccagcatcatcgtctcctcggcgtacacgcagatgaacaccaccttcatccagcaaggcagcgccatgaacgtgtccgtcctgtcggtgcaggtgccaccggcgtcgatgggctcgttcgaggtggtctgcgtcctcatatgggtgctgctgtacggccacgtgatcgtgccggcgctgaggggatgcgggttctcgttcggcggcgacggcgaaccgtctcagctgcagcgcatgggcgccggccggctcctcatggccctggcgatggcggtcgcggcgctcgtggagatgaagcggctcggcagcgcggcgcgcggggaggagatcaccatcgcgtggcagattccgcagtacttcttcctggccggcgcggaggtgttgtgctacatcgcgcagctggagttcttctacgaagaggcgccggaaaccatgaagagcacgtgcacgtcgctcgcgctgctcaccatcgccctgggcagctacctcagctccttcatctacgctatcgtggcagcattcacggccacggcggacagtcccggatggatctccgacaacctcaaccagggccatctcgactacttcttctggaccatggccgccatttcaacgctcaacttcgtcgtgtacagcgtgttcgccaggaactacaagcccaagagtcaagactatgctctcatgacgtgactacaaacagctctgctcccttaatttctcgtctggtacattcgactcggttcctgtgttgcatgtttgccaatttgtggcttgcgaagggtaatttgcgagttctcgttcaaccgctagtgcgtctgtcaatatgagactgtacataacatatgtactagccaggtgcctgtgcattacgacggcatacaaaatattgaataaaatggtaacgcacaactaaatcagttc

SEQ ID NO: 22809 - DNA, 230 bp, Zea mays
  Clone ID: MRT4577_120803C.1
ggatgatacgcctatctttgactgactacgaagagacccacctcatgctatccgaactgctgattgctgatgcttaaatcgaccctatcttggagggatacattctgctgcctgtatagcatcatgtagcctggtgcatctggcgtcacatgtgaacacgcagatagtcggatcgtctttctcgtaatagaatcgtcgatagtgagcacttacgctgttgcaggaacatt

SEQ ID NO: 22810 - DNA, 397 bp, Zea mays
  Clone ID: MRT4577_120804C.1
cccacgcgtccgtaggaattgaacaaggtcttttcacaaaagctggaggttcagacacagaggcttgaactattgacttctcaaaggatggctaacgagaatgccctggcgaaaccaattgacacacgccccatcaacgaggcaacaatgtatgcggatgaaggagacgaggtaagtgtccttcaccaagtatttagatggaatttggtagttgatcctaccacataatccttgatgttaattttttgtgctgtcatgttgtgttcccagagtatggttccagtgttttagcttgaataagagctagtttggaaactcaaataatttccctatcaatcccctttaatcccagagaggatttgagttttcaaactagccctaagagcttgtttgggag

SEQ ID NO: 22811 - DNA, 301 bp, Zea mays
  Clone ID: MRT4577_120805C.1
gcagcacctgctgctgcgcgtttggcttcaagaacgtctgcttggtctggggctgctgcccggtcgagggcgccacctgctgcaaggatcacgccagctgctgcccgccgggctaccctgtctgcaacgtcagagctggaacttgctcggtggtaaactctctgctccttgatgtctggcataatagcatgctgtttgtgcttttgaccagactagtatacttaacagcatgcatgagctaataaccgagagatatctttgttttgtttgaactgagcagagcaaagacagcccactgagc

SEQ ID NO: 22812 - DNA, 274 bp, Zea mays
  Clone ID: MRT4577_120806C.1
ctgaccacctctggactcgtcccgagcggtgacgtaggcagccgctgtgacgggacacctacgggactaacacttgaaaccagtggaaacagcgaccggtgatgttcacgagtggatggatcactgcaactatgatcgtcaggactgtctgtggacctagtagtacagcgtgattaagggccaccagcgcctacaccgacacccactgagcgattcgactacgaagcacgtctagtgctcttgctagaccgttgcagagctgggactatgttac

SEQ ID NO: 22813 - DNA, 399 bp, Zea mays
  Clone ID: MRT4577_120807C.1
ttttttttttttttttttttttttttttttttttttttttttttttttttttttttttttttttttttttttttttttttttttttgggggggaaaaaaaaattgcaaccaaattttgtttcaaaaaattgcaccgcacagaaaaccacgatcagattccgaaggggccaaaatttgaccacacttttacaacccacccccccaaattacgacggggacattttcagacgacggggagaggaaacccggacttggggcttttaaaattaatttaaataccccttgacagggaaaacctttacctggtccaaaacggggcccaaaagggaaacccccccggggacctttgtgtggtattaagagccttaaaaagggaggggggtgcggaccccccccgcc

SEQ ID NO: 22814 - DNA, 108 bp, Zea mays
  Clone ID: MRT4577_120808C.1
gcaatcttcacttctgtagaatcattattcatgtgcgacaacggtcttgtcaatagttttacgaccatcctgtaccttctctgggggccctggcccctcattctgttc

SEQ ID NO: 22815 - DNA, 231 bp, Zea mays
  Clone ID: MRT4577_12080C.1
attctattatcaggggggacgtatatatgggtggggcaggtgaaagaacaattccacatagaacaagagcatacgacagcatgcatatgtgtaacaaaagcaaaagattggatccccatgtgtttgtccatatagacacatattgtttgggctaggccctggcaattggttttcaggggaatgaatgcaaccaccaaagctccttgggaggacctgagcggtggttgggaa

SEQ ID NO: 22816 - DNA, 406 bp, Zea mays
  Clone ID: MRT4577_120810C.1
tcgaaacacatataagtcagccaccatgggtcgtatgcacagcagcggaaagggtatttcgggatcagctctcccataccgtcgtaccccaccttcatggttgaaggtcacttcatctgatgtctcagagctcatttgcaagctcgccaagaagggtcttaccccatcccaaattggtgtgatcctcagagattctcacggtgttgcccaggtcaagaacgtcactggtaacaagctcctccgtatcctcaaggccaacggacttgcccccaaaatcccagaagatctttaccacttaatcaagaaagctgttgctatccgcaagcacttagaaaagaacagaaaggacaaggactccaagttccgtcttattctcgttgagtcccgtgtccacagactcgctcgt

SEQ ID NO: 22817 - DNA, 345 bp, Zea mays
  Clone ID: MRT4577_120811C.1
ccgcgcgcgtgctcgggtaccctatagcgcgcgcgccctttttattattttcttttaaagaccaaaaaaaaactggtgtttttatgaggctgttccggggcaaacctcccaacataaactgaaacaacagttcacgtccggttccaaaatagaaattcatttacaatgttctctagagccctagttggagtacatacaacacatacaactgtaatacatatcatcaaatgatataatccctaccacgaccatcatgcccacctagtctactagtgcaacagcccccaggtttgagcatccttgattaatcatccaaccaatcaccaccctatatacttgatttct

SEQ ID NO: 22818 - DNA, 310 bp, Zea mays
  Clone ID: MRT4577_120812C.1
gtccgaggtcaaaacctgctccgaggtggacgagccgtagctccccgaatgggcttaagaagaggtggtgttcgaggtcgtggaggtcctgggagagggggcctagggcgtggagctatgggtcgtggcggaatcggtggtagaggtcggggtatgataggtcggggaagagggggctttggaggccgaggccgaggccgtggacgagggagaggtgcccttgctcgccctgtattgaccaaggagcagctggacaaccaattggatgcatatatgtcgaaaacaaaaggacacctggatgctgagttgg

SEQ ID NO: 22819 - DNA, 138 bp, Zea mays
  unsure (1)..(138): unsure at all n locations
  Clone ID: MRT4577_120813C.1
naaataatgccgcgtacgcggctcggagttcggctctcgcgctctttgggatttacatggtcaccgacgagcccnacgtgcccatggtggatgtgctgcagcctggattctacatgcttgctgctggctactgcatgt

SEQ ID NO: 22820 - DNA, 682 bp, Zea mays
  Clone ID: MRT4577_120814C.1
cccacccgcttcggcttctccctcctcctcggtcgctcgatcgctcccacgtgctcggctgcctccacaaaccaccaccatcattcaggattgcatggcggtgcgcgagagaggggtgagcaggttgcaaagatgagggagatcctgcacatccagggtggccagtgcggtgaccagatcggcgccaagttctgggaggtgatctgtggcgagcactgcgtcgacttcacgggtccgatactcggagacctcctctgatcatgattgagctcgagcggatcatcttctactacagcgaggctggtggtggacgttacttgccccgcgccgtgctcatggacctggagcccggcaccatggaatacatccgcgccggccctttctgcggaatcttacgtcccgacaactattgctacggacagggctgcgccgcgaacatctgtgtcaagggccactacaccgatggcgccgagctcatctgactacgtcctcgacgccatgcgcaaggaggctgacaactgcgactggctacaagggttccaaggatgccactccctgtgtggcggcactggttctggcatgggcacactgttcatctccaagatccgggaggagtacccggaccgccatgatgctcaccttctacgtgttcccgttgcccatagtgtccgacaccgtcgtg

SEQ ID NO: 22821 - DNA, 415 bp, Zea mays
  Clone ID: MRT4577_120815C.1
tgggtacctcgaggccggccgggcgtggttccaggatcagcagtggtccagctgtcgcaataaagcaattgaattttgtttttcggtggtgtatatggcaatatggcatggcttttacatatgtactagaatatggtggtcgtgtgtatggtggtatcgctcgatctcggaaggaaagacgatcgatcgagcgttgccgcgagctggaggcctggaccatgaatggtccggtccgtgaacgaacatgtaactagtgttcttccgtcgtcgttgttttcttgcatgctccttgaatgaacacgccatggtccaaaaaaaaaaaaaaaaaaaaaaaaaaaaaaaaaaaaaaacactaaaaataaaaattaaaaaaaaaaaaaaaaaaggggccctgcacgtctagatttagggggcc

SEQ ID NO: 22822 - DNA, 316 bp, Zea mays
  Clone ID: MRT4577_120816C.1
aaggaggaaaaaaccttaaataaacgggcccaaaaaaacttaaccggtttccctaaaaaccacattaaaaccaggggaaaaaaggaaaaaacccccgggcgcacccggaccaaaagaagaggggccaaattttacagaaaagcaaaaaaacgaacagggggaccctttcagggaaccaaatccacggacgggagggagggacaaaaccgggggggtaaatggggacaacccggtcccttcccttaaccatcaacgggcctaaacaaaccgccctagggtcatcaaaagggggaccccaaagccccacgggcggccc

SEQ ID NO: 22823 - DNA, 589 bp, Zea mays
  Clone ID: MRT4577_120817C.1
ggccgcttttttttttttttttttcctttttttttttttttttttaaaatatttttttttttttttttttgtttttgtatcctacttaatcgttggattaaataaccaaaatcccaactaagtttcgcaaatttgggctcaaaaaataaagcctgagtgcgccttgagattcacgcggactgggggggagaagccatgctaataataccattaccagccgcccgtaagccccagcccctgcagccgagccgccgacggccaactccaaaaacagacctacagaaaaccctagtgtcctaaactttttcgggcgtacgtatagtggaaacaaattgtgaccgtatggcccccgtatctatactttcttcaccaggaataaagaatccctgaattgggtgcgcgcgcgccccctgccctaagatcgcttctctggcaaaaaaattattcacattctgtgggcgggcggcacgccctcccctttccattcctgatcacgccgttctggtcaccagtttgacgccggggaggtccccgcccaactccttgaggaacaccagcaggttgccgctgggtttcagccaggagcgcg

SEQ ID NO: 22824 - DNA, 486 bp, Zea mays
  Clone ID: MRT4577_120818C.1
aaaaaaaaaaaaaaaaaaaaaaaaaagggaaaaggggaaaaaaaaaaaaaaaaaaaaaaaaaaaaaaaaaaaaaaaaaaaaaaaaaaaaaaaggggcggccgcccaaaaggaccaaagcaaacgaacccgggcatgcaacggaaaagcccttcaaaagagcaaccaaaattaaataaacggaccgccgtgaaacaacgacgaaacgggaaaaaccaagccgttaccaaacaaaatcgcctggcagaaaaccccccttacaccagcgggcaaaaaagcaaaaaggcccacaccaatcgccctgccaaaaaatggccaaacctaaagggcaaagggaacccccccgggagcggcaaaaaaaccccggcgggtggggtggtaacgcccagcgtaaccgctacaccggccagggcccaaacgcccgctcccttacgcttactaccataccttttaaaaaacgtgcaccggcttcccccgaaaagctaaaa

SEQ ID NO: 22825 - DNA, 443 bp, Zea mays
  Clone ID: MRT4577_120819C.1
taggggccttttttttttttttttttctaagaaatatttcacatgatccttattgtaccaaccaccctgcacatcgcatttcacaagtttctgcattatcccatcatggatcatatagaaatttaccctctcttccttttactccttttacacatacagatacccctcgagtgcaaatacgaaggcacatgatgataccccacatgtacagcatcaacgacaacaacaaaaaaaatccatatcatttcatcgaacaccttccatgcgccatccacaacgagcaacctagattgaaaggaggagagacgtatcctacctccagggcctggccgcggtgctggcgcttgtccatactccttgaccactcgctgtgaagctcaacggatccgaggatgtttctggaccgcgccaaccacagttcgattctccggacaaggagtgtg

SEQ ID NO: 22826 - DNA, 222 bp, Zea mays
  unsure (1)..(222): unsure at all n locations
  Clone ID: MRT4577_12081C.1
ccgggnacgactgcccgcgcccgcgcggtacctggacggcgtgttcgtggccgccgacggacggccctacgtgcgcgagaagatgatctgcgtgttctgagcggtactccggtgaggtcgggtggtgacactgtgatagccgcttcactgtgttgcatgtaacgtagtggcggtatatcggagaggcttggatcttggtatggaacggtccagggggggggg

SEQ ID NO: 22827 - DNA, 1585 bp, Zea mays
  Clone ID: MRT4577_120820C.1
aaaaaaaaaaaaaaaaaaaaaaaaaaaaaacggtccccactcctcgacagcgggcccggggccggccccgccagatctccggatcgttcatccactggtcgagaatccagatctctcgccttctcgctaccaaataccaaccacgaagaacaggaagaatgcccaaactgtcgtgtcgggtgctctttgcggctcttctcatcgcttcgctagccgctctgctcgtccggttcccgatccacaggctcctcaatccccacgccgccatggaccccgactccgagctcgagttcgagatgcccggcgtcttgcgtgtgtacaagaccggccgcgtcgagcgcttcgacggcaccgagaccgtcccgccctgccccgatggcgatcccgccaacggcgtcgcgtccaaggacatcgtcctggaccccgccgcaggcatctccgcccgcctctacctacccgcgggagtggatgccgggaagaagctccccgtcgttgtgttcttccacggcggtgcgttcatggtccacaccgccgcctccccgctgtaccacatctacgccgcctccctcgctgccgcggtgcccgccgtcgtcgtctccgttgactaccgcctagcgcccgagcaccgcatccccgccgcctacgacgacgcattcgcggccttgaaggcggtcatcgccgcgtgccgcgcggatggcgccgaggcggaagctgagccctggctcgccgctcacggcgacgcctcccgcatcgtccttgcgggggacagcgccggcggtaacatggcgcacaacgtggcgataaggctgcgcaaggaaggcggcatcgagggttacggcgacatggtcagcggcgtcgtcctcctgtacccttatttctgggggaaggagccgctgggcgcggagcccacggatccccggctaccgcgcaatgttcgatcccacttgggaattcatctgcggcggaaagttcggcctcgaccacccctacgtcaacccaatggcatcgccggaggagtggaggcagcttggttcccgccgcgtgctggtgaccacggcggaccagtgctggttcgtggagagggcaagggcttacgcagagggaatcaagaagtgcggctgggagggggagctcgagttctacgagaccaagggtgaggcgcacgtcttcttcttgcctaaacacggcagcgaaaaagccgtgaaggagctcgccctcgtggccgaattcgtccggcgctgttgaggtgcctttcgctttgtttgcccggacctggtgagtagttcagcgagagaaaaaaaatcgcacaattagtgacttttattcatattgcaagttaagcacagaggttcagtctcgattcagaatcctgatcttgaatttctgttgtgcatcgaaatttatcctgaacagtacatactgtaatttcgaagtgcaggctagcgagtggctaaatgtattgtatacttgaaaactgtccgatgtattgtatacttgaaaattgcccctgtttctttcggactgtacgttgttagtaattgcatcttttgtttgaaaaaaaaaaaaaaaaactgcccgccttggt

SEQ ID NO: 22828 - DNA, 752 bp, Zea mays
  unsure (1)..(752): unsure at all n locations
  Clone ID: MRT4577_120821C.1
aactcccagaacacgccattgaatagctcgctttgaagtaagaagaatgggtgagccaccggtgaagctcatcagctcattcggcagtacgttcagccaccgcacggaggtggccctgaggctgaagcgagtgccgtacgagctcatcgtcgaagaccttcacaacaagagccaactgttgctcacccacaaccccatccacaagaaggtccccgtgctcctccacggcgacagaccagcgatcagcgagtcgctcgtcattatcgagtacgtggatgaggcttncggccgggcggcccctcctccccactgacccccacgcccgcaccaccgcccggttctgggctcacttcatcgatcaaaagtgcatgaagtcgttgtgggcggcgctctggatggaacctagcgaggcacagagacggtccatggtagaggcaaaggggagcctcgcgttgctagaggagcacctcggggagaggagtttcttcggtggtgactccatcgggctcgtggacatagcagctagtgtactggcacactggcttggagtcatggagaagatctccggagtgaccgtggtcaccaaagaggagttcccggccctttgccattggtctagacggtatgtaggtgatgaggatgtgaagacatgcttgccggagaggggtgacctcgttgccatgttctctgggtgcaaggagatgtttcgatcaatggcaatggcgatgccacaggtagtggaagtggtccac

SEQ ID NO: 22829 - DNA, 627 bp, Zea mays
  unsure (1)..(627): unsure at all n locations
  Clone ID: MRT4577_120822C.1
ccttgcacttgctcaccaacaattntgagcaagcaaagctgtcatggtattacgctattggtaccaatgcggatctggacacatggccttcctctgaagtcttggagctcttcaacagagctgaggacaacatggaaaagggtacagagatgtgggaggaaatggaagaacagcgcctgaagaatcgatccaaacctaacctggaaaatgccgtgctagagaagatgggcatggaggagtatatcaaagatgtatccactgatgacgctgctgaacgggcttccaatatgaggtctcagatcaatattctgtggggtatgctgctttatgagcgctcggttgtggagtttaaattaggactgccagcgtgggaggattgtctgatggcagcaattgagaagtttaaactaggaggagcttcagctacaaacattgctgtgttggtgaagaaccactgtgcaaatgaaactgcccaagatggtttgggcttcaacgttgatgaaattgtgcaagcctggaatgagatgtacgacattaaacggtggctgcgtggtgctccatccttccgtctcgagccattgtttangcggagaactccgcaactgcatatggcactggagcatatat

SEQ ID NO: 22830 - DNA, 384 bp, Zea mays
  Clone ID: MRT4577_120823C.1
gttccttctctctcggcttggagctcacccgtatctgggatataaaggcaggcacccacgataccctggctatcaatcccggtgcctccaagttttgccgagagggtcagcagcaacaagaaaccggagcttgaaactcgctaccgctcgcaccatgatcagtggcggaggagaaccattgccatctgcccagccgatgccctcatcccctagaaccgagcaagcaaccacgtcatagcagaaacagagagggtgagagaaagttgggaaggcgggcggctgcgttgagctgtagccgcgccgtgcccagaacctcgggttcatcctcatcggtcgctgcggtgcttctacaggacacagggagctcttgctacgaattctgcg

SEQ ID NO: 22831 - DNA, 610 bp, Zea mays
  unsure (1)..(610): unsure at all n locations
  Clone ID: MRT4577_120824C.1
cggatccaggcggcgctgcttacgtccgggcagctcccgcggagtggggagctccacgacgcgctcatccgggccctctcccgctccgcgcgcccgcacctcgcgcttccgctctacgcccacctcctccgcgccggcctccttcccaccccgcacacccttccttccctcctcaagtccatggcgctgtccccggcagtaccgggcgccgcggtgctggcacttaccgtgcacacccacgccgtcaagctcggtctggaccggttcgtcctcgtcagcaacgcgcttatccgcgtgcacgcgggcttcctcggcagcctcgccgacgggcttctcctcctgcggacggccgctgcagnggatgcctcgacgttcaacaccctcatcaccgcctacgcgagggcgggccggctcgctgacgcccgggcactggttgacgaaatgcctgcgaggaatgctgngtcttggagcgccatggtgaatggntatgttcaggccggtgatgggagggaagcactgangatattcgcgcggatgcangctgangatgtccgcccggatgacacagtgctcggggggtgctcgcagcttgtgcacagacggggcactg

SEQ ID NO: 22832 - DNA, 602 bp, Zea mays
  unsure (1)..(602): unsure at all n locations
  Clone ID: MRT4577_120825C.1
ccgggacggcccatcacccatcacgtatcgctccctccctcggccctcgatcgtacggcgcgagcgttgcgctccacgccttcctcttcctcgtctggcatcgcgacccgccgcaccccacccagccgnctacaggccacagtcgaccggcttctgcaggtcctgtccccgggggcgcgtggctgcagagctactgccatgactgctcgctctacttaaggggaggcggaggtgcagcgcactttattgcaggcgccccagtaggtgatttctcgggattgggagaaggccgcctcctaccaggggggcatgtggcagtcgttgggtgggcggctacggcttccgggtgcggaagcttctggttctcgagcaagcgtacgatgttacaatcttttgccttctgcttgtatttggcgggggcgtgcacatgtcagccttctgttactgtggccagcctgacagcattccttaaggttgatgcctcgccacattttgcccggatgatccctggaacactgtgtgggatcttttttgaggtgatcgaccatgcaggagctgtttggctagtgggctgagctttgtggtcacaggggttgcgcagc

SEQ ID NO: 22833 - DNA, 216 bp, Zea mays
  Clone ID: MRT4577_120826C.1
ataaaaacatcccatatagcgatgaacgtttctgttacttgaggaggggtgacaacatgctggcgaaggtcgatacttccctactcaggctttgaactgtgcatttaaggactgctttaagacgttgatcaacttcgccaatgatagggatcgctatagcaagtgggaagctggtgacctggcctttacaggtgctgctcatgcttactctatggt

SEQ ID NO: 22834 - DNA, 361 bp, Zea mays
  unsure (1)..(361): unsure at all n locations
  Clone ID: MRT4577_120827C.1
tctcgcagnaattcggacttcgnagcggcacgcccagggcaggtaccgatggccccagacaggtgttgcggtggatatggcgcaagcgcgaacagcgtccgtcaaattcatgggtttcaagtgcggcatttagctgctggtagagctgaatttattattgtttgtctcgcttggtttgactgaattggctacggctatgtttgttgttagtcatcgatggatctgtgtgactatgattagatgcttgttcagaatacatccgttcacactgcacgaaaaacaaaaatacgaaaagtacctggggcgcggagaccacggctagagtccgaaattccagacacactcggacggccgtatacta

SEQ ID NO: 22835 - DNA, 239 bp, Zea mays
  Clone ID: MRT4577_120828C.1
cgtcgcctgttggtggggttggtgtctggtgtggtggggtcggcgctgcagcggaggcagcagtcaccgattcacgaacccaccaaaacatcctctccgtcccctgtacatgcacagatccagagtctgcgagagatgatggccaatgggttcgtgcgtctcccgctccggcgcgatgtcgacggcggcggagtccgtgcacgcgctcacggccaaggtcgtggacctcgacggctccg

SEQ ID NO: 22836 - DNA, 378 bp, Zea mays
  unsure (1)..(378): unsure at all n locations
  Clone ID: MRT4577_120829C.1
ttttnnnggnttgttaagctttttttttttttttttttttttagcacatgggataaatatccatttgcctgaaacagggaagggtgggtgggacaaaacaccgagctttatcgggtttttcgttttggggtgtgtaccgacactatttttcaggttcttttttgccggggggtggtggcactttaattcacatatgctacaattttacgcacactccaggtgagctttatagcttaatttcctggagacatgggctgttccattttgccagaaggggcggttgcgctgcttccttatcagcgctgtctgaaacggcaggttttgggcccttggcctttattcctggggtaagcatccaagggaggcagaacgagattg

SEQ ID NO: 22837 - DNA, 415 bp, Zea mays
  Clone ID: MRT4577_12082C.1
gtgcttttgatgttgttataattgatgaagctgcacaagcggtggaacctgcaactcttattcctttgatccatggctgcagacaaatttttcttgttggtgacccagttcagttgcctgcaactgtcatttcacagactgcacagaagttgggatatggaacgagcttgttcaaaagatttcaagctgctggttttccagtgcaaatgcttaaaatccaatatcgcatgcatccagagattagtacattcccttcaaaagaattttatgaaggggtactacaagatggggagggcctgagcaggaaacgtccatggcattcctacagctgcttcggaccgttttgtttctttgacgttgatggcattgaatcccaaccatctggaagtgggtcttgggtaaaccaggatgaagt

SEQ ID NO: 22838 - DNA, 294 bp, Zea mays
  Clone ID: MRT4577_120830C.1
accaagccttattggacatttatttaaagggacaacacacagtccatgggacactgttttttttcaaactaagtaaaggggggctcaaaggtattcgcagcactcattgtcccaaaccatttacaccttgtacgaaagcttaaaaacaatcaaaaaggggggggttttttttttgtccctagaccaagttgtaaaaataacattgaccaccccggggttttttactttcctaggacaaaaaacatgtgggacaaaacaaaaagcaaaattccttctgaaaatgttagaaatttt

SEQ ID NO: 22839 - DNA, 577 bp, Zea mays
  Clone ID: MRT4577_120831C.1
cctatctcgtcgctcgtcgtttcccccaatccgctcgcctcgcctctcctcaaccgccgctccgccccccgcgccgcctcctgctccggctccggcgagatgtctcgcttcgggcgctccggcccgccgccgatccgcgacacctactccctcctcgtcctcaacatcaccttccgtacgacggccgatgaccttttcccgctcttcgacaagtacggcgaggtcgtcgacatctacatccccagggaccgcaggactggcgactcgcgagggtttgcctttgtgaggtacaagtatgaggacgaggcccagaaggcagttgatcgcctggacgggaggttggtggacgggagggagatgatggtgcagtttgccaagtacggcccaaatgctgagcggattcagaaagggcgaatcatggaaacggtcccgaagccaaggggtcgttccagaagccgcagtccaagacgggggtaccgtgatgatcatcggggcagagattctagaaggcgaagtcggagtcggagtggagatagatatggacgtgacaggtacagagagagggatcatcatcgtc

SEQ ID NO: 22840 - DNA, 590 bp, Zea mays
  Clone ID: MRT4577_120832C.1
gttgttggtgtttttgttgatcattgatccaacgatcgtggtaagggcgggtgaagtcaccacagcggaattgcataagagcccctggggaactcaaatactaacccgcattccacagttttagaaagagtcttacaaattaggtgaatctcctttcttacaatttatactccaattattgggtgaatccaatatttattcttatattccctaatccatttgagtgagttggtggctcacccattgttcatgtgtcgctcctgtgacgcaagaacgtctcggtccggtgccggtgccatctgtcaaatatatcacgacgaccatgttgacgcaagttgctgtccgaggcgactccatggccatcgtctagaccagcaggatgtcgcgtcagtcatccatcgtcttgacagcaaacggtgcttgccatgacttgatgtggcacagatcccgggaaactgcggatgcgtggcgtttccccgtgaccaccgatgctgaaaaacgtgctctgaacgacgacgatcagctgagacccaggtgacaagtccgatattttcagacacggacgcatggtgtagaacaccgacctctgc

SEQ ID NO: 22841 - DNA, 353 bp, Zea mays
  Clone ID: MRT4577_120833C.1
cggccgcgtgggtcgctctcctcacgctgctagaggcgcgtgagcaggagtaactgccatcgctctgtgcccagccgcgcgtctcgtcccttcgctcgctgctgctagctcgatcgtcggccggagccatgggcggtggtggcgcggcggccgtggcggcggcgctggtggtggtggtgctgtgggcgggcgtggcgtcggcggccgtgtacgaggtgggcgacaagaccgggtggaccatcatgggcaaccccgactatgccgcctgggccaactccaagaagttccacctcggcgacactgttgtgttcacgtacaacaagcagttccacaacgtgctggcagtgagcaag

SEQ ID NO: 22842 - DNA, 150 bp, Zea mays
  Clone ID: MRT4577_120834C.1
acctgggaaaaatgccccggggggttatggatttccgcaccaggtacaagaaaatccctttacaaaccacgacaatacaccggctggtgttaaacattggggacgaccaccttattaaataaaacggccggaacggaaaaaaacaggccg

SEQ ID NO: 22843 - DNA, 599 bp, Zea mays
  Clone ID: MRT4577_120835C.1
gccattcatgaccttcgtatgaagatcattatattcgagaggatattatgcttcgaaggacgaaggtctctaaccattaacaattgtgttgccttgttcttgatctatagcatccaagaacgagtgaccaacaaagtcttacaaattaggtgattctcctttcttacgatttatactccaattattgggtgaatccaatatttattcttatattccctaatccatttcagtgagttgggggctcagtcattgttcatgtgtcgctcctgtgacgcaagaacgttgaacagctgtagtgagcaccgtcaccgtgcgtctcggtccggtgccggtgccggtgccatctgtcaaatatatcacgacgaccatgttgacgcaagttgctgtccgaggcgactccatgcccatcgtctagaccagcaggatgtcgcgtcagccatccatcgtcttgacagcaaacggtgcttgccatgacttgatgtggcacagatcccgggaaactgcggatgcgtggcgtttcgccgtgaccaccaatgctgaaaaacgtgctctgaacgacgacgatcagctgagattcaggtgacaagtccgatattttc

SEQ ID NO: 22844 - DNA, 731 bp, Zea mays
  unsure (1)..(731): unsure at all n locations
  Clone ID: MRT4577_120836C.1
attttgatgtcattagcggctcactcacgtgctgagaaagcaaagaaaggaattcactctgacaaacttcctcctgtgatgcgtataacagatttaacaatggttaattctaagaaggccaaagatttccttcccttcctgcagcggaatagaaggcatactgctgttgttgaatatgtgttcagcggtcatcgtttcaaactaacaattccgaaggagacttgcagcatcgctttttctttgtctggtgttaggtgccctggtaaagatgagccctactcgagcgaagctattgctttgatgaggaggatgattctacagcgtgatgtggagattgaggttgaaacagttgatagaactggaacattcataggttccttgtgggagtctaagaccaatgtgggttctgttcttttggagtctggcttggccaagcttagttcatttggcttggataggattccagatgctcatgtcctcacaagagctgaaaagttagcaaagcagcagaaactgaagatatgggagaactatgtcgagggtgaagaagttactaatgggtcggcctctgaatccaaacaaaaggaaattctgaaggttgttgctactgaagttcttgnntggtggaaagttctatgcccagacagtaggtgaccagagagtagcttccatccaacaacagcttgcatccttgaaacttaaggaggcaccagtcattggtgcttttaatc

SEQ ID NO: 22845 - DNA, 491 bp, Zea mays
  unsure (1)..(491): unsure at all n locations
  Clone ID: MRT4577_120837C.1
tcgtcccccccccnanaanangattcgtggtttgcaacgactcccggttcactgtcgctctcgctcccttcccttccacccctggtggccgatcgcctccgcctcgcgctgctgctctccgcgggcctctgctccgcgcgggcgcgcccactgctcgagccgaccatccgacttccgcacgagcgcgcgatggtcgacgaaacgcaccaccacgcccctcgcacactgcgggccctgctcctcctcccttaccctcgcctatcacgatcacccacaccatcgggacattcgtcatgcatatcccatggtgaaaagcggaggacttaacgccaacagaatagtgtgtccccatgaatgatgaactgcgcgtaagcctgaaaaacctgagtcctcttggcaatattaaccctccccaggatggcagtgaaaaacctgaatgaccgaagagataccctggaccatggcgccaggactgcaaagattgctgtatg

SEQ ID NO: 22846 - DNA, 939 bp, Zea mays
  Clone ID: MRT4577_120838C.1
cagatgcagcgtcgacggatacgactgggagatccagttccgcttttcaccttacgagggcagtcctgaagactactggtagcgctcgtgcttgtgtacctcggcgcgccgtgcgacggcggtgtggcggtggctctgagctgtcatctggttgatcagagctgcgatcttcgtgttccattattaacaacaacacaaggtctaaacacaacgtttaggcgtcccttggaccgctctcctccgatttacttcggcaaagggaaggttagagacgatgtgcaggcagcagcagcagctggtcgcccgctaatattcaagggtggttcatttactgtggaatgccagatcgacgtgcacagcagcagggactcagattccgtttctctgccgtcctctgacctgccccaacacctcggggagctcttgcggaaccagtctggtgcagacgtcaccttcatcgtttctggcgagtccatcgcagcacacaagagcatactagccgcaaggtccccgatcttcatggcccagttctttggcaacatgctggagaggggctcccagtgcgtggagatccaggacatgcacccggccgtgttcaaggccatgcttcactacatctacactgacacagtgcctgaccttggtactgataccaccacggtcgaggagacagcggtgatggctcagcacctgcttgtagctgccgacatgtatgcgctgcacaggctcaaggagatctgcgaggaaaggctcacccgcggcatcggcattggcacggtggcgtcgacgctggctctagcagaccagcacaacttggcccagctcaaggctaagtgcatcgacttcatcactggagggtccagtgaaaatcttctagccgtcttgagacggaagagtacaggcatctggaggccagcgacagcaacggaattcgagctc

SEQ ID NO: 22847 - DNA, 278 bp, Zea mays
  Clone ID: MRT4577_120839C.1
cggattagctcgagctccacagacagagagtctgtctcacaatgagaacgccaagctcttggaggacatcatgtcctgactgctcagatacatgcaggtacatgctacataatgaatgatcgagacaaatagcatgactcatcagcggcattatactttgagtttcacactgagaaagcggagaaacatgctgaagcagtctctgccccttggtttgacagctaaggagctgggatgaaccagacgtgctgttctgagcttgatgaaaattttaaagg

SEQ ID NO: 22848 - DNA, 396 bp, Zea mays
  unsure (1)..(396): unsure at all n locations
  Clone ID: MRT4577_120840C.1
tgcgctgcaaaaggttaccgtggatcagtggaccggaataccaaaggactgcagtgctgcatgtgcttgtcactggatcagcagggagagcagcagcagcagcaaaagaaaaagaagcctgtgaaaagaagcaaaagagaagccaccctttttctttacatcttttttttcaaagggaaaaggacggctccaccagaaactacacaactgtggtctgaactctagaccctaaagcacctaggaatacctttaattgcaaactgactcgcaacaactctaactcgacatctctctctctctctctctacctgtaatttttttcaagctctccgaacatctgaattttgaatntaatgctatcatatcaagggagtggctcttcccgccaggcggcaa

SEQ ID NO: 22849 - DNA, 269 bp, Zea mays
  Clone ID: MRT4577_120841C.1
acccgtacgagtcacaggtattgcacgaagcctaacttatcttcatgtggagttcatccaccaccatcgtgcataggggcatcggggacagcaatgttctacttgacacctacctcacgcccaagactctcgatatacaggtttgacgaggtccttgctgagaaaaatactcacgccagcgctaaaatcaacaggacgatttggttcctcgggcccgaccatgcaacgagagtcgactgtatccttcacagcaccttccgtttttatcc

SEQ ID NO: 22850 - DNA, 210 bp, Zea mays
  Clone ID: MRT4577_120842C.1
aaaaaacaaaacaaaaaaaaaaaaaaaaaaaaaaaaaaaaaaaaaaaaaaaagataataacaactaaacaacaaattattccctctatcattcaatcccacttatttatcatacttaacccaataatccattcccacataaactcatctctcagtccaatctaacgatctctaccttttcaattaccatacatcatctttacccaaaacc

SEQ ID NO: 22851 - DNA, 483 bp, Zea mays
  Clone ID: MRT4577_120843C.1
tacgtaagctcggaattcggctcgaggccttcaaagacaaaacgtcttggctgcctgcgaccgacctgagatgcgtgatgtttatgtcgaacagggtgcatcatgggaaagagggctcacagacagaacatgaaaaaagactggggagcgtgcttcaagtaccaatacagaacagattacttcgtgtcgcttacaggcgacgggtaataagcgggcgtgtccatcattgagtgatacggcttgagacgcaccctagagcatccaagatgacaggggctgcttccatgctgaagctgagtagataccgaccctgtgttggaggtcggcacacatacgcactaaggagatactttggttatgttatacataccaaaagtccatacttatgtgccgagaagaggcataaggatccagctgcaccgcccattgcaggacaaaaaactgtccaccttttaaattattaaccttcacagtgcagacatg

SEQ ID NO: 22852 - DNA, 1577 bp, Zea mays
  Clone ID: MRT4577_120844C.1
tagcatagagtgcattaacaccttgaatgaaggactcttgttgcatcatgcatctgctggatgccctaaaccacagtggtcaaaatacctgagttttcttaaaagcaggaggttttcagagcttacaaaaccaaaatactggaagggtgaacaggttgacagcataatgaccatgcaacatgttgcattgtccaaggcaaacaatgaatatccaaaaatacacacccttttctctaccgaatgttcatcatattttgactggcaaactgttggacttatgcacagttttcgtttaagcggacagcctggtaacatcacgcgcttattgagctgtacggatgaggacttaaagaactataaaggacatgatcttgctcccacacattatgttccatctatgagccgacatccattgacaggggactggtaccctgcaattaacaaacctgcagcagttctccattggctcaatcatgtgcagactgatgctgagttccttgttatcctagatgctgatatgatcatgagaggccccatcaccccatgggaatatggtgcaaaacgtggccatcctgtttctactccttatgagtacctcattggttgtgataacatacttgcaaagatacacactcgcaatccctccgcgtgtgataaggttggtggtgtcattatcatgcatatagatgatcttcggcgttttgctctactgtggcttcacaaatcagaggaggttcgtgcagacaaagctcactatgcaaccaacattactggcgatatatataattctggctggattagcgagatgtatggctactcttttgcagcagctgagattaacctgcgacacatcattaggagggacataatgatatatccaggttatgttccactgcccagggcaaaatacagggttttccattatggtttgagatttggagttggtaattggagctttgacaaggcggattggagaaacgctgatgtagtaaatacatgctgggccaagttccctgaaccacctgatcctgctacgatcacgaaacaagatctagatgcacgggagagggatcttctcagcattgaatgcgggagagctttgaacaaagccctatacctgcaccataagcgcagaaattgcccccggctagacaccattagcagcacatctaagaaaactgatcaagtttctgcttctaacaaaattgtgagtgttgcacaaaagtcaagaagtataagtagaggaaacatcgaatccatggacgagggaaggttgaagactgtcaagaggactgcagcttctgtacaacctctacatagatcaaggagactggccaggtcttctaggatgtggataattgctgtatgggcattatcaattgtggtgttcctattagtaatctccatgtttttcactgagcaaaggagaaacgcttcgagatctagggtttctagaagtttaaaggctcatgtctgagtattctctttttctaccgacacaatttctgactatagagcagacaatattcacaaactgttactttgtggacgtatataatacataaaaggattttgcc

SEQ ID NO: 22853 - DNA, 1575 bp, Zea mays
  Clone ID: MRT4577_120845C.1
gctcctcctcccccacctggacctcccagaggttctaaagcaagacttgctcagctgtcacctgttgagtcaagtcgttctgaaggatcatctgccagcgagcagaccagcgaatcatctgaagcagaagttaatgctccaagaaccaagcttcgacctttctattgggacaaagttcttgctaatcctgatcagtcaatggcatggcatgatatcaaattcggttcttttcatgtgaatgaagatatgatagaggaattgtttggttatagtggtggaagcagaaataaccttaaggataaggaactcccctctgcggatcctgcatctcagcacatttctcttctcaatgttaagaaatcatgcaacctggcagttgttttaaaggcaatgaatatcagggtacaagacattcatgacgctcttattgaagggaacgaacttccaagggtgcttcttgagacaatcttgagaatgaaaccaactgacgaggaggaacagaatctcaggctttataacggggatttctcgcagctaggccttgcagaacaagtgatgaaggcattaattgacacgccttttgctttcaagagggttgacatgttgcttttcatgtcctccttgcaagaagatgcttcaagtctcagggattcgttccaccaattggaggccgcttgtggggaactgaagcaccgcctttttctcaagttactagaagccgtgctcaaaactggaaaccgtttgaatgatggaaccttccgtggtggtgctaatgcattcaagcttgacactctcctgaagctatcagatgtcaagggtgctgatggaaagaccacattgctgcactttgttgtgcaggagattgttcggtccgaaggtgtccgcgaagcaaggctagccatggaaaacggaagaagtccagctcatagtgcttcagatgacacttccaatggatctcttgaagaggacggtgatcactactccaaccgcggacttagcattgtgtcaggacttagcagtgagatggacaacgtcaagagggtagccgcactggatgctgagcctctgtttgccactgtggtgaccctcagacaagagttgctgaaatcaagggagttcctgaatgaaattgcgacagtagaagagacgagtggattcagacgttcgttggaaagctttgtggaacacgcggataatgagacggggtttttgttgaaagaagagaagaggttgagatcgttggtgaagaaaacaatccggtatttccatggaaacgactctaaagacgacggtttccggttgtttgtggttgtgagagatttcttggtgatgctagataaggcgtgcaaggaggtcggggcatcacagaagggtacgaataaatcacgaagcagtggcagtggcagtggcaatggcaatggcaaccctacgttcccgtcaatcctacaggagcaacagttccctgctgttattgatggccattcagatagttcacatactagcaattgacgatgagatactaacctttttttgtaaagaaaaaaaatccgttttggagaggaaatacattttagc

SEQ ID NO: 22854 - DNA, 162 bp, Zea mays
  Clone ID: MRT4577_120846C.1
acttaatctttttgggaggctctaaacgagaagggaatcttttattaatcccttaatgcaatggaaaaaaagacccagtagacatttttacaacacaaacaaaaaaggtgaggtatgctagccacttctatacattgaaaggggaattagattgcgacacac

SEQ ID NO: 22855 - DNA, 159 bp, Zea mays
  Clone ID: MRT4577_120847C.1
ctatacttactctaggaagtttggttcaccaccgccagggcagccatcatgcttgcattgttcgctatcttagcctcttgtgcatgcgccactagtgctaccctatattttcagggcactcgctaccatactttccaatgggtaccattaccccatgca

SEQ ID NO: 22856 - DNA, 1681 bp, Zea mays
  unsure (1)..(1681): unsure at all n locations
  Clone ID: MRT4577_120848C.1
cgtcataggaagccgcgaacagcacgcaggaatcaggtgagaaagcaaccactcaacctccaactgccagctttactgccattggcggtcttgaggacgaggagctacagctgcagggtccggttgccagtggttccaagaggagcaaagactctgcccgccgccgccacacgcagcgccaatgtcagctcaccctctgtggttcactctcaccatgccatcctccctgctcccgcgcagcggattccagaggttaagcaagcagactcggagacgacgccggcgcgggagcgggagtggaagccgctgtgcgacgtcacctcgaaccggcgcatcgactggtgcgagctggacggcgacgtccgcgtggtcggcgccaacgccagcgtgacgctggtggcgccgccgggcgcggacaaccggaccttccgcgcggagtcgtggcgcatcaagccgtacccgcgcaaggcggacccgaacgcgatgcgcttcgtgcgcgtgctgacggtgcggtcggtggcgtcgggctccggcgaggcggcgtgcacggacggcggccgacgacgacgtgccggcgctggtgttctcggaccgcgggtacacgggcaactacttccacgcgttcacggacgtgatcctgccgctgttcctgacggcgcggcggtacgcgggcgaggtgcggctgctggtggccgacctccagccgtggtgggtgggcaagttcctgcccgtgttgaggagcatctccaagtacgagctggtggacctggaccgcgacccgcgcgtgcgctgcttccgccacgtccaggtggggctgaccagccacgccgacttcagcatcgacccgcgccgcgcgcccaacggctactccatgctggacttcacccggttcatgcgcgccgcctacgggcgcccgcgcggcgtcgccgcggcggcggcgaggaggccgaggctgctggtggtcgcgcgcgcgcggacgcggcggttcgtcaacacggaggagatcgtgcgcggcgccgaggccgtcgggttcgaggcggtggtgtcggaggggacgcacgaggtggcgcccttcgcggagctggccaacggctgcgacgccatcatgggcgtgcacggcgccgggctgaccaacatggtgttcctgcccacgggcggggtggtgatccaggtggtgccgctgggagggctggagttcgtggccggatacttccgaggcccgtccgtggacatggggctgcgctacctcgagtaccggatcgagccggaggagagcacgctggtggaccagtacccgcgcgaccaccccatcttcacggaccccaacgggatcaagagcaagggctgggagtccctcaaggacgcctacctcgacaagcaggacgtgaggctggacatggagaggttccggccgacgctccaggaggccatcgcgcacctcaggaaggccaaggccaaggccaatggcgacggaaacaactaggcatcgccgtgcgtatgtagcgtgttcattcatcctcttattaatctactcttctttttcttcttttccttttcggggtatgtcggtgtatgtagcgtgcagaaatcgagcaaatgtatgatatgtggcagggaaagaagctagagcgaataatatattctctctcttgncatcccaaaaaaaaaaaaaaaagggcgg

SEQ ID NO: 22857 - DNA, 805 bp, Zea mays
  unsure (1)..(805): unsure at all n locations
  Clone ID: MRT4577_120849C.1
ggcccgtcgtcgaagcggcggccgaggctgctgctgatcgcgcgcgcgcggacngcggcggttcgtgaacgcggaggagatcgtgcgcggcgcggagaagctcgggttcgaggtggtggtgcccgaggggacgcacgaggtggcgcccttcgcggagctggccaacagctgcgacgccatcatgggcgtgcacggcgccgggctgaccaacatggtgttcgtgccgacgggcggggtggtcatccaggtggtgccgctgggcgggctggagttcgtggcgggctacttccggggcccgtccagggacatggggctgcgctacctcgagtaccggatcacgccggaggagagcacgctgatcaaccagtacccgcgcgaccaccccatcttcacggaccccaatgggatcaagagcaagggctgggagtccctcaaggatgcctacctcgacaagcaggacgtgtcgctggacatgaagaggttccgccccacgctcaagaaggccatcgcgcacatcaggaaggccagggccaaggccaacgccggcggcggcggcaacaactaggcatcgccgtacatgtgctcattcatcctcctcttactctacttttgtttttcctcccctccttttcggattatggcagtacttgtatgtagcaagcagaaatcgatcaaatgtataatatggcagggaaagaagttagagcaaatcatatattctcttttccccccagttttcgattggggtcaaaaaaaaaaaaaaaaaaaaaaaaaaaaccaaaaaaaaaaaaaaaaaaggccccta

SEQ ID NO: 22858 - DNA, 343 bp, Zea mays
  Clone ID: MRT4577_12084C.1
tttttattttttattttaatataaaattttttttttttttttttttttttttttttggaagataattgttcgtatttttttctgtgggaaaactttaggagttttggccgagctttctgcaaaactggatgggctcatcgaaaacctctagggttaaatgggaaagaacccccccgctttggttttggaaaatagacttaaaaggtttaccctttcgccggattttttcccaatagttgagggccaaatccaggctttgtaaaaggatccactaattcgttcattgggtcagggatgtttggcgaacccctctttcaaagttttcagccaatttacatactgg

SEQ ID NO: 22859 - DNA, 507 bp, Zea mays
  Clone ID: MRT4577_120850C.1
taaaaaaaaaaaaaaaaaaaaaaaaaaaaaaaaaaaaaaaaaaaaaaaaaaaaaaaaaaaaaaatttaaaataaaaaaatttttaaaatttaatttttaatatttttaaatttctttttcttttgtttttccttttctaccttgctttttttagggccctttttttcccttttccaagttcgttttttttttgcattgtttttcctttttacatcttttttgatttgccaaaaccttcgcccgtttccccacctttttgtttttttcaggtaatcccctttttctccagttgtggttttaaccaattggccttccccgtttttccttcccaccatttgcgcttcctttttttttcttgccctttttttttattggaccattattcccttcctttttttgggttactcgcagggtggcctctacatttgccatccccttatggcccgctcctttaagtgcccttccctttcttttttgttcctttctttcttttttcctttgggtttt

SEQ ID NO: 22860 - DNA, 825 bp, Zea mays
  unsure (1)..(825): unsure at all n locations
  Clone ID: MRT4577_120851C.1
tcgccacgncgacttcagcatcgacccgcgccgcgccgccacggctactccatgctggacttcaccgggttcatgcgcgccgcctacgggctcccgcgcggggacgtcgccgccgccgctggcccgtcgtcgaagcggcggccgaggctgctgctgatcgcgcgcgcgcgggacgcgggggggcgtgttttctgttttagatcgngcgcggcgcggagaagctcgggttcgaggtggtggtgtcggaggggacgcacgaggtggcgcccttcgcggagctggccaacagctgcgacgccatcatgggcgtgcacggcgccgggctgaccaacatggtgttcgtgccgacgggcggggtggtcatccaggtggtgccgctgggcgggctggagttcgtggcgggctacttccggggtccgtccagggacatgggggtgcgctacctcgaggaccggatcacgccggaggagagctccctgatcacccagggcccgcggtaccaccccattttcgcggaccccaatgggatcaagagcaagggatgggagtccctcaagaatgctcacctcgacaaacagcacgtgtcgctggatatgaagaggttccgccccacgctcaataagcccttcgcgcacatcaggaaggccagggccaaggccatatgttgccgatgacgacaacaggggggnnngccgtatatgtgctcattcatcctcccctccttctcgggttatggcagcacttgtatgtagcaagcagaaatcgatcaaaatgtataatatggcagggaaataagttagagcaaatcacacattctctttttag

SEQ ID NO: 22861 - DNA, 1506 bp, Zea mays
  Clone ID: MRT4577_120852C.1
cattgggaccctggcgggccggcggacgaaacggacggacgccacgccctgcccgccggggctgcttgccactgagccactcctctctcttcctcatccatccccgccccgcccgcagaaccaaaccagcctccctagtccctccctccccagcagctcacgactcacgagagagcgcaagtattactgcgcaccgcctcgcccgcgggcgtcagcgtgaagctgccgcacagctaccccgcgaggcatggggatggacgccggcggcgggaagctgccgtacagctaccccgcccaccaggacggcaagctggtgaagagcttcagccgcgtggagccccgcaagttcggcctcggcctcgtcgcgggcttcctgctcgtcacctgcgcctacttctccaccgccaagttcgacgccatccacgtcgccatgacgtcagccccgtctccggcaatgcggctgggatcggcccgctagtgggcgccgccaacgccgacacctccgactccaagcagcgattagatttgggcaagcaagacccggacgacgcgctgtccaggtccgaggaggaggaggggagcagggccgacgaggtgctggagaaggacgacggcaaggcatcctcgtcgtcggggacagattccggcagcaatgcgccgctggaggacacgaggagagacgagacctttgtgggggacagcggtggtgcatcttccgcggcgggcgccaggaagtgaggcggttcctgccaggcacgagcacgacgatgacgcccccgctgccgccctgcttcctcccgtgacgtcagagggagccgcgaacagcacgcaaggatcaggagttcttgaggacgaggagctgcaggtgcaggacgctgtcgccaatccttccaagaggagcaacgattcagccgccacgcgcagcagcagcagtggccgctcgccctctgtggttcactctgatcctgccatcctccctgctccctcgcagcagattgctcctgctgctcctcaagaggcagataaggctcttgctgttcagcatattccagcgatacctgaggttaagcaatcagattcggagacgccggcgcgggagtggaagccgctgtgcgacatcacctcgaaccgccgcatcgactggtgcgagctcgacggcgacgtccgcgtgctgggcgccaacgcgagcgtcacgctggtggcgccgcccggcggggcggacggccgcaccttccgcgcggagtcgtggcgcatcaagccgtacccgcgcaaggcggacccgaacgcgatgcgcgtcgtccgcgtgctgacggtgcggtcggtgcccggcgaggcgcccgcgtgcacggaccggcacggcgtcccggcgctggtgttctcggaccgcgggtacacggggaactacttccacgcgttcacggacgtgatcctgccgctgttcctgacggcgcggcagtacgccggcgaggtgcggctgctggtgacggacctccaggcgtggtgggt

SEQ ID NO: 22862 - DNA, 424 bp, Zea mays
  Clone ID: MRT4577_120853C.1
aacagggaaactatgctgtttttcccccaaatatttgattacacaaggttaacggggctcatttttttcccccaaaagaatcaatacccaacggccgcccatgggtttattaggaagggcccacaaaaatttcgggggggatctttgtttttcaagggaggccaagcaacccatcattgggggctacatgggattttccaacttcgggtgtaaaaaacacaacaatgatgggcgaaggggcaataaaataactttttcccaggtgggactccaactacaacggtggtgacaaggtttcccttggaaaaaactggcataggggtttaaaaaacaacagttactttttgagattgggatttaagggcaaaagttgatgaacccctttttgaaaacccatctgatgttggcctccaaaaaggggggg

SEQ ID NO: 22863 - DNA, 215 bp, Zea mays
  unsure (1)..(215): unsure at all n locations
  Clone ID: MRT4577_120854C.1
ggacagcaacccacggttactgattttatgggggtttatgtccccaaacgaaccaaaggctgacttcgacctacaacaaaggagaaaaacaaaactggccaccaacaggggaacaggcccaaccgatcaactgaggcacccataaaaacggggggggggggggacattttttttttaacccccaaaaagggagcaanngcacgaccccaaacggg

SEQ ID NO: 22864 - DNA, 499 bp, Zea mays
  Clone ID: MRT4577_120855C.1
atgttctcgcctccagcgctccagctcccctccatcctcgaaaaaaaaattctgagaaaaagataaaaaaaaaaaaaaaaaaaaaaaaaaaaaaaaaaaaaaaaaaaaaaaaaaaaaacccgggggaaggggcggaaataatcggtttggtctggtttggtttcgcctcccttctctttttcccccctcctggaaaagggcggttaacggtaacggaacaaaagaaggaatcaagggttgaggaaaaaaacaagggccccggaagggggggaaactccgggaaccccccgggggcccgaaaaaaaaacctcaaggcaatcaagttcgggggtttcggggcccccaagaaaaaaagaaaaacaaacgcaaggttgaaattcaaaaggttgggaaagggaaggaacaaggtcggggccggaaccttgaacaatttaaccgtaaaggaaaagaagcccggcggcgcaaaaaaaaatttgaacaaggcaaagggggggaaaaa

SEQ ID NO: 22865 - DNA, 543 bp, Zea mays
  Clone ID: MRT4577_120856C.1
ttttttttttttttttttttttttttttttttttttttttttttttttcttttttataaaaggggcaccatccttttttttcaaattttatataacattcagagcccgtttgatttacagataagaacataacaaaaaaaacactccccatgccaatttttcaacaccaccacaatacatttattttttgtgcacataacaaatgaaaatgtcgtccgactcataatggctcaaccccaaaggcaagcgttggcttcggcccccaacatctccacctaaattataattttcagcgtccaaaggtttatcttctgcttcgggaccaccaagttgacggacactaggccagggtcgatatattagctgaacttcacttccccccagtacaaatagcaccttcccggtttccgcgaacaataagtgcctaaccgaccgtaccctgaaaccctgaaagccatggccttgccctcaatattgttaataacattgcacattctcaacggggcccccggggtttaaaattgtcaaaaacctgaccggcgc

SEQ ID NO: 22866 - DNA, 280 bp, Zea mays
  unsure (1)..(280): unsure at all n locations
  Clone ID: MRT4577_120857C.1
ggaacaatcccttctgagctcggnaacatgtataatctaataagcttggacttggtcaagaacaaccattcggggaccataccctcctcccttgggaaggtggaaacccctggaattccggcggtcaaagggacaaaattggccggggccgacccaaagggaactttctggaatattaagtctaaaagtgtgggaggttaaaagcaaagatatatgggggacaattcccacatggggaccattagagcacattcctgtgagaaactgtgagaaaaaccca

SEQ ID NO: 22867 - DNA, 176 bp, Zea mays
  Clone ID: MRT4577_120858C.1
gggtttagccatggcggccgaggcccagactccttgtcacaagctccgccccggcaaagcccatacgcggaagacgacgcagagggccacgtggggccagcctatctccgccgccgacgccgctgaggagccgtcggtggcgccggagcagagcacccggcggggtagttgcggcg

SEQ ID NO: 22868 - DNA, 2088 bp, Zea mays
  Clone ID: MRT4577_120859C.1
ctcgaggccggccggggattttgaaccgtaataaccgaggccgaggccgaccggccgagagaaacaccgacccgaccgaactcaactcgttctcgacccgaaaccccaaatccctctcagaaaacccttccctcccgatggcaaccgccgccgccgccgccgtggcggcacccgagcagccgcgtcgccggaagccggcgccggggcgtgggggcgtggccctccctgcgggactctcggaagaggaggccagggtgcgggccatcgccgagatcgtctcggcgatgggggagctctcgcggcgcggggaggatgtggaccttaactcgctcaagtctgccgcgtgccggagatacggtctggcgcgggcgcccaagctagtggagatgatcgccgccgtgcccgaggccgaccgtgccacgctgcttccgcggttgcgcgctaagcccgtgcgcacggcgtcgggtatcgccgtcgtcgccgtcatgtcgaagccgcaccgttgcccacacatcgccaccaccgggaacatctgtgtctactgccccggcggtcccgattccgacttcgagtacagcacgcaatcctacacgggatacgagcccaccagcatgcgtgccattcgggcaaggtataatccatatgtgcaagccaggagcaggatagatcagctcaagaggctagggcatagcgtggataaggtcgaattcatcttgatgggtgggactttcatgtccttaccagctgaatatcgtgattatttcatcagaaatcttcatgatgctttatcgggtcacacttctgcaaatgttgaggaggctatttgttattcggaacatagtgctgtcaaatgtattggtatgacgattgagacgagacctgattattgcttggggcctcatctgcgccagatgctatcttatggttgtacccgcttggaaattggtgtccagagtacatatgaggatgttgcccgtgacacaaacagaggacacacagtggctgctgttgctgattgcttctgtttggcaaaagatgctgggtttaaggtggttgcccacatgatgccagatttacctaatgttggagttgaaagagatttggaaagtttcagagaattttttggaagtccagcgttccgggctgatggtctgaagatttatccaacacttgtgattcgtggaactggtctttatgagctctggaaaactggcagatatagaaattatccacctgagctgttggtggatattgtggcaagaattctgtctttggttccaccttggacacgagtgtatcgggtccagagagatattcctatgcctcttgttacttctggtgtcgagaaaggtaaccttcgcgagcttgctttggctcgaatggatgatctgggcctaaaatgccgggacgtcagaacccgtgaagcagggattcaggatatccatcacaagatcaggcctgatgaagtagagcttgttagacgtgactatgctgcaaatgagggctgggagacgttcctctcttatgaggatacacgacaggatatcctgatcggcctgttgcgcttgcgtaaatgtggccgtaatgttacatgccctgaacttgtagggaggtgttcaattgttcgtgagcttcatgtctatggaactgcagtccctgtgcatggccgtgatgtagacaagctacagcaccaggggtatggaactctgttaatggaagaagcagaaaggattgctcaaaaggagcaccgttcaaagaaattggctgtcatttcgggggttggtactcgccactactaccgcaaattgggttatgagctagaaggaccttatatggtcaaatgtttggcataataccgtttcattttttttcgtgctcatgtagaacagactagtgtttataatgtaacttgtgtagttttttcaaaaaaaaaaaaattgttataccattgttttctaatattgagtagtccagaactccagatgaaaatggagacaactttctatgtatactgaacgatagctaatttgtcgcttatcctcaactttgtgccgtgcagcaactgtgatatgtagtcaggttactcct

SEQ ID NO: 22869 - DNA, 258 bp, Zea mays
  Clone ID: MRT4577_12085C.1
ctctcaacaccacctcgcatgcgatgttcgtagcctccgtagcgtcgagcatcgatcatgtcggcctactgcggaaagtacaaggatgagctcatcaagaatgctgcctacattggcacccccggcaagggtatcgttgttgctgatgagtccactggaacaattggaaggcgcctttcgagtatcaatgtcgagacctttgagttaaccggcgttgcctccgtgagctcctaatctggtagcctggtggtctccagt

SEQ ID NO: 22870 - DNA, 368 bp, Zea mays
  Clone ID: MRT4577_120860C.1
aaaggcaagctccctcgcctaatggtaatttaacattttgaacaaccttaatacaaaaggaaaggcagttttgtcacgacaacataagcattcccacccatttagtccctaggaggcatcaccacacgaacctaaaactggcgggtcctaacagggatccagggaattttatttttgtcccaagcactggggaaaaggacttaggtcttttcctttttttcctcctcctcctggaactcctaatcctgggaaggggcgccctggtactggtgatactcggccaccaggtcgttcatgttactttctgcctgggggaactccatttaatccataccctggcctgtgtaccagggcaagaaagccttcct

SEQ ID NO: 22871 - DNA, 233 bp, Zea mays
  Clone ID: MRT4577_120861C.1
cagggggaatagaaaattttgacttttaagaaaaggaaatacactgctggcaaattgcaaaaaatccaaagcattggaaatactagaacctctacgctctaaaaaaaaattctcacttttttccaccaaaggggcgacacaaaccttaagcgacccgccgtccacctccaatggcaaaatgggcgcccctgggattacacccgccaattatttctctgaatccatgcctgcta

SEQ ID NO: 22872 - DNA, 549 bp, Zea mays
  Clone ID: MRT4577_120862C.1
gccacattcctccacccggaggatcacctcgcgtgtccggcagccacctgccgccttcctcctccggtcctccccgttgctgcattggctagctccgagcctccgactcgacccatcctgctgacctgagaggcgcggtacgtacggtaccagctgcaggtcagttagttagctagcccgtccccccgtgccctccaagctccagtagttagccccatggacagggggatgggggacaggcgggtcctcgcctcctgtattccgggcatggaagcggcggcggataaggaagacaaagggctggagctcaacctctcgctggacccgttcccgtcgtcggcgcccaaggtccaggcgggctttgcctgctgcttctgccccaggaaatttcgcagctcgcaagcgctcgggggtcaccataacgcgcacaatctgcagcgcaacctggcatggggagggcgggagggcacctcgggggcacccgcgccgccgtcggcggcggcggtagtcgaccagggcattgggagggcgttcggcagcgacagcgcg

SEQ ID NO: 22873 - DNA, 296 bp, Zea mays
  Clone ID: MRT4577_120863C.1
gtgattatgcatcaaaaaaacgatgttctgtctcagagagagcgccgtgtgagcggccagattgcttgttgcggagaaaacacctccactcattcattagtatacaacgaacattcatggcgtactctccttaaacacgatcataccttcactaagactgcacatatcgtcatgctgattggacgagacacgccttacttgatctatgacatgactgactgttgtaataagcaaaccgatagagcatgttggctatgtttatgaagtaaccaaacgatctgattgaacctgtagtg

SEQ ID NO: 22874 - DNA, 357 bp, Zea mays
  Clone ID: MRT4577_120864C.1
cttcctcttaaaatggacaaaggtggacctcggactgcactttttaggctatgcaagagtttacagtggccaattccagaatttgaatttgtggaacaaaggtttaggtatgccaagtaatacccaaacattactttcttgtaaaagaatgtcaaacttcattcacaagagctttggggattcatattcaggccccgtttggtttgagggactaaagattagtctctccattttagtcacatttcgtctctaaattgccaaacagtgggactaaaacagggactaaactgttttagtctctggtctctcaatgagtgactaaaagggattaaaccaattaatttcactttctgccca

SEQ ID NO: 22875 - DNA, 467 bp, Zea mays
  Clone ID: MRT4577_120865C.1
tggcttcgaacctttgggctgatttatgtgcttgtctcccgcgacgtcggggaccttgccggtacccccggattggaccaccctaacgttgcttacgctaaccttagacgataaggcgcaatcgatacacccaccgggcggtcgtgaactttaaaatatcccacttcgacgccgaccgggccggagaaggcctccgaaagaaaacgagttcactttcaaatccgctatcgccgcgaacttggggaattttctcggagtccccaccttaaggttcacgtccgagagaaccctagactcgcgtaaaaacgtcggcgtacggtccgcggccgataacattcacgagcatcccacgcacgacggaacggagtatcatcgtccagaagacgtctacaccgctaattctcctctgcctctaaaggtccacggaacgacggggcggtgcgcaggacataccgtacccttaaacg

SEQ ID NO: 22876 - DNA, 399 bp, Zea mays
  Clone ID: MRT4577_120866C.1
ggccgccctctatctatatcttaggaaccaaaactttgaatttccagcactggatggaccgcatgcacgacagggccagactgaattggaacaatgcgttatgagccacggcgcaggagagaaagcctccagaacccctcgaggcggaaaaaaacagaaaactttcggatcgaaaccacacaccaggttattatgggctgaacccacatcatgaggcccccgattactaagaagacgcaagaatcttctagcagggcaacttcgagggggtgaaccgataaaaccacggggcagactccttcatgtagcgcgggcagctattgatgcggtcgacgtaaacaatgccataacgttcagggaagccggcgaaccaaggaaagcagtccagcagagaccaag

SEQ ID NO: 22877 - DNA, 584 bp, Zea mays
  Clone ID: MRT4577_120867C.1
cggcgcaggtcctgtaacaaccacagcattctgagtgtgtaaacccggtccttcaaacatacaacatccacaatgccatcagacggtgagcatcttccctctacaaggcgcggttctaactcctatatcagccctctaaatctaaaaacctgtggtgcattcctaaggcacaaaacgccacccttcggcaacgccttcatctcgatctcgttagctccagccaactctctgccaagcattgcagcatcactgtcgacctgatctttggctgatagtgctccaatacattcgccacagcatctactacatggctcaatgcatactgcaggctgcgcaacaacatcaaccatgtgagtcctgctgatctcaacaagctactctgagtgcggacggcatcttcaccgcctaccattacctaccatcaatgtgcgtgatcgtacctcgcccgctagcacactcacggttagtgccgctctaccgcgcgctgcgtctaacgctggcactctgttacaactgctgcaattgctgccatacaaccaacttgctgtgacaaacccagcagcgttctacctaccacaccatca

SEQ ID NO: 22878 - DNA, 759 bp, Zea mays
  Clone ID: MRT4577_120868C.1
atatcctattccagtgctctgctccgctctgctctctgtcccgcccgccggctcatccccgcgcgcagaggcagcgtcgcggcgagcacaccaccgtcgaccccctcctcctccccctagccgctcccgcgcgcggccggcggtgtcgtgatggcgaggtcgtcgtcgtcgccgacggcgaggttgccgctgccgctgcttgtgctgctgctgtgcttgtcgtcgctttccatggcggcggcgcagaagtacaatgcggtgtacagcttcggcgactcgatcacggacacagggaacctgtgcaccaacgggcggccctcggcgatcaccttcacgcagccgccctacggggagacctacttcgggagccccacctgccgctgctccgacggccgcgtcatcgtcgacttcctcagcaccaagtacagcctccccttcctgcccccctccaagtccacctccgccgacttcaagaagggcgccaacatggccatcaccggcgccaccgccatggacgcccccttcttccgctccctcggcctctccgacaagatctggaacaacgggcccatcagcttccagctccagtggttccagaccatcacctcctccgtctgcggcagcagctgcaagagctacctggcgaactcgctcttcatcttcggggagttcgggggggaacgactacaacgcgatgctgttcggcaactacaacacgggacaggcgagcacgtacgcgccgcagatcggggacccatc

SEQ ID NO: 22879 - DNA, 294 bp, Zea mays
  Clone ID: MRT4577_120869C.1
agagtatgacgaaaacgcccgcgtacgtaatgctcggaattcggctggtgattacctgccacttcctctggacctccgtggtgccggctgcttacgggggggtttttaagcatttccgcggtctgcacggaggtcctatgtgtgatgaactggtcgccagccaccacagagttctgtgttaggctcaagcgcaatcccactttgaggcgcgccatggacatggttccatccatcaggtgttgcctagtgagtgcgcgtgccatgcgtgtgttctttgctgctgctacagctcct

SEQ ID NO: 22880 - DNA, 403 bp, Zea mays
  unsure (1)..(403): unsure at all n locations
  Clone ID: MRT4577_12086C.1
cgaagctgggatcctctatagcggtcgccctttttaacccnntggcttttaaccccttnnntattttttttttttttttgtgaaacttgcaggtcaactcgggggggttcctaaaagacgaacgggaaacgtaatggggaaagggggggcctgttcccccgctgctctaaacaaaaaactatcgggcccctggttacaccccttatcttagggccagcacgtctcggaaagacaagaccgcaagagcccagcatccagtttcagcaaaagaaatttccccccggctgggaaggcaggggttgcaaaaatgaatgctggaattgggatgacccgaaaacgggagaccactgggttttcttggcctccgggctcggctcggacccggcctccgttagcggggggg

SEQ ID NO: 22881 - DNA, 744 bp, Zea mays
  unsure (1)..(744): unsure at all n locations
  Clone ID: MRT4577_120870C.1
catttcttaaagcgctctgctctctgccccgcccgccggctcatctccgcgcgcagaggcagcgtcgcagcgagcacacaccaccttcgatccctcctcctcctcctcctcctcctgcttcttctctcgcgtacacggctgcgcgtgtgacgatggcgaggacgtcgtcgtcgccgacggcgacgaggctgccgctgctgcttgtgctgctgtcgtcgctggccttgcaggcggcggcgcagaagtacaatgcggtgtacagcttcggcgactcgatcacggacacggggaacctgtgcaccaacgggcggccctcggcgatcaccttcacgcagccgccctacggggagacctacttcgggagccccacctgccgctgctccgacggccgcgtcatcgtcgacttcctcagcaccaagtacggcctccccttcctgcccccctccaagtccacctccgccgacttcaaaaagggcgccaacatggccatcaccggcgccaccgccatggacgcccccttcttccgctccctcggcctctccgacaagatctggaacaacgggcccatcagcttccagctccagtggttccagaccatcacctcctccgtctgcggcagcagctgcaagagctacctggcgaactcgctcttcatcttcggngagttcggngggaacgactacaacgcgatgctgttcggcaactacaacacggaccaggcgagcacgtacgcgccgcagatcg

SEQ ID NO: 22882 - DNA, 458 bp, Zea mays
  Clone ID: MRT4577_120871C.1
aaaaaccatatgcaaaattgtttgtggggggccttgtattgtaccaatatgtacataatgttcctcgactacaaacagtctacatgatgtgcttgtactaaactgtaattacggaccgcctttgatgcaaacttgtttgggatgcacaaggatcacgagggcatacaaatgggcaacagatcctccctgccatataatgagaaagaaggggaggtgcaagaattacactgacacgtcctgaacatttgaggtttctaataaaaggcacgtcttgatttggagattggcatgtcgcacacgcaaagccagcttgacttgcacaagctatagctaaacttaaaagggggcgaagtgtcaccatacattacggaggctcctgccttccatatagagggctcttacggaacttttgattttggagctatacaaagatccctgctccttgcactacagtttga

SEQ ID NO: 22883 - DNA, 684 bp, Zea mays
  Clone ID: MRT4577_120872C.1
cattgggacctcgagccggccgggagcaccctcgcctgattctttcccagccgccgctctgggcgattaaaaatcctgctcgccggccggatctccggcgtcgtctgcccctgctttcctcggtgtcctccccacagtcgtctccttcctctgctcgtcgctgaaattcgccggccgcgaacgcccatggcgcacccccagtccctgctttctctttgcctctctctcttatccatggccgccggtcgctcctttctgtcccgcctggtgctctgcactgctccgtcgcttggtctccggctcgccgcgtgcgcaaggtttctctggttcagccgttcttcttcctccccctgcgtccctgctctgctctgtctgccgcgcgctgagtgccgaggctcctgctcgaccgctcctctctggcttctctctctccctccatctctctctgctcaccgcggctcttccccaagtctggtgccatggcgcttgtcagccgcgaccttgccaggctcggtccctgctgctgctcgcccatctccttcatctccctcctctccatcgtggggttcctctccctggtgcttttctgtgccggccgccctcacctctgctcctcctggttgggcgagcagctcgccttgtcgtgcgtcctgctcgccctcagcttttcacggagctcgcccc

SEQ ID NO: 22884 - DNA, 412 bp, Zea mays
  Clone ID: MRT4577_120873C.1
ggggggggaatttttttccccaattttcccaggtccaaaaaaattcccttgggggggcgggggggttcccaagggggttcaaaaaaaaaaccttaaaccggttaaaaattttttaaaggttgaaaaaattgcccccccaaggggccccccccaaaaaaaaggggaaagcgggggtttcctttttaaaaagggccggcccccccggcctttaaccccttcccgggggccaaaaatttaacccggggaaaccctgggttaggggggtggggccccccctggggaagcccccttggggtgggcccccgtcaaaataacccattttggggcccacccataaaaatatcccgggggataacccccccctgggggccccctggagcaattttccccccccggggataaatttcccccc

SEQ ID NO: 22885 - DNA, 644 bp, Zea mays
  Clone ID: MRT4577_120874C.1
cgtcaacttctggagttgtgttggaggattttgattctcacttctccaatagattttatcatagctatctggataaccctgtaaacatcaattcctcgtcaatagctgcagccgctgctttggttgccaggtcgctgtatattcttgctagtgatgactcagttgttgaccttataacactaaacactataaaagtgaacgtttcattggtcgaagaacttattggatgcctgcttacttgcaatcctggtctttcgtgcggccttgtgaaaagattcatttctccaagcaatccctgcccaagtcattatgttggtgtttttctggatgacccatctggcacgcagtttccttcatacgcagatgacacgtctcggtttgtatggaactttttggcagacagaactaattcagcaggcaataaaagctcatgtactggaaagtgtggtgatgaaggtgaagtatgtgtaggggcagaggtggagggtggaggtagatgtgttgtatctacaaccaggtaacctgtgtttactagttatgcttctgcagctatttttttgtcttatatccagttgctgctgaagaaacaattgattgaatccagaagaaactctagttttagtacctttttatgtcagttagcg

SEQ ID NO: 22886 - DNA, 565 bp, Zea mays
  Clone ID: MRT4577_120875C.1
cggcttattaccttcattaattagtttagcttcccgccggcggcgcttcgatttcctccggagataaagattctttggggcatgaatacctagcacctaaacctatgcttaattccatgtccatcccatatgtaatgttcatatgccaactgctcttttcgccatgccttccgatcttgtgaaatgcgaatacaaaaaaagagagagcaaattcttaagaattgcgcgccgttgttgactcttgaattcctcgtcggccttagccacacaatatacttggtcatcgtccatgtgattattattagctcgccgaccgtgctggtaagcgaaagctataccctgtttatcttggataatcagatgctgttcatcgttaaccgcttaaccatcgtcgcccggcccgggtcattagacgacgctggctggctggcggagaagctttctcctccgatgctgcctttcgtctttgtgtataagttttaatagcgctgtggtgtggacgaatatcaggtgaatacttttctagtactatggattgagttcggatattccaaacaggccggtc

SEQ ID NO: 22887 - DNA, 277 bp, Zea mays
  Clone ID: MRT4577_120876C.1
gcaggaggaagtctgtccgtggttgcatcgtgagccaagacctatctgatatcaacttggtgagggtcaagaagggtgagaatgatctgcctggtctgactgacactgacaagccaaagatgaggggtcccaatagggcctccaagatcagaaagctgttcaaccttaacaaggatgatgatgtacgcaagtacgtgaacacataccgcatgacattcactaccaagaacggtacgactgtcagcacggcacctaagatccaacggcttgtgacacc

SEQ ID NO: 22888 - DNA, 429 bp, Zea mays
  Clone ID: MRT4577_120877C.1
ggaacgcccgcccggcccaagggaagcgagaaaattttataggggggggggggaaaacgaaagagttcaggcaaattcgggtacaacgggggggggggagttaaagggaaaggccccacccgcttgatcgggggggaaaatttatggggagaggaaaacaaaagttcagcgcctaccccaaagggtaaaggaaaaagggggggaaaaacagcccccttttttgctttaaaaggctcaaaggactgtttattacgggctcacaacaaaaagcaccggggaaggctagaactaaatatccccgctaaaaaaaaaatgggtaccctatttttaattttaaggggcggggggaaaaaaacctatatttggggggatgttaaccgctggagcgggttttgggactttgaaaaaaattaaattgcagcctaaaaa

SEQ ID NO: 22889 - DNA, 415 bp, Zea mays
  Clone ID: MRT4577_120878C.1
gtacaagcttttttttttttttgacaagcttttttttttttttttttttttttttttgcttctttcaaagagaaaaggaagaaaaaccccactaggttcccacaaaccaaaaggatgaggggggggggatggttcaactcgcacaaagtgacacccgcccagcccgcgcggtcatgcaaccaaaacaaataggctcgagctaaaaaaggacaaggaggacaacacaagctaggggcgagaaagggtagccccggacggcgagctagactcactctcgacagagaaggcgcgcaagtgcctgccacgaacaaattggctggcggccggcactgattctgagaaccaaaggaagctgctggggttgaaaatcataagccgaatgcactgcaaacctttgcactaacggaagaaactg

SEQ ID NO: 22890 - DNA, 355 bp, Zea mays
  unsure (1)..(355): unsure at all n locations
  Clone ID: MRT4577_120879C.1
cgtgtgtgttgtgccgttttttatttatttttgtttggagagactagaaattttgttaaaaatggaaagatgaaaaaaaagggaaaatantagaaaacaataggccgaaaattgagaaagataaaggaaaaccttttaaacttcaccaaaagccactggggggggggggacccccaaagccccggggagaacgaggagtaaaaaaaagagataaaatgaaaccccctcctccccctggcggccccagttgtccccaaggcctgagacccccagggcagtgacccactcctttgaataccaggaagagagcttgaccagccggggggccatgaacacggctagacaggccttcccc

SEQ ID NO: 22891 - DNA, 338 bp, Zea mays
  Clone ID: MRT4577_12087C.1
ccggccgggagtttctgtgttctaccgagcctatgtcacatggtaattctatcctggagttttatgtttttaaaaaaaaaaaaaaaaaaaaaaaaaaaaaaaaaaaaaaaaaaaaaaaaaaaaaaaaaagaaaaaaaaaaaaaaaaaaaaaaaaaaaaaaaaaaaaaaatttgtctgcgggaaaaactacgggaaaatggggaaatgaatcgtaaatgaaaaaaagaattaaaatttgacattatttcatacgggggttaaaaatcttgaaaactttgttttgtaatacaaaattgggggcgacatgaaaaaaaaaaaaaaaaaaggggcggccccca

SEQ ID NO: 22892 - DNA, 327 bp, Zea mays
  Clone ID: MRT4577_120880C.1
ggaaaaaattgggcatccccaattgacaaagtttttggttttgttcaattaaacagggggcagatcccgatttttttccgaactggtgttttttaaaagcaaaacaaacaagttttggttccaattggccgggaaacaaaagggcggttcttttgtgtttttgaacggggttcggaaacatccaaaaaagttggggggtgatcaaacccctagttgccgggggattgttccacgggttttttgggggggggctccatggggacgccccaaattttgttcccgatgggttttggcctgccgggcgcggcccggacccgtgggcggacc

SEQ ID NO: 22893 - DNA, 374 bp, Zea mays
  Clone ID: MRT4577_120881C.1
actatctttgaatccggtctcctccctcggtctagcggtatccggcaagagagggtcccgacacgaacagagctctcggctttttgcttgcagataaccacacaatggttcccatcacgcaagagaccgtgaacggtctcaaggacatcattaacaagctcgagtcgcgcgttgccgatcttgaaggcgcgtcttgttcatggcagcacggattccaactcgaaatcaatggctgatcaattccgtattgtcttgatgggtactcctggggctgccatgggaactcatgctcctcgcttgaaggaacagttctgcatgtgccacttggccaccctggatatgctgccatcccaggttgccaagaagacaccgct

SEQ ID NO: 22894 - DNA, 1276 bp, Zea mays
  Clone ID: MRT4577_120882C.1
gacccccgggttggccggacggatttatctaggttctcaccagatgtacgcagatctgccgctagcgcgttgatacgcattgcgaaatcatccaccgcctcgctttccttaaactcgatattctcgaattcacggagcaggcgctgagcattggcttccttcacgcgttcagcaccaacgcgcatgctcttcaccgccgtccacgcatccttgacggtattcttcgcgcccagcatctgccacatttccgggggcacagaccggagcagggcgctcatggcctgccggtcttgccaccgcttcactccttcgccaccgggctcgatcgtctcccagatctctagagcctcgaagttgcattgcatgagcatcgcccactccgtgtaattggagcgagttagcatcggccacatgagagaaccctcccgtacgtcatgccctgaactgctcggctgttcggcgtcacctgccatcttcttcgtctccggtgaccagcgcggtggaggcgcttctttcttggtgcctctgataccagatgttggcgccggctgccggaatggctgcaccgacggcgatcggcgacttccggcgaactcactctctctctctgcgctgagtggatgagatggcaacagcagttccccatcgttggccggctccgccgccagtgccagggagtccaggggcaaccggtgcttcggcggaggatctactatgtgcgggcggacgatcaagggaacttcaactcggacgcctggaggatgctatggttccttgaccggtccgtgtggcacctgaggagagatttagcagcccaggtgggtgtgggtgaagccaacgccctagacatcacgctgtgcgtgcgggccggctccaacggccggttgactcctcttgtcatcgacctgccttccgatgagcaggccatgcacgtcgtcgtcctcaacactgattcaccagctgctgaagctttagtgcacccagatgttggtgcaccgtagaggaatattagaccaagacttctgacagcaacatcgcagttcatctcttcagaaatgagcagttccctgcttcggattcagtgagatgacaactgatatttgttctgatagcttcagaagactcagtcagtccatttgggatttatgtgttccgctaatcggaagcgttttgaactggccttcaagtttcaaaacttcaaaactgctggaggcgttctgtggaaacattgtttgaactcacttttttcttgatatactagatgaattctccgcgc

SEQ ID NO: 22895 - DNA, 548 bp, Zea mays
  Clone ID: MRT4577_120883C.1
ccggccgggtttttttcgctgttcttgtttgattacatcatcttattttgtgcttgaatctaacctgccattaagtttttatcgcttcgttatttctctgttgtgcttgtcttgttcttttgttgctctaaccatggacgcaggctcccgctcgatctcctcggcgaagaaccgcgccgccgccgtcgccgccgcgccccggccaccgctgcaggaggcgggctcccgcccctacatgccatcgctgagctcgggaccccgcaacccgtcggccaagtgctacgtgagtcccttggtcttggtactggagcgcgtggggtgttcgacgttttgcctgaccaagcttggctcgttctcccctcctccttctcatgtttgtgtcctgcagggcgacaggttcatcccggacaggtcggcgatggacatggacttggcgcactacttgcttactgagcccaagagggacaaggagaacgcgtcgggcatggcggcgtccccgtccaaggaagcgtaccggaggctggtcgcggagaaactggttaacaacc

SEQ ID NO: 22896 - DNA, 2034 bp, Zea mays
  Clone ID: MRT4577_120884C.1
ccggccggggacacaaataaccattcacggccgatccctaaaccccacaaagcaaaccggcctctctctctctgtctctctctctcgcctccctctcgcctccctctcgacgacgatctcaggcgctcgcggggagtcgagtcgagaccagcttcgttccttcataaaaagctcacttagttgttgtccccgcctctttttttcgctgttcttgtttgattacatcatcttattttgtgcttgaatctaacctgccattaagtttttatcgcttcgttatttctctgttgtgcttgtcttgttcttttgttgctctaaccatggacgcaggctcccgctcgatctcctcggcgaagaaccgcgccgccgccgtcgccgccgcgccccggccaccgctgcaggaggcgggctcccgcccctacatgccatcgctgagctcgggaccccgcaacccgtcggccaagtgctacggcgacaggttcatcccggacaggtcggcgatggacatggacttggcgcactacttgcttactgagcccaggagggacaaggagaacgcgtcgggcatggcggcgtccccgtccaaggaggcgtaccggaggctgctcgcggagaagctgctcaacaaccggacacggatcctcgctttcaggagcaagccgccggagcccgagaacgtttcttttgcggacacgacttcctccaacctgcaggccaagccggccaaacagcggcgccacattccccagtctgccgagaggaccctagacgcaccagagctagttgacgactactacctcaacttgcttgactggggaagcaacaacgtgctatccattgctttgggagacacggtgtacctgtgggatgcatcgagcggatccacatccgagcttgtgaccgtcggcgaggacagtggtcctgttacaagcgttagctgggctcctgatggtcggcacatggccgtcgggctcaactcgtctgacgtccagctctgggacaccagctccaaccgactgttgagaacactcagaggtgcgcatgaggcaagggtaggctcgctggcatggaacaacagcgtcttgaccaccggttgcatggacggcaagatcgtgaacaatgacgtaaggattagagaccacgtcgtgcagaggtacgaggggcacagccaggaggtctgcgggctcaagtggtccggatcagggcagcagctggccagcggaggcaacgacaaccttctgcacatttgggatgtgtcgatggcatcatccatgccatctgctggccgcaaccagtggctgcataggctcgaggaccacatggccgccgtgaaggcactcgcgtggtgcccgttccagagcaacttgctggccaccggcggcggtggcagcgaccgctgcatcaagttctggaacacgcacaccggtgtgtgcctgaactcggttgataccggatcacaggtgtgcgctctgctgtggaacaagaacgagagggagctgctgagctcacatggattcacacagaaccaactcaccttgtggaagtacccatcgatggtgaagatggctgaacttaatggccatacctctcgcgtcctcttcatggctcagagtcctgatggatgcacagtagcgtcggctgctgctgacgagaccctccggttctggaacgtttttggaacccctgaaacgcccaagcctgcagccaaagcttcccacactgggatgttcaacagcttcaaacatatccgataggatgagtcaagactattattggatattgtctatacttgacttgatgatggcctgtcgttttcggaaggtcagaaatcaatgacacagggtttgcttcagaaatcagatgtaatgttttttcctcatttttggttggaacatcaagggcgcttgtttgatgtaccaattattgtaaatcaagacagcaatatattttgtcggttggatttggaaattgttgtaaatcaaggcaaccgtttgtttcccaaattataaattgatattttggttgacggctgtg

SEQ ID NO: 22897 - DNA, 367 bp, Zea mays
  unsure (1)..(367): unsure at all n locations
  Clone ID: MRT4577_120885C.1
tcttaatttatgaatttaaaaaaaggaaagcgtaactttcagacatttgggggcgtatactcnatggggggtattttgtgctgaccactcatcacacatatgcatggcgccccaacccacgcacagccgaccctgcccgaccgacgaccgctggtgccgtccgatccacgcctgcgaccactccacaatgggtggcaagtttgaccatgtagatcgtttgttccaaagcatggaaagcgcttacataaatagcttatcaaatacaaatgacgtcaaagagcttattccagaattcttttacatgtgatggggaacctataggcgatgttgctctccctccatgcgcaaacggttaacctgaaaaatc

SEQ ID NO: 22898 - DNA, 149 bp, Zea mays
  unsure (1)..(149): unsure at all n locations
  Clone ID: MRT4577_120887C.1
aagcgaaatagcaactggattcggttccaaattataataatgnntaatatgaaaggattgggggggccctttatagagaaccaaatttcactcacgtgcatgcgaagtgataaatctttatagaggacccaaaataaatactggggcgg

SEQ ID NO: 22899 - DNA, 568 bp, Zea mays
  Clone ID: MRT4577_120888C.1
cccagcgtccgcggacgcgtgggcggacgcgtgggcgtttctgcacattcttttttttttgggtgctgaatagtactgtacagtttatgatttgcttggactcatgatcgagagtgtaaaaaaaaaaaaaaaaaaaaaaaaaaaaaaaaaaaaaaaaaaaaaaaaaaaaaaaaaaaaaaaaaaaaaaaaaaaaaaaaaaaaaaaaaaaaaaaaaaaaaaaaaaaaaaaaaaaaaaaaaaaaaaaaaaaaaaaaggggggggccgttttaaaggaccaaattttagaaccccggcctggaaaggtaaaaatttttttaaagggcccccaaaataaattataggggccgggttttaaaagggggggggggggaaaacccttggggttcccaaattaaatccctttgaaaaaaatcccctttttcccggtgggggaaaaaggaaaaaggccccccccaatcccctttccaaaaggtggcccacctgaaagggaaaagggaaccccccttataggggcaaataaagcgggggggggggggggtttccccccagggggcccgttaatttggca

SEQ ID NO: 22900 - DNA, 515 bp, Zea mays
  Clone ID: MRT4577_120889C.1
aaaacaaacccccccccagggggggcgcccaagggggggctcccagaaccaatatcaaaaggggggggggcccaaccctggggggccccgggaaagacagaacgtaaattttgggggggggcacggggatcggcccgggccacaacggaaaagttggccccccggttcaacaaaataaactgggcgaaccaactaggttaaaacatgggggggggattttaaacggggttgagccgactaaattttgggttcccccgactaaattttttcggcccaaaaaaaatggccgggaacttgggggttaaaaacttttttttcaacactatcaccccaaaaaaatccattcccaaaccccccattccaccaagaccccccaaggcgggcatataccccaggccccccataccacccaaaccgggaaaattggagaaggcccccccatccaagggggaatcagcaccattattattttggggaacccattgggcccaaacaactttcacaagggggggggg

SEQ ID NO: 22901 - DNA, 1454 bp, Zea mays
  Clone ID: MRT4577_12088C.1
cgtccgcctcagctggagcgtcaggcccgctgtctcgcgtccgtcaaactccaggcagggggtcaggcgggcgacgcacggcagtgttgccaatggactcgcgctgcccccatctgctactgctcctccctctcctcctcttggccgccctcctgcccccgccgtcgtcgggggtgccggaggtcatctggctgccgacgagcgggggagcggggcccttgtcctgcgcgccgccggaccccgccgtgtacgaccgccccgtcatcggcatcgtctcgcacccaggggacggtgcgggcggcaggatcagcaacaccaccgcgacctcctacatcggcgcctcctacgtcaagttcgtcgaggccgccggcgcgcgcgtcatcccactcgtctacaacgagcccgaagaccgcctcctcgagaaattgagtttgttgaatggagtgctgttcactggtgggtcagagaaggaaggtgtatattttgacacgataaaaagagtatttcagtatgttttggacaagaatgatgcaggtgaaccatttcctttgtttgcccaatgtcttggctttgagcttgtaagcatgattgtcagcaaggacaataatatcttggaggcatttgacgcccaggatcaagcatcaactcttcagtttcccagctatgctttggagggttcagtttttcaaaggtttgacactgacctcatcaagaaagtcagcaccaactgtcttgtcatgcaaaatcacagatatggtatatcaccaaggcgatatcgagagaacgatgcactatcaagtttcttcaaaatcttgactacatcacctgatgaaaacggcaaggtctatgtctcaactgtacaagccaataattatccaatcacttgcacgcaatggcatcctgagaaagccatttttgagtggaggaaaccaatgatcccacacagcgaagatgcagtacaggttactcaacattttgccaatcattttatcagccaagcacgcaagtctccaaacaggcctcctgccgacaaagtgctggataacttaatttacaactacagtccgacatttaccgggaaaaaatcgaaatcgtttgaggaggtctacatcttctcctgagactggattgaacgcctgagtgtcttcaggaatctgtagttctgcactacattgctattgtagtgtaaccgtgcattagtattacccgtggtaccagaagttgtatttgtatagattcgttggactgcctgtattgcagtaacctttccaccgtatgggtggctctatagaatgcctataagcagcgcaataataatgataatgtaagactgaaaaaaaatacttgtatggagattttctgaatttaaaagtttctccaaatcaggtgaaggtcgaatgttcctggacctgattcatgaaaaaaaaaaaaagggcggccgccaccgcggtgga

SEQ ID NO: 22902 - DNA, 365 bp, Zea mays
  Clone ID: MRT4577_120890C.1
tcacacacgtcgggtgtcatggaatcaagcgtcctgctactctaactggctccaccgctccttgaccgacatgccggccagagagcatgtctactacaacttctgctcgtatacggttcccgatcactcaagcgtgacatggaagacgaccagggtatgaagaaacaccaactgatcatcactgacgccatcagccacgtcatgatcgtgatgccggacgacgctcacatacacgctctgcatcgatacgtctgcagtcctgatgacaacgccaacgggccaaacgaggttagctgtgacgaggaggatctgacgccgcttagggacaggttctatctgtgacgagcagacaagctgtggctaca

SEQ ID NO: 22903 - DNA, 352 bp, Zea mays
  unsure (1)..(352): unsure at all n locations
  Clone ID: MRT4577_120891C.1
tttttttttttttttttttttttttttttttttttttttttgttttgtttttttttttaaaacccctaaaaacggcccccaattggcattacccatttgaaatttttttttgaaaaacaaaaaatttttgcccccaaaaaacaaaaaaaatgccgtctcttgttacagaacaaggggggatgaacatcagttctacaagggaactntaatcatgcctggtggtacttttgccctaccccacttaaacaagatttttgcaaaactttttttggtggggggggggggtccatgaaaaaaatttgaactttacacactttgggttgggctggatccgggcttccccggagtcgcc

SEQ ID NO: 22904 - DNA, 2185 bp, Zea mays
  Clone ID: MRT4577_120892C.1
gttctccctttccactccagtccaaccaaccgtccatgggtttcttcatcccgccgcccaaggtgtacaagccggcggcagaggtcgacctcgggccggacagcgacgagcactacatcagccccaacgtgaaagcgccccgcgtggccgggttcctggtgaagatgctggcctgggtgctggagacgccggtgcttggctggatcgtgctcggcgtcctcaagagggacaacctcgtctacaagctcgtctcggacgctgagatcccggagccgccgctattcacggccacccacacatggcaagcagcgatccaggagcagagcgtgcgcgtgacggagtcgaggctgtcgccggcggagcgcgtgcaggaggccgtcgcctgcgtcccagctgctgcccaggcccagttggagccggcggcggggttcaggcgctggacggtgcgggacttccacagggcgtacagatcaggacaggctacccctaccatggtggcgcggcgatccctggcagccgtaggggaatgttcagcgccggactcgaacatgggcttcttcatcagctgcgaccctgcggacgtgctgcggcaggccgaggactccacccgcagataccagcaaggggcgccgctgtccgccagggacggagtactggtcgccgtcagtgacgagcgcgatcaccggccgtgcccgatccgcggcgggaggcggtcgctgggggcggcgcggcggttcgcggcggatgcagtgtgcgtggcacagcttcgcgcgtgcggcggcgagagggccggcaaggacagcatgcacgagctgggcgcgggcaccagcggcatcaacccgcaccacggcgccacgcgcaacccctacaacgtgggcagggtgtcgggcggctcctcgggcgggtccgccgccgccgtctgcgccgggctctgccccgtcgccctcggcgccgacggaggcgggtccgtgcgcatgccggcggcgctctgcggcgtcgtcgggttcaagcccactgccggccgcctctccaactccgggcttcttcctctgaactggaccgtcggcatgccggggatcctagcagcgacggtcgaggacacgctgatcgcgtgttttccgtgcttcctttcaggtatgcggcgattgctgatcagtcaaaaccaagccctttacagcagcctgaactgaacctgcccatgctgacacgcacgaggtccatgcccagcatcaggctcgccaaatacgcaaagtggttcgacgacagctcggaggacatcaggagcctctgcgggaaggcgctgcagatgctgcgcacgcactacggctgggagagcgtggacgtcaccgtccctgagatcgaagagatgcggctggcgcactacgtgaccatgggctcggagtgcactgcctccctcgctgccaagtacctggacagcatggacaggtccgaggtcgggtgggacgtgcggatcgcgctcagcgcctacgggtccttcagcagccgagactacctcagcgcgcagcgtctccgatgccggcagatgtacttccacgagaagatcttcgagactgccgacgccatcgtcacgccgatgacaggggtgacggcgtacgcgctgcaggacgacgcgctgagcacgggggagctggactacatcaacggagctgcgctggtgaggtactcgatcgcgggcaacttcctggggctgccagcgatcaccgtgcccgtcgggtatgacaggggagggctccccgtggggctccagttcatcggccgcccgtggtcggaggccacgctgctgcacctcgcctacgccatgcaggaggcgtgcgggaagaaggtgctccggaagcccaaggtgcactacgacctcctcaccaaagagtagctccagcgagcatcgatccggcagattgctctctatgaggcgcgcggttgctgattgcatgcacctctagtgtgattgattgtttgtttgattgattgagcttgtgatgagagagtgggggaagttgaatggaatgccgtcaatgtcggacaactctcaactaggagaagaaaaaaaaacatggttgccagcaccatgcatgtgcaccaccattcgttttttaatgtcgtcctcattgaaacattatgtaagtattgtgtatacgtgtgcttttaaaaaaaccccacccccccc

SEQ ID NO: 22905 - DNA, 1728 bp, Zea mays
  Clone ID: MRT4577_120893C.1
gtagtgacgaaggactccggtccagtaggaattacctgccctgctgacctgtaggaattaaggagggggacagggccacgtacagcccccacagcagagagatcgcatcgcctccttcgttcccgcgccgtcactgggcgccgctgtccgccatggacggagtactggtcgccgtcaaggacgagctcgattgcctgccgtacccgaccagcggcggcacgcggtggctggggtcggcgcggcggtgcgcggcggacgcggcgtgcgtggcgcagctgcgcgcgtgcggcgccgtgatggccggcaaggccaacatgcacgagctgggcgcgggcaccagcggcatcaacccgcaccacggcgccacgcgcaacccctacaacgtgggcagggtgtcgggcggctcctcgggcgggtccgccgccgccgtctgcgccgggctctgccccgtcgccctcggcgccgacggaggcgggtccgtgcgcatgccggcggcgctctgcggcgtcgtcgggttcaagcccaccgccggccgcctctccaactccgggcttcttcctctgaactggaccgtcggcatgccggggatcctagcagcgacggtcgaggacacgctgatcgcgtcggtgccgggcagctagcttcttgtttctcccataaaccaaatctttcgattcacatgtctgctttgttttcacccatgaggtaatgaaaacaccacgcaaatgttgtctgctttgttttccgtgcttcctttcaggtatgcggcgattgctgatcagtcaaaacaaagccctttacagcctgaactgaacctgcccatgctgacacgcacgaggtccatgcccagcatcaggctcgccaaatacgcaaagtggttcgacgacagctcggaggacatcaggagcctctgcgggaaggcgctgcagatgctgcgcacgcactacggctgggagagcgtggacgtcaccgtccctgagatcgaagagatgcggctggcgcactacgtgaccatgggctcggagtgcactgcctccctcgctgccaagtacctggacagcatggacaggtccgaggtcgggtgggacgtgcggatcgcgctcagcgcctacgggtccttcagcagccgagactacctcagcgcgcagcgtctccgatgccggcagatgtacttccacgagaagatcttcgagacggccgacgccatcgtcacgccgatgacaggggtgacggcgtacgcgctgcaggacgacgcgctgaggacgggggagctggactacatcaacggagctgcgctggtgaggtactcgatcgcgggcaacttcctggggctgccggcgatcaccgtgcccgtcgggtatgacaggggagggctccccgtggggctccagttcatcggccgcccgtggtcggaggccacgctgctgcacctcgcctacgccatgcaggaggcgtgcgggaagaaggtgcaccggaagcccaaggtgcactacgacctcctcaccaaagagtagctccgattcgtattgtgtcatgcatgatgctggcatgatgctggtgcacatgcatgatgctccgattcgtgtacttctaatgtgttaagatagagaccattcgtgtgccctcgatgtcgtcgtcattgaaacattatgcaagtattgtgtatagtgtgctttagaaaaaaaaaaaaaaaaaaaaaaaaaaaaaaaaaaaaaaaaaaaaaacaac

SEQ ID NO: 22906 - DNA, 444 bp, Zea mays
  unsure (1)..(444): unsure at all n locations
  Clone ID: MRT4577_120894C.1
ggccgtagtgacgaaggactccggtccagtaggaattacctgccctgctgacctgtaggaattcaaggagggggacagggccacgtacagcccccacagcagagagatcgcatcgcctccttcgttcccgcgccgtcactgtatcgttcgtatgcaggttttaattattgcgatttatttattggatgcaacggctcgatctgctaataactgcaggggcgccgctgtccgccatggacggagtgctggtcgccgtcaaggacgagctcgactgcctgccgtacccaaccagcggcggcacgcggtggctggggtcggcgcggcggtgcgcggcggacgcggcgtgcgtggcgcagctgcgcgcgtgcggcgccgtgatggccggcnnggccaacatgcacgagctgggcgccggcaccagcggnattaacccgtaccacgggg

SEQ ID NO: 22907 - DNA, 1715 bp, Zea mays
  unsure (1)..(1715): unsure at all n locations
  Clone ID: MRT4577_120895C.1
tgtgggggaagaacggcgtcggcaaacgaggtccattactcctctgagcaaaggggagtctccgtacgctggcgtcatgaaggctccagtaggggccactctccacgggcgggccaggcaggcccgcatcggtaggccctacagcggctgggagtggacggagacccaccgcacgcaccgccgccgtgggacggggagccaccgtagccgcgtccggtggacggggcttcagactcaaatgctccagttctatgtaatatgattgaccgtgataatggtcatagcaaggatggatgctttatagttttaccaaagcatgcacctgtgctgtctatccgaagctcaatggacatgccttcttgcttggaaggctcctctcagggcagtggcactgaagctcacttgagcagtgctcactgtttccaaaatcttacaggcgacaacttttcaactcctgattgcttaaatgataaagtattgttgacaacagatgaagacgtagttcgacaatcagctgaatctgagccttccaggttcaacttgcaggtttctaggaaacaacgggtgacagtattgcctttccattgtcacgaggatgaatcgatatctgtttcggatcatactgatggtacaaaattttgtaaaggctcaaaagaggttgagcaaccgagcccagtgtccatccttgagcctccaattaatgaagatatttgttttccacgatgtttcaactatgacttgcaagggatggctaacaaacagagaggttgccatcaatatcacaatgaatctgaagttaacatgtcaagtgatgatgaagaccattctttttaccaatctttggaagcatttcaggtcgaggaaaactgggacttctcatatcttctcgacatacttatatgctctggtatcatagttgttgactggcagctcatctgcaagtcatggtacttgcctggttaccctgttggccctcatgtctttgataggcttgaaaggaaatacaataaaatcgcaacatgggcaaagcctgagaggaggcttctttttgacctcgtgaattcaattctttccgaggtccttgcaccatgtgttgatgtgcacccatgggtgcagcctagtagacactgtgtggcattttggggccctgaagggcctgttgagaaggtttggcagacaattgttaggctgcaggaagactgtgtcacaaggcatcctgatgagatggttcttgatacaaattggctggaagtaggcaccgacatcaatatggtggggaagcagatagctaggatgttacatggcgacctcttggaagaagtcatagtggacttccttggttgagttggtagtttcatgtggacataactagtaactaacaacttcggcaacatggggttcgctcaaacttcaagcagattatgctgaatatgtaacggcttttcaagtgcacacatgctgcatttttcttctggttataataggagctatgtattatgtaattacattggagagcaaaatatacaggccaaaaaaacactactgcaggtatttttcgattctgtactgctaagctgtacttcctggtcctatctgatactttgatgggtgtagtaattgtaaggaaaatggaccttaatctagtttggttatgatgtttgatgaccaacatgattatttggactaatatttgattggtgaaaaaaaaaaaanaa

SEQ ID NO: 22908 - DNA, 381 bp, Zea mays
  Clone ID: MRT4577_120896C.1
cttaacttaagccaaaatggaaccccccatctacgtattgaaaaagcaaactggataaacgacagcccgcatcataaatttttggcaaaaaggcggggatcccttgtcaccgtgcaaaaaccttcctctccacactcttggtgacttcaatattttccgggctgactcatttggccgcctgggaacctacccagggcttgtttctgccacaatgggtgccccaccatgggcccggtgggaataattttcggcaaaccaacctccccagggttgaaaaacttgagatttttctcaacccccttggctgaacgggaataaattttggtaaagagactagccaatttttaaaaaatatgggatgtttggcaagccccctctggg

SEQ ID NO: 22909 - DNA, 914 bp, Zea mays
  Clone ID: MRT4577_120897C.1
acggctgggagagcgtggacgtcaccgtccctgagatcgaagagatgcggctggcgcactacgtgaccatgggctcggagtgcactgcctccctcgctgccaagtacctggacagcatggacaggtccgaggtcgggtgggacgtgcggatcgcgctcagcgcctacgggtccttcagcagccgagactacctcagcgcgcagcgtctccggtaggccagtcgccagccgccacatctacatacatgcggacacatcgaatgcatggacaacgtaacgccattgtttgttctgcgaaaacgacgcctgtagatgccggcagatgtacttccacgagaagatcttcgagactgccgacgccatcgtcacgccgatgacaggggtgacggcgtacgcgctgcaggacgacgcgctgagaacgggggagctggactacatcaacggagctgcgctggtgaggtactcgatcgcgggcaacttcctggggctgccagcgatcaccgtgcccgtcgggtatgacaggggagggctccccgtggggctccagttcatcggccgcccgtggtcggaggccacgctgctgcacctcgcctacgccatgcaggaggcgtgcgggaagaaggtgctccggaagcccaaggtgcactacgacctcctcaccaaagagtagctccagcgagcatcgatccggcagattgctctctatgaggcgcgcggttgctgattgcatgcacctctagtgtgattgattgtttgtttgattgattgagcttgtgatgagagagtgggggaagttgaatggaatgccgtcaatgtcggacaactctcaactaggagaagaaaaaaaaacatggttgccagcaccatgcatgtgcaccaccattcgttttttaatgtcgtcctcattgaaacatt

SEQ ID NO: 22910 - DNA, 634 bp, Zea mays
  Clone ID: MRT4577_120898C.1
gtcatagcaaggatggatgctttatagttttaccaaagcatgcacctgtgctgtctatccgaagctcaatggacatgccttcttgcttggaaggctcctctcagggtaaaaataatctaaacatatccaatatttacaacaatggtaagtttcagattgattcttcccgggataaaccaagatcactgaagcaaattggcagtggcactgaagctcacttgagcagtgctcactgtttccaaaatcttacaggtgacaacttttcaactcctgattgcttaaatgataaagtattgttgacaacagatgaagacgtagttcgacaatcagctgaatctgagccttccaggttcaacttgcaggtttctaggaaacaacgggtgacagtattgcctttccattgtcacgaggatgaatcgatatctgtttcggatcatactgatggtacaaaattttgtaaaggctcaaaagaggttgagcaaccgagcccagtgtccatccttgagcctccaattaatgaagatatttgttttccacgatgtttcaactatgacttgcaagggatggctaacaaacagagaggttgccatcaatatcacaatgaatctgaagttaacatgtcaagtgatgatga

SEQ ID NO: 22911 - DNA, 1834 bp, Zea mays
  unsure (1)..(1834): unsure at all n locations
  Clone ID: MRT4577_120899C.1
cctcgcgccgccgccgccgccgccgtgccggaagggagnagaggagcaaggagcacgacgcgatgggccactccaacgtgtggaactcgcaccctaagaactacggccctggctcccgcgtctggtaactatcccgcgacgctcctttctctgtatagcaggatctcggttcttttcgcttttttagaatgtggacgacctgcttgtgatagggactccatggatctgttaaggtcctcactctttttttatggttagcttaggccctgtttgtttcagattataatctctccagattatataatccagcgcaaataatccaataggtaaacaaacaactagattatgggttcagattatataatctaaagcccagattatgataatctcataatctcctcaagtgtagcttatttgagattattttggcaaaagacccactacccatgtttatgtaaatagaaattacaatatatgtcatccttcttttcccacctcaaataaacaaacaagtgtattgttgtctttgtgaataatctatatttatataatctaaactaccaaacaactacatttagattataatatatctagattataatctaaattatatattttagattataatccagattatataatctataagctgcccttagtcccccgtaaagctctggaagaattaggtttcttggattagcctgttgctactgagatttgatgtgcatctctcgtataaactctgctatcttgttaaaaatcagaagtctttgtatcctttagtttagtatctcagttcaatgtggggtaatttcagctggttatatgtagcagctgctttggtctgctgtttggtggtcttactcatggctgtttgatgaaataacctgattgatttttagctgatatattctatgattatgttctattaatgagtatgcgtttggtctgttgtattgtgcatttatgccataatgtgagacttaagcagcacaaagggctcttgtttttaatggattgcgatttgttaaaaagatgtggaaatagaccgttttttacctttatgtgcaaagagtttatttcacaatacaacaaattagcctcggtaactctttatgtttgtggttttgcagccgggtctgcgcgaaccctcacggtctgatcaggaagtacgggctcatgtgctgcaggcagtgcttccgcagcaacgccaaggacattggtttcatcaagtaccgttgaagaggccactgtgctgctgtggagaacttcctacatcaaagaaatgggtccttcattagaaggcctaatttatgcgctttagctttttgttcagaacttgagactcatgtgttaaactcaacttgttaaagttttgatggctactttgtgcttgttggaccagctataatcagaagattgaaattttctcacgcaaaaaaaaaaaaaaaaaaaaaaaaaaaaaaaaaaaaagcgccactaatctcgccttccgaggaaactcaccagcccaccacagacccgagcggaagaagccatgtccgggcgcggtaagggtggcaaggggctcggcaagggcggcgcgaagcgtcaccggaaggtgctgcgcgacaacatccagggcatcaccaagccggcgatccggcggctggcgaggaggggcggcgtcaagcgcatctcggggctcatctacgaggagacccgcggcgtgctcaagatcttcctcgagaacgcatccgcgacgccgtcacctacactgagcacgcccgccgcaagaccgtcaaccgccatggacgtcgtctacgcgctcaagcgccagggccgcaccctctac

SEQ ID NO: 22912 - DNA, 407 bp, Zea mays
  unsure (1)..(407): unsure at all n locations
  Clone ID: MRT4577_12089C.1
ccccaagaagttaacgttcagctgaaaaaaatgatgttttgacccaaaagaacagggggttttgaacatgcaactaataactttcctaggtggctaactacagccgggagggaataaacgttttgatcctgggggggaagtcctgaaattgggaccggccccccctttggggggcccatttccggccggggggggaggccccctttccgggggaaacggggagcgcgtacagggtttggaaaatcttgggaaacccaaaaaagggggggatttcaaaaaggtagggcgggcaggcaaaaaaaccaaacgggccgccccgggggaccttgtaccctgggccgtnntcggccctaaggcccaaaagggggcggggggggaaaaggtttcccgcgaggcccacggaaaaa

SEQ ID NO: 22913 - DNA, 192 bp, Zea mays
  Clone ID: MRT4577_1208C.1
gacataaagaaaatatgcaacgaggcaagtttttaccttgttgttgcttaaagaaaatatatgagccccgataacagaaacataatgcattcttatacccaacaatgtaacctggtatatccacatagaggatataatatgctccggttcttacagaaacaactgaagaatggccacaaaaagaaatgaacc

SEQ ID NO: 22914 - DNA, 704 bp, Zea mays
  unsure (1)..(704): unsure at all n locations
  Clone ID: MRT4577_120900C.1
ggccaagttctccatttcaaggtaanagacttatggctcgagtctccgccgccgtcgccgctatgcctccctccccatcctccgccgcgggctccgcctcgccgtccggctccgcgtccgcctcggcctccgacccaaccccgtcctggtgggagtccgtctcgcaggcgcgctcccgcatcctggcgctctcctccatcctgccggccccggcctcccacgacgtcgcggcgctggccgacgccgaccgaccggcgcgcgcgctcctccgctcgcccgctgcctacgcggcgctctctgacgcactgcgggcgggtggcggcgccgatgaccccgcctgccactggctctacgacacgctcctctccgccgaccccgacctccgcctcgccgcgctcgcgttcctgcccctgttggcggcgctctacctccgccacctcccgcccgagctcccctcctcgctttcgggcttcgaggccgtcctcctcgccgtctactcctccgaagccaagaatcgtcaggggaagccggtcctcgtcctgatgcccgacctctctgtcccatccctgtaccacacgccagcgatggcgtccagcctcagctccaagtcccctcggttggtcgcagcccccgcagtccccgncaatcccccctccgcaggcgactcccgtggtgggggttctctcgccgccgctggagccaca

SEQ ID NO: 22915 - DNA, 364 bp, Zea mays
  Clone ID: MRT4577_120901C.1
atgcttacaaaaaaaaaccaagcgaagcgttttgttttcaccctaacataattgcatgggaggcgatgagctttccttgccttgctcgccttgccattgagcgcagcacatccgttgattatttcatagcgctgagttgattttatcgcaatgatttcatagcacatcccatcagatactttactgggctgggatcatacaatcgagcaagcctacaggatacaattcgcgctggccgtgagcgtagcacatcaccccatcgaacagttgcaacaacactactaggcacatctcatcttacaaaacataccatcgcaacagaaccaacagattcttgtcatgacttaaccaactaacctaggcg

SEQ ID NO: 22916 - DNA, 984 bp, Zea mays
  Clone ID: MRT4577_120902C.1
ttcaacttcggctcgagggaaagatcacaatgttgtacctcgtgggacttggtctctctgacgagacagatattactgtcaagggtcttgaggtcgttaagaaagcctccagggtctatctggaggcttatactagcattctgcttgtcgagcaatctgtcttggaatcgtactatggacgatccatcacggtagctgaccgtgagatggttgagtcaaacagcgacgagatcctccgaaatgcgcagaacgaagatgttgcgttccttgtagttggagatcccttcggagctaccactcatacggatctcgtgcttcgtgctcgggaactcgaaatccctgtccgaaccgttcccaatgcctccatcatgtccgggattggcgcatgcggtctacagctctacaattttggacaaaccgtgtccatggtttttttcactgatacatggaagcccgcatctttctacgatcggataaaggagaaccgtcaaatcggcttacatacgctagtcttggtcgatatcaaggttaaggagcagagtctcgaaaatatggcccgaggtcgtctggtctacgagcctcctcgctacatgactgttggccagtgtgcaaagcagatgctagagattgaggatgagcgtaaggagggtgtctataccaaggacagtctggccattggcgctgctcgcgtgggaggtaagacggagaagttcgtggccggtactttggaggagctttgctccaccgacgaggtgctagggcctcctcttcacagtctcgtcctccttggtcgaaggacacacgagctggagcttgactacgtccggcagtttgcggttgacaaggagaagtgggatagactatggaaagctgagtacggaaagcagctgtgaactgttgctaatattgtcatgaattcgtatcgcctttgataaaagtcctatcgtacaagcgagatttgcattattcagaacattactctcg

SEQ ID NO: 22917 - DNA, 423 bp, Zea mays
  unsure (1)..(423): unsure at all n locations
  Clone ID: MRT4577_120903C.1
tttttntttttnttaagtagtaccaaaatttataccttctaaatattantngtgtatgcggaataataggctatttcatgggtgccttgaaccttaatacttgtnnggtttctatttaggtcttcatactcttagctataccacatacattaataaggatgtgtgggactataaagnatccatgttgttacattccatccaatatgtcatgtacatacatccgttttggatgtgagtgcatcgtatacatgcaaggccannatgcatgaatnncatcggattngggcgtgtaccgatgtnnngccgccagnatagatcgggccagnatgccnncttgtgatgncnntcctcgnngcggccatttcttctcnnncttggtcatttcgtccnncgacgtccgttggtcggttctttgnngcgacc

SEQ ID NO: 22918 - DNA, 165 bp, Zea mays
  Clone ID: MRT4577_120904C.1
acaaataaaggtggcccgcatgttccatatctaaaaaggatgatcaataacagaggtcaaatttgtgtacgccaatacaaacatgggttatccccaagcatggtcaggacaggtatagctcactccaatacactatacccacaacagagctcttctttacacatg

SEQ ID NO: 22919 - DNA, 729 bp, Zea mays
  Clone ID: MRT4577_120905C.1
attcgcgcggcggcggcggcgagcgtgcgacctgcgaccaccagacgacccaaccgacccactgacccacaccaccggagagctctgccttttacgttaatcaatcgagcccagttaaagaacctcttaattgcccgccaggagatccaccaggcttatcttctccgtctcctccgacctcgcctcgccccctcgccccgcggcttctgggctccttggcgccaaaatccccgcttccgatctcaggccttcgggaatcagggggcctttcattgaagttcacgatggggggctgtgtgggcaagggtcgtagcatcgtggaagaaaagcttgatttcaaaggtggaaatgtgcatgtcataacaaccaaagaggactgggaccagaagattgaagaagcaaacaaggatgggaaaattgttgtggcaaacttcagcgcttcgtggtgtgggccatgccgtgtcattgcacctgtttatgctgagatgtccaagacttaccctcaactcatgttcttgacaattgatgttgatgacctaatggatttcagctcaacatgggacatccgtgcaaccccgacgttcttcttcctcaaaaacggccagcagatcgacaagctcgtcggcgccaacaaacctgagctcgagaagaaagacaagctcttggtgatggcagttgaaccatgctacagaattagaacagagccagcttgtcattgcttatatatct

SEQ ID NO: 22920 - DNA, 876 bp, Zea mays
  Clone ID: MRT4577_120906C.1
atggccttgcgggcctggagctccagctcacgtgccctcgacagcatacgccatggatgccgggtccaagagcgccatcctctgtccagcgctgggaaaaaacaaagaattggctacacgacgggtcctaaacagagtacctggcaaagtcttccacttcaaaagaagggttcgaccttcgacggggtgatcctctatgcccttcaaggtgatagacaacaagcgcctgtgctccatcggcggaaggtttggagggccgaaaggaggagcgtcatggtactgcttgaggagaccggcatggaagatgacatggatgagagcaccctcgggcaacagcaagcggtattcaacaacgtcaatgccctccttgagttggaagggcacggcatagcaggggccgagcttgacattggggtgggtcacaagggaggcagcttggtgatggaggaggcgcaaccacaccaaataacctatggagcactcaaggggacaatcacccataaaccacctgaaacagagtggcacatgaggtggtgcagtatttcacccaatgtagccactcgaccatgcaccgggacggtcaccgctgatgcaacggaggtacatggcgatggtcttgttggcggcctcaaactgaccatctatctaagggtggaaggtggtgctcatgcacagcttgacaccaccggccatctggaacaagtcgtgccatacgacgctaatgaacaatgggtcaccgtcattgatgatagacatccgaaaaccgtggagtcagacaatcccagtgaaaaagacgcatgcgatggaggaggcagtgtaggggtggccaagaacaatgaagtgggtgtacttcaaaatgcggtcaaccaccgttag

SEQ ID NO: 22921 - DNA, 299 bp, Zea mays
  Clone ID: MRT4577_120907C.1
gcgcgtagagccgccgtcgccgccgtttcgcgcaccgtaccctagccctcgtcagcggcggcgtcgagctcagccagccatgacgttcaagcggaggaatggcggacgcaacaagcacgggcgcggacacgtcaagtacatccgctgctccaactgcgccaagagctgtcccaaggataacgctatcaagcggatcttggtgaggaacattgttgcacatgctgccgtcacagatgtgcatgaggcctgtgtacatgatggatatgttctacccaaattgtttgcaaaggtttatcact

SEQ ID NO: 22922 - DNA, 1479 bp, Zea mays
  Clone ID: MRT4577_120908C.1
gtatcgttcaccagctagttactagcgtcaaatgtttcatcagagtaccatcgtcagctgcttgaaaataccatgttatgtggtggcaccgcatcaatgactggttagttgccttttgtttttgatgtgcacctttgctctattcaaccttgtgaggtataggtcaaatagcgaaagggcctctaacgtaatggttaaggcttccgagtagcatcttcaggtcttggttcgatccctaatttcgggcttggttaaaaaaatcccctcgctgtgtcccatccgttctcggttatgtcctgcgcgtcacccctctggctgggccgttgcagagtgggcagaatggattttatcggtcaagaccatgtttcgatctcttcttaatttaatattgggagggcggtctttccctacccggccgagtttttttagctataggccaaatgcatatcaattagctgtatagggtaagtaatatcattttgttttaaactaacatatgttttctagttgaacgcagcttcattcaagatgaaaatctgccttcggtatgaactgattgtatggatgccaacctatgcaccactagtctgggacattctctgttgttatgttccctaataataaacagtgccagctttgatgttctgttagaactttaaagtttcatttgatacctgtcctttggataagtagtcaaacattgtagtgaatatgggtagcaatagcacaactggaagtggaaagtatgttggttaagtaagaattaggtagcaatagcacaactggaagtggaaagtatgttggttaagtaagaattaggtagcaatagcaacaggcaacagctacatttcatgtcatggttacagctttgcatgttcaattggctttcttggacagttgtgtatacaacgtgttgatctttatgcatatatttaatctaaactcttgtagttttgcttagactcattcaatcactaaggtttatctcacttttttttcctcaaggctttgaggacaggttccagagagaagcaaatctgtctgcttcagcaatctgtccatcacttgtgaagcacggggccgtccattgtgcacaagaagtgcttttagagacaaactgccttgaactagcacggttgtgttgtgcaccatttgctgctgttcatgtcacagctgtgccgatgcaggtgccgatgcttgagtccactgtacgccagccacagttcatacctgactgttgcgaagtgttggtgcatctggtttagggtatatttagagtgcaatagagtgtaacattggcacgtattcgttagaagttttagctagtagcccatttgcacctgtaggagaattagctgagatttccttttcaacttacattatgattcattatctcttcagctactgctagcgaaagagttgtttgggtcatgcccacaaactaagcacgtcacagattcttgggcatatgtttttctt

SEQ ID NO: 22923 - DNA, 660 bp, Zea mays
  Clone ID: MRT4577_120909C.1
ggggcgaataaattgaacacacctatgacaaagtttagccaaaaaaagactatgaacggggcgcagggatacaaagcttgacgtacaacttatgtggcctgaactaaacatatattatgactaagaaactgtgacgcgcttagtttgtgagcatgcttccgaagaactctttcactagtagcagctgaacaggtaatggatcataatgtaaatttaaaaggaaatctcaactcaggaaattctctggtactacaggtacaaatgagcaattggctaaaactcctaaggaatacatgccgaggctacactccattccactttaaataaacctaagggccaatccatcctaaccgagctagctagatgcatcaacacttagcaaccgccaggtatgaactgtggctggagtaaggtgtagacacaagcatcgctgcatcagcacccgcaaggccgcaacgttcaggtacgagcacaactgcgacatgaacagcagcaaatggtgcaccaaccgtgctagttcaaggcatttgtctctaaaagcacttcttgtgcacaatggacggccccgtctcatcatactcgcccttggtcacatgctggttttgagggaaaacgaccttagccaatatcgcaccacccaaccaggccgagtaccttgct

SEQ ID NO: 22924 - DNA, 707 bp, Zea mays
  Clone ID: MRT4577_12090C.1
ctatgtctcaactgtacaagccaataattatccaatcacttgcacgcaatggcatccagaggtaatttagttgtagctgtttaggagttcccatttagtgttcttattggttcttccttttctcttgtgcactgtatttattcctaggttatattcacaacatatcaaattgtggccactcaccaaatacaagtggctttatgccacaataaaactgtcctcatttgatgcagaaagccatttttgagtggaggaaaccaatgatcccacacagcgaagatgcagtacaggttactcaacattttgccaatcattttatcaggtttgttattgtaggctttaacctctattattatacaattcaagttggcagtacatcatgttggtttaagcatatgcaagaaaggaccttgctttgatgaaacttgcaagagtggtgaaagaaaaatggagttcgtgtttacctagctcaccctttccgtgtcgtggaacagccaagctcgcaagtctacaaacaggccttctgccgacaaagtgctggataacttaatttacaactacagcccaacatttaccgggaaaaaatcgaaatcgtttgaggaggtctagatcttctcctgagactgtggattgaacgcctgagtgtcttcaggaatctgcagttctgcactgcattgctattgtagtgtaactatgcattagtatta

SEQ ID NO: 22925 - DNA, 417 bp, Zea mays
  Clone ID: MRT4577_120910C.1
ggcccaaaaaccaacttattattgggggcattttcaatagaacgggccaaaccagttttttactggggccgggaaaaaacactggggggatgcccccccttttgttttttaaatccaacaacccaaaagacacttaacaaacaagtggggaaggagagcacaccctttggcatcaaaccatgaaacaaagccccgtccccgatcaaccttgggtggaaaacaggtttcctttgggatttcccccaaaccggccgatcgttagggggggggggtttactccggccttggcccccgggctcgcctccccgtccaaagccattttggccaaaaacctctcgacgggcgggcccattttgaaaccggggccaaaaaaccccgggccgaaaacaacgttcttcccgaactcccccccgggga

SEQ ID NO: 22926 - DNA, 1903 bp, Zea mays
  Clone ID: MRT4577_120911C.1
gcacacctcgaggccggccggggggttatccccgtttctacgcgctcgctcctgtacctctccccagtgcccaagaatccaagatctggaagggccaggtgggaggaccaagcttcgtcgacgtcgactcctcgtcctccctcacctcgctcgcttctctgcaattctccgcagccctcctctttcggtctttcccgctggcctcctcttttcaaaaccctcgctaatctcgtgccccgtcccacccacctctagcttcgaatcctagcgcctcgcctccgcattctagggtttccccgcctccggcgccggccatggaggcggtggtcgtcgacgcgggctctaagctgctcaaggccggcatcgcggcgcccgaccaggcacccccactggtaatgccgtcgaagatgaagctggatgttgaggaccaggagctggctgacggcgcggtggtagaggaggtggtgcaccctgtggtgcgcggcttcgtcaaggactgggacgccatggaggacctactcaactacgtcctgtacagggacattgggtgggagattggggacgagggccagattctcttcaccgaacccctcttcacgccaaagactcttcgggagcaattggtgcagcttatgtttgaaaagttcaatgtttcaggcttttatgcctctgaacaggctgtattgtcactctatgctgttggacgcatttcaggatgtaccgttgacattggtcacgggaaaatagatattgctccagtttgtgaaggagctgttcaacacatagcttctaagagattagagattgggggagttgacttgacaaacctgtttgcacaagaactgaaaaaatccaacccatcagtaaaccttgatgttgctgatgttgagctgctgaaagagcagtatgcgtgttgcacagaagattatttgacttttgaaggtatagaaagctcttgccaaccagaaaagcacactcttcctgatgggcaggttataacaattgaaaaagaggggtacattgttggtgaagctttatttcaaccacgtatattgggcttggaagattatggtatcgttcaccagctagttactagtgtctcaaatgtttcatcagagtaccatcgtcagctgcttgaaaataccatgttatgtggtggcacctcatcaatgactggctttgaggacaggttccagagagaagcaaatctgtctgcttcagcaatctgtccatcacttgtgaagcctcctgaatacatgcccgagaacctagcaaggtactcggcctggttgggtggtgcgatattggctaaggtcgttttccctcaaaaccagcatgtgaccaagggcgagtatgatgagacggggccgtccattgtgcacaagaagtgcttttagagacaaatgccttgaactagcacggttggtgcaccatttgctgctgttcatgtcgcaggtgtgctcgtacctgaacgttgcggccttgcgggtgctgatgcagcgatgcttgtgtctacaccttactccagccacagttcatacctgacggttgctaagtgttgatgcatctagctagctcggttaggatggattggcccttaggtttatttagagtggaatggagtgtagcctcggcatgtattccttaggagttttagccaattgctcatttgtacctgtagtaccagagaatttcctgagttgagatttccttttaaatttacattatgatccattacctgttcagctgctactagtgaaagagttcttcgaagcatgctcacaaaaaaaaaaaaaaaaaaaccccccccccccctcggcatgtattccttaggagttttagccaattgctcatttgtacctgtagtaccagagaatttccttttaaatttacattatgatcc

SEQ ID NO: 22927 - DNA, 878 bp, Zea mays
  unsure (1)..(878): unsure at all n locations
  Clone ID: MRT4577_120912C.1
ggagagtcagagactgctgcgtcgagctgtccacgacgattgccattaattcgcctctcttgctgcctgcgcgcggcggtcacgacccgagacactctcccggtctcccctcccagatcgacaccatctctacggtcggcaagaggcatgaactggaagcgcaacaaggtcgccggcggcggcaggtgcaggaaagaagagacgcgggagcggctgattcagcaggcggcggcggcggatccggatggcgggggcagcgtgccgcggggctgcgtggcggtgctggtcggcggccgggaggacggcgcggagccggaggagcgggtggtggtggacgtgcgcgcgctggggcagccctgcgtgcgcgcgctgctggacatggcggcgcgggagttcgggtacggccagaagggcgtgctgcggatcccctgcgccgccgccgagctccgccgcgccgtcgccgccgacaggcaccgggggtcgcgccgggcgtgcgccggccacgcgctcgctgcattgggcccgcgccgacctgcgccgacagacaccgactgacaacggtggacggcgtgccagcaatgatcgattccacgctccttaatctacgcgtacggtacggatcgacctgccatgcacatgcatatatagagacggacgtagctagccacggtactacactacttacaagttagaacatccagacgcaacggcatctccatgtgtgcgtgctcgaattcgttaggaagcatagagtagctaggttctgagcttgcaggtgttgcagtctttttttttccttagagtttgcaagtgtacagattaactgggggacatttagacccagtttggttttctatcactagtacgtcgtntggtca

SEQ ID NO: 22928 - DNA, 634 bp, Zea mays
  Clone ID: MRT4577_120913C.1
taggggcctttttttttttttttttttcttttttttttttttttttttttttttttttttttttttttttttttttttttttttttttttttttttttgggggggccaaatatataaaacttttaccttttggcccccgggtctggttggtccgcttaacacccccaaaaaccacccctacttgggtcggcctcctattttggaccccaaaaccccacaggggcaaaaaaaaaacccttaaaaggcccttggcccctggggggggagaaaaaaaaattttatcccttgggggtggggaaaaagcgaagggtaaactggggggggcaccaaaccggcgggtttcccggcccccgatttacggggtttgtccccaaaaaagggcccccccaggaaattccctttacaacccaccggtactgggggaacatggtgggggaaaaaaaggggggggcggtaatggtgtaacccaccctggggggggggggggaataagcccggggattttaacccccgggggaaccgggggaacccttggggggggtaccggggggggccaccgcgtacaccgcgggggaagagggcccacccggggagggccggggaacgaaataacccgggggcgcccggaataaaa

SEQ ID NO: 22929 - DNA, 1039 bp, Zea mays
  Clone ID: MRT4577_120914C.1
gacgtgagccgcgactgggtgaacacagatattgctccagtttgtgaagcagctgttcaacacagcttctaagagattagagattggggtagttgacttgacaaacctcttttcacacgaactgaaaaactaatccatcagtaaaccttgatgtttctgatgttgagaggctgaaagagcagtatgcatgttgcacagaagatcagttggcttttgaaggctatagaaagctcttgccaaccagaaaggcacttcctgatgggcaggtcataacaattgagaaagagaggtacattgttggtgaagctttatttcaaccacatatattgggcttggaagattatggtatcgttcaccagctagttactagcgcctcaaatgtttcatcagagtaccatcgtcagctgcttgaaaataccatgttatgtggtggcaccacatcaatgactggctttgaggacaggttccagagagaagcaaatctgtctgcttcagcaatctttccatcacttgtgaagcccccctgaatacatgtccgagaacctagcaaggtactcggcctggttgggtggtgcgatattggccaaggtcgttttccctgaaaaccagcatatcaccaagggcgagtatgatgagacggggcgtctattgtgcaccagaagtgcttttagagacaaactgccttgaactagcacggttgtgcaccatttgctgctgttcatgtcacagctgtgctcgtacctgaatgttgcaggtgccgatgcttgagtccactgtacgccagccacagttcataccgctagccacagttcatacctgactgttgcgaagtgttggtgcatctaggtcggttgggtttatttagagtgcaatagagggtaacattgacgtgtattcgttaggagttttagccaattgcccatttgcacctgtagtattagagaattagctgagatttccttttcaacttacattatgatccattatctcttcagctactgctagtgaaagagttgtttgggtcatgcccacaaacttt

SEQ ID NO: 22930 - DNA, 743 bp, Zea mays
  Clone ID: MRT4577_120915C.1
cggaattcccgggtcgacccacgcctaaggttgagagcatcaagagagacaaagcagcaactgagaagttgcttcaagaaacaatagaaagaaatcagactgaacttgcagctcaaaaggagttctacaccaatgctcttaatgcggctaaagaggctgaggcattggctgaagcaagagtcaacagcgaagccaaaattgaactggagaatcttttaggagaagctggtgaaaaagaaaatatgctgattaagacaatcgaggagttgaggcattttctcacccggcaagaacaggaggctgctttcagggaagaaagactaaaaggggactatgatgatcttcaaaagcggtatcaagccagtgaacttcgttataatgaactggtaacgcaagttcctgagtctaccagaccgctcctaagacaaattgaagccatgcaggagacaactgctcgaagggaagatgcttgggctggtgtggagagaaccttaaactctcgccttcaggaagcagaagctaaagctgcttcttcagaagaaaaggagcggtctgtaaatgagagactgtcacaaagtttatcccggataactgtccttgagacccagattacaattcttagaacagagcagacacagctgagccgatctcttgaaaaggagaggcagagagcatctgaaagtagacaggagtacctagcaatcaaagaggaggcagcaatacaagaagggcgagctaaacag

SEQ ID NO: 22931 - DNA, 266 bp, Zea mays
  Clone ID: MRT4577_120916C.1
gcatggagggatatcaaatggtgaaattatttacttgaaagtggcttttaagccaacagctactatcggagtaagccatcccagctcaaaacttgctttctttgcttgcttaaaatgtcagcagaggcataattaccatatactgccttttgagtgataatacagagaaatgctgtgaatacagttggaaccactaatttgtcagaaacacatactttgtgcaactaccatgaatgttagaatatttactgtggatcaacatctgc

SEQ ID NO: 22932 - DNA, 326 bp, Zea mays
  Clone ID: MRT4577_120917C.1
cgtcgtagcgtccctcttccacctcttctctccctgcttccttgtctaaatcgatttgtcagccattgctttcgtccttactgcagtgtccgttttggttgtttggtgaaatctgtcgctatcttcgtcgactccagttcgtcgtccatttcttaaagttcaaaaaggcctgctttgtccccatttttcttccccgtcccaaggtacgtgattgcagcagatacgacttcctctgcttcggatctccttcaatcgtcatcttccacttcgcgttttcctcttcgtactcatatggctttgtctgcagcaatgctttacgggtcgcg

SEQ ID NO: 22933 - DNA, 624 bp, Zea mays
  Clone ID: MRT4577_120918C.1
gctgcgctctgtgactcgtcattggggtcactcaaattctactgccccttcaaggaatgctctgctctgttggttgatgatcctgggcacggtgaggaggtgataacaaacgtggagtgcccacactgctgccggatgttctgtgcccagtgcaaggttccatggcacgccggtgtcacttgcgcggagttccaacgactggggaaggatgagcggggcagggaggacctactgctgaggaaggtcgcgcaagagagcaagtggcagaggtgccccaagtgcaagatatatgtggagaggatcgagggctgtgtattcatcatctgcaggtgcgggcactgcttctgctacctttgtgcatccccaatgtctagggacaaccattgttgcaaaacctgcaaccgaacctggtgaatgacttgaaaccgccaagctctacctgaaggaaagaaactctcaataactagtatttatgtatttatgtgtgaactgctaagttctacccgtagaaaagaaatccttaactagtagtatgtgtttagatgataagttgctgttatgactgtttcagttggcactggcttgttgcactagtagcaaattggtattccacgttgatgttcg

SEQ ID NO: 22934 - DNA, 692 bp, Zea mays
  unsure (1)..(692): unsure at all n locations
  Clone ID: MRT4577_120919C.1
tcgaggccggccgggaaaacacttttccttccagcattccagcacatcagtcacgccaatcgtcgacttcatctccaccattactcatccctcaccacctctcaacctcacacaccaccagccaaaatgggtttcgaagccggcgatgctaagaagggtgccaacctcttcaagacccgctgcgcccagtgccacgccctgaaggagggtgagggcaataagatcggccccaacctacacggtcttttcggccgcaagtctggccaggtcgagggcttctcatacaccgatgccaacaagcaaaagggtgttgtctgggaggacaacagcttgttcgagtacctcgagaaccccaagaagtacattcccggtaccaagatggccttcggtggcctcaagaagcccaaggaccgcaacgacttgatcaccttcctccaggaggagaccaaataagcgcctcgccaccacgacgctttccccttcatcaccccgacacgacatgaccattctcgaaactccgtttcccaccttcttccgattgtaccaataccgatagacgcacgaatgaggcgacggcgcgcatttgcagggcgccattgtcttatgtagattatgnttggtgtataatgcagtgtgcattttcgacttctgntgcagcatagaccggnnttggacttagncgcacgatcgaa

SEQ ID NO: 22935 - DNA, 888 bp, Zea mays
  Clone ID: MRT4577_12091C.1
cactgacctcatcaagaaagtcagcaccaactgtcttgtcatgcaaaatcacagatatggtatatcaccaaggcgatatcgagagaacgatgcactatcaagtttcttcaaaatcttgactacatcacctgatgaaaacggcaaggtctatgtctcaactgtacaagccaataattatccaatcacttgcacgcaatggcatcctgaggtaatttagttgtagctgtttcaggagttccacatttagtgttcttattggttcttccttttctcttgtgcactgtatttattcctaggttatattcacaacatatcaaattgtggccactcaccaaatacaagtggctttatgccacaataaaactgtcctcatttgatgcagaaagccatttttgagtggaggaaaccaatgatcccacacagcgaagatgcagtacaggttactcaacattttgccaatcattttatcagccaagcacgcaagtctccaaacaggcctcctgccgacaaagtgctggataacttaatttacaactacagtccgacatttaccgggaaaaaatcgaaatcgtttgaggaggtctacatcttctcctgagactggattgaacgcctgagtgtcttcaggaatctgtagttctgcactacattgctattgtagtgtaaccgtgcattagtattacccgtggtaccagaagttgtatttgtatagattcgttggactgcctgtattgcagtaacctttccaccgtatgggtggctctatagaatgcctataagcagcgcaataataatgataatgtaagactgaaaaaaaatacttgtatggagattttctgaatttaaaagtttctccaaagcaaaaaaaaaaaaaaaaaacccgcggcc

SEQ ID NO: 22936 - DNA, 391 bp, Zea mays
  Clone ID: MRT4577_120920C.1
tggtgatcgggcacgagtgcgcgatcgtgagcgaggaggtgggccccagcttgacgcacctgtccgccaactacctcttggtgcttgagccgggcgttatctgttgacgctgtggtcactggaaggtttttccttactacctacacgatgacattaatttctttttcaccccatccgttccatgatttatggctaaacaattggtaaacccagcccttctatcctttaagcttcaacaaggcaattgcataaggacatacctttatcggccttgttgagtgaacaatcgccagccctatctttggtgcaggtattggtacaaaccatcatggcacaactggtggaagaactcgtgcttcctgtgattaaccaagtagctttgggaaaactt

SEQ ID NO: 22937 - DNA, 263 bp, Zea mays
  Clone ID: MRT4577_120921C.1
tggacctcgcccccgcgcctcccctctcatcagttcttgcacacacgagttgcagttccagcagacaaatcctcccactggtacttccaccacaccacagtccacaggcagagaagagcgaagatgcttcttcccaggcacagattcttcaagttcaggtccttgtagatgagctgcagctgcaggatctcagaatcagctaactattttccacgcatagtcgcctttaattccaggtgacagcaagggcaggtcgactgcgc

SEQ ID NO: 22938 - DNA, 274 bp, Zea mays
  Clone ID: MRT4577_120922C.1
attcggctcgaggttctacacgcatttttcgatagggaaggacgccaagcccacatggaagcttgtggaccccgtgaacgggactgcacacttacccacgtacaaggacagagtacgggactggatgctcgtaggctagcttgccctgaaggatgtcgtggacaactagcagctcctttgtacagggaaggggctcagacgacacaacttggtactgagagccacccaatgaggagcactcaggctggcattaccactcacgaacccactgttg

SEQ ID NO: 22939 - DNA, 483 bp, Zea mays
  Clone ID: MRT4577_120923C.1
gccggccgggctggaatacactcgccacacctaaattctcatcaatatagcacgatcatgcaccaatgcaattatggccttgaaaactcgtttcacacggcggcctcttcatcatcgcggtggctgccaagacaggctccttcaccgtgacctgcagctgcccgtacaaccgtgtggtcgggcggctggccgtgcggcgcgtagcaactggacaaccgcgagacgtgtagcatcgacgtagacgagggcacgacgtgcgggcgcgtgtgagaacacacgggatgctccttcgacggcagcggcaacggccagtgccagacgagcgactggcgcgtcgtgctgcactgcgcgcatgatcgcaggcgcccaacacgatgtgcgagatcgtactcaaaagatcgacgtgctcgacttcttcgacatctccctggtgcacggcttcaacgtgcccatggacttcctgcccgccggcgacgcctccgg

SEQ ID NO: 22940 - DNA, 263 bp, Zea mays
  Clone ID: MRT4577_120924C.1
tatatttttttttttttttctgaggaccttggggccaacatatttgcataatggggaaaatcgccacccaaaacaaagtctttgggggcatagaaaaaacccggtgtttgggaatcctgaagatccaggggaacaaacctggcaaagaaggactaattaccgggcaggaaggttattggttgcgcgcctagtaagataatcaccaagcgagtgccggcccccctgaaaggaccctggaaaccccttttgcaccaaacagaaga

SEQ ID NO: 22941 - DNA, 227 bp, Zea mays
  unsure (1)..(227): unsure at all n locations
  Clone ID: MRT4577_120925C.1
ctttncacaatattnncgctgccatttacctgcgttatgttgtggaattgtcgctggggggggggctggcctttatgcagatcaccaacatgaggcgnggagcgcaatctcttcatcatnggagaataagtcttgctgggcaaagataaagaaaagtaataatataggtaaaccacacgcgcccaacagaccctatcaaacacaacccccattaccggggggggggg

SEQ ID NO: 22942 - DNA, 628 bp, Zea mays
  Clone ID: MRT4577_120926C.1
cattgggtacctcgaggccggccggggctatatccagcgccaaccccggaaaggcggaaacccatcgcaactaatgatcaacctcatagcttcaatcgcacgcatcccctcctcatgcagtcggtggggctatggtttgctccttcgtgggcgggatggttgtgttttccagtccataccccggacagcaggcccctcgccgttgtgcccaagaccatctctgtctcatgctcctcgtactacacctgctcgctctatctacggtccgcctaatatcctccagatccaggcggagctccagacatctcacgcccacccagcaggatacacgacgtgtcgtggattaataattgagcgactaacttactatattagagagtggacaatgaagaggacatacatgtgaagttctatgattacatggcgaacaatacaaccttctgatctgctacccctggaagtatactctttgtatgacagagagatagtactgtcttaggagccagagatgaagatctcgaaacaatcaacactgaagacactatggagtatctgccgacagaagtgaactctgaacttgtatggaagcaaacagaaaggatactcgctgaatatgaccgtcttatag

SEQ ID NO: 22943 - DNA, 811 bp, Zea mays
  unsure (1)..(811): unsure at all n locations
  Clone ID: MRT4577_120927C.1
cctcgnagccggccgggccggggagcgcgcagtcgccgtccacaccgttgagctttttctcaggcttcgcatggcctgattcatcctacagtctccaggaagccaagcaaacgccgcatcgcgctttctccgcttccttctttcccctcacagggtcagaccccaacgccgggagaataggggattaggagccagacctggcggcgccgggcgtccaagaaacgctgcctaataaaatccctccggcgtctgtcgtcttgaccgcggcggcgcaggcttcttcttttcgctctccacgtaagtctgctaccttcccccccacggttccagcgcttgcccccctgcgggagcgtgtcttggatcctttggttgggaattgggattcgaaagcgtcgtcgggattctctgatcccattcttgaattctagcgcggaggcggattggattcgagctgcgagttttagcttactaatttttctgtgcggtgggtcgagtaatagaatctggagggcgtccttttgtgtgcgatgttgtcagttcatagctgttactcagctcgatgatgcaagcactgagctcaacatgttcgatgaaatttcttacccaagttacttatctaaggaaggattgctgcggtcagaattacatcttcaaggttgtagactggcaactgtgtttccaaacttgaaatctgacggcaggacagcaagaagcaagacacacttaggggctggnttgggtgacaaggaattggggntcatttttctccctcatcccgttcatatcacttaattccccggtcatcaaaccg

SEQ ID NO: 22944 - DNA, 167 bp, Zea mays
  Clone ID: MRT4577_120928C.1
cgcacacgcgtctgaactgatgtataacgttgcatctgatatacatacgcactttaccggggagcattcctctgactgggcgaaccctggcattgatgctcattctgtcgctcttttgagggccaactattacactttggcttggatattggctagggggattatag

SEQ ID NO: 22945 - DNA, 214 bp, Zea mays
  Clone ID: MRT4577_120929C.1
tgcagcacctctagtacaaaataggttgccgggccagccatgccaaacaaccatggcagcatgctgtgaactagaggtgctgcatccttgtgttcctgtgccccatccaatgtgtatatctcatatttgtccgtgtcacatgaatgctctgttatttgtagctcaacagatacgtttttctccccctttctgatgtatgaagtttgatcttgcc

SEQ ID NO: 22946 - DNA, 357 bp, Zea mays
  Clone ID: MRT4577_12092C.1
ccgggtccacgctgaccctcttcacgggggcggcgaaagatctcagccgcgacgggttcgagcgccggcgagcgctcgcccacctgggcctataaactggccccggctcctcttctcgcgtcgcagagcccagcctcgggatgacgtggcgtatcgcgacaccgccacagctcactcaaccgcgcgggtctccaacgaaccccttgtagaagcttccaaaccctagcgcaggaggaagaggagcgtggaggagctccaggaatggcgaaggcgaggacacagaagggtgacggtagcggtacgggcggaggcgccaccgttctccaccagaaactctgcctcttcatcgacatggag

SEQ ID NO: 22947 - DNA, 623 bp, Zea mays
  Clone ID: MRT4577_120930C.1
catcagaaatttgtaattgattggcggatcagtattcatcatccctgctagaacaatcatgaaaaatgatcagcaacctaattaactgaagctacgttcgctccatcatctctgtgccaagctagaacaatcatgaatcagtaaccaacgtgccttgcacagagggagtaatgcgaataagcaattctctattacacgttgaccgatgcgaagcaaccaatttgagttgatggatcgcagtcccagccccgctggctgccggtgccgggacgctctcagtcttcgttcagatcgacgatggtcgcccgcattttcatgcatcggaacgcctttcaaacaatgctgcactgtacaagatgatatggtattcttgatcatctcagcagcgcgtactcggcccgcggcttggtgccgcggccgtcgtcgtcgtggagctcgaggccgtagagcacgccggcgcacatctccaggctgccttccttggggaagtagagcctggccatctcccggaaggtgtcccacgtgagcacgctgtcggacgccgcctggtggctccggcccgcggcgcggcgcacccggagcgcggcggcgacgcgctcgagcccgccgagcagcgcgggggc

SEQ ID NO: 22948 - DNA, 353 bp, Zea mays
  Clone ID: MRT4577_120931C.1
catacctatagagaggaatacgatagcgggctttctccgatggcctacctgttcttgcaacagacaggaatgttcaaggaattggctcgggctgcccacgaccaggacgaacacatggatagctagcaggacttgctcatgaaggaaaccaagaggcaggaaaaggataaaaaagcggaggctcaggagacagaaaaatgtgaaaaaaagactagagagcttatcatgagccatgatactatctacaacctgagagatgagaatgctaaactaaccgctcaggtagacaagacgagcgtgtgtgatgatgccatcgaacatctcaaaaaagacaaagctaggtcgagctctaa

SEQ ID NO: 22949 - DNA, 405 bp, Zea mays
  Clone ID: MRT4577_120932C.1
tttatttttttttttttttttttttttttttggttttttttttatttttttggggtgttttttttttgggcccgggaaacgctttatacttacaattggccgaaaaaggtgtggcacaaaaaccttgatagttttttagaaggattgacctataggggcggcaatccaagagcacagccggggttccaactactttgcataagggaaaacggtcctttaagcgggagacagaagcgaacgggttcccgatgctttaccaataaaagattgctatgccgaaagctggacggctccaccaatgagacttttcatatgaattatccactccttgggaggtcaccatcctgtggcacagcgaagaggatcaatgcgtgtaaaaagctctaggaaccaccttgagtcgcc

SEQ ID NO: 22950 - DNA, 1779 bp, Zea mays
  Clone ID: MRT4577_120933C.1
ggccctaggggccttttttttttttttttttcatagcaagatgtttttttttcattaataacatttacaggaaggattgcggactgacaacaggcgatgtggaacacttacaggcgaactacaacatttaacgttggagaaagtaatacaataccagggattgaattccttcaatagcttaacaatacaccaacccacttcccctcacactgcttaagtaaaatcagattttgcattaaaacaggcgacaaaaggctggctgcacgaacataccgcctctccttatgcaacacattggcgccagctcgtgtttggctttccaataatggtcagattctacaccttgaattgcctatggcacaacgaagaatcagaaagagcaaggtttaaacaccatagagccttcgcctatggtccagcggtgggcaataaagtgagcccaagatgccgcctagcatggtctgggatcagcctgttgatgagctccggggaggcatttgctagttcctgtttaaagttgaacagtggaggaaatggccgtccatttggcaaccgcgcatgtggctctcgcaactcatcaaagaatggatgtgcacacgcttcaagagcagtgcatcttagatttggtgagtactggagcaaacgtgaagcgagatctatagcttctggaggcatccgcttgtggaaaatcttgtgccatgggtgagctttgatctgaggaaatctaaactcggtgtagtttggattcatacaacggatttcctcacgtgttggagtaccaagaacctttattatctcaacaagttgatccacagcactttcgccagggaagagaggctggccaagaagcagctcagcaagaacacatccagctgaccaaatatcaattgatgttgtgtactcggttgccccaaatatgagctctggagcacggtaataacgtgagcatatatatgaaatgtttgcttcacctttgaccaacattttggcactcccaaaatcacatatcttcacttggtgagtcaatggatcaaccaaaagattctgtggtttcacatccctgtggcaaacaccaggtactgtgtgaatataggctaaacctcgaaatatctggtaggtatataatttaacataaataagcggcatcctctggttcatattgctgtagtgcttcagcacacgatgtagtgactcaggaacaaactccatcactaagttaagaaaaagttcatctctgcttgtggtggagaagaaacaatgcttcaaggaaacagcattgcagtgatccatggatcgcatgatttgcagctccctgttcttgtagcgcttgtcctgcaaaaccttcttgatagcaacagtctcaccagtctccagacattttgcctggaagacgattccgaatgatccagttcccacaactctctctgccatgtagctgatagtctttttaggctctccattcttccctccaatggttgttgagattatatgacccgtgactggatcattcccttcaatcatagaaccagcatgcttggcgtccgcggggccgtgtgcggccgcagcggggagcggctggtccacctgcatctggtccccggcgccggcggcgtgggccccacccggcatggctgccatgtggtgggtggggctgctggcggagacgacgcggaaatgaacctcctcttctcgtagtgtcctgttctctcttggcgcctcggtctctcctcggtgaggagggaggttggtgaggcggctgggccctcgtgccgaattaca

SEQ ID NO: 22951 - DNA, 259 bp, Zea mays
  Clone ID: MRT4577_120934C.1
gggcattatgtgtatggggtacgggaaaccaaaacctaatcctcctccctttacaatggggtcaccacaggggtgttcaaggggtacccaaaacaccagcaaaattttaaactggttcctctttaattggccatgtaccgacccgcatgggaaaaccattctgggcccctttaaataggtcaaccattctcaccaaataaagattctcaggtgtcattaggatatggggactccggctggggcttgttatctcgggatc

SEQ ID NO: 22952 - DNA, 887 bp, Zea mays
  Clone ID: MRT4577_120935C.1
gcttccaacaaggtagggattagttatgtggttggaaaagcacgaaataatttcccattaataacatttacagaattacactgactgacaacaggggatatatggaacacttacaggcgcactacaacgtttaaacgttggagaaagtaacacaatagcagggatcgaattccttcaatagcttaacaatacaccgaccacccccttccctcctctcactacttgggcaaaaatcagatttttgcattaagacatgcgacaaattaaggatggctgcacgagaacataccacctctccttacgcgccagctcatgtttgaccttccaataattgtcagattctacaccttgaatgtgggaacatgcaggttgccttccgcaccaccatagagccttcgcctatggtccagtagcgggcaataatgtgagcccaagatgccgcctagcatggtctgggatcaacctgttgatgagctctggggaggcatttgctagttcctgtttaaagttgaacagtggaggaaatggccgtccatttggcaacctcgcatgtggttctcgcaaatcgtcaaagaatggatgtgcacacgcttcaagagcagtgcatcttagatttggtgaatactggagcaagcgtgaagcgagatctatagcttctggaggcatccgcttgtggaaaatcttgtgccatgggtgagctttgatctgaggaaatctaaactcggtgtagtttggattcatacatcggatttcctcgcgcgttggagtaccaagaacctttattatctcaacaagctgatccacagcactttcaccagggaagagaggctggccaagaagcagctcagcaagaacacatccagctgaccaaatatcaattctggtgc

SEQ ID NO: 22953 - DNA, 2103 bp, Zea mays
  Clone ID: MRT4577_120936C.1
ggatcgaatgtcacatctttatatataacaggagttctatacaaaataaataattacattataaggagacaacggtccagcaacccaaagttgactgggagacgacgacctagacctctcacgaacacatcgcagcatcctccacgcgcttcatcctgcagtacctgttcttgaccttcgtttacaggtgattcaggctcggatccacaaatgtcgaagtagaaactattcccggcctgagtgtccaaaggtggttgcacttgctcttcagttacttctacctcttcttctcgttctgggactcgagattccaggtaccaacttgctcttcagatgacacgtgtcctcactgctttgacctttacccattttctagagcagaagcagagttcgtagaaccgtgtttttatttgggtggcgaagttgaaagtggagtgaatagtctcgaacagacccatgcgaatccatatagcttcacctgctcactttgaaaccacctctccttacgcgccagctcatgtttgaccttccaataattgtcagattctacaccttgaatgcaggttgccttccgcacaacgaagcaccaccatagagccttcgcctatggtccagtagcgggcaataatgtgagcccaagatgccgcctagcatggtctgggatcaacctgttgatgagctctggggaggcatttgctagttcctgtttaaagttgaacagtggaggaaatggccgtccatttggcaacctcgcatgtggttctcgcaaatcgtcaaagaatggatgtgcacacgcttcaagagcagtgcatcttagatttggtgaatactggagcaagcgtgaagcgagatctatagcttctggaggcatccgcttgtggaaaatcttgtgccatgggtgagctttgatctgaggaaatctaaactcggtgtagtttggattcatacatcggatttcctcgcgcgttggagtaccaagaacctgtcagcaaagcaaatccatctttattatctcaacaagctgatccacagcactttcaccagggaagagaggctggccaagaagcagctcagcaagaacacatccagctgaccaaatatcaattgatgttgtgtactcagttgccccaaatatgagctctggagcacggtaataacgtgaacatatatatgatatgtttgcttcacctttgaccaacattttggcactcccaaaatcacatatcttcacttggtgagtcagtggatcaaccaaaagattttgtggtttcacatccctgtggcaaactccaggtactgtgtgaatataggctaagcctcgaaatatctggtaggtatataatttaacataaatgagtggcatcctctggttcatattgctgtaatgtttcagcacccgatataatgactcgggaacaaactccatcactaagttaagaaaaagttcatctctgcttgtggtagagaagaagcaatgcttcaaggaaacaacattgcagtgatccatggatcgcatgatttgcagctccctgttcttgtagcgcttgtcctgcaaaaccttcttaatcgcaacagtctcaccagtctccagacattttgcctggaagacgattccaaatgatccagttcccacaactctctctgccatgtagctgatagtctttttaggctctccattcttccctccaatggttgtcgagattatatgacctgtgaccggatcactcccttcaatcatagaaccagcatgcttggcgtcggcgggggcgtgtgctgtgcctgcggcggcaggggggagcggctggtccacctgcatcgggtccgcggcgccggcggcgtgggccccacccggcatggctgccatgtggtgggtggtgggtggtggggctgccggctgcgggcggagacgacgcggaaatgaacgtcctctctcccgtgtcctcttggtctttctctctctgtatcggtctctctctcctcggtgaggttgggccgttggggaggcggctgggctagagagagagggaggcagcgccaccgccccgagcctctttttctcgccaaaagtactataaaaatcccggccggcctcgaggtacccaa

SEQ ID NO: 22954 - DNA, 298 bp, Zea mays
  Clone ID: MRT4577_120937C.1
accacgcgtgcgctcacccgttcaactaaaacatatattaactaaccttttcgaaaacctgattgaggaggacgcggtaaacatgaacatttatgagactattcaacaacaaataaaaaaaaacctacggaggctacgctatggtttatatcagaccactcagtagctgatccacactatctatgatatcaactaaacctaaacaacatgcagataatgaccactctaccatgtccttttctaaaacaaatgatacacacacaccaggacatgcatagtagtcacccctaaacctcct

SEQ ID NO: 22955 - DNA, 407 bp, Zea mays
  unsure (1)..(407): unsure at all n locations
  Clone ID: MRT4577_120938C.1
cgatttcagatcgcaccacttaaagggggagatctctccataaatagtgagcgaacncaaaacagcannaatgaaantggcggtcgtcgacatcggccgaggtggtcatgaaggcaatcgcgatggctgctctagaaaggagaagacatctaccacaagtggcttccttagatgacccaacagagagggccaaagcagataagcgtgctgctaggttaactgggaactaagaatgcttttcataaccatttcgacatgaaatttggcaagtataaaaagtttcaaattgaagataggctgaaactgggcggtgcaagcatacttaagttaatgatccacttctacttgtacatcattcttatcttcatattcaggcacagactatcaaggataatatgataaataag

SEQ ID NO: 22956 - DNA, 219 bp, Zea mays
  Clone ID: MRT4577_120939C.1
tccggtggaggcttcgtgtcctatctcatcttgctccgcctcgctgtacggggttgctttgtcacatggtagattttttgtgcgataccatgctttgtgttttacccttctacgtcccttttatctggctgttctcgttctcgtctcgcttttacctgctcttgcttgtattcaggtttctgtgttgtcctgtgaacagggggagttgggttttggtcc

SEQ ID NO: 22957 - DNA, 716 bp, Zea mays
  Clone ID: MRT4577_12093C.1
gacgaagaagtagaggagaaagcaacgcgtggatcagcttgtactgcatagcatgatactaaatgccataccactaatatatagcgttaatgtataagaacgaaaaggtatcccaagtacttgctgaagaagaagactataccatctacttcagtgtatgactatagaaacattgagaaatagatacagggcgattgaagaacaccttttttagattatatacttcatggatatctaccactgtaactctaatgaaaagtttaggatgtcgaaagaggctattaaatatatacatgcataatagacaccctttatcggcgttagtgagatggtattatacttcgctgcacttgctggcagctgaagcgatacgaagccttaacatgaaatgcattctgaaatatgtggcgcacaccaatcagggcccaaggtgcactaccaattaagacatttgggttattataggactacaatgttcgacgatgccatgaaatttgcaaaaagatgccatgaatgccatatacatgggaacttcatacatcagacccacaaaccattacacccaaccaatatgtcttgaccctttgaaacgtggagaatagatgtagtcgggccaatacacccgccatcttctaaaggacataaattcatccttgctgcaaccgactacttctctaagtgggcagaaagctgtgcactaaaagaagtcaaagctg

SEQ ID NO: 22958 - DNA, 256 bp, Zea mays
  Clone ID: MRT4577_120940C.1
ggggaagaaccagtcccttggtaaatttcagaaatgggccatgaccggtctttgcactgaagccaaaacatttagaacgtttctcctcccggattagggggcccccaaacgaatgccccccttttctttttggaacacttcaacgcccagcgcggcgacgggggcttaaacccttttcccccttatgccccgggcgagctggatttccttgggcatgaaaaggacccccttggcgacgattgggcaaaggttgggt

SEQ ID NO: 22959 - DNA, 289 bp, Zea mays
  Clone ID: MRT4577_120941C.1
catgtatgcccagcggaaacaacgctgcctttcttctcataacagcataaataaaactttgtggcttcgagttctcgggaaaatttagtgacaaactacaggctcgttcaagcaattctcaatctcaacgagatgaatacggggttcaaaaggtacatgtggctattccctacattatcctatctattcattggcacacacggcagaagacacctctgtaaatggatatgagtttgaccgatgggctccttgaccatattcattgctcaacacaaattaccttcatatt

SEQ ID NO: 22960 - DNA, 681 bp, Zea mays
  Clone ID: MRT4577_120942C.1
cggctctctctcgctgcgacgccgcctccgagatcgtaccttcgtacccacgagaaaccgataatctgccggcgacgatatgttggcttatcaggatctcctatttgtcgacctagctcctgctcggattcattctcctacaaggagctccagaacagatgcctgagggaggaccagggaaagtgggtcacccaaagtgctggtgatgtggacattggtggcaatccatccggctagggcggtgaggaccaaagcgtagatgacacaactgcgaaggtggatgatattgctgacacattccgcctactgagaacaacactccttttgaccagaaatcctttgtgactatatcgatctaaaaatacatcaagaatctcactgatgtggtgaatgcagagaaagcgcatgagatcaaaaacggcgatatagggagcaaccacgtttctccttaacgagatgaaggacctgctattctttggtgctgacgcacatgtaggatagatgcctctgtggtattcacctattacaaggatggcgccactaatacgacattcctctatttctctcatgggcttaaggagatctagtgctacgcgcgtcgcgaaattaatgacccatgatgtgtactatctatgcactagtattatatcctgaactataagagtcctggctgaattggac

SEQ ID NO: 22961 - DNA, 177 bp, Zea mays
  Clone ID: MRT4577_120943C.1
acctcgaggccggccggggggggcatgaggaggattagctggtatgcacctttgcttgaaagggaggttttatcggccaaactgcagatccagaggcactgaataatagaaactctacgagagaaaagcgggaaaaaaggcaggacggcaatcgcatggcttgtagtcactatatct

SEQ ID NO: 22962 - DNA, 485 bp, Zea mays
  Clone ID: MRT4577_120944C.1
cccccaagggtttgaaaaatcaaaactggaaattttttaacagtttcaggacaaactcgaaaaggggaaaaaaaaaaaaaaaaccgggcgaaacccaacttgggggaaaaaaaaaaaaccagcgcattaaacctgggtggggcccccccaaatttttccaatccctaaaccgggcagggggccccacatggtttggtgggggaattgccatttgccaaaacctttttaaccaactttttttttatttaatttctagggggcaaaacagccagtcactgattaaacacacatccaggggggggagcaaaaaaaaaaatccttgggggttttagcagagcccaacaaaaaagaaccccatggccagggaacttcccaatacatttttaaggggaggccttttttaggggcttgaccaccccccaagggaaggcggggtcgtcacggccaaaaggcgcctatgcgggggtcttgataaacctgttgcc

SEQ ID NO: 22963 - DNA, 374 bp, Zea mays
  Clone ID: MRT4577_120945C.1
aatagtcattgtaaaatggacgtgtttgttcattggggaataaaaaagaaatgggcttgtctagatgatggtgatagaattacggctaagaagaatgtaacttacgagaaaacggacattcatctgggttcctgcatacggtcttgtgttgtgtaacatagcagatgttcttggtaacccacctccattgtgaccttcgaaattatggcaatcatgttgaaagatgtatacactattcactgtatcgatacagcctgtattatatatgtcaattgtgcagaatgtttcttatccagatgctgcagaatccaatgtaccggcaacaaactacaggatatgctaaaaaacatgggtggatctcctgatcaatggga

SEQ ID NO: 22964 - DNA, 580 bp, Zea mays
  unsure (1)..(580): unsure at all n locations
  Clone ID: MRT4577_120946C.1
agcagtggtaacaacgcagagtacttttttttttttttttttttttttttttattttttttttttttttttttttttttttttttttttttttnntttttttttttttttttttanaanttataaagngnaagaatttaaatttttatgttttttaaangaaaaaaaaaaaattttaaattttttacattaaaaggaaggtttaaaatttaangggnaaagttggaagagaggatttaaaagaagtttagtttagtaggaaaggaattttgattaggagtgggattaagaggaaanaanggggaagtttaaagggggtggggggggggaaaaaagtattggggggggnngtaggggggggggttggaaaattaagnttggggttaaaagnggggaaggtgggnattgnngagggaagggagaattttaatggtttttttgtngagggggattttttnganttggaggggggatttttngggaangaagtnattggggggttggggtttttttttttgnantttgagggaaatgngggggattgggnngggttgattggggggattaaggggggaattgaa

SEQ ID NO: 22965 - DNA, 249 bp, Zea mays
  unsure (1)..(249): unsure at all n locations
  Clone ID: MRT4577_120947C.1
cccgggggcttagctgaatcgctgtaggctcagctccacacttcttncgtggggcggcggaggaccgcagccacnncaccacacccacnnctctaggcgtacctcacatgggccgtgctcgagggtgcgtcacgtcgacgggaccgcatgcgtgccgcgcctcggcggtgccggtacccagagggctgctcggcggcggcacgtcgccaccgccgccgcagccgatgagcgggagcgtcgtcagggcga

SEQ ID NO: 22966 - DNA, 447 bp, Zea mays
  Clone ID: MRT4577_120948C.1
ttcccgaattgacggacggacgcactcgttctgatacagcacgcctaaacatactcacatagtctgttacctatcccgaacgatcggagcttagtgaaccaaccatccgggagtgggatgccaaaaagacacaagctcaaaatgatccacctgatcaccagagaaattgcgaaactctctagcctatcactcatatccatcatcataggagccgctacatatatgatcttcactacacaaggaatcagatatcacaccatctttaccagtttagcgctcgaccagagctatgcagatcatcacctgatctcaaagtgaaaaaagccaggatactagcacatacgctggctcaggtgcatacagacacctgaccacaactttgcaacgacttgtacctgcctagtccccaagcatttgatggatgatcaagatattcaatgtgtccat

SEQ ID NO: 22967 - DNA, 369 bp, Zea mays
  Clone ID: MRT4577_120949C.1
aaagcccaaagcagcgggcagaattggaccacaacccattcatgggcggaaaaaacacccgaatggaaaaaagttaaggacaaatgccccaaaatggccttcaaaaaaaaaaggggccaaaaacccaaatggcaaacttttaaaaaggcacccagagacgggccccctggttgtcttgatgggaaaagaccggacgggggcaatatcaaagcccccaaggggtttttaaacgaaagcgggggagggagggggtctggtccccctcccagggggctcccctggggggcctgttttggggggggggggggccttggccacccaggccagggatctttttgcctgtggggggggggccacggacttcacggg

SEQ ID NO: 22968 - DNA, 373 bp, Zea mays
  Clone ID: MRT4577_12094C.1
attcaatctcgagcctgctgaaatccttaaaagcatgtacaacaggaggaattctctcatgtctgtttgcagacaccacatactactaccacaagaacttctatccccaccctatataaatgatgctgaatgaaagaacatgaaaacactcgccttacctaattcaacaaaaagcattaggctcaagtgctataaacagaaaaaggaaactaaacaaaccaggtgaacccaggccctcacacgaaccggacggctaaaccaagacctactattaaaccatctaaaaaaccccgtaacacccactttcactttgacacagacctcgatagaacaattatacggcttttaacaccactaaaattccaaacttttg

SEQ ID NO: 22969 - DNA, 2082 bp, Zea mays
  Clone ID: MRT4577_120950C.1
atgaacacgccgagtgaagtcggaggagtgttggctcggatagctgatggcatcccgcggactctagatgctgagggctatcggcgactgctcactcgggcagctaatcatcttctacccctcgctcggccttcgagcgatctgcggcacgccatcaacagtcggcgagacgcacggagttccatcaatgcttcgcgcgaacgacgacacgaaaacgagataaggcgccgggaggagtacgatcgggaccgtggcgtcctggctcgaagtcgcgccacccgagttgagtcggcagcagcctcaactagtgacccgacccggggacgatcgagacggcacatcagcaactcccctccccgggaccggcaccacgaacgtcgacaggagggcacatgtggagtatccacgcttacttcgcgtcttagggccatccagtggcccccaaacttcaaggtctccaacgtcgacaaatatgagcctaagcaggacccaggaggccgattgatcatctatacgaccgccgctcggaccgctggggcaactgaagacatgatgactgcgtactttcccatcgttctcgagcaggatgcattgcagtggctgcgacacctgccacaacactgcatcgatgactggagcgacttcattcggtgtttcatcgccaactttcagtccctctccgacaagtcggcgcagccatgggacctcaaatccatcaggcaccagggagatgaaacacttcggtcgtacctcaagaggtttcagaccatgagaaatcacatccccgaggtcactgaggcagcagcgattgaggacttctaccggggatctaatgactcagccttcatccgagccatactgcagaaatcaccgaccacctccgaacagatgtttcgagaagcggacctctacatcaccgctgatgaacgggctcaggacctcatcgggggagcaaaacttgcgccaccagcaccgcggcgcaacgcgaaccagcaacccgacaagcgttgggagaagaggccccgtgaagaggtccacgccgccggaccactcgtctctcgtgcccgaggtgcaccccgtggaggcgaacggacactggatgacatcctcaatgcccagtgcacgtatcacaaggacatgcgccataccctgcggaactgcaagacctcaagcattccgtcgggaatggccgaccgttccagcctctaccacctcgcccaccacgaggagggcctggcgagcccaggcagcctcaacaataggaagggggaaggggtggagcattctcgcgcgtcgacagaaagatcaatgtcatcttcggaggacacgggtcgcaggagaacagaaggcagcaaaagctcaacgaccagtgctccagctccctaccggtggtcggagtacccgatcaccttcagccgagcggatcaatggctcaacttcgaccattcgggcaagtacccgctcctcgtcgatccagtgatccgagagagcagggtaaagaaagtactagtggacaggggaagcaacatcaacgttaccttcccccggacgctcctgggcttgggggtcgcactcaaagacctcaccaagtcagacacccctttctttggcattctgtcgaccgaaggggagtacccgcttaggcatatctacatgcccgttacctttggaactccgcaaaactacagaaccaagtttctgaggttcaaggtggcgagtttcgactgcggatacagcgccatcatcggcagcctaggattggcgaaattcatggccatttcgcactactcgtacatgatattgaagatgtcaggaccacaaggaataatcatcgtgcgcacctacttccatggcgccgcagaatgctttcggggagctatccaggcagccctcactactagaccgccaccaacttcctccacgcaggcgaacacaaagcctgagggaggcctcgcagtaccagcgaatgaagctcaagccatgacctctatgcggccgactgaggagacaaagaggatcaacctggggttcgtcgatgaacgcaagaccgccatcatcagctccaggcttgacaacaaatag

SEQ ID NO: 22970 - DNA, 450 bp, Zea mays
  Clone ID: MRT4577_120951C.1
cggaaaagccgggggagaccacgcggccgagaagccgggaaaccaacagcgaacggaggaggcaggcgcgggacacgccccggcgaccgaggagccagcggagggcccgagagcccaggcggccgaacgcgcccaaggcgaacaaggcgcccaaggagaacaaggcgcccaaggagaagaagctctccgcggcgaacaagccggcggcacaccctccctacgctgagacgacggcagaggcgagcgctaccctcaaggagaggaaggggtcaagctcggtggccatcagcaagtacttctaggggaatcatagcggcaagctccccacaaacttccgtaagcaacttactacgcagctgaagaagctcgctgccaacaccaagctgacgagggtgaaaaactccttcaagctgacgggcaccgacgccaagcccaaggccgccaagccta

SEQ ID NO: 22971 - DNA, 251 bp, Zea mays
  Clone ID: MRT4577_120952C.1
atgagggggggttgagaccaaagtatcgacataattgggggcatacatggggttccaagagagcgccgaccctgaatagattgcgagggcccaagggtattttgtatcgacgggggcagggctgcctttcctcaggccgtttgtcataacactgagtgacttgtggcagacaaaacctcaggattaggctaaagccaaggggaattggtatggtggctagcgggcccgttcacttttcaaatttaggccgc

SEQ ID NO: 22972 - DNA, 1011 bp, Zea mays
  unsure (1)..(1011): unsure at all n locations
  Clone ID: MRT4577_120953C.1
ggccggccgggaaaacaaatttaaaaaaacggccggcatcactttcacggctcccggcctctctgcgctgcggcgatgcggtggctacccaggctgctctctcactccatcgaggtcgggagggcctccgcggcggggaggtccaaccctagtctcgtcaaggcaggatcccatgggttcgccagcggcggctgggatgggtcactagcggtgccccgggagtggctgcggaagctgtgggtagacgtgctgaagaagcagaaggaggacgcgaggaggtggggcatcggcgcgtcacccgggaacgccggcagcggtgcggagccttcgctatgcgcgttcgcgaattctgtggaggctaaactggctccgcttcttgcaagagctaacctcatcattgccagggatattgagtgggcgaacatcatgcttgcttttgagcaggagagcaggtatatcataatggacccactctttccacaatctccagtaggttttatccgagagaaaagcagcatcatctttaggcagctactcagaacaagacggccatttgttgcagaaataacggatgctatgggtaacgagatatttaaggttcgtaggccattttggtggatcaacagctcaatttatgcagaagtggatggtaaggagataggcgtagtccacaggcgttggcacctttggcggagaatctatgacctgtacttagggaataggcaatttgcagttgttgagaatccaggattctggaactggacctttagcctagtggatgaagatgacaaactgttggctcagattgatcgtaattggaggggcatcggctttgaggtaatatccttttcatcatataatgatcaaagcatacccttttgttatacccgatggacatccatgtccatccatgaccttatgaaccaattgcatgtttgacagcaaacaatgtttccattgacatacagattaatgatttacacttagatcattangaactatctatctaaa

SEQ ID NO: 22973 - DNA, 236 bp, Zea mays
  Clone ID: MRT4577_120954C.1
gtggtggccctcgtggtgctcccggtgactttggtggcgataagagtggagctcctgctgagttccagccatctttcaggagttctggcgcaaggcctggctttggccgtggtggtggcagcggcttggcgctggccgacctttccatggatgaaagtgaagtgccctagttggaaacgagttcctccgtgagcgttcatttgaggaggtatagtatagtatgtttcggtcgctat

SEQ ID NO: 22974 - DNA, 384 bp, Zea mays
  unsure (1)..(384): unsure at all n locations
  Clone ID: MRT4577_120956C.1
ataaggagcccttggcttttcccactaaaaccgaactttgtttttttttaaacccatgaaaagaaaggggggggggggggtttttttttttntnnngaaccancccccaaaacggggggaaaacaggtcgccngccaggccgcccgccccccccccatggaaaccactaaatttccgccatctttcgcccatcgggggccgggcccgggccccccttgggggccgggggaattgggggccggcttctgggccttgtccctcttggcgatgcccgggttggcctggaattttggggggtttacccctgccggctttctaaaaaaatattagagggggggggggnngggggcccccgggccccccccgtgggggccgtccctgggg

SEQ ID NO: 22975 - DNA, 122 bp, Zea mays
  Clone ID: MRT4577_120957C.1
ctgacgctggaggtatgaacatcaaggatctgttggattcaaccagctgtgatgtattgtactaaagcgattatgtgcaacaacacctagcatctagtatggtgcctgactgctacgatcaa

SEQ ID NO: 22976 - DNA, 1842 bp, Zea mays
  Clone ID: MRT4577_120958C.1
ctcggggccggccgggccgggagtctccagcagtccaggtcgatcgcgatcggaggccagaaatccatggccgctcccgccgccgcgccgctcgacgagggcaaggcgaagaaagtccttcgccaggtcgagttctacttcagcgacagcaacctcccccgcgataagttcctgcgggagacggtcgagcagagcgatgacggattggtgagcttgcccttgatatgctccttctcgcggatgaagtcccacctggggctggacgcagatgtcaagcccgagactgtgccggaggagaccgtgcttgcggttgctgaggtgctccggccttctcctgccctccgcgtatcggaggatggaaagaagattggtagagctagtgaactcttgaagccagatgagatcatagaacaagtagactctaggactattgctgtatctccgctgccttgcaatgtaaagcaggaagacgtccaatcttttttcacaaattatgcaaaggtaaacagcgtgagacttccacgcaatattgccaacaaaaaacacttctgtgggactgctttggttgagttttctgaagaagaggaagcaaaaagaattatggagactgctttagtatttgcaggggcaaatctggaaataaggccaaagaaggagtttgatgctgagcaaaagtccaaaaaagaagcatatgaaaagacacaccttaaaaaggacaaccagtatgaaggctatcaaaaaggcctaattgtggccttcaaattggagaaggccacagctgatactgtagtgcagcaagataacatagataaagagaatgactctgctacgaaattagatgtttccagttccatggaaaaaccttcaggccaggggccagaggagtctatccttgagagcgatgttattaagcaagggatgtcctcagatgacatgaccaaagagaaagatctaaacactggggaagctacagaatctgagaagtgtattagtgatgtccccatagaaagtgataaacatggtgatagtgaaccattgagcagggaaggcaaaatcatttctggcaatgtgaatgtgaagaaccaaatatcgagggaggatctaaaagaagcattcaaaaaatttggagctgtccggtatgtggacttcagcatcggagataattcaggataccttcgctttgaagattctaaggcagctgaaaaagcccgcatgtctgcagtacttgctgatggtggcttgataattaaggaccacattgttactttggagcctgtgactggtgaagctgagaaggattattgggacacaatccgcagtattcaaggaaagtacaaggatagtagaagctacaagggaagggcttcaaataaccagagaggaggaaagcgtttcaacgcgaagcgagatagaaacccagactcggagaagaattctaacaaggctcggaaggttgaagctatcgcatgaggttaatttaggtaccttagctcgactaaagaagtaacatgttatgccagcatgatcgacttcagtactctccaagtttctagaatcgacttgttttttagctatcgttttcattttggtcgttttgccaccttattcgatgttcgtcccttagctataatccttttgtaatggctttactgtgatgcgagggctcacccgatggcgtgtaatttgagcacaccaagcttaggcttcccttgcgaaagggtggaagcctttctattctttcactagcaaatatgcagttagggcttattcggttatttccatttctaacatagcctaaagcttaagggccgtttggacccctgcaaaaaaaaaaaataggag

SEQ ID NO: 22977 - DNA, 1058 bp, Zea mays
  unsure (1)..(1058): unsure at all n locations
  Clone ID: MRT4577_120959C.1
cccccccctcgagtttttttaccccctcttttttttttttttttttaaaagaaaatttggggtttttttttgagcaatcaatggttcaatggggagtctataatacatcaatttaataccaagtaaacaacggtattcctcgctacagatgctttctagaacaggtacaacaaactgaatttagagcaggttacaaacatttttggcgtcaatttgcctttcctgctaagtgtatacttcaggttgctaccctcaggctacagaagaacagaacataacctgattatcctacattaatccatcaggtcaattcttcttggattgctgtctatttccagttgttaaattgttttctgtgaccaaagcactagcattattctttggtgaggcttcaccagccaagggtggagagttgttcttggcagaaaaatctgctgctgaagatggagaatttcccttctcatggctgttcttgtcgcgggaaaaaaattctgggtttgcaaatgatcttgtacatggccacctgcttgaccgaattgtttcacctccaacaatggtttctgattcaaaaatgttccctctgtcaaaagccttcttagagaaaaacttagccttcagacgggctgcaaggattgcttgatatctattgattttttgtccatgctcttgggttactgcttctgagtcgttgtcccgcggcaagtggagcttggcctcctcctgcttcggtacagtcgcggcggcagcgtttccttcctccttaacccggtgttgctccgacgtcggggcgggggtggcggcggcggtagcagcagcagctgctgcttctggcggcgggacaggggcggcaccggcggtgcgcagccacggggaggaagccatcggttgcgcagtgatacggaggccggtctgccgcgaggccggcgctgggaaatttttgctggtgaattgataggacattgcagatggcgccttttttttttttttttttttttttttttttttttttttttttttttttttttttttnnttntttntnnnnnggccggcctcgagg

SEQ ID NO: 22978 - DNA, 374 bp, Zea mays
  Clone ID: MRT4577_12095C.1
ctcgccggtcgatacacgcatctacactgactcgtgctaacgcgtccgcccacgcgtccggaaacatgaaacctgcgaggctgccatcgcaatgtacctgaacctctcctgcatccccgaggcacaggcgatcatcggctcgagcgtcgccatccatttcctcgtcaacagcctaggggaaggtggcccccggagcgacacctgccgcatggacgcgctgctcaccctgtacaacctgtccctgcacgcgcccaacatcccacccctcatggcgtccggcatcatcgagaacctccgccgcgtgctggtgccgtcctccccgtggacggacaaggccctagcggtcctgctgaacctggcgctgacccggaaga

SEQ ID NO: 22979 - DNA, 224 bp, Zea mays
  Clone ID: MRT4577_120960C.1
aaaacccgacgcccatgggggtgtcggcctcgtctcctggcttcgtggagcgcacctcccatacaacgggtgcgtgcaccaccgcgcggtattacgcgcgggcattgcactcggtactgcacctcgggcatctccacgcggtcactgcgcgcggtcactgcaccgcggccatgccgcgcggtattgcgcgcacatgccactaccctataacgcccgctagctat

SEQ ID NO: 22980 - DNA, 190 bp, Zea mays
  unsure (1)..(190): unsure at all n locations
  Clone ID: MRT4577_120961C.1
cctccacctccnncccccccagaagacctttttttacaataaatagtattctccccccctttattttaatccttccctcatttaccctaattttcccaccaacaccactttcataaatatactacctcccttcccaaatttaaccaaaacctatttccaaaatgcttcccatccttatttttcccctcta

SEQ ID NO: 22981 - DNA, 261 bp, Zea mays
  Clone ID: MRT4577_120962C.1
ctgatccagcatatgcaaagcattcacaaccagtgcattcaaagagttggttgggctgcgcaccacacgaactacaactacgctcacaaagatcagacaactgctgccacccctgtcgaacgtattgacaacacagcctacacaaaagcacagaacacacataacgctaataatgctactgatgctactgcatcctcgacattctctcattcagcccagtccaaattggcccaatcttgaccctgaggatcctgactgagc

SEQ ID NO: 22982 - DNA, 287 bp, Zea mays
  unsure (1)..(287): unsure at all n locations
  Clone ID: MRT4577_120963C.1
gggggancancaaaaacgggacgaacgaagataaacattttggactagggggggggagacggtagcaaaaaggataatttggccgggcgggccccaccggttaatttcttcagttcccgggggagttgccgtaaccgccgccacggttgccaccggcgtagccgccggcaacaaaaacggagccggcggcggcaccaccggagccgccgccaccgggggagcccccgccgncataaaggtttccgccaccgncgnaaccgncgncttcaggggcacaaccgnacccg

SEQ ID NO: 22983 - DNA, 439 bp, Zea mays
  Clone ID: MRT4577_120964C.1
aacggccgcaggggcgggattcgcccttaagtgaacgcggacgaagtccaacaagcatcataaatagttgaatccattagcaacagggggagcttcaatggcgaccaagatcttttccctacttatgctccttgctcttactacatgtgttgctcacgcgacaatattccctcaatgctcacaagctcctatagcttcccttcttcccccataccttccatcaattatagcttcagtatgtgaaaacccagctctacaaccatataagcttcaacaagcaatcgctgcaagcaacattccataatcgccctagtgtttcaacaatcaccagccctatcttaggtgcagtcataaggtccaaaccatcaaggcacaacagttgtagcaactcgagctacctgtgatcaaccaagtagctctggaaaacctttctaacttc

SEQ ID NO: 22984 - DNA, 809 bp, Zea mays
  Clone ID: MRT4577_120965C.1
agttttgttctgtttggaaaggcggagtggccggcaggggagaacttctcgcctgcttggagagaagtcgccatccgctttccaccactcggcgatttgcagctttgggtccgatacagtgctcaccaaggctcactaaatggagtctcacaatggcgaggccaatgacttgcctccaccacctcctctgattgctggggttgaaccacttaaagctgatgaaacaaagatgccattgaaacctaggagtctggtccagagaaatggatttggcagaaaggggcagccaataaagctgataacaaatcacttcaaagtttctcttgtgaatgctgaagaatttttctaccattactatgtcaatttgatgtatgaagatgatacaccggttgatcgcaaagggtcaggaaggaaagtgattgaaaaactgcagcaaacttatgctgctgaacttgcaaataaagattttgcctatgatggtgagaagagcctgttcacaattggtgctcttcctcaagttaaaaatgagtttactgtcgtggttgaagatttttcaactggaaagactcctgcaaacggcagtccaggaaatgacagtcctcctggaagtgacaggaaaaggctcagaaggccttacaatacaaagacctataaggtcgagctctcttttgcagcaaaaattcctatgagtgcaatctcacaggccttaagaggtcaggaatcagagcacactcaggaagcaattcgagtgattgacattattctgaggcagcactcagctaagcagggttgcctattagtaaggcaat

SEQ ID NO: 22985 - DNA, 642 bp, Zea mays
  unsure (1)..(642): unsure at all n locations
  Clone ID: MRT4577_120966C.1
aggcggagtggccggcnaggggagaacttctcgcctgcttggagagaagtcgccatccgctttccaccactcggcgatttgcagctttgggtccgatacagtgctcaccttgttgcaatattgctgtactcagatgttctatctctgttggaagggtgattttacctcaaggctcactaaatggagtctcacaatggcgaggccaatgacttgcctccaccacctcttctgattgctggtgttgaaccacttaaagctgatgaaacaaagatgccattgaaacctaggagtctggtccagagaaatggatttggcagaaaggggcagccaataaagctgataacaaatcacttcaaagtttctcttgtgaatgctgaagaatttttctaccattactatgtcaatttgaagtatgaagatgatacaccggttgatcgcaaagggtcaggaaggaaagtgattgaaaaactgcagcaaacttatgctgctgaacttgcaaataaagattttgcctatgatggtgagaagagcctgttcacaattggtgctcttcctcaagttaaaaatgagtttacctgtcgtggnttgaagatttttcaactggaaagactcctgcaaacggcagtccaggaaatgacagtc

SEQ ID NO: 22986 - DNA, 343 bp, Zea mays
  unsure (1)..(343): unsure at all n locations
  Clone ID: MRT4577_120967C.1
cggacgcgtgggcgcatgcgcgttaccttttacaactgcaaacactacaaccataagaaggggcgtcctcttctgtgggtgcgtagcactatctattgtaagtgccctcggacgtttgccagcaccctttcttctagaactaattacagctactaacatcacaaaacatcttcaatgacaacctcaactgcatgctgcatgcccaaatgttcctctttgattacacacatactggtgctattataatcaaggactctaatgaacaangnncnctatatccaaatataccttacaatctaagctcatatgtcatttcaatcctacaaaatcttgggaccattat

SEQ ID NO: 22987 - DNA, 186 bp, Zea mays
  unsure (1)..(186): unsure at all n locations
  Clone ID: MRT4577_120968C.1
gttacgggggattatcgcgtagttagccctcgtaggagttttcctaaactgtctgtaggagtttggtagtaggctgagccgtatggtttctggtagttagccgtctgtagggagttagtctttaaacgtctgtataaaaactgcactgtttctggtagtgtaactgtcngtcaggagttagtagtt

SEQ ID NO: 22988 - DNA, 412 bp, Zea mays
  Clone ID: MRT4577_120969C.1
gagcagcaagaaaatctattcatttgacacgtctccatctcattgagcatttaattatttttgggcaggaaagaacacataccagagatgaggttgttggtttaatttgattctaagtcctaatgaagaagattgtgagctccggcccggcggtgccgccctctgggttgtgcatgtagtacgtctcggagtccttggaaccgacgaggcggtcgaaatgcgcgcgcatgtaggtgagctcgccgtcggacgggtgggacatatcggacggcagcacgccggcgcccatggacgtggagtggagcatccgcatcacgcagtcgtcccgctccgtcgcctcccgccgcgacgcgtgcccgacactctcgccgttcacctcggccgtccagaccggctcgtcgagcagcctcct

SEQ ID NO: 22989 - DNA, 278 bp, Zea mays
  Clone ID: MRT4577_12096C.1
gcagcgcctgctagtcctagccttggccttggctgggtgctgttgtcttgggtctgccgagtctggcctctggggccacggctggctttccctgatgtatggcaagagcctcgctcgtgtgcttccatttctcctgagcttacagctcacagtcttttatcctacgacagcagtggaaatttacacctccggagccctggaggcagttaacgggacagatattcggttaaaatgcactttctccagactttgccctgtgggagatgcgctaaccgtga

SEQ ID NO: 22990 - DNA, 652 bp, Zea mays
  Clone ID: MRT4577_120970C.1
cttttactttgcaggcaccatggatagcggctccttgctttcatcggcgctgcccctgacggcccgcggaatcgcctcgctgctccttgaagaaccgtttcctctacggcaagctgcccccggaacccgagggacttgcccaaggtgattaacatgctcaacccgtaaaccgagcgtggacggagctacctaaaaacgaggatgcgggacgagaacatcataacgaagtggctgcataccatccccactgtgctgaaatccacattaaatgtgacctaggatactgtcaatatccatgaacaacaccatcgacgaccgttgtcgggatcgatactccgacatgtctactccattctggctaaaacctcatcatgtctccaatacggatgatcactaaatcaaggcgcccaagatctgtcaactctaaaatcgactggcaacaacgcctccaagtgcttaggcgcatcaccgactacgaccttacatgaatgtactaacccgtataccacgcactgacagccactggtaaaggactcacagcgcctgtagctcagaatcatctctgcatagaggcttacgaaaacataaatgcggtgggctttcaacaacagtctgcgtatgccaccactgagttgctaagaaaacgaagctg

SEQ ID NO: 22991 - DNA, 296 bp, Zea mays
  unsure (1)..(296): unsure at all n locations
  Clone ID: MRT4577_120971C.1
gaaacgaaaatattggaacattattaaggggttcaattgacgccaccacagaatatttgatgncnttnntggtactgatgctgcataccaaacaatatgaatatacatcaagcctctcattcgaattgcagcagaaatgggagaaacaatcatcattctttttcctccacttgatgacaatctggcactatcaaaaggcactgctagaattttttaacattgaagagactggatatggattaacaccagattggacccagaatagtttccaaacaaaaggatctgcaacgagtagg

SEQ ID NO: 22992 - DNA, 398 bp, Zea mays
  Clone ID: MRT4577_120972C.1
ggccgcttttttttttttttttttcctaacttggtcaccgctctaattcgtgctcgaagtgctcatgtggtgtccggcattttaatatggagttcataacttggggatcaattatcattacatggagctcgatcctccaggcacatcgtcgtcgtagttctcggcgttgacaagatccgtaaccctctccacgaggacttcaaagtcgtcgtccgacttgatgaggctcaccctcgtgtaccggctgctagcgtcgtagccagcgccgcacggccggatgatcctggccttgagcagcgcctcgtagcagtcgtcgtcttccttccctctcgcacttgacccatgcataaagcaggcgatgggtttttgacccgggtgaagtaccggcagtactgggg

SEQ ID NO: 22993 - DNA, 1599 bp, Zea mays
  unsure (1)..(1599): unsure at all n locations
  Clone ID: MRT4577_120973C.1
cctcgaggcncggccggggaaaaaaaaaaaaaaaaaaaccgtcacccntttttcaccccaccccattctccctcttcctccagagtccagacggcgtgcttccgcctgccgccgccggcgagctgcttgcccgcagcatgactccgcatcctggccgcctcgtcctacctccggcggctccttctccctgaaccccgccgcgcgccaggccccacgcctccttccgcagtcacacgagcacgcgggcgtcctctgccgcaccgcgccgcctccagacgcctcgctcgtcaggccactccacctccgcctgcgaacgtccggcccggctccggcgagttcctccgcaattccggatctgctggagcgccagcaaggcggcctctccaactctccggagtccggaacagcaagggttctgatctcccatgccacagttttataacgttgaaggattcaaaaatctacagaactagatgatacttgcataatgcagccctcagatatttggaaggcgcatgctggttcatcacagtcagagggttcgggtctggatatggagaggaacggatgcaatcataattattgtccatctcctctccaaccaattgcctcagctggtcagcactctgaaagcagcgctgcatacttttcttggcctacatctactctaatgcacgggtcagctgaaggccgtgctaattactttgggaacctacagaagggtgtactaccagngacatcttggtcgcttgccaaagggccagcaagctaccacctttacttgatttaatgattataagagcattccacagcaagatcctccgccggtttagtcttggtacagcaataggctttagaatcaggaaaggaacattgactgacacacctgccatccttgtgtttgttgctcgaaaggttcacaggaagtggctcagcgctactcaatgtcttccaactgcccttgagggacctgggggtgtgtggtgtgatgttgatgttgttgaattttcttattatggtgcaccagccccaacaccaaaggaacaactttatgatgagcttgttgatggattgcgtggtagcgaccctattgtaggctcaggttcacaggcatgttgcggttgatctggattatcccaaccagaagatgttccatccgctacctcctaatcttgggcctggagtttacctaggtgccgttgagagagcaacatcatttataacagatgatgtttggtacgggatctacgcaggaacaaacccagaaacttttgtccgagctgatggtgcatttataccgtttgctgatgacttgaattacaagtgtcagcacatcggttaaaggagttggagtcattggtgatgtaaaggcaattgatttgcaatcctcaattggcagtctcattgggagacaagttgtcaaagttggaagaagttctggtctgacaacaggaactgttgtcgcatacgcacttgagtacaatgatgagaaggggatatgcttcttcactgactttcttgtcgttgnggagaaccaacaacatttgatcttgaaggggacagcnggagcctcataatcttgacaggacaagacggtga

SEQ ID NO: 22994 - DNA, 683 bp, Zea mays
  Clone ID: MRT4577_120974C.1
agcagtggtaacaacgcagagtactttttttttttttttttttttttttttgcattaaattatgtcacctattgaaggcaatattttttattatgtaatcgtttttattatcttgttaattttattctcaaacagatttggtgcgatcttgcttattattcagtcattttttctattttgtttgctttattttaaaacagatttggagcaatctttttattgtcaagctatcttcaacaaccttcgcatcctaactcttatctcacttcatattttctataaacagtgaactctatatacagctgcgccgaaggtagcctcagcaccacctcttatccttaattgggccaactcctatcacagtgtcacctcaccaagcgccggagcgtcaggtcgggtgtgtcatgtgtgcgcgtcgcaggctcgcagcgcttgcaaatgcaaaggatgtggctgttccgtgcggtttgaatctttagctaattttaatagctaattattagttctagtgcattcaaacattaatctaaaagtgaatgcccgcgtactctgcgttgttaccactgctgggaaatggggtattcggcaaagatgacgctcccactccagtccaacggtattatttaactttgccggtgttccgccatctctccccattggcttactctttcacttatttttat

SEQ ID NO: 22995 - DNA, 2762 bp, Zea mays
  Clone ID: MRT4577_120975C.1
cattgggtacctcgaggccggccgggaccccggcaccctttcggaccccaccccattctccttcttcctccagagtccagacggcgtgcttccgcctgccgccgccggcgagctgcttgcccgcagcatgactccgcatcctggccgcctcgtcctaccaccggcggctccttctccctgaaccccgccgcgcgccaggcaccacgcctccctccgcagtcacacgagcacgcggccgtcctctgccgcaccgcgccgcctccagacgcctcgctcgtcaggtctctccacctccgcctgcgaacgttcggcccagctccggcgagttcctccgcaattccggatctgctggagcgccagcaaggcggcctctccaaccctccggagtccggaccagcaagggttctgatctcccatgccacagtttataacgttgaaggattcaaaaatctacagaactagatgatacttgcataatgcagtcctcaggtatttggaaggcgcatgctggttcatcacagtcagagggttcgggtctggatatggagaggaacggatgcaatcataattattgtccatctcctctccaaccaattgcctcagctggtcagcactctgaaagcagcgctgcatacttttcttggcctacatctactctaatgcacgggtcagctgaaggccgtgctaattactttgggaacctacagaagggtgtactaccaggacatcttggtcgcttgccaaagggccagcaagctaccaccttacttgatttaatgattataagagcattccacagcaagatcctccgccggtttagtcttggtacagcaataggctttagaatcaggaaaggaacattgactgacacacctgccatccttgtgtttgttgctcgaaaggttcacaggaagtggctcagcgctactcaatgtcttccaactgcccttgagggacctgggggtgtgtggtgtgatgttgatgttgttgaattttcttattatggtgcaccagccccaacaccaaaggaacaactttatgatgagcttgttgatggattgcgtggtagcgaccctattgtaggctcaggttcacaggtggctagtcttgagacctatgggactttgggtgccattgtgaagagtcaaactggcaataaacaagttgggttccttacaaacaggcatgttgcggtcgatctggattatcccaaccagaagatgttccatccgctgcctcctaatcttggacctggagtttacctaggtgctgttgagagagcaacatcatttataacagatgatgtttggtacgggatctatgcaggaacaaacccagaaacttttgtccgagctgatggtgcatttataccgtttgctgatgactttgaaattgctagtgtcagcacctccgttaaaggagttggagtcattggtaatgtaaaggcaattgacttgcaatccccaattggcagtctcattgggagacaagttgtcaaagttggaagaagttctggtatgacaactgggactgttgtcgcatacgcacttgagtacaatgatgagaagggaatatgtttcttcactgactttcttgtcgttggggagaaccaacaaacatttgatcttgaaggggacagtggaagcctcataatcttaacaggacaagacggtgagaagccgcaacctataggaattatatggggtggtacagctaaccggggaaggttgaaacttaaaagtggccagggtccggagaactggacaagtggagttgatcttggccgccttcttgatctcttggagctagatctgatcacaacaagtgaagggctacaagctgccttggaagaacaaaggattactctagctgccgctgcggctgcagccactaattcaactgccacagaatcgtcacctgttgctggccctcaagaggatgataaaatcgacaaaatctatgagcctctcggcattaacatcattcctcgggacagttcttgccatatcaacagaccaacccaacgagaatgtggaagagctaaacctgatgtctccgatgcgcaacggtcaagaaggcaacggtgacttgaataacttgatggacttggaactggaaaattcacctgatggtatttgtattgccctgaacctgggagagcgggagccaaaaagactccgctcagattttgattcgaccctggacatggacttgcagaaatgaggctgttatgctgcagacttgttgcaggaggctctgcactattcagcttttgtgttgatcattgaaggtatggccataaaggaaataatatgtttctggacgactggacctgttgtcctgcttggagccggtctgggttaagctgtgaagctcctgctgcagttttgcgtctagtgtcaagtgctctagtatatctagtgttgcgtaagatgtcggcacctcaatttgacagaggcgccatacttcttgcccatgtaatgttgtcatttgttgtatgctcgtgtatatgtactacatgaagcattgtaaaattgagcaacagcaaccggagctcgagaatcttaggcgcatgcgcaaccatccaccaaccccgtacctgatgaattgacaataaagctggatattttaggtgttaaaaaaaaaaaaaaaaaagcggccccccccgccccttttttcccccctttttccccccctctccccccttttctccccctttttccccccatttcccccgctgctccccccgttttttttccccc

SEQ ID NO: 22996 - DNA, 1205 bp, Zea mays
  Clone ID: MRT4577_120976C.1
gggtacctcgaggccggccgggcattttatattctatctccgtcacacctttttccctccctgctcttccagtcttgttgggtcttgagtcttccaccttcctcctcccgtctcgtctccaacggtgtgcttcttcctccggacgcctcgctcgtccgaccgctttacctccctcctccggcgagctccctccgctgttcctggtgtgtctacgcgccagctcctcctcttgtcgattttgggcgcgctcccctccgccgccgggctgtgctgcgcggacgcggttcgtggattcggcagacggatctgcaccgtcctcgccgccggtgtgttccctctcctcgcggccgatatgcaggagcactagcaaagcggcctcgccatccctccggagtccggagcagccagttgtgcatcaattctaaaacagagttgataccttttttccatcttcaaggctctgctctctcatgccgcagttttacaacgttgaaggcttcaaaaatcttcagaactagatgatacttgcataatgcagccctcagatatttggaaggtgcatgctggttcatcacagtcagaggcttcgggtctggatatggagaggaacggatgcaatcataattgctgtccatctcctctccagccaattgcttcagctggtcagcactctgaaagcagcgctgcatacttttcttggcctacatctactctaatgcacgcctcagctgaatactttgggaatctacagaagggtgtactaccaggacatcttggtcgcttgccaaatggccagcaagccaccaccttacttgatttaatgattataagagcattccacagcaagattctccgccggtttagtcttggtacagcaataggctttagaatcaggaaaggaacattgactgacacacctgccatccttgtgtttgttgctcgaaggttcacaggaagtggctcagccctactcaatgtcttccaggtgcccttgagtttcgttgcattccataaacagggacctgggggtgtgtggtgtgatgttgatgttgttgaattttcttattatggtgcaccagcccccacaccgaaggaacaactttatgatgagcttgttgatggattgcgtggtaacgacccttgtataggctcaggttcacaggtggctagtcttgagacctatgggactttgggtgccattgtga

SEQ ID NO: 22997 - DNA, 246 bp, Zea mays
  Clone ID: MRT4577_120977C.1
ggacaaagtaaatttattggagcgcggaaagggctcccgattgacgcggccagcgccagttcaggccggccagagcttaaggcgccagaatgcgtacgcccgcaatccatagggagacaacgacgacgacgaagacgcgtacctggtggcgcggtagctgcgcttggggctgatcatctctggcagcagaggctacttagcaggatcgccacctagctctgccgtgcggccggtaggatcgacgcg

SEQ ID NO: 22998 - DNA, 577 bp, Zea mays
  Clone ID: MRT4577_120978C.1
cccacgcgtccttttgtcttgttgactcttgagtcttccaccttcctcctcccatccctccgtctcgtctccaacggtgtgcttcttcctccggacgcctcgctcgtccgaccactttacctccctcctccggcgagctccctccgctgttcctggtgtgtctacgcgccagctcctcctcttgacgattttgggcgcgcccccctccgccgccgggctgtgctgcgcggacgcggttcgtggattcggcagacggatctgcaccgtcctcgccgccgatatgcaggagcactagcaaagcggcttcgccatccctccggagtccggagcagccagctcatcaatcgttcctccttagatacattcccattatatatcatgtgccgagtgccctccaagatggtttactacagtaatatagttgtgcatcaattctaaaacagagttgataccttttttccatcttcaaggttctgctctctcatgccgcagttttacaacgttgaaggcttaaaaattctacagaactagatgatacttgcataatgcagccctcagatatttggaaggcgcatgc

SEQ ID NO: 22999 - DNA, 2977 bp, Zea mays
  Clone ID: MRT4577_120979C.1
ttggttttatacctaacttgccatactttgcctaacttttctgtttaaggttagttcttcaattcgaacgactaaccttaggcaaagtgtggcccatttagccccgaaccaaacagccccgtaattccctcgtcaacgcctccgtttcgtcgaagccacatccgcggcgtttcataatcccaaacgtctccctcccgtctcgtctccaacggtgtgcttcttcctccggacgcctcgctcgtccgaccgctttacctccctcctccggcgagctccctccgctgttcctggtgtgtctacgcgccagctcctcctcttgtcgattttgggcgcgctcccctccgccgccgggctgtgctgcgcggacgcggttcgtggattcggcagacggatctgcaccgtcctcgccgccgatatgcaggagcactagcaaagcggcttcgccatccctccggagtccggagcagccagttgtgcatcaattctaaaacagagttgataccttttttccatcttcaaggttctgctctctcatgccgcagttttacaacgttgaaggcttaaaaattctacagaactagatgatacttgcataatgcagccctcagatatttggaaggcgcatgctggttcatcacagtcagaggcttcgggtctggatatggagaggaacggatgcaatcataattgctgtccatctcctctccagccaattgcttcagctggtcagcactctgaaagcagcgctgcatacttttcttggcctacatctactctaatgcacggctcagctgaaggccgtgctaattactttgggaatctacagaagggtgtactaccaggacatcttggtcgcttgccaaatggccagcaagccaccaccttacttgatttaatgattataagagcattccacagcaagatcctccgccggtttagtcttggtacagcaataggctttagaatcaggaaaggaacattgactgacacacctgccatccttgtgtttgttgctcgaaaggttcacaggaagtggctcagccctactcaatgtcttccaggtgcccttgagggacctgggggtgtgtggtgtgatgttgatgttactctagtcttcttattatctgcggcaagccccaacactgccacagaaactttatgatgagcttgttgatggattgctgataaaatcgacaaaatctatcaacctctcggcatcaacatcattcctcgggacaggtcttccatatcaacagaccaacccaacgagaagcaacaagcaagttggctgatgtctccgatgcgcaacggtcaagaaggtaacggtgacttgaataacttgatggacttggaactggaaaattcgcctgatggtatttctattgccctgaacctgggagagcgggagccaaaaagactccgctctgattttgattcgaccctagacatggacttgcaaaaatttggccgttatgatggtgacttgatgcagtatgctcttgactattaagcttttggtttgagcatttcagttatggccataaaggaaattgttaatttctagacaactggccttcaatccccgattggcagtcttattgggagacaagttgtccacgttcgaagatgttctggtttgacaactgggactgttgttgtgtactgacttgagtacaatggggacaagggtataagattctccacagacttacttgtcgatgggaagatgcttcttacatgtgttcttgaacgtgagagtgaaagcacaaacatttgaactggacaagaacagtggaagcctcataatcttaacaggacaagacggtgagaagccgcaacctataggaattatatggggtggtacagctaaccggggaaggttgaaacttaaaagtggccagggtccggagaactggacaagtggagttgatcttggccgccttcttgatctcttggagctagatctcatggcaacaagtgaaggtactctagctgccgctgggctgcaaccactaattcaactgccacagaatcgtcacctgttgctggccctcaagaggatgataaaatcgacaaaatctatgagcctctcggcattaacatcattcctcgagacggttctgccatatcaacggaccaacccaacgaggatgtggaagagctaaacctgatgtctccaatgcgcaatggtgaagaaggcaacggtgacttcaataacttgatggacttggaatcggaaaattcacctgatggtatttctattgctctgaacctgggagagcgggagccagaaagactccgctctgtttctgattcgatgctggacatagacttgcagaaatgaggctgcccgctgctatgctgcagacgtattgcaggaggctccgtatcattcagctttttttatcgatcattgcaggtatggccacaaaggaaataatctgtttctaggcgactggaccggttgttctgcttgaaacccggtctgggttaagctgtgaagctcctgcagccgcttgctcctgcagttttgcgtcaagtgtctaccaactctagcatatgtagtgctgcgtaagatgtcggcacctcagatagacagaggcgccatatttcttgctcatgtaatgttatttgttgtatgctcgtttgtatgtactgcatgaagcattgtaaaattgagcaacagcaaccagagctcgagaattttaggcgcaaccaaccaaccccgtatcgatgaattgacaataaagctgaatattttaggtgtttagaaagtattttctcttagatttttggggagattaggatacaaactctctgattcaagcagcccctaggtgttgtcctgacctgcttgatcaaacgacctgctggctaaagtttggacagagtagtcgctctctagcttgatgagttcttaagctatcttcaactaactaaccccccccctgcgcgggaaaaaacgctgtttccctcc

SEQ ID NO: 23000 - DNA, 508 bp, Zea mays
  Clone ID: MRT4577_12097C.1
ccccctcgagttttttttttttttttttttttttttttttttttttttttttttttttttttttttttttttttttttttttttgggggaaaaaccctttttttaaaacaaggttccaggtttccaaattccgcccacctcaggcggttaaatccccgggcccaacttttacccccaaatggaaaccaaatcgcttttgggaacccccaaataataccccgggggggggagattaaagccgccctactgggggcccctgaagaagttgggccagccttgcccgtaattgggaacccggggtcaaacccaggaagggccttgtcttgaggggagggggcagccgacctcttttgttggggcattggggagggggagcgccaccccagggggggggggggggggggcttcccactttaggcccctttaaacgtccgtttgccagttgatgatgccgggggccagcccccggagggacggccttgggaggccgtcccggtgttgtccccct

SEQ ID NO: 23001 - DNA, 390 bp, Zea mays
  unsure (1)..(390): unsure at all n locations
  Clone ID: MRT4577_120980C.1
gaagagccgcgagcagcgcgcccaggccgcggagcagaaggcggccgaccagcngcacgcgncaaggcaggacagagcccccgaggaggcgcccgacggcgggggcaggaacnagcagcanccggggcagcccgcaggaggggaaggccaacgccacgggcgaggcggacgccgccangggcaaggccagcgagacgaaggacgcggcggcggacaaggcgggcggcgacagggacagcggcggcggacaggacgggaaanaanaaggcggcggccgccgagncaaacgaggacgggaagccaagggagaaggcggcggaccagangacggggcaggcgnncaacgacgaccgaacgaggggggaggagggcaccggcgcaccgcggaga

SEQ ID NO: 23002 - DNA, 193 bp, Zea mays
  Clone ID: MRT4577_120981C.1
gactttcatacatacgatttttgttttgtgggtaggagggcttatcatcaacactgattttataatctgacaataaatgtctttcattaaagagtttacctaaatgatgttcgattatatgtataatttataaaatatttatgtatagtttgtttattcaggtatatgtatattttgttgaaccccttctgtg

SEQ ID NO: 23003 - DNA, 490 bp, Zea mays
  Clone ID: MRT4577_120982C.1
gcacgctgcagacgcgttacgtatcggatccagaattcgcgatgtttttgatatatacgtagtaaataatacgatagttggggggaaaacaaattaaaagtgagccatctgtagcgaaatgaccgtccatttcacactaagagctgaaatctatactagatggaatatatcatatgggtacacgttccggctaatacaagcaatgggagggcaactccatatgattcaatataaaaggtgtagtgacgtaaacattgattcaggatatgaagcttttaaagatggattttccgattatattattaagatggaggtctcaaaaggggattctatacaccgctttttgggaccagaaggtactttgctggaacattactctcatgctttagaagaaggcaaaactgttggcgtaatactaggtgggatagaggaacatgaaaggattaagactatgcgctgcggaacaatagcggttcatcctaattaccgc

SEQ ID NO: 23004 - DNA, 505 bp, Zea mays
  Clone ID: MRT4577_120983C.1
ttttagaagatgagattacttttaattaaaataaaacagccaccataaaaaatgattacaagtcgcgcaaagggacacacactgccactaccagccatcaacaccctgtacctcacattcatctctctcaggaacccaatgcattgatgaccacacgatacttttgatgcagacagataacactaatagtaatataatacacataacagagaaagttactaccgcactgaataaccctaattaaagtaaaatcctcaggaatgatcaacgcagaaacatgtttgcggtggccataatcggttgtatcggatgaggaatctgccagggcttgaggagaggatctggaatctcgggaatctcaacggataacccttcgacctcttcagcgatctaaggatggagttcaagaagcgcaatcgatcggccagttccattgtctgtgctctcagaatgctgttcgccgcttcggtctcgacgcacgcttcttccttggcctctatgttct

SEQ ID NO: 23005 - DNA, 1230 bp, Zea mays
  Clone ID: MRT4577_120984C.1
gttcggagctgagttgtgccatgacaacctacacaacacaaagagaccaagtttcaagaatctgggtcgggctacgcgttgcggacatgatatctgatataataccagggttacgggacggggaacttatgccacagaagctcgaggagatgcaggcatttacgcaatcttggaaaataggtggacactcgcatgaaacccagaggcagattatgtttgaggtgaattcatttacatgccctgcttatggcaaattctgcaacgatgcacagcgtcatgcaactctgaagttggaggttgagctgaggaactggagatcctgcttcactagctatttcaatgctcagaaagcgtatatcgaggctcttgatggctggctatccaagtttgttctgaccgataccatccggtactcgcgggggatctcgtcgattgctccagatagagccggtgctccaactctagttgtgatgtgccatgactggtacactacaatgtccaagtttccgagcaagcgggtctcgttcaccatgaggaattttctcaggagcgtgagggtgctatggctgaagcaaggagaggagcagcagcagaaaaggaaggtggacagcctggcaaaggagctggacaagaagctgaccgcctacaaaagggcagagaacaggatcataggcaccaagcttctggagcacagtcctgagacagacgccaagcagcgcatggagcacctgtcggagaagaaagaggtgctgaacctcctaaagaggaggatcgaggcagagaaagggaagcatcatgcgtgcatgcgggacacgcacgacgtcactctcaacgggttcaagatcggcctcgccagcatcttcgagtcgctggctgagttctcgaaggattcggtgaagctctacgaagacctcctaggccgagcccatggcaaggattcagagaaggctcacatagtggtggatgatggtaatctgcatgtgttaggacctagctagctgcattggcccagtttttgggcccctagaatctttgtctgattttagcgtgtagagagtaccatgttgtttggtttggttggttggttgcttgaaggtagtagggtcattcttgtgggcgacctgctgtgcttgtaattatccttttagcttgatatcggtggggattcgatctattgtggtgctgtgctgtgctgctgctcgttccatgtgactgtcaggtatgtatggg

SEQ ID NO: 23006 - DNA, 779 bp, Zea mays
  Clone ID: MRT4577_120985C.1
ccggggagacctaccgatgcttgttttctctactgcaagtagcactttcttgcacacgtgagattcctggtgaacgaacgaccatggaagaagcagctagcagaattggttcaatcaagaccacgtatgctaaaggaattgaaaacgcaagcaggcattgaattgaaaccacctctatgttgagcgaacgtacgtggggatggacatcatccaataatatcgcttaccatatgcagcgataagtagtcattggcggctctagaagaaccgacaatgatgctccgatggtgtagggagctagtagtgaaattaccagttttcatatgagatgttacataatggaagtgagagtcagtatcgacctctgcttgtagagcccatttctatgccaaccaattgcgtttgtagatttcagaaatacagtactctttggaaagtagaaaatttatccgaagcaagtgacatgacgatgacagccatatggaaggttcaaggttgcaactcagtagcactgcttcaaatcaattgtaaaataaactcagtaactcagcagctctacagacacccttcctggaagaggaaataaactctgtaattgcaagcctctccaatggcaaggcaccgggtccagatggcttcaatacagatttcctaaaaaatgttggccggttatctcacaggatttttatggtctttgtaaaaatttctacaaagaaaatgtttgttacagagtattaatgcatggttcccacatgaaaaaaaaaaaaaaaaaagcggcc

SEQ ID NO: 23007 - DNA, 243 bp, Zea mays
  Clone ID: MRT4577_120986C.1
ctcaatcgtgagcggaccccttcttttgtttttttgatcccataaacaattaacgctaggatttatgcccatttacccagttcataactgctttacaactcattattatttccaatcaaagtgttttacatggttccatatacacattcataaatatgggaatgtcatactagcgatagcttaaaaaatgtataccaatcttttgttagcgaataccccaaagttttgactgaagatcctttt

SEQ ID NO: 23008 - DNA, 709 bp, Zea mays
  Clone ID: MRT4577_120987C.1
tctcgtgatatgtgtttgtggacgaactaaacattgtcaaattcgtggagaggagcttccctaataaaatattggatgtgattgatggttccttatgtgatgacttcaagagtgcccaaataaacatggtaacagagcgtgagacctaccgatgcttgttttctctactgcaagtagcactttcttgcacacgtgagattcctggtgaacgaacgaccatggaagaagcagctagcagaattggttcaatccagaccacgtatgctagagggattgaaaacgcaagcaggcattgaattgaaaccatctctatgttgagcgaacgtacgtggggatggacatcatccaatatcgcttaccatatggcagaaccgacaatgatgctccaatccgatggtgtagggaactgctagtagtgaaattaccagttttcatatgagatgttacagaatggaagtgagagtcagtatcgacctttgtttgtagagcccatttctatgccaaccaaatgcgtttatagatttcagaaatacagtactctttggaaactagaaaatttatccgaagcaagtgacatgacgatgacaaccatatggaaggttgcaactcagcagcactgcttcaaattaattgtaaaataaactctgtaaatcagcagctctacaggcacccttcatagaagaagaaataaacttcgtaattgcaagcc

SEQ ID NO: 23009 - DNA, 316 bp, Zea mays
  Clone ID: MRT4577_120988C.1
ctcacgcgtccgagaggatctacgcattaagctagatgaggacctacttctacagcagggaagaacacgctggataaatcggacgagctctcggatgcgatggaatcggtggagaactagaaggcgtaaaaggacatctcaggagcgcttgaatggatgtactagaagaacgcatgctaatgggactactatgaagaaaaatgtacagcgtgaccaatcgcttcgaatggattgaactcatctgggtcatgcggaagaccaactccttcgagaagcacgtgtgagactaccagaaggcatgcgacgtgaacagact

SEQ ID NO: 23010 - DNA, 136 bp, Zea mays
  Clone ID: MRT4577_120989C.1
cgctccaagggcacgggtcactttcattgagctttgcattctttttgctcacaccaaaaagacctcgaaaacacatgaactggcccgcgctattcattaaaaccatttggtgaagtgcacagacaccaacatatac

SEQ ID NO: 23011 - DNA, 347 bp, Zea mays
  Clone ID: MRT4577_12098C.1
tttgtttattgttgtacttgaacatctacgggagggtatcaatactggggaggcgagggtgaaggactacacaacccttctctttgttgagaaggaggttgctgtgtttggctccaggaaccctgaggagatcccaggacgatcggttgtgtgctgaatttgttgccgagtctactgcagtattcactgaccaggagaaggctgcacctcacttgaagggtggcgtcaacaatgatgtcatctcttctcctagcacggatgcccccaagtaggcaggaggcggcaactaaaaagattacaattctgacattaacattgtcttcaatgctagctgcacaaaccaactg

SEQ ID NO: 23012 - DNA, 246 bp, Zea mays
  Clone ID: MRT4577_120990C.1
ggggagaagacttaaggaggtgggggccataattggacccaataaacggtccctgttcctttactgaagggttttgttgggaaaaaggttttttttgttttaacaaataaggttgacggaaaacttgttcaagttgaatttatggggcgatcagaagttcataaacaaaacggaatagcaccaaccgagaaaaaaggagggcaaatacccaaatttcttagcaaacctggaaagcaatccttaaat

SEQ ID NO: 23013 - DNA, 462 bp, Zea mays
  Clone ID: MRT4577_120991C.1
aaaaaaaaggtttttttggcatttgctcagagccctcgggtaacgttcgaaaaaaacgggctaaacttaaaattaccgccggccaaaagggggtgcaatttttttggaatgcccacgggacacacattactttggaaatagacaagggttttgggggagccccatgagctgggggcactggcgttttgaatgccccggtttttttacgggcaagggcttgatttgtcaacccccccaaaggagggttcaccaccggaaaatatgctcttctaaccatttttaataccttgggtccgatttaacaaggaaatataacgggtgcatgtcagccgggggccacccggctgaaggcgggggccccgaagcaaagcaggggcccccccaaaagtccacaaactggtgttcgatggaacacgagctttacaggacggggacctctcacgatttccattaagacccccc

SEQ ID NO: 23014 - DNA, 563 bp, Zea mays
  Clone ID: MRT4577_120992C.1
atacgcttttttttttttttttttgcaagcaaaactcagattatgatagatagttctggcaggtatcataatttacaagatctctgtgaatttccgctacagcttttctgtttctttgaactgcttccattcagtatcatcaattcatttctagagctgcaacttctgcctcacgctagcacaacaaaagaaagaagaagaaggagaaaaaagaacgaatactcaaagaacacacacgttatttataacaaaaactataatttaatttataccatggccgtggcccgtgggcagcaggagcagtaaaccagaggagagaaaagaaaagatcgagggggaagaccggaagaagaagaagccaagaactcggaagaactctccaagaaatcgaccgagcctggaggaaagccggtggcaaaggcaaatcacggccggatcgatcgcggcatcacgatacccggatccgcttcttgggggacagcgaccggaagacggtggagaggtcgcgcgggacggcgactaacacccgcacgggcgcgggcggcggcttccgcttggcgggc

SEQ ID NO: 23015 - DNA, 233 bp, Zea mays
  Clone ID: MRT4577_120993C.1
attatacaaaaacaaccgggagggggatttttaaaaatgcactcccacaaacagaaccatcagccgcagaagcccacgattaagacacacggtctgacacaatgaaaaaaaggggaggaaaaagcaccgccaaaacccacagaataacccccaacttaagcacaacaaataatatgaaaaaccaggtgctcaagtaaccgatacagggggcaaaaaaaaccaaacatgacggg

SEQ ID NO: 23016 - DNA, 180 bp, Zea mays
  unsure (1)..(180): unsure at all n locations
  Clone ID: MRT4577_120994C.1
ttctctccccagtccccgatcccaanctntgcgtcgaaccatttttatccaataaagaacgacctttaatctttccaccggcattaatcgctcttctctttcttactccttccatttcccttggctttgttccatcataaccaattaccgcgttgcctttccctatacccacaaatttct

SEQ ID NO: 23017 - DNA, 402 bp, Zea mays
  Clone ID: MRT4577_120995C.1
gggttgggttttttttttttgttttttttttttttttttgccacaatcaaactatttgcttccccgggggctaaaaaaaacacccaaacggggggccaacgatcaacaacctaccaaaattcattttttagcccccccgttgggtaggggcaatacaggggttaaacggcagaggggggagggaaatgcccgtccaacgcattggatttgggctctacccctttacaaccagggactgagtgatcgaggggaaacttcttaattctcaaacccacgggaaggaccactaaacatacaagggcgggtctacttggggaaaaagaacgctatatcaaatttgacctttggagttgtgacacaacacccccattttcctggatttttttggtggaaatcaccggg

SEQ ID NO: 23018 - DNA, 4186 bp, Zea mays
  Clone ID: MRT4577_120996C.1
gctgtcgcgccgctggtacctcgttctcgcggcggggcagccccggctgctggccggcccccagggcggggaggctgcggcccccggccctgggccgcgccagggctccctgtggaagcgcgctcgcgcccgggcctcgggccaggggcccaggacacggcgacgcctgctccaatcctggtccttcatgccgaactgcgtttcgcctcgcttctccggtgcatgggcctttccttgctggtctggtagggcggtaggcttgtataataataataaggcgtccttgctcgagatagatctggagtttttcaggattcaaacagtcaggcacaggacacttgtaagaggtctacgtttctgaacatgttagtttagcaattgatagattgctttattcttgtaatttccccggtcaaatgtgcaaggttatatggccaagcccgctcccgctgagccattctccatacggggttacgccatgaggatgcgagctgtcgacgcggccgagtgctacccgttcgtcggtggctgccgcagcgatgtggagggggaatcaccgccgcggttccgtccgatggacccgaagccgctgtcacggtggtggaagcacgaactcgcggcggggcaggcccgacttttggctggcgccaagggcggagaggctgcggcatccggcggtgggctgcggaaggggaccaagaggaagggctctcgctcgagttccacgggcgagagggccaggaaacggcgacacgtgcttcaatttaggtcctttctgacgaaaaaggagataactgctaagcctcagtcaacatcttgtttgcatgagcacaagttgcatatggcatttccgagaaagcataaaagttccactgtccatccaagtacagaacttcaaccaaggaagaaacgggaagaggcacgtgatcacatgccaactcatggaaacagcatgaataaacgaaacagagaaagagcgggcccttctagtgaaatgaatagtgacctaattgggataaaggaagtgacctcagctgtaaataagcaaagcatagaagtcaatggttcgactaataatcctacaaatactggctatgaattggtgaaaactcccacagggcccaaagatgatatctttggagatctccctctcctggaattagaaagctccaagactatgtttcgcactggtgttcatgaacttccaactgttattgaggaatcattaataacaaatcaaaccgaagcagattctataccagaagcggtacccttgaagttgatagatgcatctgacattactgctcagacaccatctcctcttgaagacttggtgaaaagtgaagctactgagccaccatgtatctcccacaatgatgtggcagggagtcacccttccactgttgagattgatggtcttccaaatcatatgaacatcaatatggtgaaaccaggtcttggtgatatgcaattgaaatttactgacgtgtctgctttaggttctcattctgttctcaggtcaaaacgtggttctggtaaccctatgcagggttgttttgatgtgaacaaaaactgttctcaggaaatgaaaaaacatggtacaaattctattagcagtccacctgccatgagaaccagacctgaagagactaaatttaaagatgcaccagttaaaggcaagaagagtactgatatcactggtgcagtggttacactacctacgcttgccaaccaactttcctatcaagctagtgtgttgccctctgcagtatcacatacagttttcagcataagagttgattcaaatgacttgtcttcattgagaagtatgcctgccgaggaatgcatcccaactaccagacctggtaacttcagaactaatgtgtgccatggaagtagggaacatgtggatccatatgcggcacaatctactgataaccagggtagctcacactcaaaacttcacccaatttgcagtcctgctaacattggaatggcttttatgaagctaccgggccttgaaagaatggagatctcaaactgcaatgcaaggataggtgaaaacaggtttagtaatgcagagtcaatgaacacagtaagatgtcagaaacaacagttgttgagtggcatgacctatgtaatggaaggtcagaaacagattggtctaagcagctctcaagttgggaaaccaggtctggatggttatgggggccaaggtgatcatcatctgcagcaacccacagttcgtttgatgggtaagaccgtctcagtgtgctcacatggcaaggatcataatgtatggaccatggataaagtcagtcctgacaatgttgccattgaaacaagccgcctatccaatagcacgtcagggcaaaatactactttcagtggccttcataaccaaaggccagaaccaataagtagtgttccaatagtgaaagattgcacttggaattttggtaatcagtttgttcgtcaagctgaactcaataaggcagctataggcagttccaactctcagaccaggcatcttgagctacatcaaccacctcatttgataagcattcctcagaatcaacagtctcatttgtggacacctgcagcacacatgagtaggaaagatcagtgttttgtgggtccagcagcgaaccaatcttctctggttccaaaatcactgctaaatgcaagcatgcaggaaaagtatcagaaatccactttgttgtcttacgatgatcctagttctatgcctattcgccaaccctaccagacacctggtgtaaagtcatcttctggatctgtcatatccttttttgagtatggtgcgaataattctttgtccagaagctcttctcctggactgactctttctcttacaactggtttggctaatgactctatttcagcaggcagagcagcttgtgcaggcagccttacaaatgcagatggtaggaaagctgctagctttgccgaaccaataggcaatagatcagtttatgcagataatgtttcacagcaacctgcgaggccaataagcaacagaacagcttatgcgacagataatgtttcacaacaacctgcaaagagacaagttgttacagatagacatgattttatgtctatgggcccaaacattgtgaaccattcacctggctggtcacttagtgatgcagttggtcctcaggtacttgattttagtaaaagagtagcaagagatgctgttcaaacgtcaagaaatgaaagcaacaatccaagggccagttccggtccagttctgcctattgaaacatggtctaggcctggcgtggttgcaggggctaataacatgttgaagccaggtcaaaacctgaacgatcattccaaactgctatactccacgaaatttcctgttgatagtgctatcaattcagttgtattatagcggaaagcaagaataataataataaggcgtccttgttgaagatagatctggagtttttcaggattcaaacagtcaggcacaggacacttgtaagaggtctacgtttctgaacatgttagtttagcaattgatagattgctttattcttctaatttccccggtcaaatgtgcaaggttatttgattgtttgattacatgtcatgccatatctgacaaaagctggaggacagatcaactgtacagattgtaactagttgagtgcttttttggggcacttgatttctaagactaagcagcatttgctacgaacccacttgatgggcagcagttcaatttcagagatgatgtattgtactgtttgatcttgaaagcaaagcataaagtttactttcagccagtttctgtaaaccatcatacaaactttcggatgctgcacttgattggtttgcaattattagccactgctgttacaaagctgcatgtttcacctttttttggctttcttacatctgaaagatagtcgaaaagaacattcagaacgaaatggtccttttaccagattcatcagtcctggcctttatggttaaaaaaaatcagcttcggtgcaagtgatagctgctggcttcttgattcccactgttgggagccctctgacccttacaacctaggaaaaagttactggtgaacgcagttgcttcagacctttgcaactgcaatgttcttggctttccttgaaccaagagtaaagaaagctttgcatggtaatcg

SEQ ID NO: 23019 - DNA, 1449 bp, Zea mays
  Clone ID: MRT4577_120997C.1
cactccttagggcgattgggttcctcgaggccggccgggactcaccgggccagggccagagaagcggcaaagcagagagtcggcgaggacgagactacgagaggaggaggagcgcgtgtgctttggtttggagcgagcgatggtgttcgcgtccgggtccgccgccggcgggccgcaggtgctgacggcgcggttcgtgcggcaggtggtgcagggccggtggttcatggtgttcgcgtgcctgctcatcttgtcggcgtcgggcgccacctacatcttcagcatctactccaaggtgctcaagtcgacgctggggtacgaccagcgcacgctcaacacgctctccttcttcaaggacctgggcgccaacgtgggcgtcatttcgggcctcatcaacgaggtcacgccgccgtgggtggtgctcgccatgggcgccgccatgaacctggcgggctacctcatgatctacctcgccatcgacgggcgcaccgccaggccccccgtctggctcatgtgcatctacatctgcgtgggcgccaactcccagtccttcgccaacaccggcgcgctcgtcacctgcgtcaagaacttcccggagagccgcggcgtcgtgctcggcctcctcaagggcttcgtcggcctcagcggcgccatcttcacgcagctctacctcgccatctacggcgacgacgccaagtcgctcgtgctgctcatcgcctggctccccgccgccgtcaccatcctcttcgtccacaccgtccgcatcatgccgtacccgcgcgccagccgacgccggggcccgtcagcggcagccaccagcaacgacgccttcttctgcttcctctacatctccatcgcgctcgcgacctacctcctcgtcatgatcgtggtgcagaagcaggtcaacttctcgcacgccgccttcgcggtctcggccgcggcgctgctcctcatcctcttcctgccgctcgccgtcgtcgtcaagcaggagtacaagatccagaaggagctggaggagtccctccgcgaggaccccacggtgaccgtggagaaaccggccaccgcagcttcgctgcagctggtggcagcagcagcagcagcacctgaaccagcggtggctcagagcatgactacgggaacagaggccaagccgtccagctgcctggggtcttgccttcggcacatgttcagcccgccggcgcagggggaggactacaccatcctgcaggcgctggtgagcgtggacatgctggtgctgttcctggccaccatctgcggcgtgggcggcacgctgacggcgatcgacaacatgggacagatcgggcagtccctgggatacccggccaagagcatcaacacgttcgtttccctcatcagcatctggaactacgccgggcgcgtcaccgccgggttcgcgtcggaggtgttcctggcgcggtacaagttccc

SEQ ID NO: 23020 - DNA, 330 bp, Zea mays
  Clone ID: MRT4577_120998C.1
accgacccacgcgatcgtttattttctcctttgctgccaacgaatgctatgaccaactggagagtgctaagaatgtggcatggatgggcagatgcttgtgtgtatacatcagccacaacatttcgcatggtgtactgaacgggagcaagctacacaatgcctcgaatgtgtatcatttgctcacaaccaacgtcagattgcagaacaagacagtcatgcatgctgagaattgcaccatgtatttggctataattcggccaataggatccattctgggtattgtactccagcatggtgagctgtactacagatgcgtcagcagctcgttga

SEQ ID NO: 23021 - DNA, 749 bp, Zea mays
  Clone ID: MRT4577_120999C.1
cattgggtacctcgaggccggccgtcttcgcttcctcctgctgactcgagcgtccgggatctcatcctctccggtgaatctgccgctccagctgctcgagccgctagctgccgcacctgctcgccggtgctgcggcatgcatgatgacccgtatggcgacgaaacctctattcaagacaaggacgaatctgatcaccatctgggcttcagccgtgctccactgaggacaccccctcacccagtcattagcacctttgacttgcgcttgcagagactatcttgccttatgttatgtctcctacggttatgatacaactatccaacagtttgccctttccctacgagagtatgtcattacctccctgcatcttatgattctcaaacacggttctaattactatattgccgctgatcagaggattctgaagagggaccgagcttcgaatgccagaatttactgtctgcttcagaagaaaccaattggtgcgattgacggacttatgcatgtaactgacctctgtgagcaaatgaaggctcatcttgatgtcatccctcacgacatgcatccgatcgaacttgatgtgtggcttcgcctcctgagcgagataactcacgttccttactggattgttactggcacatttcgactctggaaaattgttcagacgaatgatgcattgaacttgtgactgaccactgtacagaacgattgataacttgagtttcttaagatcttgcagtctattaat

SEQ ID NO: 23022 - DNA, 402 bp, Zea mays
  unsure (1)..(402): unsure at all n locations
  Clone ID: MRT4577_12099C.1
attctcgaggagccagccccgtccactcctcagccatcnctctcggtggggggtgtcacacacgttggggaggacgcacctacnnnagagtcgagtagacatgcgagccgatgcgagcagatgcgaatgccataggcttctccaggacgcctggcactcgattgatacgtccctaatccttcgcagctcaggcaggcgccggccccggcccgtcggcaggcgtccagcgaggggaggtgatcgacggtcagcgcttccccagaccctctcactacgatcttcggcgcagcttggagccaggcccattctcggagggaagatcatttgcgccctgctaccaccaagaaagcatccatcgccatcctacgttcgccaaactacaatcaagggcgctgggagcag

SEQ ID NO: 23023 - DNA, 280 bp, Zea mays
  Clone ID: MRT4577_1209C.1
gtaaataccaagttcagggcttgaaacaaaactgttttggccccaatacacgcaaaattagagccatccggtggtcgttggctaaataacgttaccccacggggatactttaataccaccttcattttaaggtttcctacaacaccctacacaaatgcttacacacagccaggaaaaaactaaacggaatattgggaaggaaaaaaagtttcactctatgacaaccagcgcaaaaaagatactggggggctgattactttttttggttaaccctcttcca

SEQ ID NO: 23024 - DNA, 236 bp, Zea mays
  Clone ID: MRT4577_120C.1
acgaacacaggcagacgccggaagggaccgcgacacaagctcaaggagcagcaccaaggagcaggaaggcaaccagagccgacggcgccgacacgcacggcggcagagaccagcaacagggaggccgcaaaaaggcggaggagaacgacacccacaaagacacccacgcaacgtttttttttttccccccccccccccggggggaggaaggggagagggacaccagggggaacgcc

SEQ ID NO: 23025 - DNA, 272 bp, Zea mays
  Clone ID: MRT4577_121000C.1
cgcctgcaggtaccggtacggactggatcgccgagctgactagtcggcggccgcgcggctcgtcctttttttttttttttttttggttgggaatttttttttttttttttttttgtttgttgaacagcgcaacacatgttcataggaatacataattgaaaaataacacggttttattgatgggtccaaaccttcatggtcttttggaagccatgaggatcttttaaaacggccacttgctggagtatacaaattttcggggggggtctttt

SEQ ID NO: 23026 - DNA, 333 bp, Zea mays
  Clone ID: MRT4577_121001C.1
gggccaaaccccattcatccacaggagagcaagccccccgggcccccccaaattacctcggccaaacccccgggcaaaaaaccccaaatttccggacccgttttgaaccctcccccccccttgtgggccccccttttgggttttcccccccttgtaaataacaaacccccccccccccataaaagggggtcaactttggccccagttttgttagcaccaaggccccaaaaaacctcccctttcccgggggccagttaaaggcggctgggttttattgggacccccctaaacccattccgccccccctttggaggggggccctggccccccccc

SEQ ID NO: 23027 - DNA, 764 bp, Zea mays
  Clone ID: MRT4577_121002C.1
aactgggaacaggggatattcatgcaagctgattttcaaacggcaatctttccttgagcgcaaccctcggcaggttgaaggattggttaaggacggtgatggttcgacggtggcaagcctaatgggaaagtgggatgagaggatgtactgcagcgcatcagggcagaatgtgattctgttgtgggagaaaaatgaagcttcgactaatcccactcgctataacctctcatcgttcgcaataactctgaacgagttgactccagaactcaaggagagccttccaccaacggattcaagactgagaccagatcagcgacatgtagagaatggggagtatagtaaggccaatgctgagaagctgcgactggagaggaggcaacggatgtcacggaagatgcaggacaatggttggaaaccaagatggttccgaagggatgatggcacattccgctatgtgggaggttactgggaggcacgacagcagcggaaatgggacggatgtcatgatatatttggtgaattcgtgtgactcaacagtgaggctgctcggagcttatatatatgtgtctaatacaacaagtagctagatagtcgaactggacaattgggctgtacactttgtcgggctgccgtggtccgccacccgcgtcttgccggactcgttggtaacgcgcatggactgtatcaatttggtttgtatgttctaccaatttccatcacatattttgctgtgcattcataattacaccgacatacatatacat

SEQ ID NO: 23028 - DNA, 1207 bp, Zea mays
  unsure (1)..(1207): unsure at all n locations
  Clone ID: MRT4577_121003C.1
ggtaccctccgnggctcggccggcccggccggcagacacacaacgatctagctacttcctctctcaagcccataggtgttgtagagcaactcaactagcaatggcttccaagagcacaatgcgttcccttgtcctcatcatggggctcctgctgctctcgtgcagcggcatgagcagcgcggcgcggctgctggaggaggtggcgcccaaggaggagtacccgcaccctgaagtgccagagctgcccaagcctgagctcccgccgcaccctacggtgccggaactccctaagcctgatgagctaccgccacatccggtcgtgccggagctgccaaagcctgaggtgccagtgcaccccgccgtgccggagttgccgaagcccgagataccgccacattcgaccgtgcctgagctgccgaagcccgaggtgccggagctgccaaagcctgaggtgcctgagcaccccgccgtgccggagctgccgaagcccgagcttcctcctcaccccaccgtgcctgagctaccaaagcccgaggtgccggagctgccaaagcctgaggtgcctgagcaccccgccgtgccggagctgccgaagcccgagcttcctcctcaccccaccgtgcctgagctaccaaagcccgaggtgccggagctgccaaagcctgaggtgcctgagcaccccgccgtgccggagctgccccacccggacgtgccagagcaccctgcttccgtgccggagctgccgaagcccgaggtgcctgagcaccccaccgtgccggagctgccaaagcatgagctgccacctctacctgaacccgagttgccattgccaccaaaggccgagagccactacccggagccagggatggccaagccgtgatcggcctaacactacccggaggccggccggagttagagatgatcacgatgtgatcggcctgcattagtgaacacttcatgtatatgtatttacgtacgtatgctttatactttgatgtctgcatgcgatgttgtggacgtgccccatgcatgcacacaactcgctaggagcgtgatgatgtttgcagttattgcagtagtgtatttgtattccctttgtatgtatgcgtctgtacttttggttataatgtctatacagagtatatccatgtatcatacacaggtttcatttatttatcttgggttaattataaaaaaaaaaccgatt

SEQ ID NO: 23029 - DNA, 2876 bp, Zea mays
  Clone ID: MRT4577_121004C.1
gagcagccccgtggagtggcggcaatcatcgctagcaagacgtgaagagttctcaagcaggaggcgtgtgacgtcagcaaggacaccagtattttcagtggagtggtggcgccagcaggaggccggcgaggggtcttctcttctagtagatgatgattgatgtggacttgaatttggaagttctaggaggagtaggagtatataaactggaggaggagtggaggagaggagagccgaatgcgagcgcgatccatggctccaaatcgaatccaaagaaactagtagaagtaatgcgggcgagggatttgcacccgctgtgctgcctccccgccgccgacggaggaccccctccgcctccccttggtcatgcaccgccggccgtggctgggctgctctacaagtggaccaacatcggcaagggctggcgcccgcgctggttcgccatccgcggtgccgtcctcgcctactccaagattccacgccgctccacgtcggccccctcctccgcctcttcctccacagccacccggatcattgggcacgcccgatacggccacgacagccccgtcggcctcgtgcacctcaagatctcctcgttccgtgaaagcaagtcagatgacaggcggttctccgaaattacatcaaccaatctgatacaactaagaacagactatgctaatgagcgaacggcttggaatgattcccttgtttctgctcgagctgaatctgctccttagcggagttgatagtgctactatgattgtgcatcactttcacttgatggaactagaaatttccagcactggacaggcgatgatgtagtaagagcagcaatacagaatcatctgatgatgttgggcaacaggagttggatgaacttttgaaacaacgctgtgaagaatatgtaagctttctcaagagtttcagtgattcagcaggactttcttgcttgaacatgaaatgttcaaattctggcaaggatacccttctttatggtgataaatttgtgaaaccaaaagctggtacaggtgacagtgagtgcctgccaccgtttttcgagcgtcgcacgaaattgcctgatccagttgagaaggaaaaaagtgctagtctttggtcaatgatcaaggataatgtcggaagagatcttacacaagtatgtcttccagtttactttaacgttctggcaaggatacctttctttatggtgataaatttgtgaaaccaaaagctggtacgggtgacagtgagtgcctgccaccgtttttcaagcgtcgcacgaagttgcctgatccagttgagaaggaaaaaagtgttagtctttggtcaatgatcaaggataatgtcggaagagatcttacacaagtatgtcttccagtttactttaacgaaccattatcatctcttcaaaaatgctttgaggacttggaatattcttatttgttggatcgtgcatatgaatgtggcctaaagggggacaatttgatgagaattcttaatgttgctgcatttgcggtttctgggtatgcttcctcggttgggcgcccctgcaaacctttcaatccattgttaggggaaacctatgaagctgattaccctgaaaatggaatccgtttcttttctgaaaaggtgtattctttgttaaaaagtcacccctttttcgttgctgttaaatcataagaggtgggcttggtcccctgacaagacaaattaatgggctggcaatattaactgaattatgcagtgtgactagtttctaaatcagtattttaattcaatgaaaactaaatcagtatttcagttgaaaaaaataaatattgctgtttcatgacctcagtagaaactatagctggagttcatgttatgatgctgtatttgttgcgataggttagtcatcatccaatggtcatggcttgtcattgtgaaggaaaagggtggaaattttggggagacagcaatgtaaagagcaagttctgggggcaaacaatccagctggatcctgttggtgtgttatctgtagaatttgatgatggagaaattttccaatggagtaaggttacaacaacaattaataacgttatcattggtcaagtttattgtaatcactatggaacgatgagtataactgggaacaggggatattcatgcaagctgattttcaaacggcaatctttccttgagcgcaaccctcggcaggtaaaaagaaatgcagcatcccattttggaatcgatttgatggatgttactaagatgtagctgtatgcaaggttgaaggattggttaaggacggtgatggttcgacggtggcaagcctaatgggaaagtgggatgagaggatgtactgcagcgcatcagggcagaatgtgattctgttgtgggagaaaaatgaagcttcgactaatcccactcgctataacctctcatcgttcgcaataactctgaacgagttgactccagaactcaaggagagccttccaccaacggattcaagactcagaccagatcagcgacatgtagagaacggggagtatagtaaggccaatgctgagaagctgcgactggagaggaggcaacggatgtcacggaagatgcaggacaatggttggaaaccaagatggttccgaagggatgatgacacattccgctatgtgggaggttactgggaggcacgacagcagcggaaatgggacggatgtcatgatatatttggtgaattcgtgtgactcaacagtgaggctgctcggaccttttatatatatatatatataataataataatgataatgataataataatctgggctgcccactttgtcgggctgccgtggtccgccacccgcgtcttgccggactcgttggtaacgcgcatggactgtatc

SEQ ID NO: 23030 - DNA, 1010 bp, Zea mays
  unsure (1)..(1010): unsure at all n locations
  Clone ID: MRT4577_121005C.1
ctgtgcggcgctcgagccggcccggccgggaccacacacaacgatctagctacttcctctctcaagcccataggtgttgtagagcaactcaactagcaatggcttccaagagcacaatgcgttcccttgtcctcatcatggggctcctgctgctctcgtgcagcggcatcagcagcgcggcgcggctgctggaggaggtggcgcccaaggaggagtacccgcaccctgaagtgccagagctgcccaagcctgagctcccgccgcaccctacggtgccggaactccctaagcctgatgagctaccgccacatccggtcgtgccggagctgccaaagcccgaggtgccagtgcaccccgccgtgccggagctgccgaagcccgagcttcctcctcaccccaccgtgcctgagctgccgaagcccgaggtgcccgcgcaccccgccgtgccggagctgccgaagcccgagcttcctcctcaccccaccgtgcctgagctaccaaagcccgaggtgccggagctgccaaagcctgaggtgcctgagcaccccgctgtgccggagctgccgaagcccgagcttcctcctcaccccaccgtgcctgagctaccaaagcccgaggtgccggagctgccaaagcctgaggtgcctgagcaccccgccgtgccggagctgccccacccggacgtgccagagcaccctgcttccgtgccggagctgccgaagcccgaggtgcctgagcaccccaccgtgccggagctgccaaagcatgagctgccacctctacctgaacccgagttgccattgccaccaaaggccgagagccactacccggagccagggatggccaagccgtgatcggcctaacactacccggaggcggccggagntagagatgatcacgatgtgatcggcctgcattagtgaacacttcatgtatatgtatttacgtacgtacagtatgctttatactttgatgtctgcatgcgatgttgtggacgtgccccatgcatg

SEQ ID NO: 23031 - DNA, 1455 bp, Zea mays
  Clone ID: MRT4577_121006C.1
aattcggcacgaggcatggctccaaatcgaatccaaagaaactagtagaagtaatgcgggcgagggatttgcacccgctgtgctgcctccccgccgccgacggaggaccccctccgcctccccttgctcatgcaccgccggccgtggctgggctgctctacaagtggaccaacatcggcaagggctggcgcccgcgctggttcgccatccgcggtgccgtcctcgcctactccaagattccacgccgctccacgtcgcccccctcctccgccacttcctccacagccacccggatcattgggcacgcccgatacggccacgacagccccgtcggcctcgtgcacctcaagatctcctcgttccgtgaaagcaagtcagatgaacaggcggttctacctaattactccagccaagacgctgcagctgagaacagactctgctaatgaacgagcggcttggattgaagcccttgtttctgctcgagctgaatcttctcctgagggggtttattgactaaccagaatgatgcatcattttctacggagaggcttagaaatcgcatgcacgaggaaggcctttggtgaggaaataattaaagactgtgaacagattgtccattcagaattctcacagtatcacacacagatgaaaccacgctgtgaagaatatgtaagctttctcagcaggcttccacagcagtttgaggtacttagcgcagatgataatgctaatatgattgagctccactcgcacttgatgaaacctgactattgcagctctggacagggaaaatgtagtgagagcagcaatacagaatcttctgatgatgttgggcaacaggagttggatgaacttttggatgacgatgactatcaattttatgatacaaggcagagtttcagtgattcagcaggactttcttgcttgaacatgaaatgttcaaattctggcaaggatacctttctttatggtgataaatttgtgaaaccaaaagctggtacaggtgacagtgagtgcctgccaccgtttttcaagcgtcgcacgaagttgcctgatccagttgagaaggaaaaaagtgttagtctttggtcaatgatcaaggataatgtcggaagagatcttacacaagtatgtcttccagtttactttaacgaaccattatcatctcttcaaaaatgctttgaggacttggaatattcttatttgttggatcgtgcatatgaatgtggcctaaagggggacaatttgatgagaattcttaatgttgctgcatttgcggattctgggtatgcttcctcggttgggcgcccctgcaaacctttcaatccattgttaggggaaacctatgaagctgattaccctgaaaatggaatccgtttcttttctgaaaaggttagtcatcatccaatggtcatggctcgtcattgtgaaggaaaagggtggaaattttgggga

SEQ ID NO: 23032 - DNA, 520 bp, Zea mays
  Clone ID: MRT4577_121007C.1
cgactaatcccactcgctataacctctcatcgttcgcaataactttgaacgagttgactccagaactcaaggagagccttccaccaacggattcaagactgagaccagatcagcgacatgtaaagaatggggagtatagtaaggccaatgctgagaagctgcgactggaaaggaggcaacggatgtcccggaaaatgcaggacaatggttggaaaccaaaatggttccgaagggatgatggcccattcccctatgtgggaggttactgggaggcccgacagcagcggaaatgggacggatgtcatgatatatttggtgaattcgtgtgactcaacagtgaggctgctcggagcttatatatatgtgtctaatccaacaagtagctagatagtcgaactggacaattgggctgtacactttgtcgggctgccgtggtcccccacccgcgtcttgccggactcgttggtaacgcgcatggactgtatcaatttggtttgtatgttctaccaatttccctccc

SEQ ID NO: 23033 - DNA, 572 bp, Zea mays
  Clone ID: MRT4577_121008C.1
acaacgggaatacaaatacactactgcaataactgcaaacatcatcacgctcctagcgagttgtgtgcatgcatggggcacgtccacaacatcgcatgcagacatcaaagtataaagcatactgtacgtacgtaaatacatatacatgaagtgttcactaatgcaggccgatcacatcgtgatcatctctaactccggccggcctccgggtagtgttaggccgatcacggcttggccatccctggctccgggtagtggctctcggcctttggtggcaatggcaactcgggttcaggtagaggtggcagctcatgctttggcagctcaggctttggcagctccggcacctcgggctttggtagctcaggcacggtggggtgaggaggaagctcgggcttcggcagctccggcacagcggggtgctcaggcacctcaggctttggcagctccggcacctcgggctttggtagctcaggcacggtggggtgaggaggaagctcgggcttcggcagctccggcacggcggggtgcgcgggcacctcgggcttcggcagctcaggcacggtggggtg

SEQ ID NO: 23034 - DNA, 403 bp, Zea mays
  Clone ID: MRT4577_121009C.1
cagacgcgtcgttgcactactgtgagtgattatatgattagtataggatgcttgtggggggctttctagcagttcaagctgatgcatcctgtaaatactaatgcggtatgctagagactatgggatgtctagaccctgaactgtaaggtgattccattgcttcgtacccgtttacagataatctacgtctagtatgtctctatcaactgatagtttgactggtgagagtagtgcggtagaccacctgaattgtatggtatcattattgattgacatatgtgagcctactctgcagcctgctggtccagagtgctcaattgcagcagagagtacaggccgtgcactcacacgctactaagagttagatagtttcaacaaagttagatctgcaaatcaggtacgc

SEQ ID NO: 23035 - DNA, 391 bp, Zea mays
  Clone ID: MRT4577_12100C.1
catgtgggtgccatgtggtaccaaacaaccgggcgctgtacagaccacatgtcaccggctgccatgctgttctttacggtagacggtgacatgcgcatgccatagggtccaatgcgctcgtcgttaaatagtctggttgcatggagatttgctcctaactttatggaggacatacatgtggggggggggggtgaaggcattcttatgtggtatgtgctgtaatgtcgatagtcatcatcatcccgttgttgagaagtacgtgcgctacttcttaacgctattatgtcttttcggcgtcttttctacatgatgcactgccggtcttcgctggatggtgttgataatattactggggagattgtgctcatatgcttgatgtttttcattgact

SEQ ID NO: 23036 - DNA, 361 bp, Zea mays
  Clone ID: MRT4577_121010C.1
gccggaacgacattcttactgaatgtcggctctcgcatttaccaagaacgtagcaaaatgcgatacctggtgtgaattgcagaatcccgcgaaccatcgagtttttgaacgcaagttgcgcccgaagccttctggcggagggtacgtctgcctgggcgtcacgccaaaagacaaaaaaaaaaacaaaaagcttttccttccatggatccccctcgctagctgagcccgctggtgctcacggtcgcgcatggtgagagcggactcaccggcgacacaccaacgatggacctcccgctgatggatctgcccttcaccttcctgacgctgctcattgacacccgcctcaactacaactactatg

SEQ ID NO: 23037 - DNA, 514 bp, Zea mays
  Clone ID: MRT4577_121011C.1
gaaatattaaaaggtcatgtacctcatattgaaatgaacataaagtaaggatggttgtacaaaacacatttaccaaccaccttgtaaaatgagtgaggttagactcctgccggattgccattttcttgtacatcaagcactcacaacagttttatttacaatagccttaacaggcctgtgtgagttaacaacagacttggatatggcttgccatttttcaccatgctttgtttttgatgcaacacattttttaaaaacatccttataccaggccacatttatatgctgcagtataaatttgtagtacaacgcccacaagtcaccaatttaaggagcatgagttacagttgtgtccaaccaattgctaactttagcgaccttcttgtctagcctgaaaagcatggccacagttgtgatgacatgtggatcatgatcacttccattaatagcggctggactcaccacattgcgctgtgggcgaggagccatctcattagcggaattccacataata

SEQ ID NO: 23038 - DNA, 631 bp, Zea mays
  Clone ID: MRT4577_121012C.1
cctcgaggccggccgggaaggactccgtggtctgtctccatctcgtacgtcggtcaccgcggaatctacgctacgactaatgatggcgtgcggcaccggccgcgacccggtcgcagccctgcgcccggcgtcgacgtcggccttccttggctactctagccgactcggccgtactgctaccgcgtcgccgacaaggctgcagcctcaaggcggaggccaaggtacgagtggctcccgggccttccctcccccgcctacctcgaccttagcctgccgggtgacaatggtttccacccgctggtactggcggaggacccgcagaacctgaggcggaacctgcagtcggagctggtgaacgaacgatgagatatgctgggggtgggcgggatgctgataccgaagacgctgaccaagggcgaggtgatcaacgcgacgcagggcaaagacgccgataaggcacaatacttcgcgtcgtcggcaacactgtacgagagcgactcgtactgtttcactacgtgaacatctaccgctgctcggacataaggatacccgtgaagaacagcatggacacatctccaaaagatacccgctgccgcctcacgagctgcggactacccccgacaacgacttc

SEQ ID NO: 23039 - DNA, 740 bp, Zea mays
  Clone ID: MRT4577_121013C.1
agttctcgcgacggcggccgccatgagagccctcctctccctctccaagcttgcccgtcgtctccccacctccctggccgccaccagggtcgccccgcccctcctccaacggcaccttcacgccgactccgcacttcctcctcaagctccgcccccttttgcctcccgcatcctccaatccgaagagagcccggacccgagcactgatttggaacatgctcagccggcccccgaccctgtcctcgatgagtttctcgcccgcttggtcaccgcgctccgtccgacacttgcggccgccttccccacccacacccgccccgtgctcgacgaaatgcttcgtcttatcgcggaggccgtcctcaaccgcctctccggagccgatccggggccagacaccgtcgagctcagcgacgacctctgggcggcggtgtgggaggtcagcgcctccgtgcgcgaggccatgcgccgggaccaggtccgcgccgacctccgtaactacctccactccgacgatgtcaaggagatgacgcggttcgccgtcgacgtaggcatccgcggcgctatgctccgcgagctgcgcttcaagtgggcccgcgagaagctcgaggaggtcgaattctaccgcggcctggaggttatgcgccaacaggctgatgcggctgatagccctgcggcacccccgccggcgaggctaaccgcgttgccgcagaggaagggggaggttaagttccagatctctg

SEQ ID NO: 23040 - DNA, 1527 bp, Zea mays
  Clone ID: MRT4577_121014C.1
cctaaacatagatagtggcatatctctaaccatggtaccggtatagttttttgaacagtaatagtacgcttaaaatggaagaattataatgatacagaactaatagccctagtatcaaagaaagatgattttctattgttgataatgttatgttaattaagtagggacacgcacttgcaccaacacatctagcttgtcaatttcaaccgtgtgtgtcattttctgtacgatgcaactgggtttagaacgattgtcactaaactgacacaacatccatgcatggtcatgctatgtctaaaaaattctcttaaaacgatccatatgtgaaattgtaggtatcaacaattaatataaaactggcagcagaataaatgtcaaacccgggcgcgtgttgtcaatcggaaaaaagaaacaaaaatgtcctttctgtgaattgaatggacgcttgtacgtacgcccacacctccgtctcttaattttcttctttgaaactgtggtacatgctgcaccctgcaaatcgtcttgatggtcagtaagtacaacttgacgttcttgtttcgaaacgtggaattgggtgccgtgccatctcattagtttcgggaaaaaatactagtgcatgcctttctctatcggagatgaaaactgttacaagaaggtgtgtgctggtgaatatgtttacgaaattaccgtacactggcttgaaacgaaatgtgtgtgtccaggtaaagagatggggataacagacttcatcgaccctaacgacatctgtgacaaaccggtccatgaggtgatcagggagatgactgacggaggtgtcgactacagcttcgagtgtaccgggataaatgatgtgctgagagaggccttcttgtccacgcatgatggttggggcctgacggtggtgctagggatccattcaacgcccaagatggtgccgctgcacccgatggagctctacggccgtaggatcaccggctgcgtctttggcgacttcaagggcaagtcccagctgcccgacctcgtcgataaatgcgtcaacggggaggtcaatataaacttcgatggcttcataacacacaagatgccattctcggacatcaacaaggctttccggttactcgaggaaggcaagtcgctgaggtgcctgctcagtctctgatcgacaatacttcatcagcgaggacagttttggattattgagtagcaaaataaatgtacaaggaaagtttttccctcgtacactcgcttcttataaaacgaatgcatgcaacttctttcgttctttgaagaagacaaaagggcacaattattctggagcaggtattgctaatcattttatcgctggttcactgccgaccaggacaacattcaggcagctttgcttggcgctctgatcctcccagacctaggattctgctggcaccgtctcaactacagtttcgtttgcatttaataaactttctataagcattttttaatgatataacgaagtttttaacttttaaaaaaaaaaaaaaaaaagcggcc

SEQ ID NO: 23041 - DNA, 555 bp, Zea mays
  Clone ID: MRT4577_121015C.1
gcatgcaactcattatggggtagacagctgtgactcctgattgctccgtaagcaggtattacaggtgcgaccgacgcgtccggactgacgtctaaggttcacgaggagaccgccgacgggctcgatcgagctcgtttaaacatgtataataggcgagcgtgggtctttgtcacacttatcgccgagaatattgcgtatagtatcaactgagacaaatcaggatcttgtctggagaacgacctatcagcacagtaatatatgagcttgatcttatttcatacgagaaggtgctgacctgactgatattcgtgtctggtctaaatcattgacctgtgagcaactgcacatgactgatattcatgtctgatctagatcgttagacctgtgtgcaattgcaaaacagatcaatctaatctggtcacacaagccaaggacgccgtgggacttgaaccatgaagagaagattgaggctgctggcaaaaagaaagaggaagggaatgctttggtcaaattcgggcaaatattgctaaagcttccaagcgatatgagaaggct

SEQ ID NO: 23042 - DNA, 464 bp, Zea mays
  unsure (1)..(464): unsure at all n locations
  Clone ID: MRT4577_121016C.1
atcgagaaaaatctcaatcaatatattgattatttttaggaaacacatgccgctttgagggccccattatcgagtacatctcatatgtaatctaaaagatggcccccccaacgatgggttgctgccaccacaaggcagggttcatcaaaaaaaactggttgtatggcaacaattgttgctgctgtaggaaggcagcgaccaatgggttagccaccgctaggggattaaataactggtggccctgttggagggacccaacaaagttcgacacaatcagttggttgaatggaagtagttgttgcaaggaggcaacagggtttgccccagctagctgagtaaaagccgggacaatttggtgcagcaaccggtggtgcaacaaccgttgttgcaggtatgtaggggccttgcccatagcgagcgggctaaatgaaaaaaattgttgctgttgtngggcggccataggg

SEQ ID NO: 23043 - DNA, 1098 bp, Zea mays
  Clone ID: MRT4577_121017C.1
tattatagtgaatagatggtgagagactatgcatttgagacatgcaaattaacaagactcatacaagcgcgttcgagccccagcctttgcatatcatacacatgctcaggtcttaacatgtttggcttccgagcaaactttctccagatcccaaaaaatataatatccgatcaaatatgtgtcgatgctcatcctaacatactcccgttgcaacgtacgggcacacacctagtatatacataaggacgaggttccatgccctcctactcagcgtatagcaggatgaggaaattgatgatgcgcagcaggaagtagaagacaatgatgtagagccatttgacaccggcccagccccatccaatgcccttaatagcagcaaatgcccagttggcatatacaacaatcagagtggcattctgcaaacaccataaaatgtaaggagacgcggaaagaccacatacaacagtaaggtatggaactagagtcggatgactcagcagctgcgccaccaagaaggcaaaggttagcaagaacctaggacggtacacaaatgaccagttgcgagcgtgcgaaaccgtgtaagttaagggccctgattgattgtgctgacttgaaggtacatggcagaggaaagcgtatgaaaatcaccctggggaaattttctcaaggcttttgacatggaacaatttctgatattaggcaaagccatcagccttctcggtcaattcatcaattggcaatgaagcaagtgactcatccttacatttagtacccattcccaaacgacgtgttgtttccttcccaatagcaagttgatcacccttgcaaccttggagagcgtgggccagcgcttagcgtcgacgactgcagtgcagttcggggcagggtgcttccaggtggagtgcttggccagggagacggagggagatggggacagggacagggagaggtgctacggcgtcggatcaggtgaggaggtggcggcgggatgctccatagccggctagggtttggcacaggggataggatggatggatcgctgctccttttgggcgatggcgggtgggggaggccgggagggacgtcccccccggccgg

SEQ ID NO: 23044 - DNA, 2153 bp, Zea mays
  Clone ID: MRT4577_121018C.1
ctagaatctggaggatgacacacaagtgaggaaaaaagacacgtctcatgttgggtcagccatggggacgtccctcccggcctcccccacccgccatcgcccaaaaggagcagcgatccatccatcctatcccctgtgccaaaccctagccggctatggagcatcccgccgccacctcctcacctgatccgacgccgtagcacctctccctgtccctgtccccatctccctccgtctccctggccaagcactccacctggaagcaccctgccccgaactgcaccgcagtcgtcgacgctaagcgctggcccacgctctccaaggttgcaagggtatgaagctcctagactcctcggatcccttacttgcgcccatcgctgcccaatcggtcagatcccttctctttgcgttcgttggtgtttcgtgccgccggcatggcctgcgtggtgacagtgagtgcagggccactcaatcttgatgtcaatgacaagatgattacaggtgatcaacttgctattgggaaggaaacaacacgtcgtttgggaatgggtactaaatgtaaggatgagtcacttgcttcattgccaattgatgaattgaccgagaaggctgatggctttgctagagtctttccagcttggttttatgcttcttgcgctgatatggaagtttgacttcccaacatttaccgtccagatcattgccatcctcaatgacgtacaagcagcatattaggtaaactaacaacatcaacctggcgacatgaataagtaccattgtggctatctcgaaggacatagtaaaaccacctgcacaactggacagttggaaagttatttggtcgtgatgactgtcattttttcttctgggctacgtacaagactgacttcttctcgatgcaacgtcagcacggtcagtcaggcccttatcgtgacacggcagctggtcgtttgtggagcgtggttcttgctggtcttcgctttcttggtggctaagctgatgcctctgatcgctgtatatgccaactgggcgtttgctgcgatcaagggcattggatggggctgggccggtgtcatctggctctataacatcgtcttctacttcccgctggacatcatcaagttcctcatccgctatgcgctgagtgggagggcatggaacctcgtccttgagcagaggattgcgttcacgagcaagaagaatttcggcacggaagaaagggagcgcaagtgggcgcatgcgcagaggactctccatgggctccagccgccagaagcatccatcttcgagaacaagacgacattcaatgagctgaaccagctcgcggaagaggcccgcaggagagccgagatggcgaggttgcgagaagtgagcaccctgaaggggaggatggagtcagtggtgaagcagaagggtctggacatctagaccatccagcagtcctacactgtgtgactgactgactgacgacgacggggtttatagaggtttcttcttatactatacaatctgtactaggtagcaataaggatcaaggaaggaacccctatatattggctgcggttcgcaggaaatgaatgatggtaatatttatgatgtcggtgtggtgcttctgtcgccaactctcgaccatactaccctcaactcacccccggcaccaccggcaggcattgatattcagagatgaggtatagtagtctgtagcctctagtagatgctgatgaattgatgatatagtacatttttgcttgctttcttgctaaaaaaaaaaaaaaaaagaaaaaaaaaaaaaaaaaaggcccctaaaggcccaaaagcaccaacaaaaagggccctttagcgcggttaaactccagcccttggccccttcatggacataaatgtgccccctgggacaaagcatggccatcacaattccccacaacaaacgagccgtccgcccacagtgccacacaccggacggcctcaagagtgaactaactaaccctagttgcgcttaagcgcactgcccactttccaaaatggaaacctgcccacccccctgctttaatgaataaaaacccgccgcgccgagagcattaatgaatattgcaccccccgccgcgagctcgcttactgactggctgctcttgggctttcgggtgcagtgaccc

SEQ ID NO: 23045 - DNA, 1500 bp, Zea mays
  Clone ID: MRT4577_121019C.1
ttgggaccctcgaggccggccgggactgtattcaggcaggcaggcatcgacgtgcccacctcgttccgctctgacgtctgagatcgcgagatcgggaacccctgcccgtctgctccggaatctcgcccgcacgaaacttccccgacccatcgaccacaccagccccatcccctccgtcgctcccaagtcccaactgccgccacctctccgcgagccgacgccgacgcctacggtcaccaggacagagggacggctgctaccgcgggagtatgggggtggactactacaaggtgctgcaggtggggcgcggcgcctctgacgacgagctcaagaaggcttaccggaagctggccatgaagtggcacccggacaagaaccccagcaacaagaaagaagcggaggccaagttcaaacagatctcagaggcatatgaggtgctaagtgattcccaaaagcgggcaatctatgatcaggccggcgaagaggggcttaaggctcaggtcccacctactggagcaggtggtcccagtgggtcttccttctatggagggaatgcatcgacattccagttcaaccctcgcagtgcagatgatatttttgctgagttttttgggttctcaagcccattctcaaccatgggtggcatgggcggaggtgctgagagaggcatgaggggctccaggtttgggatgttcggcgatgacatatttgggtcccaccctcagtttcctggtgaggcatcaatgcatgttccacagcggtctcagaaggttcctccaattgagaatcggttgccatgcaaccttgctgatttgtacaaaggtaccaccaagaaaatgaagatttcacgagaggttttagatgccagcgggagaactttggttgttgaggagatcttaacgatagatataaaacctggatggaagaaagggacaaaaataacatttcctgaaaagggtaatgaggctcctcatataattcctgcagatattgttttcataattgatgagaaaccccatgatgtattcacaagagatggtaatgatctggttatgactcagaagattactttggctgaagccttgacagaatgtactgttaatataacaacattagatggtcggaatctgacagtgcagataaataatatcatctaccctggctatgaggaggttgttccccgagagggaatgccgattcagaaggattcttcaaagaagggaaatcttaggatcaaatttagcattaaattcccctcgaggctgacctcggagcagaaagcagaaatcaagaggctactaggttcataaggagcatgcacaaccttttttttttctggtgacgcaatgctgtatccagtgtacattcagatgttaaatgtgaataccagcaaagtctcggtttccttaaactgtgccagttcctttggcatatggatgttttgagatgcaaagttgaattgtttcattttcggggaataacattctcttgtactaaaaa

SEQ ID NO: 23046 - DNA, 1726 bp, Zea mays
  unsure (1)..(1726): unsure at all n locations
  Clone ID: MRT4577_12101C.1
tacctcgaggccggccgggctagagcagggctaggcgttcccgggcagcctgctccggtcctcttggagttgggcctgcccacctcccggccggtccgccgcgcggttccagtttcgcctctcgtcgccggtcctggcgagccccgcctccttgatctccgaccagcagcttccccactgcccactccccagccccggacgtgcccttcgccggtgctgtcatggcgttcggccgacggagccccgggtcctcgcggcaccctcccgcgctcaccatcgtcacggcgctactcctcgcctccctctactccgccgccgcggcggcggctctatcgcccaccgacgcgatgcacaacaacaactgggccgtgctcgtgtgtacctcccgcttctggtttaattatcgacacatggcgaatacattgtccctatacaggactgttaagagattaggaatacctgatgagcgaatcatacttatgttggcggacgatatggcctgtaacccaaggaacagctatcctgcccaagttttcaataatgagaaccaccagctaaatctctatggtgacaatgttgaggtcgattatcgagggtatgaggtgacagttgaaaatttcttgagagttttgactggccgacatgaaagtgctgtaccaagatcgaagcgtcttcttagtgatgaaggaagtcatatacttttgtacatgactggacatggtggtgatgaatttttgaagttccaagattctgaagagcttcagagccatgacttagcagatgctgtgaagcaaatgaaggagaagcatagatttaaagagctgctgataatggtagatacctgccaagctgctactctcttttcacagcttcagtcacctggtgttttggcgattggtagtagcatgaagggtgaaaactcttattctcaccatcttgattcagatgtaggtgtttctgttgtggataggtttacctattatacacttgctttctttgagaaactgaacatgtatagcaatgcctcactgaacagccttttcacctcatacaatccttccatgctgttgtctactgcatattatcgaatggatctttatgaacgtcccttaaatgaggtgcctgtgacaaatttttttggatcagtcatgaagactctccacactgattcagcctacacaggtttcttggctgcgcatgacaatgaaactccaatgtccacgggagataaccttgatgatcatttcatgttaaagggcagggctatcgcacgaagatcaaccatagaaaaggaggcacaattaacaccgcatggatggactgaagttctggctgaacagctggagggaaagaatactgatactgttgtgatgtatggtctgggagctatgggtatactgttggcactttcaacctggttatcaatgtaggcaccaaaaaagtgtggttcgtagtctcttacgctatccatctctggtccgcgtgcgagagagagaaaagagataatatgtttgggaggtcttttagattttttctcttggtttttaaattcattaacgatgattagagttctttagaaaatgctgtatgtagttctttagggattactgtgttatcgttttatttatttaacatgatcttttgggaaagacttgtgcatatggaagtttggttatcttgatagccatttgagtagnnnnnnnnnnnnnnnnnnnnnnnnnngtgc

SEQ ID NO: 23047 - DNA, 2708 bp, Zea mays
  Clone ID: MRT4577_121020C.1
ccccgacccatcagtagagggcggcggctgcctcctcttcctacccgcgtccgagctcgcccccttcctcgccaccttgggaggcgacgagcatcaccaggacaccaggttgcctatattttcttccccttcttgaaaatggatcatagttctgacgaagatacagaaatcagtgattctgagattgatgattatgaaggaaaaatttatgcaagactgatgtcaggagatttaaaattaaataagaatggagaaaattacatttgtcccttctgtagcagcaagaagaagaattacagtataagtagcttgatgcaacctgcgccaccttgggaggcaacaagcatcagcgagacacaaggcaagctatgttatattaactttattgaaaagggatcatagatctaactatgatacagaaatcagtgattctgagattgatgcttatgaaggcaaaaattatgcaagactgatgtcaggagatttaaaattaaataagaatggagaaaattacatttgtcccttctgtagcagcaagaagaagaattacagtaaaagtagcctggttcaacatgcctcaggagtcagtgcagcacctaatcgtgaggcaaaagaaaaagcagtccatcgcgccctcttcaaatatttgaagaatggtcttgctaaatcacctgaaccagggtcacatgcaactcctgtggagccacaacctcttcagaaccgagacgagaagtttgtgtggccctggatgggtgtcctagttaatgtgcctactgaatggaaggatgggcgccaaattggagaaagtggaaatcgtctgaaggagcaactatcacacttttgcccactgagggtcatcccgttatggacttttagaggtcatacaggaaatgctattgttgagtttggaaaggactggaatggtttcagaaatgcgcgtacctttgaaagtcactttgcggcaggaggattcggtaagaaggactggattggaaaaaagaatcaaggatccgagctctatggatggcttgcgcgggctgatctgttcatttctggatatatgctggcgctcctattgcggaaaaatggcgacttgaaatctgtcaatgatcttgcaaaggaaggagcgcgtaaaaatgacaggcttgttgctaatttagctaaccaaattgaggtgaaaaataggtatttacaggaactagaatgcaaatacagtgagacaactgcatcacttgagaagatgatggggcaaagggaacaacttctccagtcatacaatgaagaaattagcaagatgcagcagctagctcgcaggcattctcagaagatcattgatgagaatcaaaagttgcgttctgaccttgaggcaaaaatgaatgatcttgatgtgagatccaagcaactcgatgagattgcagcaaaaagcgattatgacagaaggagccttgagcaggagaagcaaaagaatgctatcaaatcgagtcatcttaaattggcaacattagagcagcagaaagctgatgagaatgtgctgaagcttgtggaagaacaaaaaagggagaaacatgctgcgttaaagaagattctgatgttggaacaacaattggatgcaaaacaaaagcttgaattagaaatacagcagttgaagggcaaactaaaagtgatggagcatatgccaggtgatgaagattcagcgtcaaagaataaaattaatgagctgagtgaggcattgcaagaaaagatagatgaactggatggaatggagtcacttaaccaaactctggttatcaaagaaagcaaaagcaacattgaactgcaagaagctcgcaaagagctagaaaatggcctgcttgatctttcaggtgggcagacacatataggaatcaagagaatgggagagcttgatctaaaagcattttcaaaggcatgccaaaaggagcgtacagaaaatgcagaagttactgctgcctttctttgttcaaagtgggaggctgaaataaaaaatcctgactggcacccttttagggtcgtcacaattgatggaaaggagatggcaataatcgaggatgatgcaaagcttcgagcactcaaagaagaacatggagaagaaatctatgcaatggtgacaaaggcgctgcttgaaaccaacgagtacaaatcaaaaggcagctaccctgtgggggagctatggaacttcaaagaaaaccggaaggtgactctgaaggaagctgtccagtttgtcctgagacagtggcgaacaaacaggaggaagcgataagctctcggctacccaatgctcttggctttttttccccaccacctggtccgaaagccatgagttcgagagctagtaacctggaaacagtagtattaattcgtgataaaatcaacagggcgatacagccctgtggatctgttccttgttggatataagctggcactcctattgcagtgtcagcatcagtggactcgaacgccattatggcgttatccttgtgccacctttgtaacaagtagttcgttcttgttcttgaaccgtgtgttgtagttggcccttggccgcatgctaccggctctgtacggctgtgcctacaaagttgtggtggaacatgcagactcataataaagcatgcttgggctcttgtgatactcaaaaaaaaaaaaaaaaaagggcggccggctactagggagctcatcgacccgccaat

SEQ ID NO: 23048 - DNA, 512 bp, Zea mays
  Clone ID: MRT4577_121021C.1
cgccgctccggcattcccgggttgggtcagccatggggacgtccctcccggcctcccccacccgccatcgcccaaaaggagcagcgatccatccatcctatcccctgtgccaaaccctagccggctatggagcatcccgccgccacctcctcacctgatccgacgccgtagcacctctccctgtccctgtccccatctccctccgtctccctggccaagcactccacctggaagcaccctgccccgaactgcaccgcagtcgtcgacgctaagcgctggcccacgctctccaaggttgcaagggtgatcaacttgctattgggaaggaaacaacacgtcgtttgggaatgggtactaaatgtaaggatgagtcacttgcttcattgccaattgatgaattgaccgagaaggctgatggctttgctagagtctttccagcttggttttatgcttcttgcgctgatatggaagtttgacttcccaacatttaccgaccagaccattgccatcct

SEQ ID NO: 23049 - DNA, 745 bp, Zea mays
  Clone ID: MRT4577_121022C.1
ggagaagcaaaagaatgctatcaaatcgagtcatcttaaattggcaacattagagcagcagagagctgatgagaatgtgctgaagcttgtggaagaacaaaaagtatgtaccttggctcctgtgatatgatgctttaggtttcaaacaatgtgtcctatggtagtcttactgtatggaaactacagagggagaaacatgctgcgttaaagaagattctgatgttggaacaacaattggatgcaaaacaaaagcttgaattagaaatacagcagttgaagggcaaactaaaagtgatggagcatatgccaggtgatgaagattcagcgtcaaagaataaaattaatgagctgagtgaggcattgcaagaaaagatagatgaactggatggaatggagtcacttaaccaaactctggttatcaaagaaagcaaaagcaacattgaactgcaagaagctcgcaaagagctagaaaatgtatgctattttaccaataagatctatgtgactaatattgtccatcagatttcattgttatccatcttttgttctatggcatgctccacagggcctgcttgatctttcaggtgggcagacacatataggaatcaagagaatgggagagcttgatctaaaagcattttcaaaggcatgccaaaaggagcgtacagaaaatgcagaagttactgctgcctttctttgttcaaagtgggaggctgaaataaaaaatcctgactggcaccctttt

SEQ ID NO: 23050 - DNA, 1921 bp, Zea mays
  Clone ID: MRT4577_121023C.1
aaaagacacgtctcatgttgggtcagccatggggacgtccctcccggcctcccccacccgccatcgcccaaaaggagcagcgatccatccatcctatcccctgtgccaaaccctagccggctatggagcatcccgccgccacctcctcacctgatccgacgccgtagcacctctccctgtccctgtccccatctccctccgtctccctggccaagcactccacctggaagcaccctgccccgaactgcaccgcagtcgtcgacgctaagcgctggcccacgctctccaaggttgcaagggtatgaagctcctagactcctcggatcccttacttgcgcccatcgctgcccaatcggtcagatcccttctctttgcgttcgttggtgtttcgtgccgccggcatggcctgcgtggtgacagtgaggtatgaggcggagctgacgttgatgcaaaattcatgtacatgaagtgccagatggtacaaaagggagtcatgaaggaccatgacatttcattatcttcttgccatcccccccccccccccccccccacgccatgatagtgcagggccactcaatcttgatgtcaatgacaagatgattacaggtgatcaacttgctattgggaaggaaacaacacgtcgtttgggaatgggtactaaatgtaaggatgagtcacttgcttcattgccaattgatgaattgaccgagaaggctgatggctttgctagagtctttccagatctatgttgaatcaattaccatctgtattgtgcttggttttatgcttcttgcgctgatatggaagtttgacttcccaacatttaccgtccagatcattgccatcctcaatgacgtacaagcagcatattaggtaaactaacaacatcaacctggcgacatgaataagtaccattgtggctatctcgaaggacatagtaaaaccacctgcacaacctgacagttggaagttatttggtcgtgatgactgtcattttttcttctgggctacgtacaagactgacttcttctcggtatgggccagtggctggtttagcattatttaaagttttgagaaatcatcgtagtgtgcccatccttttcatggttgctaatatacagaaattgttccatgtcgaaagccttgagaaaatttcccagggtgattttcatacgctttcctctgccatgtaccttcaagtcagcacaatcaatcagggcccttaacttacacggtctcgcacgctcgcaactggtcatttgtgtaccgtcctaggttcttgctaacctttgccttcttggtggcgcagctgctgagtcatccgactctagttccataccttactgttgtatgtggtctttccgcgtctccttacattttatggtgtttgcagaatgccactctgattgttgtatatgccaactgggcatttgctgctattaagggcattggatggggctgggccggtgtcaaatggctctacatcattgtcttctacttcctgctgcgcatcatcaatttcctcatcctgctatacgctgagtaggagggcatggaacctcgtccttatgtatatatttttttgtctggtagataactactgaagttatgcatgattccaccatataaagtattacaatttctcatttctcctcctgatttttgttgtaacttaacccaactttcctgagactaagggtgggtttggttgcggggcacctaggaatagctaggtcagtaacgttcctgggcgtctcctttcgtccctctaatttcaagggacaactggggataacactgggaccaacctttgaccctgaaccaaataaccttatctggggatcatctcattttgtcctgtaaccttatctgaggattatcttattttgtcatgttctatcattgcaaccaaccgtaccct

SEQ ID NO: 23051 - DNA, 435 bp, Zea mays
  Clone ID: MRT4577_121024C.1
cagccagtcagcctccttttccaaccctatattccaaccctcctatatccacatcgtgtgtgtttgattggatttgatgcgatttgttgcgcttcgtcatctggtcgttgggaggattggttctgccaatcggttcccaacggactcgttcccttgaagctacataattccgttgtatcctgggccggctctttatcgtgtgccttcaattattccccatgaacaggggcaccgcgcggctcttacatacatggctctgttagaatgttgttttgtgctattgtttattcttgtctttcacatgatggctgtttagattttgaaatgatgcttgtgataacagtgacgaatccttacatagttacagatctgtgagattgttgcaagaagatcgcatcattcaaagcacatctaagctgacctgtcttcatttca

SEQ ID NO: 23052 - DNA, 874 bp, Zea mays
  Clone ID: MRT4577_121025C.1
accttatatccctaatttcctgcgcaccgcttctccccacggcgcgccgccatccccgcgcaccttcctgctcgccgccagccccgcgcttccctgcgcgccgccagccccgcttctccccaccgcgcgccgccatccccgcgcacctccctgcgcgccgctagccccgcgcttccctgcgcgctgctagccccgcgcttccctgcgcgccgccagcccttcaccgcttggagacgcgcgcagccgcgcttccctgcgcaccgccactccagccgacagccgcgcttccgtggccgcgtccaccgccgccagctctgtggtcgcgccgtcagccaacccatctgccgtcgtgaggtactgaggttgcctatattttcttccccttcttgaaaatggatcatagttctgacgaagatacagaaatcagtgattctgagattgatgattatgaaggaaaaatttatgcaagactgatgtcaggagatttaaaattaaataagaatggagaaaattacatttgtcccttctgtagcagcaagaagaagaattacagtaaaagtagcctggttcaacatgcctcaggagtcagtgcagcacctaatcgcgaggcaaaagaaaaagcagtccatcgcgccctcttcaaatatctgaagaatggtcttgctaaatcacctgaaccagggtcacatgcaactcctgtggagccacaacctcttcagaaccgagacgagaagtttgtgtggccctggatgggtgtcctagttaatgtgcctactgaatgggaggatgggcgccaaattggagaaagtggaaatcgtctgaaggagcaactatcacacttttgcccactgagggtcatcccgttatggacttt

SEQ ID NO: 23053 - DNA, 490 bp, Zea mays
  Clone ID: MRT4577_121026C.1
gacaacaaccaaaggaacacaaaatgaacgctgcgagacggagtttttccaaacttacaacggtttgtttcatgcggcactgccaagactaatcattcatttcccccacaggctagccagataaaattgaaggcaggttctatctatattggcattatatcacaattcgagagggccccaattccaagaatacacaggggcctagtttctttcataatgggcaaatgagggggtcgagctcgaacaccttctggaccaattccgagtgtttctgcacgtgcacctagtaaaagcccgctacggtagcctccgacagtgccctgccgacgaacttgaatgacataatgcccccccagcccaaaaccttcatgcgcgtgatgcaccggaggctgatgcacttgtacgctcccatgaacatcgggtccatctgggaccacacgaccctgggcttgggaaacttcttcaactcccgctggatgatgatatacgg

SEQ ID NO: 23054 - DNA, 303 bp, Zea mays
  Clone ID: MRT4577_121028C.1
atcaactgtcaacaaaggcaagtggggaatctagacttctacctccacctggcagtaacaagatggcaccctcgcttcccctgacaaagcagtgtcagagaaagctggctaaaacaggcgggttaaataagattcaagtctcagaacatgatacaaacatgtccaggtttcagtaaaaaatcattcattataccaagaagcaaagaaatctccaacagattgtaaaaagaaaaagaacagatatcaagactagaatgataaggatgttagaattacccaacaaatattttacagcagcactga

SEQ ID NO: 23055 - DNA, 523 bp, Zea mays
  Clone ID: MRT4577_121029C.1
cctggccgggagtcgcccgccctctagccttcgtgccgtctgcccgcccgccgtctagtcctctcttcgttctcttcctctcgcgctagcagagcggaggaggaggagaccaaccgggttggtggacgtgggcgggaggtgtgtgcgtgtgtcgtccatggggcggacgccgtgctgcgacagggcggccgtgaagcggggcccgtggtcgccggaggaggacgaggcgctgcgcagctacgtccagcgccacggcagcggcggcaactggatcaccatgcccaagaaagcggggctcaagaggtgcggcaagagctgcaggctgcgctggctcaactacctccgcccggacatccgccacggcggcttcaccgccgaggaggacgccgtcatcatgtccctctacgcccagctcgggagcaaatggtcgctgatagcctcgcagatggaggggaggacggacaacgacgtgaagaaccactggaacaccaagctcaagaagcgcctcctggccgcagcggcc

SEQ ID NO: 23056 - DNA, 808 bp, Zea mays
  Clone ID: MRT4577_12102C.1
gttcgagtcctcttcgagttgggccttcccaccttccggccgcgcagttcgagtttcgcctcttgtcggttgtcgccggccccggcgagttccgcgcctccgcctccttaatcgacgaccagcagcttccccattctgcagccccgcttcgccggcgtcgtcatggcggtcggcagacggagccccgggtcgcaggaccctcccgcgctcaccatcgtcacgtcgctactcctcgccttcctctcttcctccgccgccgcggcagcgtcctcgtccaccggcgcgatgcacaacaacaattgggccgtgctcgtgtgcacctcccgcttctggtttaattatcgacacatggctaatacattgtccctgtacaggactgttaagagattaggaatacctgatgagcgaatcattcttatgttggcggatgatatggcatgtaaccctaggaacagctatcctgcccaagttttcaataatgagaaccaccagctaaatctctatggtgacaatgtagaggtcgattatcgagggtatgaggtgacagttgaaaatttcttgagagttttgactggccgacatgaaagtgttgtaccaagatcgaagcgtctccttagtgacgaaggaagccatatacttttgtacatgactggacatggtggtgatgaatttttgaagtttcaagattctgaagagcttcagagccatgacttagcagatgttgtgaagcaaatgaaggagaagcatagattttaaagagctgttgataatggtagatacctggcaggctgctactctcttttcgcag

SEQ ID NO: 23057 - DNA, 755 bp, Zea mays
  Clone ID: MRT4577_121030C.1
cgccctctagccttcgtgccgtctgcccgcccgccgtctagtcctctcttcgttctcttcctctcgcgctagcagagcggaggaggaggagaccaaccgggttggtggacgtgggcgggaggtgtgtgcgtgtgtcgtttcatggggcggacgccgtgctgcgacagggcggccgtgaagcggggcccgtggtcgccggaggaggacgaggcgctgcgcagctacgtccagcgccacggcagcggcggcaactggatcaccatgcccaagaaagccggtgagcgatcgagcgtgtgctccccttagcttgtgtgtatgtgccatatgtagctagcaagagccatatatgcacaggtgcactgacgacgggtcgatcgttgccggtcggcgtcgcgtgcagggctcaagaggtgcggcaagagctgcaggctgcgctggctcaactacctccgcccggacatccgccacggcggcttcaccgccgaggaggacgccgtcatcatgtccctctacgcccagctcgggagcaagtgagtactgatcgtacacatgtgaatccgagaagctcttcttccttcttcgatcctccaatatcttgagccgagcgcatgccatgccatgccaaagcgtctcccttaatttgaccgatcgacgcgcacaggtggtcgctgatagcctcgcagatggaggggaggacggacaacgacgtgaagaaccactggaacaccaagctcaagaagcgcctcctggccgca

SEQ ID NO: 23058 - DNA, 301 bp, Zea mays
  Clone ID: MRT4577_121031C.1
tgattataatgccttcaactcctctctcctctcctttgcatagatcgataccattaataattacaacgcttgtactaacaatgctgtatccagctgtacattcttcaacaccaaatgcttctactactacacctataacctcttccatgatctatttctaagtgatcttaataagaatcttattcattcaatggtctatatgaatcttacacatgcacatcttttttagattataaattataatccacatgtgatttaggattattaattaagctatgcaatttccaaccatcatatcatt

SEQ ID NO: 23059 - DNA, 267 bp, Zea mays
  Clone ID: MRT4577_121032C.1
aacctcggaattcggctcgaggctccatcctcacaccgagcagagctataatttttttgcacatccgcccaacacctgcgcgcgggtatttaacaaaaaattcacacggcactgctcctgataatgctccctctagctgagaacacaaacacacaacccatctgtaatgactaactggactcagaaaccactttacgactctcagagacaccctaaaatcatcactatccgcactaatggcgacgccatacctaaagccacctgcat

SEQ ID NO: 23060 - DNA, 443 bp, Zea mays
  unsure (1)..(443): unsure at all n locations
  Clone ID: MRT4577_121033C.1
gaacctttgggctgatttatgtgcttgtggatgtgcgggtcagtataagtacagcgcaggggtccggtattcaagcaaggttcgagagttacggtacttaaggttgggtctcctccggtctctaattcttcgcctcctatggcggttaatgttcgtggtagtcgtttgattttaatgtttttggctgagttattgatgctgttcttcgtcgtcattttatttttcctgcttagtggtaagcgtttgtcgaatgtgtctaagcctggtgcgcgtgttgacgcgtctggttctgctaaaggtgaggccggtaaggcgttcgttgagttgcgtcgcatttctactaaaggttccgtggatcctgaagttgttgctcgttctcgtatggntactaaggttaatgcgtctggtgctgctactgacgcttttactaagtctagtgtttt

SEQ ID NO: 23061 - DNA, 296 bp, Zea mays
  Clone ID: MRT4577_121034C.1
tccactcccccctcccgaggtgctgtccatattaagtcgggggcggcaataacaacgcgcttcaagaataaccgcatgaagcgctggcacgtgttctccggtcacggccgcattctcaagcacaagaagcaccctggaggtcgcggtaactccggttgcatgcaccaccaccgtatcctcttcgacaagtaccatcccggctactttcgcaaggttggcatgcgttacttccataagctccgcaacaagttctactgccccgcggtcaacatcgaacgcctcttgttcatggttcc

SEQ ID NO: 23062 - DNA, 296 bp, Zea mays
  Clone ID: MRT4577_121035C.1
accactttcatgtgtggtctctttccccttgaccttgatagtgactgcacgcatagaagttccctttacatccttagtgtaaaggtgaagccttggagctttttagtgtcgagaggcaactgattagctctcaaaatggagattaactttcccatgttactgaaatgcaggagtttgttcatttgctctcctatttgattcatgtattcctggaccaagtcagttcatctcatatagaagaaatagatgaatgaccagaccaaatggattcctgcccaaatgcatgaccaactgtt

SEQ ID NO: 23063 - DNA, 156 bp, Zea mays
  Clone ID: MRT4577_121036C.1
atttatatctacttttcttcacttatcctttacaaattgtcctctcagctctttttctaatctcattctagccctagccaaattcgagacgcaaaaagccctagcgacaccaaccagctcgccagcgaccatcggggaacccggggaagcggacga

SEQ ID NO: 23064 - DNA, 144 bp, Zea mays
  Clone ID: MRT4577_121037C.1
cctgaggtgtacatagtccttcccggccatattaaccacacagcctgagcctggcccagcctcggctgccagagctgcctttgctaggcccggcgccgttgtcccgggccggccttgcactatgcatctcatcacaccccccgg

SEQ ID NO: 23065 - DNA, 1051 bp, Zea mays
  Clone ID: MRT4577_121038C.1
gcacgaggttccacaagcactatcacggattgatacacaaggaattttattcttcttaggtattcttttatcagttggcagcttggaatctgcagggattttgaggcagttagcaaattatcttgatgccaatattccaaatgctgatcttattgctagtgcaattggtgtggcatcagcaattatagacaatgttccacttgttgctgcaaccatggggatgtatgacctgacttcgttccctcaagactcggacttctggcagcttgttgcattctgtgcgggtactggtggttcaatgcttatcattggctccgcagcaggagttgcttttatgggaatggagaaggtggatttcttttggtattttcgcaaggtgagcggttttgcctttgcaggttatgcagctggtataatctcttaccttgctgttcaaaatctccatctatcccttcccacgtcgctggttgagatcccttttatttcgggatcataaaagcttggcctttgtggtcattttagaatgatcacactctacatatggaggtgaacatcattattgtttccatatcttatgtaaggtccagtgtgtcggcatgtagagtattcagaatttgggggataagacagccctgagcttcaaggccagacatcagttttggacaggcttatctcgtgctgatgaactttagggtagggttgagctccttactagggggctgtttggttcgtggctaaatatgccacactttgcctaaggttagtcgttcgaattgaagaattaaccttaggcaaaaaattaagcaaagtgtggcaagttagacatcaaaccaaacaagccctagaactgtgggttcgaaccaaagtatgccactctggatatttgtgaacctactcggcaaacaaaggagcaacttagaaatgtgcaattttgtaagaaacaatcccttgtaagctaagagtgtaataagatacagaaatcttgtataactgctgtctggtaatctcattgatggtcttgttaggcaaaaaaaaatataaatataagaaa

SEQ ID NO: 23066 - DNA, 1110 bp, Zea mays
  Clone ID: MRT4577_121039C.1
agggcaatctgtatacgatgattggtttatgctgctgttcaatgttgttcttacctcgcttcctgttatatcactcggagtttttgagcaagatgtttcgtccgaaatctgcttacagttcccagcattataccagcaagggccaaagaaccttttctttgattggtaccggatccttggatggatggggaacggcctcttctcctctctagctatattcttcctcaatctctgcatattctacgaccaggcaatccgtgctggagggcagactgcggacatggctgcggtgggaactaccatgttcacctgcatcatctgggctgtcaacatacagattgccctaacaatgagccatttcacatggattcaacatctctttgtatggggcagcataacaacttggtatatcttcatcctcgcctacgggatgacattgaggtcggcgacaactaccagatcctgttagaagtccttgggccagctcccatatactgggcagggacgcttctggtgactgctgcttgcaacatcccctacctgatacacatatcctaccagagatcgtgcaatccacttgatcaccatgtgattcaagagatcaagtatctaaagaaagatgtcgaagaccagacaatgtggaagagggagcggtccaaggccaggcagaaaacaaagattggtttcactgcgcgggttgatgcaaagatcaagcagattaagggaaaattgcataagaaaggcccatctttaacaatccaaacggtatcttaggaatctcggtggcctgacaggctcgtcaacagtagttgccactttgttgtttgcttctgcaaggcagtggttttagcttctcagggcaatatagcaaaattcttttcttttttttccttatttctttattccccccgggagtcttttttttatcttcatttgtgtaagaaatgttggggtgtaatcggtggtgttcatcctagtagaagcttcatagccagccgtgtaaaaaatatagctcatttcagttggaaaaacaagctattgatatagctgacaacatatgtatatctgcaattttgattgttccctatcgatatttacggcggtgttggt

SEQ ID NO: 23067 - DNA, 392 bp, Zea mays
  Clone ID: MRT4577_12103C.1
ctattcgccgcatgcacgcgggcgaaggctcggaattcggctcgtgcacaactaccgtgagatttataactgcctacgtacgcgatcctatgggggaaaatcagttctagtggcgagctcgctctgcatggatcttctgtatatgtattaaggaggcttctccatctccttggaggaggagggctgtgccactatggagaacgataacagcaacattcaagacaaggaagggagagagactcaccaggacctctcgagtgtctccgggaagcaaagtgaagacagtcggactgtctgtgattacaacatttagaccggggccacctttgatcttgaacttggtcatcccgggggaatgcatattgcatacaagaccctcactggcatgacca

SEQ ID NO: 23068 - DNA, 364 bp, Zea mays
  Clone ID: MRT4577_121040C.1
gttcaaaccaggacggccgggaccaccatttcccgccctagcttgctcctcgattcatcaattgcaagaggagcaagataccaccactgtagcaccacatgcaggtacgaagaaggcgactaacatggcgaggctggccttggaagcggcggtgcctctgtgcctcctgttagagacagggccgcagggagccgacagcgccgaggggatgtggccccttgacaatttgatcagctgcaaagtactgggcaactgcagacaagaacctgtgccccaaggcctcccgaccagggaacacccgccaacgactacacccgcgtgtgcaaccctatcaccggatgacgaggcatgatcatatctctcc

SEQ ID NO: 23069 - DNA, 727 bp, Zea mays
  unsure (1)..(727): unsure at all n locations
  Clone ID: MRT4577_121041C.1
cattgggtacctcgaggccggccgggaaggaactctccgttcgcacaccacactcctcctgtaaagagcacagtcacttgaaatccagccagacgcactacccccgtcgccatgaagctcatactctccacctccaacatcatttctggagggccctcggtcgtgcggcgccctttctttgaaaagtccaacactgaactcacctcgtcactgcgcggcaactttacaagccaccaatcagagtctggcaccaactacaagtcttggacaacgcaggcagacggcagcctctacgtacctacacatgagccctcgcccctcatcgagcctcgcgagtcctacgatatcaccgtcaagctcttctacctgcccaacgtacctgccgatcgccgatgtgctcagacaagagaagctattgagctggtcttgaaggaactgggaagcatatcgatagatcttcttattgtcagcttcccagggatggccttcgacgcagacgacgaagactcggatctggaagacccaccatctgcccctcagtcgacatcagagggctgcgacgatactgaggtaccacccgaggacatcgaaaccatggctgcgacatggaagacattagaaaaactgcacagtgaagggctggtgtcgaagctcgggatcgccgaanttggagttgcgcgtctggagaagtcctggaacacaccaccgtcaagccgagcgtcaatca

SEQ ID NO: 23070 - DNA, 1204 bp, Zea mays
  Clone ID: MRT4577_121042C.1
aggccatagcttttgacaatacaagttgaatagcaaaattagcaatacaccggcaacaagcatacaacgagcctacctgtgtccatgttccagagctcaaataatgggaacatgctacatactgcattgctacaaacagtacactttgtgctggttaaattaagaaaccatggacatgttgagcatcaggctattaacatcctaaactctaggcttagtaactttgctttagctacaattcacagccaatgggcgcacccgaatacacacagaactatgtcaactaatgagtttaacttgatacaggcgagatctagcacggaagagtcttgaagcattagaatcagcaaggacctagtttttggcgacggtcagggtgagaaattctaagctcatgtcacaacaaaataatccccacccatacggtaaacttgtattattcattgtggcatcaacattattttgattgttcaaatggtgcacgcacaaatagctgcccatggagggtgacaactgcggaggtttggtgagggtcaatgcgggaaggcaaactaatgaccttcctgaatggagtgacaccccatgggttatccaattgctcaggctctccagtaactatcaaacgaccagctgggtcggactgaacatgtacctgcatcaaaccatgcatcagacgctccaacttttgcagcacaaagaggagaacataatttaaggacaaaaatcaatcattaaaaaagttttgcatttacttacctcttccctcagaaggccaggaaccaacgcatagacttcatagcaatctttagttttcctaacatttattttcacccaatcagcaggggggcccatgtcaataaccatcgagtcatttctgctagataacaataattcatcaaatcaatcgaagtccaaggatgaagaagaaaaacaaactaatgccatgccaagcctaagtagttattcaaatggatattacgccccgctggactatgattatccatgcaaaagaacagaatgaagctaattgtgtgaagcagtgttgcaattattactgatcttctaacagcaatagatagaaaaatagaatgcatggcttgcgtgaatattataagtgcacaggggatttactgtagctgatcagatttataaggtatcaccctgtcatcttccagggatagtgtccttttcctcttggcagaac

SEQ ID NO: 23071 - DNA, 1498 bp, Zea mays
  Clone ID: MRT4577_121043C.1
acagctgaaggcctgaaaccgattcattcgttcgcctgcagatcggaagcggaagctacaaccagtgccatggcttcttccaaggtggtcgtcatggctgcaactgatgccctactactgatcatgttctccttccttattttgccgtcaccctcagacggcaagggcatgtgcccgctgttccgcagcatcgtcccggagtgccgcgacgcgccactgctctgcatcgcccgctgccaggacaagggctacgtcggcggcttctgcaccacccagcagatctgcatgtgcgcccagtgcaagtcgtcgctgctgctgcagcagcagcagcaccatcggtttcagctagcggcggcagcagcaccggagcccagcgccaccgccgccgccgcgtcgacgtagaggccggatggatgactttattacagtgctatatatatagtatggcataataacctcaagatcgatgtatgttttgacatggacatgctgaacaataatcgtcgtgtgttttgacatggacatggataaacaaacaaacacacccttctgcaaatcgaggactgacaaatcagttcaaatgtttcgaataagcatgtgaagttgtagtgtagttgtaaaaacacgggtttcagaacttgtcacaccaaaactgtaaaaacacgggacatcaatcaagacacacaacgctctttgcttcgctgtagaaatgcgctgcggtaggtcgtcgaaagctctcgagctcaaggaagggcccccctgcagttggctattatagaatctctgggggcgagcaaacaatatgggtccatgtgctctcagtacctcctcggctcctcctcagcgttaagactgcttcgttgcgtcatcaattgcgccaaaactctctggcggccaaacccggcaaaagatcttccctgtaatcagcccataaggcacagctccaaattgcctcgaatcgttagaagcaaagatattgtcaccctgcacccagacatgatcttgcggtaccacgacggttctggaggagtcgcttttgccggggtcgacaaggtaggtgacggagtccccctgcatcccgacgacgcgcttgacgaccgatttgcgcgggtcctcaggggagatcatcagcacgatgtcccccggcgcgacccggccgagcctcacgctgaccctgtccaccgccaccgcgtcgcccgccaggttcagggacggcagcatgctggcgccccgcactaaggtcaccgagcagaggtggtcgttgacgacgtggatcacgcagtaggccttcgccaccaggaacacgcgggagaggccttgcctcgcgatgctccgccacgggatgcccgcgagacgctgagcgaagcccggcatggcggcggcggcggatggcgagggaacacaccggatgcttcgctcagctacctctcttggtcagctgggcttgggcttcttagtttctttcggcccaccccggccggcctcgaggtacccaatg

SEQ ID NO: 23072 - DNA, 985 bp, Zea mays
  Clone ID: MRT4577_121044C.1
ggccgcaaattttttttttttttttttcacaaaacgaggactgacaaatcagttcaaatgtttggaataagcatgtgaagttgtagtgtagttgcaaacccaaacccaggttggcactagcaccaaaaaaaaaaaaaactgtctcgaaacctgtgccgatttgggtttcagaacttgtcacacaccaaaactataaaaacacgggacacgctctttgcttcgctgtagaaatgcgctgcggtaggtcgtcgaaagctctcgagctcaaggaagggccccctctgcagttggctattatagaatctctgggcgcgagcaaacaatatgggtccatgtgctctcctcggctcctcctcagcgttaagactgcttggttgcgtcatcaattgcgccgaaactctccggcggccaaacccggcaaaagatcttccctgtaatcagcccataaggcacagctccaaattgcctcgaatcgttagaagcaaagatattgtcaccctgcacccagacatgatcttgcggtaccacgacggttctggaggaggagtcgcttttgccggggtcgacaaggtaggtgacggagtccccctgcatcccgacgacgcgcttgacgaccgacttgcgcgggtcctcgggggagatcatcagcacgatgtcccccggcgcgacccggccgagcctcacgctgaccctgtccaccgccaccgcgtcgcccgccaggttcagggacggcagcatgctggcgccccgcactaaggtcaccgagcagaggtggtcgttgacgacgtggatcacgcagtaggccttcgccaccaggaacacgcgggagaggccttgcctcgcgatgctccgccacgggatgcccgcgagacgctgagcgaagcccggcatggcggcggcggcggatgacgagggcacacaccggatgcttcgttcagttcctctcttgtcgaacgggttcccggccggcctcgaggtacccaat

SEQ ID NO: 23073 - DNA, 427 bp, Zea mays
  Clone ID: MRT4577_121046C.1
aagcatgtgaagttgtagtgttgttgccaaacccaccaggcttgcactatcaccaaaaaaaaaactatctcggaacctgtcacacaccaaaactataaaaacacgggacatcaatcaagacacataacgctctttgcttcgctgtagaaatgcgctgcggtaggtcgtcgaaagctctcgagctcaaggaagggccccccctgcagttggctattatagaatctctgggcgcgagcaaaacaatatgggtccatgtgctctcagtacctcctcggctcctcctcagcgttaagactgcttcgttgcgtcatcaattgcgccaaaactctctggcggccaaacccggcaaaagatcttccctgtaatcagcccataaggcacggctccaaattgccttcgatcatgagaagcaagatattatcaccct

SEQ ID NO: 23074 - DNA, 145 bp, Zea mays
  Clone ID: MRT4577_121047C.1
gaatttggctgatggaaagaactcgcgttgtgtccagaggggctttcaagggagaaatatgccagaaagtgcaccgtaacctgctattgttgtgaggattgaaaatggaagcagagcttcactcaactgcagcgcagtggagatg

SEQ ID NO: 23075 - DNA, 1461 bp, Zea mays
  unsure (1)..(1461): unsure at all n locations
  Clone ID: MRT4577_121048C.1
tgctgaataataatcatcgtgtgttttgacatggacatggataaacaaacaaacacgcccttctgcaaaacgaggactgacaaatcagttcaaatgtttcgaagaagcatgtgaagttgtagtgtagttgcaaacccaggcttgcactatcaccaaaaaacaaaaaaaaactatctcggaacctgtcacacaccaaaactataaaaacacgggtttcagaacttgtcacacaccaaaactgtaaaaacacgggacatcaatcaagacacataacgctctttgcttcgccatacttactacttcacgatctggtccaaagccccaactcaaatttacatccaggccattcgccggagatggcgtcggagctgacgtaccgcggcggcagcgtggcgccaggctccgcctccaacggtggggaatactccccgaagcccttcaagccgctctcctggctcgcccgcgccgcgcgctgcgggtgctcgtgacgggcggcgccgggttcgtggggagccacctggtggaccggctgttggagcgcggcgacagcgtgattgtggtggataacttcttcacggggcgcaagggcaacgtggcgcaccatctccagaaccccaggttcgaggtgatccgccacgacgtcgtcgagcccatactgctcgaggtagaccagatctaccaccttgcctgtccagccagccccgtgcactacaagtacaaccccatcaagaccatcatatccttactcggttgcttcatctcaatctgaatgctaatccaaatttagtttcgttttattgtttatgatcttaatgattgatggctgtgagcctgtgactcaattcattgctgtgttgttttgtgttagcttttgtttatggtttaattttgtttgtttcggatgcttatataggttttttttgaaggtaaagatatattttagaatgagggttggtaaaagtagaggatcccagggtgcgtcgaatcgttagtgcatacgatattgtcaccctgcactgctctatgatcttgcggtaccacgacggttctgaaggagtcgcttttgccggggtcgacaaggtaggtgacggagtccccctgcatcccgacnacgcgcttgacgaccgatttgcgcgggtcctcaggggagatcatcagcacgatgtcccccggcgcgacccggccgagcctcacgctgaccctgtccaccgccaccgcgtcgcccgccaggttcagggacggcagcatgctggcgccccgcactaaggtcaccgagcagaggtggtcgttgacgacgtggatcacgcagtaggccttcgccaccaggaacacgcgggagaggccttgcctcgcgatgctccgccacgggatgcccgcgagacgctgagcgaagcccggcatggcggcggcggcggatggcgagggaacacaccggatgcggacgcgtgggcggacgcgggg

SEQ ID NO: 23076 - DNA, 465 bp, Zea mays
  Clone ID: MRT4577_121049C.1
caaaacgccctcgcctcccggcccggcccaaaaaaaaggcccgaaagctgggggggggccgacgcaccgacagatgagtggcagctcagccgagctgggacgctccgactggtactaggcgaagagggctcgcatccgcgcctgaccaacaagtacaaagacacaggggccccgacaggtcgggcctttaccagaacgagggcaacatggggggcgcagtagcggatcgccggcgtgttccccagtccgtcaaccagcccgaatggaaacgaagaccgtaccgacgaggaggtggacaatggagagatcgacaagcacaggaacgtgccgaagcaacaaaacggcacacacaacattcagaacgtgcagggactgcgaggtgattatgctcatgcacgagaagcacggcgagaacttggtggacacgccaggacagccagttagcgaaggagcatactgacacac

SEQ ID NO: 23077 - DNA, 478 bp, Zea mays
  unsure (1)..(478): unsure at all n locations
  Clone ID: MRT4577_12104C.1
naaaaaaaaaaaaaaaaaaaaaaaaaaaaaaaaaaaaaaaaaaaaaaaaaaagggcggacagatataaaagggccggcctgacttacaggatgccatgctaagttacacgtgttttctagggtaacctatatttaattgagtggcccaaatttaattaacgggccgactggtaaaaccgtggcgattgggaaataactggcgttgcccaactaaatcgttttgcaagatatcctaatttcgaaaagggccgtacataatcaaccatgcccaacaccgtgtcgcccttgcaaagggtaatggaacctgaattgtaaaggggactcaccctgtaccggtgcattaattacgcccagtgtgacggttacactcacagtgaccgtatcacttgctcagttccctttcgccccctcctttcgttgacttccctccctttttcccaggtaagctctatttcccggctagctttaaggtgggggt

SEQ ID NO: 23078 - DNA, 1348 bp, Zea mays
  Clone ID: MRT4577_121050C.1
gccctgaggggcctttccgcgtcttcacggattccgggtgtccgcgtagtgacatggacatcctgacacaataatcgtcgtgtgttctgacatggacatggataaacaaacaaacacgcccttctgcaaaacgaggactgacaaatcagttcaaatgtttggaataagcatgtgaagttgtagtgtagttgcaaacccaaacccaggttggcactagcacccaaaaaaaaaactgtctcgaaacctgtgccgatttgggtttcagaacttgtcacacaccaaaactataaaaacacgggacacgctctttgcttcgctgtaaaaatgcgctgcggtaggtcgtcgaaagctctcgagctcaaggaagggcccccctgcagttggctattatagaaggcccgggcgcgagcaaacaatatgggtccatgtgctctcctcggctcctcctcagcgttaagactgcttggttgcgtcatcaattgcgccgaaacgcatgggcggttgtagtgggcttgcaaacttccctgtaatcagcccacaaaacacaaaaaaaaatcgccctcggaacctgtgccgatttgggtttcagaacttgtcacacaccaaaactataaaaacacgggacatcaatcaagacacacaacgctctttgcttcgctgtagaaatgtgctgcggtaggtcgtcgaaagctctcgagctcaaggaagggcccccctgcagttggctattatagaatctctgggcgcgagcaaaacaatatgggtccatgtgctctcctcggctcctcctcagcgttaagactgcttcgttgcgtcatcaattgcgccaaaactctctggcggccaaacccggcaaaagatcttccctgtaatcagcccataaggcacagctccaaattgcctcgaatcgttagaagcaaagatattgtcaccctgcacccagacatgatcttgcggtaccacgacggttctggaggagtcgcttttgccggggtcgacaaggtaggtgacggagtccccctgcatcccgacgacgcgcttgacgaccgatttgcgcgggtcctcaggggagatcatcagcacgatgtcccccggcgcgacccggccgagcctcacgctgaccctgtccaccgccaccgcgtcgcccgccaggttcagggacggcagcatgctggcgccccgcactaaggtcaccgagcagaggtggtcgttgacgacgtggatcacgcagtaggccttcgccaccaggaacacgcgggagaggccttgcctcgcgatgctccgccacgggatgcccgcgagacgctgagcgaagcccggcatggcggcggcggcggatctcggccgg

SEQ ID NO: 23079 - DNA, 1927 bp, Zea mays
  unsure (1)..(1927): unsure at all n locations
  Clone ID: MRT4577_121051C.1
aaatcagtactaaatcacaccccttcgaaagatattaattgcacacttttggggtagccacacaattacaacagacgccagtgtccagagcactgggtacgcatttcctgcttcagatttcttgcatcaaagcaacacgagcagtacaaagatggataacaatctcatagatgcaagggcaattcatcttaatttatccaaagttctaacacaggccatacagccttgacctttatctaccccaccgtagcaaataaactcgcttcgcttcaagaggctttataatgttcattcatggtacttccttcttatggcacgaaataaagggggcagaaacgcttggattggacagttactcagccacattaaccaattcatactctattagagacaggttgttgtcttccttcaccgtgaaactggctggctctacagcctcaatccgcccccacttgtccactgcaagcctcattgatcctttgaacatgtctattttggcattgcgcaagatcactgtcgcattgggcttcagcaagtcaacttggtcgttgcgggcggtgaagacgatggcgccggtctcgtccccgacgaggcactcggcgatgcgcggcgcgcgggatggggcggcggcgggtgcgcctgggcgcgcgcgcccaggcacgggggtggcgctgacgaccttgacggtgagggtgtgcccgttggtgcccggcctgagctggtcgaccttggtgaagacgggcctccggagcgccggcttgtcgctgccgccctgcgccgccgctgtggacatcgccggtggtgtggtgcgggtggaggcggcgaggttctgcaatgcggtgccccaacgggagtcggtgcgaccggccaaaagatccggcctgtaatcagcccataaggcacagctccaaattgcctcgaatcgttagaagcaaagatattgtcaccctgcacccagacatgatcttgcggtacctcgacggttctggaggagtcgcttttgccggggtcgacaaggtaggtgacggagtccccctgcatcccgacgacgcgcttgacgaccgatttgcgcgggtcctcaggggagatcatcagcacgatgtcccccggcgcgacccggccgagcctcacgctgaccctgtccaccgccaccgcgtcgcccgccaggttcagggacggcagcatgctggcgccccgcactaaggtcaccgagcagaggtggtcgttgacgacgtggatcacgcagtaggccttcgccaccaggaacacgcgggagaggccttgcctcgcgatgctccgccacgggatgcccgcgagacgctgagcgaagcccggcatggcggcggcggcggatggcgagggaacacaccggatgcttcggtcagctacctctccccggcagtcctcaagctcgcagacggacttgaagaaatggccgcagtcgtcgacgaggcggcggaaactgcggatgtagcagcgcgcgcccatcgacttgccgtggccctcgtagtccatcccgaacacgccgtacccggccgccgccagccgcacgccgcattctttcatgaagccactgcactccatgccgtagccgtggcagaggaagacgagcgccttgggcgatgcggcagcgggcagccaaccgcaggtgaatagctgcacgcctctcgagctccgcacgtactcctcgtggtattcgacctccatgtccgcgcgcgcgcgcgcgcgaggagtggcctccgaagggtgcagagatccaggaggagggctgcacactacagcgccggcgctggtgaggctcgtatcgtacgtggtgtgagcgaagaagaagcgaggcaggcgagaggcgacggtgaccgtccgcgtcacccccgcggttttttttttttttttttttttttttttttttttnccggccggcctcgag

SEQ ID NO: 23080 - DNA, 1525 bp, Zea mays
  Clone ID: MRT4577_121052C.1
caggccggccgggccgggtgctgtgtcccttttgtatccggcaatctgatattcaccggcggccgcgattctgtggttaggatgtggaagatggaggaagggttattgattgatacatcccgtgcacttggtggcaccatccgggcgattgcagctgactcgaggcttttagtgagtggaggaactaatgcctatattcagtgttggagggccgttgaaggcaatggtcaattatttcacatctctggaagtggtaccgaccagaatgcggagtttcgcctctggggtcatgaaggtcctgtgacttgtcttgccctggattcactgaggatttatagtggttcttgggacatgactgttcgtgtttgggacagagaccagatggagtgtgtgcaaaagttcatgcatgcagactgggtttgggatcttgctctgcgtggaaatactgttgccagtactgctggtagagatgcatatgtatgggatatcagggctggcgagttaacaagcttaatttccaatgcccatgttggtagcgcatattcaattgcttggacacacctgccagatgtgctgtttaccggtggagaggatggcgctattcgcctgttcaatgtttctgatgtctctgatgatgagggtgacattaaaccagtggcaacttgggtgccacattcaggtcctgttcattctcttgcttttgagtatccatggcttgtgtcagcctcgagtgatggcaggattgcacttattgatttgaggaagcttctgtcctccaaaagttcatcaaagggtctgcgtgttaagagagttgatggaagcgcaatagagcccccacagaggatgcttcatggcgttggatgtgatctcttctccatcgctattggtgcagataggattgtatgtgccggtgaggatggttctgttagagtctggaacttctcagaagcattggagattgagaggagggcacaggctctaaggagtttgaggcaggagaaccgcatcaggcggaggaaatcacaagcggagatgaatacaaatactagaaggcctgaccagtgttcaatagccatgaaaaagaaccaactgaagggtgataagagcgcaacttggcacaacaagcgtgccattaatgagaaggccaagtcttagattaggattgtcattggtagccgttcactgagttgcagtctatcgtggccatacattgccatcactgggtactttcttgttggtcgtacttgagattttattttcactgaagccgggtctagtaacacgttttcaacattgacacattcaaatgttcaactttatgtggttatacaattaccaacttaatatatgcaaatcttctatgcctagccggacgcgtggaaagaataagttcctcaaacctttcgagttctgaaagcttttggtcttttagctttcatgttactgtaaaagaatatttagttttcagtgtccgggtatttgtactgaaggcccttctcccttctataaattagtgttcttcatc

SEQ ID NO: 23081 - DNA, 365 bp, Zea mays
  Clone ID: MRT4577_121054C.1
tcctaaaccagggaagaagccaccgaacaccgccagcaacagaggaccaggcctgagatacggccgcaccatgagacatcccccgcagggggccacaggggacggctggcgccccagttggtgaccgaggaggagacgcgccgaaagctcacctgcaactcccagaacctcaacctcgaagtgcagcagcaggaagggaggccacaacatcaaggcaaaaggctgcaatgggacccgccaaacaacggccgacatccacccccccatgatccctcaaccagaaccagctcccatccgtggaggagggtttgggacaaaacatgaggggacgacagctgcacctactcatggctagccgccatcag

SEQ ID NO: 23082 - DNA, 303 bp, Zea mays
  Clone ID: MRT4577_121055C.1
aatatttatcttgttcacaaccacagaatgcttggttacggggtgttcttagaacgcaatgcgggccaacaccccaaaacaaaggcccccaggggccatggtatgcttacacggacgggccacaacgactcaggggcgggcaggacagctaccagagatgagcgaatgacggggagcgaacgcgcaaactggccagagccctgttgctgtggccgatacccaccaacgggtgtgagccccgaaagcttgccatgtcgtcaaggtcaaggtctaggagggtaccaccgggaaagcccggtactg

SEQ ID NO: 23083 - DNA, 209 bp, Zea mays
  Clone ID: MRT4577_121056C.1
gagatgctcatcctgcagggccacgcgcagcaagggtatgtggtgaggcaagttgcatcgccctcgacatcctcacgtcgtgttcgggcagcgtgagacgcatcacgggctccgcagcggcggctagcacatccattaccaggcgtaggcgcctggggtgacgtacgactcccaacggtacgaggccgtaccaggctatggtcatgttg

SEQ ID NO: 23084 - DNA, 116 bp, Zea mays
  Clone ID: MRT4577_121057C.1
tcgcagacgcgtgggtatgttgcggtaatgttatctcaaagtgcatcttcaaaatagcaactgccgtgggatacataccctgcgaatataactagaccatgcttgcttccgtctaa

SEQ ID NO: 23085 - DNA, 374 bp, Zea mays
  Clone ID: MRT4577_121058C.1
acaccggagggaagtccccaaaggtgtttccccctttttaataccagctccaacaataaaagaggggccggccccaaccagaggggtaaatgttttccaaatgttgtaaaaaaaaattcctggtcggggaacttccgccgcaaagaaggcctctacccaaaaagaaattttctgggaaaggtggccctttaaaagggcggcacccggttttggcccccctaaaaaattggggggcttcatcttggggtaggcgggacccacagaaaaaaaacctccccaaaaagggaaaggggttcgggggggaaaaaacctttgagggccggaacaatcatttgggccaggggtttaatgtcttggaggtgggggggtgccct

SEQ ID NO: 23086 - DNA, 803 bp, Zea mays
  unsure (1)..(803): unsure at all n locations
  Clone ID: MRT4577_121059C.1
tgggaccctcgaggccggccgggccgggggttcgggttttaacatggaaatggtatttattctcggcgagcaagggtttgctattggtggtgaagagcggttaagcagatcaaatgctgatccttttaaaaacgggttgggttttaacaatggaaatggtatttactctggtgagcaagggttcgctattggtggtgaagagaggttaagcagatcaaatggctatctttctgagttggtcgcggcagcatatgtgtgccatggtggtgttcaaagagttcatattatagatggatgtgttgatggatcacttctattagaattgtttacgagagatggagcaggaacaatgattgctagggatgtttatgaaggaacaaggatggctacagcggaagatcttcctggcattagaaaaattattcggccgctggaggattctggtgttttggtgcggagaacagatgcacagcttcttgaagcgctagagtcattctatgttgttgaaagagatggttcaatcattgcttgtgctgctctatttccattccctgaggaacaatctggtgaagttgctgcaattgctgtatctgaagaatgccgaggaagaggtcagggggacaagttacttgtaagcgtatcttctcacccattttanaggngtttcagtcttgtggcatttgtactagaccaagctaagaagtccttttttgttactcatggtggttgccattcttcagattacgtggaaaagatggcattatccctgggtctcaagaaatattcttgcttactacacgaac

SEQ ID NO: 23087 - DNA, 288 bp, Zea mays
  Clone ID: MRT4577_12105C.1
aaatccttaaaacccaaaccttttttagaagcctttttttatgggccttcccacccatgatatggggggtcgtttaattgctttattccttttttaattggaaggggttggttggggggaattccccaattttcatgattcatttttagggcggatgggcaccggaaaccccccaggggttgggccggaacttggccacttggtcctggaccctgcccggccggccgttcaaaggccaaattttgaaaatttccttaaaattgtgcggccgttcaaccttccttttaa

SEQ ID NO: 23088 - DNA, 592 bp, Zea mays
  Clone ID: MRT4577_121060C.1
ggtagatcaaaatctgtccgccctgatgatgacttcagcatggtctgggaggtgcctgctgctgcctggacacaccttaagagcattaaagttgcactgaaagggcatggtgttattggacgctggcatggtcttgtggatagcattgcaagtggcaatttccttggtgctaagagaagaggggtggttaatggtattgactacggattcaccggggaagttacgaaaatagacgtttcacggataagagaaaggcttgatagtgatagcatagttgttatcagcaacatgggcttcagttcatcgggagatgtgttaaattgcaacacctacgaggttgctactgcatgtgctttagccttggaggcagataaacttatctgcgttgtagatggtcaggtttttgatgatcatggacgggccattcaatacatgtctattgaggaggctgatttgttgattagaaagcgtgctaggcaaagtgatattgctgcaagttatgtcaaggttgtggatgaggaaagcatcaattttttggctaaaggggacgacagaccatcattgagtcccaaggcttactaaatgggtatgc

SEQ ID NO: 23089 - DNA, 4021 bp, Zea mays
  Clone ID: MRT4577_121061C.1
catgcacgagcatctatctagggttggaagcttgtacatggccacctcggtggttgtggcacgcctcgcgggcgaggcctcgcagcccaaggtcctaccttctgcgaatggagtctcatccgagagctattggcgggtagctgctacgcgccgttggcagggccgcggtgtccggtgctgcgcggccggtttccgcggtgggggcgccgacgccgacgccgtgatcgccagcgaggactttgtggggttctttcgggaggcgtggccgtacatccggggccaccgtgggagcaccttcgtggtggtcatctccagcgaggtcgtgtgcgggccgcacttctaccgcgttctgcaggacatatcacttctccatggtctggggattaaatttgttcttgttccaggaacacatattcaaattgataagctgttgtcagaaagagggaagaaggccaagtatgttggtcagtacagaattactgatgaagatgcaagaaaggctgcaatggatgcagctggtagaatacgattgacaatagaagctaaactttctcctggtcctccaatgttaaatcttcgtaggcatggtgttattggacgctggcatggtcttgtggatagcattgcaagtggcaatttccttggtgctaagagaagaggggtggttaatggtattgactacggattcaccggggaagttacgaaaatagacgtttcacggataagagaaaggcttgatagtgatagcatagttgttatcagcaacatgggcttcagttcatcgggagatgtgttaaattgcaagtatattttcttaattatttttaagttttttcgtatgattgtacaatgtatacatcaaaattgtgtagttgtatgcttgctaccaagtcaagcataatatcatatgaatgcaaataattttcgtaaaacttgttcctttgcatatattgcagctaccatactaaacaaaattgatttgtgttgtttgcaataattcagcacctacgaggttgctactgcatgtgctttagccttggaggcagataaacttatctgcgttgtagatggtcaggtatttgatgatcatggacgggccattcaatacatgtctattgaggaggctgatttgttgattagaaagcgtgctaggcaaagtgatattgctgcaagttatgtcaaggttgtggatgaggaaggcatcaattctttgcataaaggggacgacagaccatcattgagtcccaaggcttacataaatgggtatgctgcttcttttcgaaacggattgggttttaacaatggaaatggtatttattctggcgagcaagggtttgctattggtggtgaagagcggttaagcagatcaaatgctgatccttttaaaaacgggttgggttttaacaatggaaatggtatttactctggtgagcaagggttcgctattggtggtgaagagaggttaagcagatcaaatggctatctttctgagttggtcgcggcagcatatgtgtgccatggatgtttatgaaggaacaaggatggctacagcggaagatcttcctggcattagaaaaattattcggccgctggaggattctggtgttttggtgcggagaacagatgcacagcttcttgaagcgctagagtcattctatgttgttgaaagagatggttcaatcattgcttgtgctgctctatttccattccctgaggaacaatctggtgaagttgctgcaattgctgtatctgaagaatgccgaggaagaggtcagggggacaagttacttggtatgttctttgcttacatggataatcagaatccattctcttgattggttgttgcaacccctctaccaggttgccacaaccatttctccaacacatgcccacatgttcctgtgtgcactttctcacatgcacatacaatccctaaatattataacaagataacagaccgcctaccagtaatgtggtgttaaagtgggggttctctgttttttcagtaagcgtatcttctcacccattttaaaggggtttcagtcttgtggcatttatactagaacaagctaagaagtcctttttttgttactcatggtggttgccattcttcagattacgtggaaaagatggcattatccctgggtctcaagaaattattcttgcttactacacgaactgcagattggtttgtgcgacgtggcttttcagagtgctcaattggatctatccctgagcagaggagaaaacgtatcaacttgtcccgtggatccaagtattacataaagcagctgtagccaaagcctgctgggattatcgccaacaattttgtcatcaggtgactcagcagcatgcacagagtttggttccacacttccacttaattaagatggtaccagccaagattacaccaatttcgcggttgcccaaaggcatataattgcacaaagaaacaaaacaccattttactgtcactgtgtttgaaagatggttgtctttgtttaagtatgtgacagaagtttgttttgccaatagaatcaaggcagagaagaaatagctgattgaattatatgtagaccctatttaacaagcaataccaaagatatgtcacgcgttgtggatgagcgaaggcatcaattctttgcataaaggggacgacagaccatcattgagtcccaaggcttacataaatgggtatgctgcttcttttcgaaacggattgggttttaacaatggaaatggtatttattctggcgagcaagggtttgctattggtggtgaagagcggttaagcagatcaaatgctgatccttttaaaaacgggttgggttttaacaatggaaatggtatttactctggtgagcaagggttcgctattggtggtgaagagaggttaagcagatcaaatggctatctttctgagttggtcgcggcagcatatgtgtgccatggtggtgttcaaagagttcatattatagatggatgtgttgatggatcacttctattagaattgtttacgagagatggagcaggaacaatgattgctagggatgtttatgaaggaacaaggatggctacagcggaagatcttcctggcattagaaaaattattcggccgctggaggattctggtgttttggtgcggagaacagatgcacagcttcttgaagcgctagagtcattctatgttgttgaaagagatggttcaatcattgcttgtgctgctctatttccattccctgaggaacaatctggtgaagttgctgcaattgctgtatctgaagaatgccgaggaagaggtcagggggacaagttacttgattacgtggaaaagatggcattatccctgggtctcaagaaattattcttgcttactacacgaactgcagattggtttgtgcgacgtggcttttcagagtgctcaattggatctatccctgagcagaggagaaaacgtatcaacttgtcccgtggatccaagtattacataaagcagctgtagccaaagcctgctgggattatcgccaacaattttgtcatcaggtgactcagcagcatgcacagagtttggttccacacttccacttaattaagatggtaccagccaagattacaccaatttcgcggttgcccaaaggcatataattgcacaaagaaacaaaacaccattttactgtcactgtgtttgaaagatggttgtctttgtttaagtatgtgacagaagtttgttttgccaatagaatcaaggcagagaagaaatagctgattgaattatatgtagaccctatttaacaagcaataccaaagatgaagtgctcgtacagtatcatctctggttggtgcctcattgtgtgcatcatagatgattgaacttgccttttccactcatagctgattggccttatcttttctacttttgttgagagaaaaaaaagagctagtgaaacaattggttctcttgtatcagatgtcaaagtatccttgaatgaaaacaaaaaatatgaagtgctcgtctgttatc

SEQ ID NO: 23090 - DNA, 999 bp, Zea mays
  Clone ID: MRT4577_121062C.1
aagggcctccctactccacctgagcgaggcccgctggaacgagggcgacatgcacggcacgctgctctcggagaacgtgatcggcgtcatccacgaccactacgtgaccttccgcctggacatggacgtggacggcgccgacaactcgttcgtgcgcgtggagatggcgcggcaggagacgggccccggcgatgagtcgccccggaggagctacctcagggccacccgccgcgtggccgagaccgagaaggacgcgcgggtgcgcctcagcctctacgatcacccggcggagttccacgtcgtcaaccccgccaagaagacgcgcgtcggcaaccccgttggctacaaggtcgtccctgccggcaccgccgcgagcttgctggacccggaggatccgccgcagaagaggggtgctttcacaaacaatcagatatgggtgacgccctacaacaagagcgaggaatgggccggcggcctgttcgtgtaccagagcaaaggggaggacactctggatacttggtccgagagagaccgtccgatcgagaacaaggacctggtgctgtggtacacgctggggttccaccacatcccgtgccaggaggacttccccatcatgcccaccgtgtcgtcaagcttcgacctcaagccagtcaacttcttcgagagcaaccccatcctcaagcagcgcccgaccaaggaggatgatctgcccatctgtactgcctccaccgccgcgtagcctactaggagggccgggggcgaactgattaaccggggacccatcaatcagcttgcatgcattgctgtgtgttgtgctcttgctaagctttattagtacgtatacgtacgtaccacgaacctaatgcatgggccatatcttatttgtcgcggtttagttatgggtgacaaataacctagaacggagatattatttgttatgttatataaatgagaactttgatatgatctgctaattaaaaggcggagctagtggttgtg

SEQ ID NO: 23091 - DNA, 642 bp, Zea mays
  unsure (1)..(642): unsure at all n locations
  Clone ID: MRT4577_121063C.1
ccgcgttccgccccacgcgtncnncgtttttttttctttttttttttttttttttttttttttttnnttttttttttttaaagagaagaaaactctgcttatttaggttttcctctcagaatttattcccccatggaagggaggagaagaaaaaaaaaaagggaagagggcgnaacgaggtggcacacctgcaccgcgtttcggaaataaaaaaggtgggcgcgccaaaacaacttccggcgggacgacagagaacaccccggacgacttaccgacacaccgaccacgatacaaaccaccgggcgggtggggggttttattattgtaaaaccaacggccgggccgggccacttgacaactttccttggggacaggacttcgccttttgtttccacaccggggcgggcggggcggggcactgtcatcagaacggggaaggcccgcgcatggaactcccacttcctaatcgttcttccttcctcgggggcggccggcggcgcgaccgcttccgagtcgttgtttctcgcccgccggacattacggcgggccttggggtgtgaacaccaggtacgggattgcgcccaaaggcccgggcgagggcggcggccgtggcgcctttggtcctctggtttagcaccttgt

SEQ ID NO: 23092 - DNA, 356 bp, Zea mays
  Clone ID: MRT4577_121064C.1
accacgcgtccgaccacgcgtccgacacagggcaaccagacaacaattacggacagcatatgactggccatcaggaggaaacagcaataaccaatgctgcaataggacaattttatgggcctaatatacacaatggggttccttattttggtgcacctgagccctcccttcctccagatgcaacaaacaccatttatgttgagggcctccctatcaactgtactagacgggaagttgcgcgtatccttgtgtggatgatgatttctctttctgatcttattatgaaactgagttgtttgctggtctttttccaccgctgaactataatctacattcaggtgctgtcaatccatatg

SEQ ID NO: 23093 - DNA, 541 bp, Zea mays
  unsure (1)..(541): unsure at all n locations
  Clone ID: MRT4577_121065C.1
ggtgcgtgccaccaggtccgtgccccccacatctctactacgggaccagtctngactctngactttgagttcctcctcctcctcctcctcctcctcctcctcctcctcctccaccaccaccaccaccagcagcggcggcggcgtgctgctgctccgtggtggcgttcaacaacagagaggagaggggggggtggggtcgccgaggtggtcggggtggatgcaggagtcgcgggcgcgagtgcgagggcggggtacgtgctactagcggatgcaagtgggagcagcagctacctgcatgtggtgcggagggcgcacacaaaggggagctggagcgggcgtgatgaccacttggcggcgtgcgcctacagctcctggtggagctgttacgggacggagaacgacgccggcgacgacgcgtgcggctgcggctcttctttgctcacggacagtggcgtggcggccggggtggtattgggatgcccaccaantctttcgtcccggcggaagggattatccgctgggacttgatgcatagcgagcc

SEQ ID NO: 23094 - DNA, 921 bp, Zea mays
  Clone ID: MRT4577_121066C.1
attcggctcgagcgatttttaaacactccattctggtgcacacaaagggatgttggaacagatacacaaacgcacggatgggcaatgttattgattcgactaacgatgttgcaacagaagtcgtgctgctgtgaagtggaaaggttcagatatcgggctacatgcacggcaagaaggacactttggaaccttgatgccacagtggcacggccagggaaaaattatacacacacactgatactcttactctcactgagaactacactctatttacatgacatggactctcgttattcgaggctaaaggctaagttcagagggagatgatacggctcaagaaacccctcgaggttgagatcggatgcttccacttgatgtgaacgttcgcagtgcgcctccaatccagtccacaaggatgcctacaacatggagttattcgtgaagccagtgaccaggaaccggaccatttggccgtggcattccggatgaggacttgctacgttcctccatggatttggtgggtttaagctgcaagatcttgttggcagcgcaaatggcgtgatggtggtgatcttggtagcaaatcgagctagagattagcatattactatattagcatgtagagagctgttagttgtgcctgcactcgtcacttgtgcagaatggatgggatggaacgcatgccggatgcgacagcggcaacgaagatggtgggcggatggcaataatgtagtgctctgttgatctgttgtatacttgatctgtgagttgtgacgagaaacctgttgtatacggaggtcctgaacttgcagaattcaaattggcaatgtattacagattctccagcctctgcatattatgcggcctcagcatattatgcgggtaaggcttgacagaagaaattattaaagaagggcaaaa

SEQ ID NO: 23095 - DNA, 825 bp, Zea mays
  unsure (1)..(825): unsure at all n locations
  Clone ID: MRT4577_121067C.1
cgaggccggccggggcttccttacgattaggcagaagcctgatcttgtgcctgctctccattggcactgccgtgacttgaacactgttccctcacatttaccttttccgattcctacgatctttgcatcctatagcaatcgcacaaacttctatatcacgatcgccagaaccatgtcacgaagaaacagtgccatgtatacccctcacccgctgaccgcgcaattcgatagcgcaaagttcatggttggcgggggagtagctatcttccatcttgcaactgggcgcgtggtactatgcagctacgagcaacacgggcgcaaagtatatttcttgcccaaaggacgacgagatgcaggcgaagagagtggaacaggtgcagagcgagaggggtatgaagagtcagggtatcgaaaccggcttctccctctaccaacaaagcattgccaaccgcaagctcatccacgtgtccacgctgcgacgcataccgccgagcccgttctgttacagttgatgccgttgcgagagtatcagtatgtggtttattggtacatttcggagacgctgccgccgttgctcgagggggatctcgaaacagaaccgggatcgccgtacaaacctccaccgcgttatccggagaatctctcattgagagcgagaattgcgatggagccacaggggtacgagcctagacatcacgagggcacgggcgtggataatatggagaggcaattcaagagcgagttatgcagtgcggaagatgcgataaagaagttgggccagggccacatgatgggtgnagctatggcggatgtagttaggaaagg

SEQ ID NO: 23096 - DNA, 453 bp, Zea mays
  Clone ID: MRT4577_121068C.1
caacatggagttattcgtgaagccagtgaccaggatccggaccatttggccgtggcattccggatgaggacttgatacgttcctccatggatttggtgggtttaagctgcaagatcttggtggcagcgcagcaaatccaggtagagattagcatattactatattagcatgtagagacctgttagttgtgcctgcactcgtcacttgtgcagaatggatgggatggaacgcatgccggatgcgacagcggcaacgaagatggtgggcggatggcaataatgtagtgctctgttgatctattctatctgtgagttgtgacgagaaacctgttgtatacggaggtcctgaacttgcagaattcaaattggcaatgtagtgtgacgaaataccttgtattgtatacgaaaatctgaacttcttgcagaatcaaaattcagaaaattaggtttggcg

SEQ ID NO: 23097 - DNA, 164 bp, Zea mays
  Clone ID: MRT4577_121069C.1
tcggcgggacgtacggaggggtgcacggcgggcacttgggcggcttgccatggtggtgcttgggcggcctacacatcaagcccgccatcctcaacccagtcctcggttccactagttgactgtcttccattctctccgtctgcgggcctcctcgcccggcacgc

SEQ ID NO: 23098 - DNA, 277 bp, Zea mays
  Clone ID: MRT4577_12106C.1
cccgggcggccacgcgtccgcccacgcgtccgcccacgcgtcctttgacttttttggcaagaaagaaggaaaaaaggggagggagtgtaaatgttttttttttaagatctgtacaacaacatgattgagaagggagggaaggtgattctgagcacaacttcgttggaaaggctgtctttaatttctggtggacgtaatatattatatgtatgtatatgcttagattcgctaatatatatgcatatatatgcacccacatgaatatgatttacagaga

SEQ ID NO: 23099 - DNA, 751 bp, Zea mays
  Clone ID: MRT4577_121070C.1
gtactagcaacttgcttcttagctgaataaccaaggaccatgcattgccgcatttatcgggggtccattccaccacccatcatcttcaacaagaagcattctggacttctttttatcgatatctttatcattggccgctttttttttttttttttaagtagctccatttataacttcgtcaagagaattgtccagcagctcagccaaagcacctagagcccacttgtgacttgttgcgtttgagtgcagaaatctagggtgcacgcgaacatgatccattccagagactgactgctgagccaccccatcaccgagcggctttccgtcgtagtccccagccttccagaactgcttcgtcgcacaagctgccaatggcaccggcaccggcggcggcgggattggctcgaggaaacccgggggcagatcgacgaccgctgaaaccctagcccgcttagtcgcggagccgtctccaccaacgcccctcaccctcttaccgcttccgaccgcaccctcgccgtcggaatcagagtcgctgctgctgaggtcgatcaccgccgtggcggtccttctgccgctaccctcgaccgctactgccgccgctggcgtccgggagaggggctcccgctcctccgccgcctcggttttcaccattggtggcctcaaaaggcttgagagatccatctgtaacctgtcggaaattttatgccccgcctttgaaggatatttctaagttggacccggcccggccggc

SEQ ID NO: 23100 - DNA, 343 bp, Zea mays
  Clone ID: MRT4577_121071C.1
aacatgcataattttattggttgtcaaacatatctacctgttcagtgtcttttgcttctctgcgtctgtagcaacatttcttccttcaacaagcaatcccttctttctcctcactccatccatatatcggttcgccacgttctccttgtcagccaactcaccaagatcctctagatcgtcttctgtgaaaggtacccagaaaggatcttcatccagaatctcgaagccagcgaagatcagctgtggctgggccgccccactggtacgcttacgcatctcgtcggcaaatacgaaactctcagctacaggaaccagtgcttgaattgtgaagaatggtgtgcct

SEQ ID NO: 23101 - DNA, 317 bp, Zea mays
  Clone ID: MRT4577_121072C.1
ggcagtaaaactaacagtctactaatttaaatcaggtgaggcccgttaacaaccaaagaagcagcacaacttttataacacacacaagccttttaactaaagcctgcccggagcaaaaccaaattgtccagggttgtacaacaaaacggaaaaaatggtgccgaacacggacacccgcagttactacaccatggattcgtttacagcagcttcagatcagatcacaaataaaccccggccctgactgatgcacacgacaagcttctggcggggaaacggtggtcaagtaaggggcttggaggaggacaccttggcct

SEQ ID NO: 23102 - DNA, 383 bp, Zea mays
  Clone ID: MRT4577_121073C.1
tctagatcgcgagcggccgcgccttttttttttttttttttttttttttttgacttgaatccgcgagatcggtaatgattttccaattcaaacaatttgtcgagcgtttggcagatgctacacaaatttcacgcacaccaactttttttttttggacatcttctcttgggggtggggggggtccgcgcgatcacagttcgggggcttcacgttggcaccaacatcgagacggggtgaccgaacgacgacgacaaaattttggttggagacgaccggttttcaacgacaagcactagagttttacgacggtcggcggtaatggggcgtctgtgcattgtccatggctaatgggagatcgacgttcggcccggggtgaccagcca

SEQ ID NO: 23103 - DNA, 234 bp, Zea mays
  unsure (1)..(234): unsure at all n locations
  Clone ID: MRT4577_121074C.1
tctggtcacgcctgcggtgtcaccggttccggtaattccccgttgctactccgaaaaagggtgtcttagggttgatggttcacgtcggtggggccgtccgccctgttagccggtcgttttggccctttgnacgcttggggtccacggtgtcttcgataggtggcctcttgtctcctgtctggncgcgtcacgtcacccctttcgtngcgtgcttttcttggggggggggggggg

SEQ ID NO: 23104 - DNA, 643 bp, Zea mays
  unsure (1)..(643): unsure at all n locations
  Clone ID: MRT4577_121075C.1
tcttgcagccatttaggatttgatctgcgcaatcatatcaccgtttgctggtgtgtgtttataagatttttagggctgtgggcgaccatttctactgtaatagatatacgatagatcgtcgtcagttttttgtttgcgaaatgtagaactgcctttggttatcactctgacttacgccgtccactactacaatacaagcatgcagctgagcctatgtttgggcatgattaagatttttggattggatgtttaatgcttgaatttagatataagatactgtaactacttgttgtgttggaataatttgaacgcaactcaaaagtgagttcttacgattgctgcatatgatggttcatcacatgtggaccataaagttaatatggtttggtgtgggtagtcacagtaattttgatatctgtagtacacaaaataagtcttcattggccactagctgataacatcagcataatgtaaataaataaataaacggtgttacattgtatcaacatgtaaaaatcagccaaacatattgtgattaagcggcttaattcatgttagcctagccttttttcactccagggtcttgttacttactcccactgncaaactataagatgttttggcatctctagattaaaacttt

SEQ ID NO: 23105 - DNA, 531 bp, Zea mays
  Clone ID: MRT4577_121076C.1
attcgagcggccgcccgggcaggtacaagctgtctttttctgtagtactgtaataatgtaatggagccgttggctagctacctagctcgctagtttactcatttagcggcgatgattgagtaataatgtgtcacgcatcaccatgggtggcagtgtcagtgtgagcaatgacctgaatgaacaattgaaatgaaaagaaaaaagtattgttccaaaaaaaaaaacaacaaaaacaaagctcacggccggggcgcgccggtaaacatgcagcttactggcagctgatcgtgcatcctctatgggggctcctcgctacagagcgtggttctacaatccatacaccggcccccttgctgcatttctatgaccaacaacacggcttaccccaaacaaatcagacagctacaaaaacaggtcccgtttgcccaactagctgggaaaaaaacagcaattacctaccgtccaaacaccatgtttccacaccctggataatacagggacgccgccttaatgcattaatcaccccccgtg

SEQ ID NO: 23106 - DNA, 879 bp, Zea mays
  Clone ID: MRT4577_121077C.1
tcttgctgctggtcccatcatccaagcaagaccgacatggcttcagctgttgctgctgtgaaggaggcctgcctgctcgccgccgtgtgcgtcgtgctgctccactcctcgtcctcgatgggacagcagccgttggcgcctgaatcgtcgtccgcttccccttactactacacgggccagcagccaccgccgccgcccgcatcaccggtcgactgcccttacactgggcagcagcccactccaccgccagtggtggtgccgccggcgcccacgccgaccccgaccccgaccccggcgccggcgccatcacccaccatcaactgcagctacagcgactgcggcgcgcagtgcactacgtcctgccaagccagctacaacgccaccgccaggaactgcacggcgttgggcgacggcgccttccaagggtgctatggcagctgcaccaacaacagctgccctggcaagtcctgtgtgcacagtgtgtgcgacagcagctgttcctgcgacaacccccacgcaagcagctgctgtcagtcttgccgtaccgctgttaacgcagccatgggtgtgggtggcgagtaccagcgatgcctgagctacaacgacaggtatatggggtactgcatgatgagctgcgtcgacagctgctacaagaactgtacccagggcgcgtaaagctagctagagagatggccggccgtcgtggacgagtgccgcgcgcttgaacagtctcgtcgcggacgggcggcaagctgcaagacacctagtagcgcgcggcccagaataatgttatctcatgtaatgttcaataatacgcatgtatactagctagcgctagctatatatgccaaactaagtgaataatgttactttacgttc

SEQ ID NO: 23107 - DNA, 213 bp, Zea mays
  Clone ID: MRT4577_121078C.1
ctacatcttctcctgctacgtgccggatctgatccatctgctctacttctactatctggacctgttcaacaacaacttctcgggcgctttcccggttgccgtggtgccgcttggcggtctgctgttcctggtcctccgcttcatccggtacgctgtgtaggtaccggctccggttctcgctctcacggtggaggcgctcttcctcaacaacaa

SEQ ID NO: 23108 - DNA, 991 bp, Zea mays
  Clone ID: MRT4577_121079C.1
tcaatcagttcgagcttcgaaccatttcaacggtgacctgttcttccccacccggccacggccacggccacgggtcacccctccaccccaaaccctagcacccccgatccagcagcagcccccctctcggagctccaaaacctctcagagatggcggcgccggcgccggcgttgatgcagctcaaggtgcggatcccggagaacgaggaggtggctcgctgcctccacgagaagcggctgtctatgagggagcagccggccggtttcaaggagcacctggaccgcacgttcgccaaagcctaccgcaatgtctgcgccgccaatgagcccatccggactctcaaggagttctccaagatcaatggtgtaggaccatggctcatacgctgtatgaaaggcttctttgcagagtccaagcaggattctccagcgaaaggaaagaaaacaagagtaccaaagtgctgtgtgacaaagaagaaaactgctgcttctgcttctcttggcaagggacctccttccaacttaaattgtcagaatgctcagttttcttcatcccaaggaacattggagctgcaaccatctggtaaaacgggttctactgacttcaatatgctagacaaggatgttgtatcaatgaacaattgtatactggctatgccacctcgtcaatcaagtgaagagtttcttgaagcttacgaggttgttctgatattggatgatcgtgagaattttgggtattgttcaagaaagttgctttcaaaaaggttgctgataacattggatcgcagtttaacgtacctgtatagggtaacgtttgcctgttagtgatggcatatggatcgctcgtcataaaaaaaatcttacagaatatgttctagatttaattggtgaaaggaaaaatgttgcagatttaggtagttcaattagagacaatcgattcaaagatcagaaaacaaggctgcaggtactgtttggactttcattgactaca

SEQ ID NO: 23109 - DNA, 248 bp, Zea mays
  Clone ID: MRT4577_12107C.1
gggtcgaccacccgtccgcggaggcctggcaacagggggccgcagatgctgcgggcgtatcctttgcggggggacgcgggggacccggaggcgagccggagttgaaaggaaccggacgaccggctgttacggcaccatcacctgctaacagcggacagcgggatataccacttgtgctgcagtggcaacatgaatggcacgggaggaacagctaggaatgcgggcaaacggtccctgccgcagctgcc

SEQ ID NO: 23110 - DNA, 346 bp, Zea mays
  Clone ID: MRT4577_121080C.1
tccggttccggatttccgggttggaccacacccttccgaacaagaggccgaggcaggaccccgctctgtgttgttcaccaggtccaccaagccgttggaaagcttgtaaaaccccggttggggcttacccaaggccggggccctgttgttgttgggttccgccgccgccgccggtttggcctacccgttgggggaccccgtcaacggtttttccaacgccacccgcttccggtcctttttaatttccttaatggccctccggttggcaacaaactcaaggaaggccggttccgccttaattttggccagcaggaagaagcataggaccgtgtccctaactttttcc

SEQ ID NO: 23111 - DNA, 261 bp, Zea mays
  Clone ID: MRT4577_121081C.1
cacactgggcatgttgatggtaggattgattatgcatcttgaggcattcatgtttgaaaagaacttaatgcagccaggttcacagcagacgacggccatacgctgacacgatgaagtcattagatgctgcggacaccgattaaagctcattgagctcacgcaatcaggtacccgttcgctctgctgtctgtcgttcttctcttcccgctggtcttctccccctctccagaaaccctaggcgccgcgccctttgaatgaatt

SEQ ID NO: 23112 - DNA, 1636 bp, Zea mays
  Clone ID: MRT4577_121082C.1
acctcacctcacctcactcccaggcaagtagccaagaagagagaagcaaagtagaaagagtgcgccggagcaagaaaccacgccatccatggaagacccctacacgagcttcctcaagaacccccactactactactgcacttcctccttccccgcccctccccccacccctcacctccctcctcccttcccaccttacgccgccctctaccccgccgtggccgcggctgcgaccgcagctcctcaccaccagtacccctcgttcttccagcaccagccggcgcagcccgctcatcactacagcacggcgcctccctcccctccgctccgggaggcgctccccctcctctccctctcgcccacgcccgccgcccgccctcgtgccgcccagcagcacgacgtcgccgacaccgattccgacgacgatgacaacgactgctgctaccacctgcagcaggaggtggcggcgggctcgaggacgacctctgcgcgcacaccgctcttcgccgacctcaactgcgtgccgtcctgctgcgacgacggcgacggcgacccgatggacgtcgaggcctcctggtccacgtccacggacgacgccgccgttgctctgcgcatcggcctgccggccgcggaagctgaccttctgtccgggctttcgggcagggccgcggaagaggacgaggaggaggaagatgattgcaagccgggaggcgggcacgaggaggttccgctagggttctcttcgtcggcgccgatcgggaggctgaccaaagggcagtactggatccccaccccgtcacagatcctcattgggcccacccagttctcctgccccgtctgctacaagacattcaaccgatacaacaacatgcagatgcacatgtggggccacgggtcgcagtaccgcaagggcccggagtcgctgcgcggcacgcagccgacggcgatgctgcggctgccgtgctactgctgcgcggcggggtgccggaacaacatcgaccacccgcgggcgcgcccgctcaaggacttccgcacgctgcagacgcactaccgccgcaggcacggcatcaagcccttcatgtgccgcaagtgcggcaagcccttcgccgtgcgcggcgactggcgcacccacgagaagaactgcggcaggctctggtactgcgcctgcggctccgacttcaagcacaagcgctccctcaaggaccacatccgggcgttcggccgcggccacgccgcctgcggcgtcgacgactgcttcgacgacgacgacgaccgcgacgacccgtcgtcatccgaggtcgaccacgcagccaccaacactactagtaacagcaccactactaccgctgccgccgccaatgctcaccaccatcaccacaccagctggaagccgccgccgccgccactgtcgtcgtcgagcagaggctccggcgacgaccgactactatagatcgacaagggtgagtacgtacggtcctactacatacatcctacacagcaaccagtcgatctgtagccaaatgcaaacgtatgcttgtgtgcgtgtgtgtataaccatgcatatcatccatctgtccgtgtcttactcagtgtttaaaatagcgggctaaggcatttatcctcggccttttttaac

SEQ ID NO: 23113 - DNA, 1118 bp, Zea mays
  Clone ID: MRT4577_121083C.1
ttttgttgcaagctctacgggatctgcgaaggttgggtacctcgaggcggggcgggaaaacgttgttggaggcgcctcacatttagcggacaggagagtttagcggctcttgttggaggcagccttaaaccgtccgcacgccgtcttccccatctcgcgcagcgctactgccggctgtccggagtcccgaccaccgtcctcggctccccgccgtgaatccatcatcccgtaatggagacctgcccgtcggtgaagaacatcctcttgctggactcggagggaaagcgcgtcgccgtaaagtactacagcgatgactggcctactctatccgcgaagctggccttcgagaagtcggtatttaccaaaacccagaaagcgaatgctggaacggaagttgagattgtaatgtttgacggtcaaattgtggtatacaagttcatccaagacctgcacttttttgttactggaggagaagaagagaatgagcttattttagcatcagttcttcagggattctctgatgctgtcgaacgacttctcaaaaacatggttgacaaaaggacagcactcgagaatttggatatgatcctattgtgccttgatgaaattgttgatggagggattgtacttgaaacagaaggaagagagatagctgaaaaggtgtctggtcatggattggagggtgcttcatcagctgagcagactttagtcaacgccctaacgcaagcaagagagcatttggcgaagtctcttctcatgtgatgctatgctttatatattagggtgacgatggagtatctattactgtgtctggatgacacagttttttttggttagcagtggacccaaaaaaaatgtctgaaatctttgaatgtgtagaatggcatgttgtgtccaaaattttcatttgtaagccttcaaagttgtgtagcatgttttttcttctaattttgactggtttagttatcggtcgttttgtttaatctcttcctgttggaaacggtaaaatagcatgcttgatggcatgttgtaacttaacaaattagggctacactttgtttaagatggtaatatgtctccctgaaaccaaaacattattggaatctgccaaaaattca

SEQ ID NO: 23114 - DNA, 491 bp, Zea mays
  Clone ID: MRT4577_121084C.1
aacacacagcagcgccgcaccagccacttgtagccaccaccgcgctcatgtccttggtctctctctcagatcctccgctctcttgcccgagtcgctagcttccctgccccgcctcctcccgtccccgtggacagacagctccccccacctccgattgcatagcactcctagctaaagtcaactgcttcgacaacgacaccagaggcacgtaggggacacctcgtttatctcttgcggtcactacaacgaggtctacctctccgccaagggagagccattcccctcagaccccaagaagcagctggagctagcagagccggctgtggtcaactcgtgggagagcgcccggggcccgaagtgcgggggcggggaccggatcactggccttttgggcaccgccgtgaacgtgcggcgcgtggggttcgccaacatggggaacactcctgggtccggggtgctcttttcctggagcccccacaccggagagaaga

SEQ ID NO: 23115 - DNA, 952 bp, Zea mays
  Clone ID: MRT4577_121085C.1
ccggccgggaacgtagaatgggcttccagttgccaccgtggcaccgcaggcttcccttccgtttcgtcatcctccggtctcgcggccggccggaaaaaacgtccgcacgccgttttccccatctcgcgcagcgctactgccggctgtcccgagtcccgaccaccgtcctccgcggctccgctccccgccgtgaatccttcctcctcccgcgatggagaccttcccgttggtgaagaacatcctcctactggactccgaggggaagcgcgtcgccgtgaagtactacagcgatggctggcctactctctccgcgaagctggccttcgagaagtcggtcttcgccaaaacccagaaagcgaatgctggaacggatgcagagattgtaatgtttgatggtcaaattgtggtatacaagttcatccaagacctgcacttttttgttactggaggagaagaggagaatgagcttattttagcatcagttcttcagggattctctgatgctgtcgaacgacttctcaagaacatggttgacaaaaggacagcactcgagaatttggacctgatcctattgtgtcttgatgaaattgttgatggagggattgtacttgaaacagaaggaagagagatagctgaaaaggtgtctggtcacggatcggagggtgcttcatcggctgagcagactttagtcaatgccctaacgcaagcaagagagcatctggcgaagtctcttctcatgtgatgttgtgctttacattttgggggtgacgacggagtatctattattgtgtctggatgacactattctttttgttagcaacggagaaagaaaaatgtctgaagcatttgaatgtgtagagtggcacattaattccaaaattctcatggtcatctataagccttcaaagtctgcagcatgattgttccgaaaaaaaaaaaaaaaaaagcggcc

SEQ ID NO: 23116 - DNA, 1212 bp, Zea mays
  Clone ID: MRT4577_121086C.1
ctcgaggccggccggggctactgccggctgtcccgagtcccgaccaccgtcctccgctcccggacgtgaatccttcctcctaccgcgatggagaccttcccgtcggtgaagaacatcctcctactggactccgaggggaagcgcgtcgccgtgaagtactacagcgatggctggcctactctctccgcgaagctggccttcgagaagtcggtcttcgccaaaacccagaaagcgaatgctggaacggatggtaatttacatctgatttctcttaatacggaagaattgttttcgactgatggtgagcgttgttgtgctcccttgaggtagtccggagtacttgattaacattatcatctcataatgaactcatgagtgtgatgtattgatgtgcctgtttgcgtgttttttcttttcttcaagtatttcatatgtttatttgtttctctttaacagcagagattgtaatgtttgatggtcaaattgtggtatacaagttcatccaagacctgcacttttttgttactggaggagaagaggagaatgagcttattttagcatcagttcttcagggattctctgatgctgtcgaacgacttctcaagttatcttccctctattgaagtttatcttttcaaccattgtttgttctgttacatgttattgtgttaatgctgattgtatatggatgtgtttccaaccttggtggtttcaggaacatggttgacaaaaggacagcactcgagaatttggacctgatcctattgtgtcttgatgaaattgttgatggagggattgtacttgaaacagaaggaagagagatagctgaaaaggtgtctggtcacggattggagggtgcttcatcggctgagcagactttagtcaacgccctaacgcaagcaagagagcatctggcgaagtctcttctcatgtgatgttgtgctttatattttgggggtgacgacggagtatctattattgtgtctggatgacacaattttttttgttagcaacggagaaagaaaaatgtctgaagcatttgaatgtgtagagtggcacattgcttccaaaattctcatggtcatctgtaagccttcaaagttctgtagcatgttttttcttctaattttgactggttcagttatttgtcgttaaaaaaaaaaaaaccccaaaaaaaaaaaaaaaaaagggcggccaaaaactagtgagctc

SEQ ID NO: 23117 - DNA, 2263 bp, Zea mays
  Clone ID: MRT4577_121087C.1
cccgaccaccgtcctcggctccccgccgtgaatccatcatcccgtaatggagacctgcccctcggtgaagaacatcctcttgctggactcggagggaaagcgcgtcgccgtaaagtactacagcgatgactggcctactctatccgcgaagctggccttcgagaagtcggtatttaccaaaacccagaaagcgaatgctggaacggaagttgagattgtaatgtttgacggtcaaattgtggtatacaagttcatccaagacctgcacttttttgttactggaggagaagaagagaatgagcttattttagcatcagttcttcagggattctctgatgctgtcgaacgacttctcaaaaacatggttgacaaaaggacagcactcgagaatttggatatgatcctattgtgccttgatgaaattgttgatggagggattgtacttgaaacagaaggaagagagatagctgaaaaggtgtctggacatggattggagggtgcttcatcagctgagcagactttagtcaacgccctaacgcaagcaagagagcattttgcgaagtctcttctcatgtgatgctatgctttatatattagggcgacgatggagtatctattactgtgtctggataacacagttttttttttggttagcagtggaccaaaaaaaaaaaaaaggtctgaaatctttgaatgtgtaaaatggcatgttgtgtccaaaattttcatttgtaagccttcaaagttgtgtaccatgtttttttcttctaattttgactggtttcgttatcggtttttttgtttaatctcttcctgttgaaaaaggtaaaatagcatgcttgatggcatgttgtaacttaacaaattagggctacactttgtttaagaaaaaacaaaaaaaaaacatgttttttttttctaattttgactggtttcgttatcggtcgttttgtttaatctcttcctgttgtaaacggtaaaatagcatgcttgatggcatgttgtaacttaacaaattagggctagttgagattgtaatgtttgacggtcaaattgtggtatacaagttcatccaagacctgcacttttttgttactggaggagaagaagagaacgagcttattttagcatcagttcttcagggattctctgatgctgtcgaacgacttctcaagttattttccctctattaaactttatcttttcaaccactgttttgttctgttacatgttgttgtgttaatgctgattgtatatgaatgtgtttccaatcttggtggttttagaaacatggttgacaaaaggacagcactcgagaatttggatatgatcctattgtgccttgatgaaattgttgatggagggtaaatccttatcttactatatacatgatattagggcttcttttcttgttccctttactgtgtacatttattattcttcctttgctctgaaataatctgactgtcatctgccgcatgtttgttttttttgaactgggggccatggcaatagagtaatgtccgagcgtctattttgtaatggttttaatcactggattcaaaggtttagcaataggatctttctcaagcttagagatgaataacgtcacacattagtatgtaattatttgtggcattatacctaattttcttgaatgattacacaggattgtacttgaaacagaaggaagagagatagctgaaaaggtgtctggtcatggattggagggtgcttcatcagctgagcagactttagtcaacgccctaacgcaagcaagagagcatttggcgaagtctcttctcatgtgatgctatgctttatatattagggtgacgatggagtatctataactgtgtctggatgacacagttttttttggttagcagtggacccaaaaaaaatgtctgaaatctttgaatgtgtagaatggcatgttgtgtccaaaattttcatttgtaagccttcaaagttgtgtagcatgttttttcttctaattttgactggtttagttatcggtcgttttgtttaatctcttcctgttggaaacggtaaaatagcatgcttgatggcatgttgtaacttaacaaattagggctacactttgtttaagatggtaatatgtctccctgaaaccaaaaaaaaaaaaaaaaaagccaaacaaaaaaaaaaaaaaaaaaaaaaaaaaaaaaaaaaaaaaaaaaaaaaaaaaaaaaaaaaaaaaaaaaaaaaaacaaataaaataacaaaaaattaccataat

SEQ ID NO: 23118 - DNA, 191 bp, Zea mays
  Clone ID: MRT4577_121088C.1
ttgtttctctcccaccaaccaacgaccttggcctggccattttcgatgagggcggcctttcccttcctccccacatacccatgcccgatttacactattgactccgccccaattctgataacaaacccctccgcctaagcatgtctcctcccagtctaccccatccagcacagagagggagaattactcac

SEQ ID NO: 23119 - DNA, 347 bp, Zea mays
  Clone ID: MRT4577_121089C.1
cgaagtaattaattggagctacattgagttgattggttaccaggatggtgcggatctcactgagaagaaacctggtggaattattgcccttctggacgaagcttgtatggttgccacatcgacacctggaacatttgctcacaagactggtcaaacttacaaaaatgaacagcgctttgctgaaccaaaattatctcggtcaggcttcaccatatcccagtaaggtggacatggcacctatcgaaccgcattatttctggacaaggaccaacattatggtggtggcgagcatcaaggcccgatgcgggggttaaaatgggcaattgacccaggcccttaccgttttc

SEQ ID NO: 23120 - DNA, 413 bp, Zea mays
  unsure (1)..(413): unsure at all n locations
  Clone ID: MRT4577_12108C.1
cgttccatcaccttctattcaccatgagcaacccgcgttaccccgccggcaactaccacaacaccaagcctgacggcacgtactactacacaaactcgtcaaaccccaactcgtactactacaacaacagcaacggctcctactactaccagaacgccgacggctccaagtactacaacaaccccaacaccggcacctcccgctacaccaccccgagtggctatgaaatcaacaccaaaggtggcagaaagtattaacgggctttcttttcgtggccaatggctctattaacctatgccataatctctgaggccacccaagcatgacaaaggctaaccctgcccgctatttacctgtatatcgaatanaacgacanacgaaaagaaaaaataaagccttcttgtcctacttca

SEQ ID NO: 23121 - DNA, 366 bp, Zea mays
  Clone ID: MRT4577_121090C.1
attcggctcgagggtcaacctgtttgtttcgaccgattgggtctgcaaggcaccactactgactgccacacgacgtgaaagaagtgccctcgtagcacgctgtggttcaagtactgaggcgacctgaacgcacctatgctgactgggctcgtgctcttcgagccatggctggcgaacctctgaccgtctatggacctgccacaccacccactcggtgctaggaatgtcctcacggcccctcctgaggctaatgtcgacgctcccattcctgattcggcccttgtaccacatgatcgacacggacccagcctgcagcgagatcaacggcgtctttttggacgtgcaaaacatcattgtaaccttgat

SEQ ID NO: 23122 - DNA, 252 bp, Zea mays
  Clone ID: MRT4577_121093C.1
accatgtaatcatgtttatagtacaggtacaaatactatgttagttgcattgtataatttggtacatgcgttgtatttttctagttctactacttatcgtcatattattccctttgtatttttttctacaacgaacacatttctttgacgcattcttatatttttcttttttgatattatatcaatgtttatacaagcatagcattgcagattggcttccaacattttccccctatgtttaatattttattt

SEQ ID NO: 23123 - DNA, 1510 bp, Zea mays
  unsure (1)..(1510): unsure at all n locations
  Clone ID: MRT4577_121094C.1
cattgggtacctcgaggccggccggggccctcgccgccgcccccgctcgcgctacacttcgcttccccagtctcccctcccccgctcactatggcgtccacaccgcggctcgctcgcctcgccgcagccgtcgcggcgtggatgctagccgctgctgcttctgctggtgtggaggccggggatccgccgctttcgcccaaggggctcaactacgaagtggcggcgctcatggcggttaagagccggctgcgggacgagaggggggtcatggccctctgggacatcaactccgtcgacccctgcacctggtccatggtcgcctgctccccggacaagttcgtcgtctcgctccagatggccaacaacggcctgtccgggacgctgtcgccgagcatcgggagcctcagccacctccagacaatgtcactacagaataacagaatatcaggtgaaattcctccagagatagggaagctgatcaatctgaatgctcttgacctttccagtaatgagttcattggtgatatcccaagttcattggggcacctgactcgactaaattatctacgccttgataggaataacttgtctgggccgatcccaacagatgttgctaggcttccaggtctcacattccttgacttgtcattcaacaatttaagtggnccagttccaaaaatctatgcacatgattacagtcttgcggaaatcgattcctttgcaattcctcagttatacatggttgttcagatgtgacagcaatgactaatgggacaatgtcgagacaggtccaaaaggccaagaaccaccatcaattagctttggcaatttctctaagtgtcacctgttccacaatattagttttgttgttcgtgtattggctaagttattgcagatggcgcttgccttttgcttcagctgatcaagatctagaattcgaattgggccatgtgaagcattttgcttttcacgatctgcaaagtgcaacggacaattttaattccaagaatatattaggtcaaggaggttttggtattgtgtataaaggctgtttgagaaatggaactttagtggcagtgaagagattaaaagatcctgatgttaccggtgaagtccagtttcagacagaagttgagttgattggccttgctgtgcacaggaatctcttgcgtttgtatggattttgcatgacctctaaagaacggttgcttgtatatccatatatgccaaatggcagtgttgctgaccgtttgagagattatcgcaatggaaaaccatctcttgattggagtaaacgcatgcggattgctcttggtgctgccagggggttactctaccttcatgaacaatgcaatcctaagatcatccacagggacgtcaaagctgcaaacatattgctcgatggaaatttcgaagcaatcgtcggggattttggattggcgaaacttcttgaccgtcaggaatcgcatgttactactgcagttcggggcactattgggcatattgctcc

SEQ ID NO: 23124 - DNA, 243 bp, Zea mays
  Clone ID: MRT4577_121095C.1
cgggcgcaggacctttttttttttttttttttgaccatagccctaaacattgacagttgtatagaacaatctctataacaacttcacaatagtagagacgccacttgctatccattgaaagcgctatacaaggtgcctctttgatagccacttgctatccatggaaatggcgctataaggcttctttttttcaggcctctgctcacttggctatggtaacaccaacctatgtggaggtgcgaa

SEQ ID NO: 23125 - DNA, 2743 bp, Zea mays
  Clone ID: MRT4577_121096C.1
ctaaaaatgaagcaagaaactgaatttgacccaggccactgccgtggtagtgtggcacataaatgaattttgttacataactgaatttgttaggagcacacatttcagaactggatttttgagttgcacacacatttcttttgtttcagaactgaatttttgaggtgcacaaacatttattttattttagaattgaattttttgttttagaactgaatttttagtgaagagcacacatatttaatagtttcggagcatgacattttaaaactaatacaaaactgaatttattacagttatacatggttgttcagatgtgacagcaatgactaatgggacaaatgtcgagataggtccaaaaggccaagaaccaccatcaattagctctggcaatattagttttgttgttcgtgtattggctaagttattgcagatggcgcttgccttttgcttcagctgatcaagatctagaattcgaattgggccatgtgaagcatttcacatttcacgatctgcaaagtgcaacggacaattttaattccaagaatatattaggtcaaggaggttttggaattgtgtataaaggctgtttgagaaatggaactttagtggcagtgaagagattaaaagatcctgatgttaccggtgaagtccagtttcaaacagaagttgagttgattggccttgctgtgcacaggaatctcttgcgtttgtatgaattttgcatgacctctaaagaacgattgcttgtatatccatatatgctaaatggcagtgttgctgaccgcttgagaggtaactcaatcgtctacaacatttcaatgttaatgaagtctacaattggcattctgtgcaagtcttttgcatttcttgtaaatattttgtttaacattatgtgttttggttggttctttgccacgaccatatactctgcttatatatccttatacatttgtaatatacggggttgcaattttcagattatcgcaatggaaaaccatctcttgattggagtaaacacatgcggattgctcttggcactgccaggggttactctaccttcatgaataattagtgtttttgtatattaatgtatgagtaggatcacaaataaattacgaaacatttttctataatattataacacatttgtacatgagttatcgtggtattttatctttccgttgcaacgcacgggcatccacctagtattacttaagatggtactccctcctttctgttttatttgtcgtgttttagttcaaaaatgaactagccggcgacaaatattcaagaacggaggtagtagtttgaatccttgaactcattttttgttgacattttcctatttatcgcaggaagctatgcattctaaagggtgtctttccacgtcagccaaagaagaaggtggaagggaaccacaagacctactaccacacaaaggatattgcattcctcgctcatgaccctttgatcgagaagttcagggagattaaggtccatcgaaggaaggttaaaaaggctgttgctaagaaaaacagggatcttgcagacaggctgttgaatcggccaccaacttacaagcttgataggcttgtccttgaaaggtatccaacattcgttgatgctcttcgtgacttggatgactgccttacaatggtgcatctgtttgcggcattacctgctgttgacggtgaacgtgttgaggtcaaacgaatccataactgccgcaggtttatcaaatatcctacatggtaaccttcaaacctgcatgtaatctgtggactgcactttgtggtcctcacatagtcacatccaaagttaagccatgaatgcttgacatttatttccgtgaagggcatatattatcaggctgaagttcaaggacaaaagatcacctggctaactccgcatgctcttcagcaagtattaactgatgatgttgatttcaatgtgatgctttcttttctagaattctatgagactcttctaggatttgtgaacttcaaaatctatcattcaataaatgtaaattatcctcctattctggatccacgtctggaagctttagctgttgagctctatgcattgtgccgatacatgtctgctggttccagaagaatgattgggaattcacaaactgacgaagtaatggaagataaggatgagaaaagtaaagctgaggaagtaattgaggaagagaaggttgtgaagaataaagcaagctcaaaagcagatgaatctgagttcagattagcacagcttcaacatcagctcccaaccaatgaacctggtgcactgatgaatcttgtagaagaatcaactgccgatgatgcagatgatgatgatactaaagattgtaaaggtttatttaagaacttaaagttctacttgagtcgagaggtgcctagggagtccctgttatttataattccagcatttggagggactgtttcatgggaaggagaaggagctccatttaaagaaatagacgaagatatcactcaccaggttgattccatttgcaataatttattacaccaaagtttaactatatagacggagacattgtgtaccatccctaaagtaagatgcccctctaagtaccacgacagcaatgccatactagggcaatagttactacaatacaatttttgtatgtggctaactgttcatattttacactctaccatcatatgatcatatctagcgaagtaaaataaaatggcctgtggattttttt

SEQ ID NO: 23126 - DNA, 1492 bp, Zea mays
  Clone ID: MRT4577_121098C.1
taaaaaaaaaaccagaaaacgcagccacctccctccaggctccagctagcgtccgtccgtccgtccggccggccagcagcagcagcagactcgctcgctccaagccaggcgccggggcgcgcgatggacgacgacaagcagcagctggcgcggcaggaggaccaggcagggcgcgcgtcgtgggtccccggcgcggtcatcgtgggcgcgggcccgtcggggctggccgtggcggcgtgcctggcggcgcgcggcgtgccggccacggtgctggagatgtcggactcgctggcgtccacgtggcgccaccgcacctacgaccggctgacgctgcacctgccgaagcgcttctgcgagctgccgctgctccccttcccgcgcgggtacccggcgtacccgtccaagggccagttcgtggcgtacctggaggcgtacgccgcggcggcgggcgtggcgccgcggttcggcgcccgcgtggaggaggccgcgttcgacgcgggcgccggcgcctgggcgctccgcctggcgggcgctggcggcggcggcgccggcgacctgctcctggcgcgctggctcgtcgtggccacgggcgagaacgccgtgccgcgcctgcccgacctgcccggcgccgcgcgcttcgccggccgcgtcctgcacacgtgcgactacaggtccggggaggagttcgcggggaggaaggtgctggtggtcgggtgcggcaactccggcatggaggtcagcctggatttgtgccgccacggcgccgcgccgtcgatggtggtgcgcaacacggtacatgtgctgccgagggagatgctgggtctctccacgttcggcatcgccatggcgctgctgaagctgctccccgtccgggtggtggaccggatcctcctggcggcggcgcggctggcgctgggcgacacgggcaagctcggcctgaggcggcccaagacggggcccatcgagctgaagaacctcaccggcaggacccccgtgctggacgtcgggacgctagcccacatcaaaaccggcaaaattaaggtagtgggagcagtgaaggaggtgacccagcgcggggtcaggttcgcggacggcaaggaggagcagttcgacgcaatcatacaggccacggggtacaggagcaacgtgccgtcctggctcaaggacggaggcgacgtgttcacgagcgaagggatgcccaggatccccttccccaacggctggaaagggaagaacgggctctacgccgtcggcttctcgcagcgggggctgctgggcgcctcggccgacgccctcaacatcgccagggatatacaccgtcagtggacggacacggccacaagacccgtcgtgctccgatgtaacagtgctgtcgtctgactcgttttgaccccgcgggaaccccccgtccgtgtgtgtgtgtgtcactgtgtgtttagtgtacagaagtaacacaaccgatgcaagtggttatatatatatcccgtctctt

SEQ ID NO: 23127 - DNA, 1198 bp, Zea mays
  Clone ID: MRT4577_121099C.1
acagctcgtgcccgtccgtcccggcggctctctcaaacccacactccccaccttcttgcggacaagccggagccgacgatcccctcgcccgcgccgccgtcgacgcggcctcttccgctcgccgggatcggagagaactgtataaacggttcggtgattgaagcgacttaagtcttaaccatgagtagcataggaaccgggtatgatctgtccgtcaccactttctccccggacggccgtgtcttccaggtcgagtatgctggcaaggccgtcgacaacagcgggacgattgttgggatcaagtgcaaagatggagttgtcctcggtgtggagaagctgataacatcgaagatgatacttgccgggtcgaatcggagacttcactctgttcaccggaactctggcttggctgtggctgggttagcagcagacggtaggcaggtggtctccagagcaaagtcagaagctgccaattatgaaaaggtatacggagaacccatgcctgtgaaggaattagctgatcgtgtagctagctacgttcatctgtgtacactctactggtggctcaggccttttggctgtggagttattcttggaggttatgatagggatgggccacagctctacatgatcgaaccttcagggctctcatataaatattttggtgctgctctgtgtaaaggaagacaggctgcaaaaacggagatagagaaattgaagctttctcagctttggtgctgccttggggaaaggaaggcaggccgcaaagacttagatagaaaagttgaaacttttggagcttaccttccgagaaggcattgttgaagttgcaaagataatttatggagtgcatggcgaatccaagggcatagctttttagttggagtttagctggatttgttatgaattgaacccccagcctcagaaggttccgaatgaattgttggagcaggccaaagctgccgctcaggcagctttttaggagatggattctgacttaaaaacatggcaaataaaaaaaaggttcatgccccccccccggtgatatctttgatccctttgggggggcagactggacattgcccatttgttgggttttatttggatgtcatgttaaactcccttcatggaagtttgaatttggattggctgatggaaaaaaaaaaaaaaaaaaaaaaaaaaaaaacccggccctccc

SEQ ID NO: 23128 - DNA, 621 bp, Zea mays
  unsure (1)..(621): unsure at all n locations
  Clone ID: MRT4577_12109C.1
atcacgcactgcacttgcttgctgaatggatcgatcgagatagtcgtttgttctttgttgcgatcagtcgtaccctttaatttacggctgatccgttcttctcatccaccacgcgtctccagttttctctatgcttcttgactttctcggcctgcctgaattttttctcgctgctgctgctgctgctgctttgcgtgctggagcaggatgcaatgtggatcatctaaggctggtatctgaacatctcaggcagtcataaccgtgctatctgattaagtaattcaaagtaaaaaaaaacagtcagtctgttccgttccaacttccaccaggagagtgtgccctgctgaataattttcgctgaaccttttttttgttgttgttgttgctgctgctgggaaagtaatcgctggaatgaaccaaaagacgaaaatgacgtgaacaaactctggacacaagcttggaatctccgtctcttggggtccatctgcatggaccttccagaagcagtgaacagcatttcccagccctcaatcattcgtcttcatccctgtccctgtcagcgacagcttcgttaagggatggccgncgnncgttcatcagcagcacgtttcacatgcccta

SEQ ID NO: 23129 - DNA, 925 bp, Zea mays
  Clone ID: MRT4577_1210C.1
gggcacaacaccattggacctgatcctcccacttccgtttcggaacaggcagcggaagcagcccggcagcgggcaggagtgtagccatgggtggcggaggagcccaccgctcgagggacgggcgcggcaggggcagtgggggcggtggcggcgctaagagatgcgcgggtatcggcggcggcggctggcggagctgcggcggcggctcgcgcgggagagcgaagtaggtgcgcacggtgccgtcagagagcgcgacggtgcggcggtcgaggtcctccagcccgtaccgcggtggcggcgggatggctgctatcaccgcctccaccgcggctacggtgagcagcggccgcgacgggggcaggggcggcagaagaggcgacgcgccgggcggagggtggtgctgctcgtgagggtgagggagcggcgaggggaccagaggcgagcggctggcctccccgttgacgctcggggtaggctctgggggcgcggaggcggcagcggcgttgcccgggttggtccgcttgtttgggttggggtcggcggcggacgtcgaagaggacgacgccttggaggcagcgacctgcgggttctgcgacgccgcggtgggcgccgcgggcggaggcagcggcgtggacttgacctgcggattggcggcggacatcatgccggaggatttctagggtttcgtcgggattggaagtcgattttggggaaaaagggctggacgtccgccagctccagctgcgagcccttcttctactggctggacgtcggcaacggcagggacttgcatcaccacaagtgtccacggagcaagctcaactcgcagctcatcatgtacctcggaccaaacgagagggcggcgtacgaagtcgtcgtgggaagaagggcggctcgtgtacaggcagagcggggaccccgtgag

SEQ ID NO: 23130 - DNA, 658 bp, Zea mays
  Clone ID: MRT4577_121100C.1
ccggccggggcgaggcccacgcccgccaccccctgtacgcctgcattgcccctcatgatgcccgggctccaacaacgagtcgcctcacccgagattgtcaccaccatgaagcctcctccccacttgtccgagatagccactgtcgttgatggaggtgtcgagcccgcggtggtggagcgagaggaggacgaggcaagacggctaatcagaggcgagagctgccgcgcatagggccccaaacaggactgtcatcggatgcgcgcctgtgccattgatagagcacgagaggagggcgaggtggctcggcgaatccgaggcggaggcttccacgccgtcaacggacgtgttgagcccgcggtggtgtggacccacgccgaggcgagagcaatccaatgtgaacataggtgttgttcttcttttattttttctatctcgagttccttctccattggtggctgtcggcgaggaggcgcacatcttgcctctccacgagatcgagtccctctgcatgcgctgcagcgagaacttagtctgggcaagcgatgacatgtatcagatcaattgtagcgcctccggtatctagtcagtcccaatattatacaattaaaccacaccctaatgggttgcttactaaaaaaaaaaaaaaaaatttgcggcc

SEQ ID NO: 23131 - DNA, 547 bp, Zea mays
  Clone ID: MRT4577_121101C.1
gttggctgggaccctgacacgacctgaccgacatctgcccaggctcctcgggttgtgtcatcgtgccgttcacactggtgcgtccttgctcctcgttggctgcaactccaacgccaaatcgctgtgggtaaagcactcgtgcgccggacttatccgcttgcttatatgtgcggaatggacaccctgggccgtggcctccgctgctgcggcgagctgatcaaggatggtaccctaaatgctctggcccggaggcggcaccacagcttgactagcacgatcgcggcctagatcaacgatggtaaaggagactttcatgcgctggataagaaggtccttgagtggggtgagcccactgcaccgtccggcaagcaagaactggcggacatgtctgatacactcttgtctctaaattgatccatgttcgaagcgttcgctcctgcgataagcaagcactgagcctgcacgcctcccaacgcgcgcggttgccctcaccagtcaccaccacgggaatgattctacttgccctcgatgaaccatgtacactaca

SEQ ID NO: 23132 - DNA, 612 bp, Zea mays
  Clone ID: MRT4577_121102C.1
ccccctcgagttttttttttttttttttttttttttttttttttttttttttttttttttttttttttttttttttttttttttttttttttttttaaaaaaaacaaaaccccgggggtcctccggaaaaaggaagaacccgccatttttgcaaaggaccccaaacccccctttttgggccaaccttccttttaccattttgcccaaagattgccccgcccaaagcaaagggaaacgggccccccttttaaacttacggggggggccgggaacccaacccacccaaaacggggtggtccttcaaaaacccccccccaaacacaaccggggccccccccgggggttaacaacaacaaccctaacgttgggggccctctccccccccagcctttgtttggaaaaaaaaatccccccctggggcccccccctgtcctccccgttttcgcgggttttttggaccccccccccgtccccggggggccccccaacctccttgccccccttttttttgttgctccccccgttggcccttttttgccaagggccaaggggggagggggggtttaatggcccccggccaccggggggccccctgttccggggggaggggcc

SEQ ID NO: 23133 - DNA, 244 bp, Zea mays
  Clone ID: MRT4577_121103C.1
cggggacatctgaagacacagctaagcagcaacgacccattaaaagcaaaaggttcaaagaggttcggaaaggggatggttctgtgctggagaaaagatgtgggtgcaaattccggtcggcgcactttctgctcttcggtatcagtggatgctgcatgactaccactcctatacacaccatctgtgatgaacatcagatgcgagtaagctctcgacttggaggggggggatataggataagacg

SEQ ID NO: 23134 - DNA, 277 bp, Zea mays
  Clone ID: MRT4577_121104C.1
gcggcgaccggcacctacacgatcgagctcaaggacagccacgaggaggacatctgccaggtggtgctggtggccagcccgtctgcgccgcgctgctcaagcagctggactcggacgacgacgacgaccagtaaactgtaccacggcggcgtcgcggacaggctgcacaaaactataacgatgatacagagcgaacgcgcgcatggcatggatagcagtatccactgaaagaaaaggaagaaaaggaaataaaaaaatgtaacagagtgcttgattc

SEQ ID NO: 23135 - DNA, 103 bp, Zea mays
  Clone ID: MRT4577_121105C.1
agcaagctcactagagcgcccacagtgggtgaccaaatatcaggcctacttatgctgcatggactgtgtgcaagcgctgatgcgcagaccattttgccacaat

SEQ ID NO: 23136 - DNA, 353 bp, Zea mays
  Clone ID: MRT4577_121106C.1
ggaccaagagactaccaacattgggggattaataattgtcattatactagatatgaacaaatttacaacaagaatatgcaatatctatacaccataacaaaagaatatgacaaaactaaattgctggaaatatttccaacttctctgagaaactaatgaaactatttgataccaagatgccaacttgccttcagatcataggaaggcttctacagtacagttgggaggccttcagatcataggaagggcttctacagttcagatcatacgaagggcttctactaacattgccgagagctcagttgacacagtgcgtcgggtgtacataaagacagccaatgaccacatggtga

SEQ ID NO: 23137 - DNA, 458 bp, Zea mays
  Clone ID: MRT4577_121107C.1
gaatcaagcactctgttacatttttttatttccttttcttccttttctttcagtggatactgctatccatgccatgcgcgcgttcgctctgtatcatcgttatagttttgtgcagcctgtccgcgacgccgccgtggtacagtttactggtcgtcgtcgtcgtccgagtccagctgcttgagcagcgcggcgcagacggggagcggcacgtccttgaagtagccgagcgggttggcggggcgcaggctgtcggagatgccgacgttcctggtgccggtcgcgtcggtgaccccgtcgatggcgcgctcgagcttgccggtgccgaagtgcctgcactccagcctcaccttggcgcccgcgatgtactcggtgacgttggtcacgaacccggcgcggcaggtgtcgcagtacacgcggtccctgagcgcctggacctcgtcgcagtccttgcgcgggct

SEQ ID NO: 23138 - DNA, 753 bp, Zea mays
  Clone ID: MRT4577_121108C.1
ctaccctcgtctcaccctccctcaccaaataagggcctgccctttcccgacattcacaggggggcagaggggaaaacacattcatccggcggccatggcctcgattctggtgacgacgaccaccgccaccgccatcctcttatgcgtcctcttctgtgctgcggcggctaacaccaccggggccaacgaccccaacctccccgactacgtcatccagggccgcgtctactgcgacacctgccgcgccgggttcgtgaccaacgtcaccgagtacatggcgggcgccaaggtgcggctggagtgcaagcacttcggcaccggcgaggtcgagcgcgccatcgacggggtgaccgacgcgaccggcacctacaccatcgagctcaaggacagccacgaggaggacatctgccaggtggtgctggtgcagagcccgcgcaaggactgcgaccagacgcagccgctcagggaccgcgccggcgtcctgctcaccaggaacgtcggcatcgcagacagcctgcgccccgccaacccgctcggctacttcaaggatgtcccgctgcccgtctgcgctgcgctgctcaagcagctggactccgacaatgacgacgatcactcacgatcacatactgttgacgacgaccaccgtggtcgtcgctgacaggctgcgcaaaactacaaatcctcttcagtcttcacctgctggcctacaaatataatggtacagagtcgaacgcatggatagcagtatctgag

SEQ ID NO: 23139 - DNA, 269 bp, Zea mays
  Clone ID: MRT4577_121109C.1
ttcttcttcttaagtggaatcctactagactgggttgcgtgcttattagaacatgaacatgttgcaagctgggatgattgttgaaggatgggacaaggccgaggaaggccaaaccttctcagaccctctccgtggaactatctagaagcaaccatcttgcaatcgggggcccaggttgcagttacctatatacccttcttgagcaccattgggccgtgcgtgtgagtctagaagaggcacgagaaatttgtggtgaaagtagttgccct

SEQ ID NO: 23140 - DNA, 381 bp, Zea mays
  Clone ID: MRT4577_12110C.1
cccacgcgtccggcaccggcagcgctccacaggcccaacctggcgttcaaggggccaaaggaggacccggaaccccggaggtccggcttgtcttcgtcctcctcccctttgccatccgccgcccatggcgtccgcttccgcccccgccgtggtggtggttttcgacttcgaccggaccataatcgactgggacagcgacgactgggtcatcaccaagctcggcgccgccgacgccttccagcgcctgcgcccaaccatgcgctggaacccgctcatggtactgctacctgtcctcgtccttccagagcgaagacacgcgccaagtcgatttcggtttcttttccaggacaggatgattggcggagctccacgcccggggga

SEQ ID NO: 23141 - DNA, 608 bp, Zea mays
  Clone ID: MRT4577_121110C.1
tgatggccaacaatcgagtgttttggctaactcttctgctgtaggatcctgatggtactttggaagtttatcaaaaccaaccattctctggataatatatatacatgtccacatgaggattagatgtagatactatatattaatacattaatgatgggaaacaaacttacccagaaacgcatgtccatataatgttttctattatttatgatttctcctttcggcccacgtgactctttattggcaagcagccgaacagccatgtcaaaacatcttagagtcatatggagtggtagcatcgcgttttctgtgtgcgcgtgcgtgaaagtagtcgtcatagcagcacgcaaacacacgtacacatggtaatgggagtcggtgcactgatccccattagcttggtaaagctccgccgaacagcctcgagggttcctctccacgcatatacaagtagcctggttcgaggccgtttacaagtccacgcaattcagtaatccaccatacatttctatatgttcaattgtactgctattgccactccacgtgtaatcaccagcctaaaagcttgtttacaactgaaaaaaaaaaaaaaaaaaaaaggcggccgc

SEQ ID NO: 23142 - DNA, 976 bp, Zea mays
  Clone ID: MRT4577_121111C.1
cccacgcgtccgcccacgcgtccgcccacgcgtccgcggacgcgtgggtctcaccctccctccctcacacaaataataaggaaaggtcccgcccttttcctccgacatccacaaggggggaggggaaaacacgtacattcacccggcggcaataatggcctcggttccggctccggcgacgacgaccgccgccgtcatcctatgcctatgcgtcgtcctctcctgtgccgcggctgacgacccgaacctccccgactacgtcatccagggccgcgtgtactgcgacacctgccgcgccgggttcgtgaccaacgtcaccgagtacatcgcgggcgccaaggtgaggctggagtgcaagcacttcggcaccggcaagctcgagcgcgccatcgacggggtcaccgacgcgaccggcacctacacgatcgagctcaaggacagccacgaggaggacatctgccaggtggtgctggtggccagcccgcgcaaggactgcgacgaggtccaggcgctcagggaccgcgccggcgtcctgctcaccaggaacgttggcatctccgacagcctgcgccccgccaacccgctaggctacttcaaggacgtgccgctccccgtctgcgccgcgctgctcaagcagctggactcggacgatgtcgacgacgacgaccagtaaactataccacggcggcgtcgcggacatgctgcacaaaactacaacgatacagagcgaacgcatggcatggatagcagtatctacggaaagaaaaggaagaaaaggaaaataaaaaatgtatcagagtgcttgattcacttgctgctgtcacccattccccgttcttaacataacatgtgggccggcttggcccaggcacaagcccatctacgcatggcctacggtccgctaaaatatagccctaattatgagccgtgttgtgccgtcacatggatcgatccagcggcataaaaaaaaaaaaaa

SEQ ID NO: 23143 - DNA, 303 bp, Zea mays
  Clone ID: MRT4577_121112C.1
ctcctggaagggccagaacgcatgcagcgcctgaactcgtcaccccatcagcacggatgattatcacgagtacttcaagcgctcattttaggaagacatcgctgcgcaagtgcctcaaggagtggaatgcaattgatcgaaacatgatatatttgacatattcatgatggatttttgtatttgatgtgtcgctttttcatctatcaatgtaattcttggacataacattgcgcacagtaccggcttttggttgatggtgtctggaggtgtgatgagacaaaaccctttgtacgtgatgaatat

SEQ ID NO: 23144 - DNA, 596 bp, Zea mays
  Clone ID: MRT4577_121113C.1
attgggtacctcgaggccggccgggaaaaaaataaagaggccacaggccaccaccattccttccttgttccttccccagctccgcagactgctcatcgccctccctccgcgcccccgatccagatccagatccaggggcttgtcatggcatccaaacgtatcctcaaggaattaaaggacttgcaaaaggaccctccaacatcatgcagtgcaggcaaccatcatgggtcctcctgatagtccatatgctggaggtgttttcttggtgaacattcatttcccgccagactaccccttcaagcctccaaaggtatcttttaagacgaaggtcttccatccaaacatcaatagtaatggaagcatatgtcttgacattcttaaggagcagtggagccctgctttgacaatctctaaggttttgctttctatctgctccctgcttactgatcccaacccagacgaccctcttgtccctgagattgctcacatgtacaagacggatcggcctaagtacgaggcgacagcccgcagctggacccagaagtacgccatgggatgaaatgttcggcgttactggctaaatgcagacgattgtg

SEQ ID NO: 23145 - DNA, 651 bp, Zea mays
  Clone ID: MRT4577_121114C.1
ccgggccgggcttcacccccctcttggccgccaccccctttttactcccccttggctggacgcgccctccccctatggcaaacaaccaccattgctttcttccccaagatcgccccctacgcagaaaggatcgagaaaaggaggggcacgtagaattgaagagcaagagaggatcaaggagaagctgttccccatctcctcttgaagattgcttggggaaaccgtagcaggtgattacacatacaaatcatgagtagcacattaccagttctaagaagaaggagcttgctgatcatcaagggcagaggaaagtagaagaccatacaccatcaatctcaaaaaaatgctggcgatacacagacatgatgtaataacaaacatgcagggaaaggagctgcctttataacgaatgagtgcacaacagagtaatagaagagctgggtgctaaaaaagaaaaatggagagcagactattcgatgatggaagccactttcggactgggggaaggaaactctgaaacatcttaaagtcgggggaacccaaggcttacaaggaaataaaggcaaagggaaaggaacttggaaaagcaaattaacgtgcacggaaacgaccacaggagtagcagaaaacggaacaagctaagttcacagg

SEQ ID NO: 23146 - DNA, 159 bp, Zea mays
  Clone ID: MRT4577_121115C.1
atgtcattcactttgaggactcgtggaacaggcacctactttcctgacccaatttgcgcaaggaccgaccacctactggacgtggggagagaggaaggaatcattcccatcagaataattatcataagtttcaccaccacacccgaccggatatgcctg

SEQ ID NO: 23147 - DNA, 952 bp, Zea mays
  Clone ID: MRT4577_121116C.1
cccacgcgtccgcccagcgtccggagattgctcacatgtacaagacggatcggcctaagtacgaggcaacagcccgcagctggacccagaaatatgccatgggatgaaaatgaaatgaagtcgaaactccatattcggcattactgcttaaatgcagacgattgtggtgttgccccatgaaactttttgtggggacgtatgttcttccattccttgtcgcccgtatgcattctgatccatctaaggatcgagtgctagtccaacatcaacctaccattgccgtcgataatgagatgacttgtgctttctgttataactatgctagtgtcgatgttatttggtaaatgattctcattgagggcttgttcaggcctcagggacaggagtctggaggggatgagagcgattttgacttgtagctgtagaggagctctgctgcccatggcctgctctagggccctgcgggctgcggcagccaaccgagggcattctgtggcctgtggccctcaattgcttctcttctggtctatccaactcacatgtcggcgtcttagcaactgaaaactgtggccatgtttgcttgatacctggagtacctcagccagcacgcgactacggggactaggcacgcatcacaacccgggtgtccgaatggaattctgctcgcgtccgaaatgcttcaacatatacccggtgctgcctcacgtaggggttgtttgctttttgccctcccaggcgtgtgctcggctgctcgcccatgcatcaatcgggatgtaatccaaacaggctcctacagtccatctatctgggttgagcacaacacttaagccacacgagactctccaacaagacattgtaaagggtcctataccctatagagaagatttttttttgtagttttcaaggatgtttactaaatttccctaaacataaaggacacttctttatcctc

SEQ ID NO: 23148 - DNA, 220 bp, Zea mays
  unsure (1)..(220): unsure at all n locations
  Clone ID: MRT4577_121117C.1
gctttgaaagctacgctgggccaggccacacacagctgagtccatcataatagcccagtgccccagtcggcttcactgagcgcgaccactgtctgactctgtactgagtctactgaccagggcagcccctcctccctcccctcccctccgtccgctcgccgccacgtccccggncgacccctcgccgccggagcgcatctcctcccctcacctcccacct

SEQ ID NO: 23149 - DNA, 714 bp, Zea mays
  Clone ID: MRT4577_121118C.1
caggggcttgtcatggcatccaaacgtatcctcaaggaattaaaggacttgcaaaaggaccctccaacatcatccagtgcaggtcctgctggtgaggatatgttccactggcaggcaaccatcatgggtcctcctgatagtccatatgctggaggtgtttttttggtgaacattcattttccgccagactaccccttcaagcctccaaaggtattttttaagacgaaggttttccctcccaccctcaatagtaatggaagcatatgtttttccatttttaaggagcagtggagccctgctttgacaatctttaaggttttgctttttatttgctccctgcttactgatcccaacccagacgacccttttgtccctgagattgctcccatgtacaaaacggatcggcctaagtacgaggcgacagcccgcagctggacccagaagtacgccatgggatgaaatgttcggcgttactggctaaatgcagacgattgtggtgttgcccatgaaacaaaaatgttatcggggacgtatgttcttctgttccttgtgcattctccgatccatctctaggatccgagttctagtccaacattaacctaccattgccttgggtaatgagatgacttgtgcttgctgtggtaaaaaaaaaaaaaaaaaaaaaaaaaaaaaaaaaaaaaaaaaaaaaaaaaaaaaaaaaactcgaggaggggc

SEQ ID NO: 23150 - DNA, 1042 bp, Zea mays
  Clone ID: MRT4577_121119C.1
tgggtacctcgaggccggccggggcaaaccctgtgttagatatttatgtatgtatatgtaagcctatattattttttttgccactacgtattcatatgcagtgtgaggaggtatgtatattattgccaaaaaaaaaaaaaaagaggccaaaggccaccaccattccttccttgttccttccccagctccgcaggctgctcatcgccctccctccgcgcccccgatccagatccagatccaggggcttgtcatggcatccaaacgtatcctcaaggaattaaaggacttgcaaaaggaccctccaacatcatgcagtgcaggtcctgctggtgaggatatgttccactggcaggcaaccatcatgggtcctcctgatagtccatatgctggaggtgttttcttggtgaacattcatttcccgccagactaccccttcaagcctccaaaggtatcttttaagacgaaggtcttccatccaaacatcaatagtaatggaagcatatgtcttgacattcttaaggagcagtggagccctgctttgacaatctctaaggttttgctttctatctgctccctgcttactgatcccaacccagacgaccctcttgtccctgagattgctcacatgtacaagacggatcggcctaagtacgaggcgacagcccgcagctggacccagaagtacgccatgggatgaaatgttcggcgttactggctaaatgcagacgattgtggtgttgcccatgaaactgttatcggggagacgtatgttcttctgttccttgtgcattctccgatccatctctaggatccgagttctagtccaacattaacctaccattgccttgggtaatgagatgacttgtgcttgctgtggtaactatgctagtgttgatgttaatgattctcattgagggcttgttcagggatcggagggtttaggggattttgacttattggcgagctctgctgcctgtggcccgctttggccagtctatatctactattattacgctagaaaaaaaaaaaaaaaaaagcggcc

SEQ ID NO: 23151 - DNA, 134 bp, Zea mays
  Clone ID: MRT4577_12111C.1
tcatccagaaaatatgaaatacaacgtgaagataggcatcattggtggatcaggacttgatgatccagatttttttaaagatgcaactgagcaaaaagtgagcactccttatggcgatccatcagatatgctca

SEQ ID NO: 23152 - DNA, 155 bp, Zea mays
  unsure (1)..(155): unsure at all n locations
  Clone ID: MRT4577_121120C.1
acggggcatgcacgcgnacaaagctcggaatacggctcgagtccctcaactaggggcaaaagggttgggcgggataaggcccggggagggggggccttattattttacatatttgcttcactgcattatattttctttttggtaccaaatccatg

SEQ ID NO: 23153 - DNA, 1051 bp, Zea mays
  Clone ID: MRT4577_121121C.1
tttcgtcgttgcgattacgggttggctgtctaattgtccaggcggtaatgatagtatcttgtacctgaaccggtggctcactttttctaagtaatggggaagaggactgaaacatgccactgaaagactctactgagacaaaaagatgggctgtcaaaaaggtagaggaggtaggatgggcagttggtcagatctagtatggatcgtacatggacgatagttggagtaaaaaaaaaaaaaaaaaaaaaaaaccaccattccttccccaactctgcaggctgctcgtcgccctccctccacgccggacgcgccccgatccagatccaggggcgtaacatggcatcaaaacgtatcctcaaggaattaaaggacctgcaaaaggaccctccaacgtcatgcagtgcaggtcctgctggtgaggatatgttccactggcaggcaaccatcatgggtcctcctgatagtccatatgctggaggtgttttcttagtgaacattcatttccccccggactaccctttcaagcctccaaaggtatcttttaagacgaaggtcttccatccaaacatcaatagtaatggaagcatatgtctcgacattcttaaggagcagtggagccctgctttgacaatctctaaggttttgctttctatctgctcgctgcttactgatcccaacccagacgatcctcttgtccctgagattgctcacatgtacaagacggatcggcctaagtacgaggcaacagcccgcagctggacccagaaatatgccatgggatgaaaatgaaatgaagtcgaaactccatattcggcattactgcttaaatgcagacgattgtggtgttgccccatgaaactgtctgtggggacgtatgttcttccattccttgtcgcccgtgtgcattctgatccatctaaggatcgaatgctagtccaacatcaacctaccattgccgtcgataatgagatgacttgtgctttctgttataactatgctagtgttgatgttatttggtaaatgattctcattgagggcttgttcaggcctc

SEQ ID NO: 23154 - DNA, 367 bp, Zea mays
  Clone ID: MRT4577_121122C.1
ccttcactctccctcatctccttcctgcccccgccttgagtcccccccatgcccgccgtgaatctcgccggtgcaatgaccacgcctgcccttaactccagatgcccgccttccaaacccgacgcctccttctatcccccgcaacgagctagcatcacgcgagtgggtattccttccattgccgtcaccgagcttccacagtaggcgactgacctccatagtatgcggtaagcttccaatcagtgcctccgcccccatccataataccccattccatccttggcgcaaccttccaacgacgatgcctactcttccacccaacatgcctgccattactgcttttaaaggaaggacacaggtgttgccg

SEQ ID NO: 23155 - DNA, 810 bp, Zea mays
  Clone ID: MRT4577_121123C.1
aaccgaggccacaggccaccaccattccttccttgttccttccccagctccgcaggctgctcatcgccctccctccgcgcccccgatccagatccagatccaggggcttgtcatggcatccaaacgtatcctcaaggaattaaaggacttgcaaaaggaccctccaacatcatgcagtgcaggtcctgctggtgaggatatgttccactggcaggcaaccatcatgggtcctcctgatagtccatatgctggaggtgttttcttggtgaacattcatttcccgccagactaccccttcaagcctccaaaggtatcttttaagacgaaggtcttccatccaaacatcaatagtaatggaagcatatgtcttgacattcttaaggagcagtggagccctgctttgacaatctctaaggttttgctttctatctgctcgctgcttactgatcccaacccagacgatcctcttgtccctgagattgctcacatgtacaagacggatcggcctaagtacgaggcaacagcccgcagctggacccagaaatatgccatgggatgaaaatgaaatgaagtcgaaactccatattcggcattactgcttaaatgcagacgattgtggtgttgccccatgaaactgtctgtggggacgtatgttcttccattccttgtcgcccgtgtgcattctgatccatctaaggatcgaatgctagtccaacatcaacctaccattgccgtcgataatgagatgacttgtgctttctgttataaaaaaaaaaaaaaaaaaaaaaaaaaaaaaaaaaaaaaaaaaaa

SEQ ID NO: 23156 - DNA, 215 bp, Zea mays
  unsure (1)..(215): unsure at all n locations
  Clone ID: MRT4577_121124C.1
gaacacatatcgataatgttactggggcaaattattcaagaaagggtgagaggagcttcgatttacttgcctgggaccgggaaataaatcgaagctcctttcttttttttcttgaacacacctatgangatgtctactggggcgactttttttttatttatgggcagagagtgagcttctggggtacaacatgggtatgacgcctggacaattcc

SEQ ID NO: 23157 - DNA, 377 bp, Zea mays
  Clone ID: MRT4577_121125C.1
ggggcccccgcaaaccaccaccaaaattaactagaagacagcagagacaatagtagcactagcataccaacaacagatggcataaaagcaaagggggaaagacccacagaacagacccggggttctctctttttcctccaaaaaaaaaaacccagtttaggcgacctcctccatttggctctggccagggtaatcctccagagggggcaggggggggtaagcctccggagcctcctggccctgggggaggctaaggcccagtttgagcatgcgggggaggcggctgccaaaggggtggggatcgccggggctaaagccagaagggagcagggccgtctcgaacagaagcaggacagggcccttaacggacttgtggt

SEQ ID NO: 23158 - DNA, 437 bp, Zea mays
  Clone ID: MRT4577_121126C.1
gtccttttcttttttttttttttttttttttttttttttttttttttttttttttttttttttttttgggggttttttggggaccaaaaccgggagggaaccttaaaacccttttttgcaaataacaacggcccaaaaaaacggttccctttttataattaaaacaaagaaaaacctggttttaaatacgcctatcctcgtttttccaacataccacttcaattggggtttttccacccggaccccaatttttctttttccaccctttgaacccccccaaattttcaaagggtttgggtggcccacccaaaatgggcaaccttttttttttaaaaccctcctctttgttttccaggaaccatggccgccatttccaggccttaatttcttgccaatggcgggccaccccgttttttttttatggtttgggggttttc

SEQ ID NO: 23159 - DNA, 599 bp, Zea mays
  unsure (1)..(599): unsure at all n locations
  Clone ID: MRT4577_121127C.1
ggcaccgcgctttcggctgcttgcggctcgcaggnaggaggacgccgcggcccgctttccctccgccgcctccgccactgccatgattccagtgtcgctggtggtagtggtggtgggcggctggactgccgtctacctgaccgacttggtgctgaagtcatctgtgtattttaagcattcttatgaagactggctggaaaacaatggattgagcatctccccttttcacataagatggcaaactgctgttttcaatcgtgccttttacagttggggacggcggaaagcaaggatgctttaccagtggttcaattttggaatggtgtttggcatcattgccatgttcagctcttttttcctccttgggagaacgctgatgcagactttggcacaaatgatggctgactctccctcttattcttcttcctcttcttcctcttccttttcttcttcctcctcttcctcttcatcatcttcctcttcttcctcttcttcctcctcttcctcctcctcctcacttcacaatgaccaagtgctacaagttgtggttcctggtataaatttacctgtcaaccaactgacctatttcttcgctgcag

SEQ ID NO: 23160 - DNA, 403 bp, Zea mays
  Clone ID: MRT4577_121128C.1
aaaatactctcacaacaaacttgcataagactgacacatgaggaactcctctccaaagcgggacttgagacaacacacaaacaccggaacggccctcttgaaggttcataggacttgattcataagtcatccagaaggtaacgtgaaattgatgccacaattcctcaacaagatgcatctggaccgattcacgacattgccggccacgctgaaatggctgcccacatttatagcacaacccctgagctttacggaatgcatacactgatgataaacagtctcttgttgcagccccctggttggtatctgatgtactgaattggggactcttcctacaagtagtaacctccttgggtggaggaggtagaggactagggccacgagcataagaatggctcgcgac

SEQ ID NO: 23161 - DNA, 215 bp, Zea mays
  Clone ID: MRT4577_121129C.1
cggggcggccacacgtcctccacgcgtccgtctagattttatttttcccccctttttttttttttggccagggatcttttttacttaggtaggataccccaacatttaaaaggttcattcatggcatacctaacacattcacccaaattcatcgaccacaccaccttacccattaccccctaacgatttaactacccaactatccaacttttcac

SEQ ID NO: 23162 - DNA, 235 bp, Zea mays
  Clone ID: MRT4577_12112C.1
ctgtcagtcatgctgatatccgcaagtagcaggcgtttggccagacattggagcagtcccgggggttcggcagtgagttccgcttcgcggatcagccgggacacactggttgtggtgctgcagctgatccgtttgcttctacaggtgctgccgctgatgatgaggatctatacaggtagttgggttgttcaagatggtgggcgtgagtcatctgtgtaaaactgatcatagtaaa

SEQ ID NO: 23163 - DNA, 259 bp, Zea mays
  Clone ID: MRT4577_121130C.1
aagatcgatgaccacgtgcacaagatgacagcggtgtccatataactcgctggagaactacccctacaccatgccctcactaacaggacgagaagatcgcgctccaagctgtgttgtccacgactagatgaagatcgagtactctcatcgacgcggccatcactggctggacgccaacctgctcggggaggcggacagagcactgtgcacgacatgaatgagctggacagcctttgcacccccatcatcgtcaagatgg

SEQ ID NO: 23164 - DNA, 142 bp, Zea mays
  Clone ID: MRT4577_121131C.1
tggagagctcgtgccgaacaggaccttgcctgaccacgctacatgaccacgtggcggtgcacaccgcccggccctggaagcacagcacatacactcaaggactgcaagaccctatcttgggacagccggcaccgatttggat

SEQ ID NO: 23165 - DNA, 440 bp, Zea mays
  Clone ID: MRT4577_121132C.1
ggaaaagggggaaaaaagggtttatttttaacggggggggaggggtgcaaaaaaaattcctttcaggaaggaagggggtcccaagttaataacccaaaattttgccgggaaaaaaacgggcaaaaaaccggaaaatgggcccccgaatttgttgaaaaaaaagccgccgggagattaaaatggcataagtttttgccaaatgatctcgggggccattgggtttttggttgattaaaaaaaactttggggaaaaattaaaaaaaaagggtgacgttgaaaagggggattccaactacaggttactggggctttttaatttccttaaaaataccccaagaaagggaatttggggcgaagtttttgccaaaaaaattgacaaactttatttttggggccatcagggccatgaaaattgggggatcaaaaaggggggcagaacc

SEQ ID NO: 23166 - DNA, 278 bp, Zea mays
  Clone ID: MRT4577_121133C.1
ctccgctcggccaccacttttgaccgcttcccttcccttccgttccgttcctgttctgccttagccaattcccccgaaggaccgggccgccgccgccaaaggcaaagccagaaggtccggcccccccccaaaaaaaaccgacacccccaagtctctccgagtctctgggtgcgcccaagtgggcgccccaacacaaccaaaaaaagctcccccacgggcgctatctagaaccacccccacacgggcggtgacaccccgaaaagaaagagatctcacac

SEQ ID NO: 23167 - DNA, 2417 bp, Zea mays
  Clone ID: MRT4577_121134C.1
gccggccgggctgggaaaaaggcgggaattctagtattccaccgccgcacacctcctgtcttccttcaccttcgcgctccgccgccgccgtcgattcgtgctgctctcacccctaacctgtccaacatcgccggggagggaagcagcagaagaagctccccttacctccggctatcgcctgaggataaagtggggtctgtaggggagtcttaggggggagcaaaagggataggatagggagagatgaagcaatcaatttcttcgtccgccttcgcccctgcttacgtccccgctactaaccctagttatgaggttgaacgccttcagaagcttctctactagattagtgtaaatagtagacttgttcgagtttagcttggctggaagaattagtctctggtccgtgtttatatctgctagcaataatggctgcgatgaacggagaggtattgggtgaatgtggaaggaacataaatagtctcaagagaaagcgggagagccccgctgcatatgctgctggcgtattctgcacctctgaattgcatcagcatactgtcaatgattctgctgttaggtttcatcttgataaagaccgtaaggcaaagatcgtgtgccacttcaacaagcaggttttgcagagctataagaaattcatgagtagtgcaccacctaagcgtattttgcttcgccaaggtgctgtctggaaagactttccagaaaagattgtcaaattggcccaagctgacttcagggcaaaaaagatgatcacagaaacaggatatcagaaccagctattttttgctggattttgcccatatgacattcatagacacgaagacaggtcttcagaggccgattgcttggattgatgaaaatggaaaccgctacttcccagaatcatttgtgcaagatcagaaaatatttatgaagaaagattttggcaacggatatcatgattacattagtgttgagtcaaatgggacacgagaaatgaatgaccagcttggaacatcagaaagttccgcagaaagttcaaacttcggttcaagtactgaagatgtttccagtcctaagagagctagagctgaaaataattccatcataaaaaaatactgtgatatgggagaagctattggagaaaatgagccatgcactttgttgcctacagcctgtaacctactaccacgccaagctaatctgggtgaggtatcacgtgcccagcgcactattgaagccgtggagaagctgttgttgcaggggatgggttcagttattgaatccaaggatattattggaatctacaggactccattattggatgaccatggacaagtccgttaccataatcacgaaaagcatgtacaggttaccagatgtcatcgtggaaacgcaaatgtccgttatgcatggcttccttgctccaaaagcactgtgcatgaaatgatgctgaatagttctttacaagttcataagccgcccattaagtgtgcagcctatggagagggcacattccttacaccagcaaatcgttctgatgcctgtgtgaaattctctgctgttgatgaaaatggcattgtccatatgatgttgtgccgtgttataatggggaacgtagaaatagttcaccctggatctaagcagcaccaacctagtagtgactattttgatagtggagtagatgaccttaaaaacccacaacattacattgtgtgggatatgaatctgaataggcacatctatcctgagtttgtagtcaccgtcaaattgccttctaaaacaaaagattacttcgtatcgcaagaagactgccagaattcatctgatctgtcactggtgttgaattctagttcacccgactgtatttcagagcgatctcaaccaaagtgtctcctcaaattatggacatggttattggttgctatgaagagtttaagagtaagaaaataagccgatgcgaactaataaaggagctgaggcacgtagttggtgatagagtgctaatatcgacgataatgcgtctccaagataagttgcctcctgtggagaggcgtgaggcaccgggtgcatcagctgccaagatggtggcgaaaccgtgaggcgggtgtcggtcggtcggtgggcgaggaatgcagaagggaggaagcagctgactttgacaaccctgtgggaagcagcaactatgaagcctcttgtgtcagtctttgtatggcggctgatgtttcttctttctgtgtcgtatgagtatgttttttcctagtagattgtatcaggagtttttcatttcaaattgagctgcgcatgttcttttgagcctttggaatagttcgtcaacgaaaaaggctccttttacctttctgataacagtgttgtgcattgttaattaatgtgggtcatatagaataatatatgatgtatac

SEQ ID NO: 23168 - DNA, 465 bp, Zea mays
  Clone ID: MRT4577_121135C.1
accgcacaacactgcgatcagaaaggtaaaaggagcctttttcgttgacgaactattccaaaggctcaaaagaacatgcgcagctcaatttgaaatgaaaaactcctgatacaatctacttgaaaaaacatactcatacgacacagaaagaaacatcagccgccatacaaagactgacgcaagaggcttcatagatgctgcttcctcccttctgcattcctcgcccaccgactgaccaacacccgcctcacggtttcgccaccatcttggcagctgatgcacccggtgcctcacgccttttcacaggaggcaacttatcttggagacgcattatcgtcgatattagcactctatcaccaactatgtgcctcagcttctttactagttcacatcggcttatttttttactcttaaactcttgataagaacccataaccatgttcatactctgggaggcactttggt

SEQ ID NO: 23169 - DNA, 3679 bp, Zea mays
  Clone ID: MRT4577_121136C.1
gcattgggaggtggatgtgcaacccccatgctaggagattcgatggtaaaggctccaagctcaccttggatgcctttctctatgttgtttgcagcgatctcaaccaaagtgcctcctcagagtatggacatggttattggttgctatgaagagtttaagagtaagaaaataagccgatgtgaactagtaaaggagctgaggcacatagttggtgatagagtgctaatatcgacgataatgcgtctccaagataagttgcctcctgtggagaggcgtgaggcaccgggtgcatcagctgccaagatggtggcgaaaccgtgaggcgggtgttggtcagttcggtgggcgaggaatgcagaagggaggaagcagcaactatgaagcctcttgcgtcagtctttgtatggcggctgatgtttctttctgtgtcgtatgagtatgttttttcaagccggccgggcagaccactcagggtgtcgagcgccggcggccaaacagccgtgtcttcgtcatcatggagctgggcattctgccgctcgttcatcggctccgccgtcgtctacccgccgtggaggcgctctacaccaccgccaccgccagcgggtgatccggcggcggccaatgctgctgcggacgatggtcgtcgtcacggccggttttgctctcatccgttggactgtgttggaggcagagactgcagccttccagaggacgccggcggcggccgtgaggtgttcctgacatgggaggatctttcggcgacagcgacgtactggcgtatatccgcgatgattctcgactcagagctcatagaggagaggacttgttggttaagggcgtgcgtggacctcgccctcatctctctcctccggccgtcccggccggcgggtaattctagtattccaccgccgcacacctcctgtcttccttcaccttcgcgctccgccgccgccgtcgattcgtgctgctctcacccctaacctgtccaacatcgccggggagggaagcagcagaagaagctccccttacctccggctatcgcctgaggataaagtggggtctgtaggggagtcttaggggggagcaaaagggataggatagggagagatgaagcaatcaatttcttcgtccgccttcgcccctgcttacgtccccgctactaaccctaggatcattctgtcttttctcgtttcttatccgactcttcttcgttttatgcctatcagttatgaggttgaacgccttcagaagcttctctactagattagtgtaaatagtagacttgttcgagtttagcttggctggaagaattagtctctggtccgtgtttatatctgctagcaataatggctgcgatgaacggagaggtattgggtgaatgtggaaggaacataaatagtctcaagagaaagcgggagagccccgctgcatatgctgctggcgtattctgcacctctgaattgcatcagcatactgtcaatgattctgctgttaggtttcatcttgataaagaccgcaaggcaaagatcgtgtgccacttcaacaagcaggttttgcagagctataagaacttcatgagtagcgcaccacctaaacgtattttgcttcgcataggtgctgtctggaaagacttcccagaaaagattgtcaaattggcacaagctgacttcagggcgaaaaaaacaatcacagaaacaggatatcagaaccagctatttttgctggattttgcccatatgacattcatagacacgaagacaggtcttcagaggccgattgcttggatcgatgaaaatggaaaccgctacttcccagaatcatttgtgcaagatcagaaaatatttatgaagaaagattttggcaacggatatcatgattacattagtgttgagtcaaatgggacacgagaaatgaatgaccagcttggaacatcagaaagttccgcagaaagttcaaacttcggttcaagtactgaagatgtttccagtcctaagagagctagagctgaaaataattccatcataaaaaaatactgtgatatgggagaagctattggagaaaatgagccatgcactttgttgcctacagcctgtaacctactaccacgccaagctaatctgggtgaggtatcacgtgcccagcgcactattgaagccgtggagaagctgttgttgcaggggatgggttcagttattgaatccaaggacattattggaatctacaggactccattattggatgaccatggacaagtccgttaccataatcacgaaaagcatgtacaggttaccagatgtcatcgtggaaacgcaaatgtccgttatgcatggcttccttgctccaaaagcactgtgcatgaaatgatgctgaatagttctttacaagttcataagccgcccattaagtgtgcagcctatggagagggcacattccttacaccagcaaatcgttctgatgcctgtgtgaaattctctgctgttgatgaaaatggcattgtccatatgatgttgtgccgtgttataatggggaacgtagaaatagttcaccctggatctaagcagcaccaacctagtagtgactattttgatagtggagtagatgaccttaaaaacccacaacattacattgtgtgggatatgaatctgaataggcacatctatcctgagtttgtagtcaccgtcaaattgccttctaaaaccaaagattcctttgtatcgcaagaaaactgtcagaattcgtctgatctatcactggtgttgaactctagttcacctgattgtatttcacaggagatgaacctggaggcacctccagcattgggaggtggatgtgcagcccccatgctaggagattcgatggcaaaggctccaagctcaccttggatgcctttctccatgctgtttgcagcgatctcaaccaaagtgtctcctcaaattatggacatggttattggttgctatgaagagtttaagagtaagaaaataagccgatgcgaactaataaaggagctgaggcacgtagttggtgatagagtgctaatatcgacgataatgcgtctccaagataagttgcctcctgtggagaggcgtgagggaccgggtgcatcagctgccaagatggtggcgaaaccgtgaggcgggtgtcggtcggtcggtgggcgaggaatgcagaagggaggaagcagctgactttgacaaccctgtgggaagcagcaactatgaagcctcttgtgtcagtctttgtatggcggctgatgtttcttctttctgtgtcgtatgagtatgttttttcctagtagattgtatcaggagtttttcatttcaaattgagctgcgcatgttcttttgagcctttggaatagttcgtcaacgaaaaaggctccttttacctttctgataacagtgttgtgcattgttaattaatgtgggtcatatagaataatatatgatgtatacaatgtttttgagtttggctcaaactaaaaaaaaaaaaaacaaaaaaaaaaaactttttggaccaaaaaagtgtttcgtccgtgaaaaagcaacatatgccaaaaaaaaaaaaaaaaaaaaaaaaaaaaaaaaaaaaatcgctgccagtcgtgtgtttattctgcacccgtggtaccccactaaacgttagtcgagcccattttatgcaccaccagacagatgac

SEQ ID NO: 23170 - DNA, 332 bp, Zea mays
  Clone ID: MRT4577_121137C.1
aaacaaacataacaaaagggttttttttatgactaaccctttcattaaattggtcagactccccaaaattcccggcctaaggccaagggccgcacccttagatggaccaaaatttcccttaatttttagcaactcacatgccttttctttagcggtttcccccggctttatgtcactaacgttggaactcccagttccatttttgcccctgggttgggcaaacattggagatccccaaacttcttaattatcaagaacaatttcagagtttggaaatgggggggaatttcctttttgaccacccccaaatttttttgtgggaagcttttctt

SEQ ID NO: 23171 - DNA, 5329 bp, Zea mays
  Clone ID: MRT4577_121138C.1
cctcctgtcttccttcaccttcgcgctccgccgccgccgtcgattcgtgctgctctcacccctaacctgtccaacatcgccggggagggaagcagcagaagaagctccccttacctccggctatcgcctgaggataaagtggggtctgtaggggagtcttaggggggagcaaaagggataggatagggagagatgaagcaatcaatttcttcgtccgccttcgcccctgcttacgtccccgctactaaccctaggatcattctgtcttttctcgtttcttatccgactcttcttcgttttatgcctatcagttatgaggttgaacgccttcagaagcttctctactagattagtgtaaatagtagacttgttcgagtttagcttggctggaagaattagtctctggtccgtgtttatatctgctagcaataatggctgcgatgaacggagaggtattgggtgaatgtggaaggaacataaatagtctcaagagaaagcgggagagccccgctgcatatgctgctggcgtattctgcacctctgaattgcatcagcatactgtcaatgattctgctgttaggtttcatcttgataaagaccgtaaggcaaagatcgtgtgccacttcaacaagcaggttttgcagagctataagaaattcatgagtagtgcaccacctaagcgtattttgcttcgccaaggtgctgtctggaaagactttccagaaaagattgtcaaattggcccaagctgacttcagggcaaaaaagatgatcacagaaacaggatatcagaaccagctatttttgctggattttgcccatatgacattcatagacacaaagacaggttttcagaggccaattgcttggatcgatgaaaatgaaaagtgctacttcccggaatcatttatacaagatcagaagttatttatgaagaaagattttggcaacggaaatcatgagtacattagtgaagagcgaaatgggacacgagaaacgaatcaccagtttggagcatcagaaagttctgctgaaagctcaaactttgagtcaagtattggagatgtttctagtcctaagagagctagggctgaaaagaatttcattgtaaaaaaatattgtgatatgggagaagctattggagaaaatgagccatgcactttgttgcctacagcctgtaacctactaccacaccaagctaatctgggtgaggtatcccgtgctcagcgcactattgaagccgtggagaagctgttgctgcaggggatgggttcagttattgaatccaaggacattattggaatctacaggactccattattggatgaccacggacaagtccgttaccatattcaccaaaagcaagtacaggttaccggatgtcatcgtggaaacgcaaatgtccgttatgcatggcttccttgctccaaaagcactgtgcatgtaatgatgctgaatggtgtttggcaagttgataagcctcccaataagtgtgcagcctatggagagggcactctccttacaccagcaaatcgttcggatgcctgtgtgaaatactctgatgttgatgaaaatggcattgtccgtatgatgttgtgccgtgtaataatggggaacgtagaaatagttcaccctggatctaagcagtgccaacctagtaataagtattttgatagtggagtagacgaccttaaaaatccacggcattacgttgtgtgggatatgaatctgaatagtcatatctattctgagtttgtagtcactgtcaaattgccttctaaaaccaaagattcctttgtatcgcaagaaaactgtcagaattcgtctgatctatcactggtgttgaactctagttcacctgattgtatttcacaggtaagatgctttacatggggtattaacaagatagtactgtaacactagagacaactgttgctaacttgatatacagaagagttccactgttggagcagcaagagtgcagtaattcagattctgtgatttgactcaataattgacatgattgcattattgagattataacttggagctgattatattcgttatctatgatagaaacctccaaatatgataagtttccctgtgaaaccatgctattttagccacgctggagttggttaaagcaccagttaacaacttccttttatgcataaaacaggagatgaacctggaggcacctccagcattgggaggtggatgtgcagcccccatgctaggagattcgatggaaaaggctccaagctcaccttggatgcctttctccatgctgtttgcagcgatctctaccaaagtgtctcctgagaatatggacgtgattattggttgctatgaagagtttaagagcaagaaaataagccgaggtgaactagtgaagaagctgaggcatgtagttggtgatagagtgctaatatcgacgataatgcgtctccaagataaggtgtgaattgttctgcttgaaccttgctgatacagttatcttggattctttttggaagactgaaatccttttagccgtaaggtgtgtcagctggtggggttctgggatggaccgccagtccgccacgcaccgaacttctgaaggcctatatcttttgctgtgaacaagctacttttcaagagcatcagaacagcagtggtttgataacctgattctttttacactgttttctgaagaaatgcttcttttgtgtgtgtctatttggcagcacctcctgtcttccttcaccttcgcgctccgccgccgccgtcgattcgtgctgctctcacccctaacctgtccaacatcgccggggagggaagcagcagaagaagctccccttacctccggctatcgcctgaggataaagtggggtctgtaggggagtcttaggggggagcaaaagggataggatagggagagatgaagcaatcaatttcttcgtccgccttcgcccctgcttacgtccccgctactaaccctaggatcattctgtcttttctcgtttcttatccgactcttcttcgttttatgcctatcagttatgaggttgaacgccttcagaagcttctctactagattagtgtaaatagtagacttgttcgagtttagcttggctggaagaattagtctctggtccgtgtttatatctgctagcaataatggctgcgatgaacggagaggtattgggtgaatgtggaaggaacataaatagtctcaagagaaagcgggagagccccgctgcatatgctgctggcgtattctgcacctctgaattgcatcagcatactgtcaatgattctgctgttaggtttcatcttgataaagaccgtaaggcaaagatcgtgtgccacttcaacaagcaggttttgcagagctataagaaattcatgagtagtgcaccacctaagcgtattttgcttcgccaaggtgctgtctggaaagactttccagaaaagattgtcaaattggcccaagctgacttcagggcaaaaaagatgatcacagaaacaggatatcagaaccagctatttttgctggattttgcccatatgacattcatagacacaaagacaggttttcagaggccaattgcttggatcgatgaaaatgaaaagtgctacttcccggaatcatttatacaagatcagaagttatttatgaagaaagattttggcaacggaaatcatgagtacattagtgaagagcgaaatgggacacgagaaacgaatcaccagtttggagcatcagaaagttctgctgaaagctcaaactttgagtcaagtattggagatgtttctagtcctaagagagctagggctgaaaagaatttcattgtaaaaaaatattgtgatatgggagaagctattggagaaaatgagccatgcactttgttgcctacagcctgtaacctactaccacaccaagctaatctgggtgaggtatcccgtgctcagcgcactattgaagccgtggagaagctgttgctgcaggggatgggttcagttattgaatccaaggacattattggaatctacaggactccattattggatgaccacggacaagtccgttaccatattcaccaaaagcaagtacaggttaccggatgtcatcgtggaaacgcaaatgtccgttatgcatggcttccttgctccaaaagcactgtgcatgtaatgatgctgaatggtgttttgcaagttgataagcctcccaataagtgtgcagcctatggagagggcactctccttacaccagcaaatcgttcggatgcctgtgtgaaatactctgatgttgatgaaaatggcattgtccgtatgatgttgtgccgtgtaataatggggaacgtagaaatagttcaccctggatctaagcagtgccaacctagtaataagtattttgatagtggagtagacgaccttaaaaatccacggcattacgttgtgtgggatatgaatctgaatagtcatatctattctgagtttgtagtcactgtcaaattgccttctaaaaccaaagattcctttgtatcgcaagaaaactgtcagaattcgtctgatctatcactggtgttgaactctagttcacctgattgtatttcacaggagatgaacctggaggcacctccagcattgggaggtggatgtgcagcccccatgctaggagattcgatggaaaaggctccaagctcaccttggatgcctttctccatgctgtttgcagcgatctctaccaaagtgtctcctgagaatatggacgtgattattggttgctatgaagagtttaagagcaagaaaataagccgaggtgaactagtgaagaagctgaggcatgtagttggtgatagagtgctaatatcgacgataatgcgtctccaagataagttacctccagtggataagcgtgaggaaccagacacatcggcgtccaaggtggtggcggaaccatgagatgggtgtcaggaggtgggcgaggaatgcagaaagggaggaaccagccgacttgacatagaaaaccctgtgggaagcagcaactatgaagcctcttgcatcagtcttgtgcatggaggctgctgtttgttctctgtatcgtaggtgtctacgtttgcgaggaaattgtatccggtgtttctctttcttcaaattaaaccacgcacatgcagctgccgtactttttggaccattgaagtgtttcgtccgtgaaaaaggctccttttaccttcccgtttgccttcctaagagcatctccagtagttttgtaaaataaaactccctaaaagacgatgtagagagttgctaaataataatagagagtaaaaaattgcatgttcttc

SEQ ID NO: 23172 - DNA, 111 bp, Zea mays
  Clone ID: MRT4577_121139C.1
gaccttgatgccaaggggaagcagactgatgagattggcaggaaaagggagagcttgatgcaaaggccaagcagatcggtgggaaaagagatagcttttgtgtgaatgtgt

SEQ ID NO: 23173 - DNA, 647 bp, Zea mays
  unsure (1)..(647): unsure at all n locations
  Clone ID: MRT4577_12113C.1
gtcaccagggtttgtttgatgtctatatatttatctcagtccacgtgttgacaagggaattgaggggaattggaggggattgagagctagtttgggagcaaggggaggcaaacctagggagagaagaccccccataaataactaaatatcttattcaaatgacaccagggtttgtttgaatgtctatatatttatctcagtccacgtgttgaagtggattagagtggaaattaaattaagttccactccaacacacgtgggttagatccaaacaaggcccaaatctgtcatgtaacgtatacttgccacttttgctgttttgtctccactaagtttatagtttgctagagtttttgttgataattcttgtggttaatgcagctcattgatttaatacaccatgcctttccctgccatgtcacatcaaaagaaattaaaactgattcttgattgctaaataatttgtattctataatcatttccatacccttgtaatcgccattaggactgatttggtgaccagggaaatagaggataatggggggnnggggaaaccnctttatattcacaatcatccncttctattcaattgtgaatagaaggggttcctccccatggaccccctccatttttctggtcaccaaact

SEQ ID NO: 23174 - DNA, 323 bp, Zea mays
  unsure (1)..(323): unsure at all n locations
  Clone ID: MRT4577_121140C.1
cgagccgccggccgggaaatcactcgcgcacgcggaccagccgatcccatcctcctcctgcccgacgccggcgccgacgggggaccccctccgcctctcacgcgcgtcgccgccgccgccgtcgccgtcccgtctccctcgccggggcatcgcgttccaccccgccggtgactaggaacacggaaatctgaagatcctgagataangtaggagggaaaaaantatacagatgaaaaatgaaaaaaaatagagtgtgtttggaaatttggaatattgaatgaaaatgagatatggaaaagatttgtgtataaatgtgaataaaa

SEQ ID NO: 23175 - DNA, 205 bp, Zea mays
  Clone ID: MRT4577_121141C.1
attcggctcgagctcttgggggccaccttcatactcaccacagccaaccccatgaaggctagcaacaaagacaacgaagaggctgatgacagacatcccctacatgtgggaacccgtgacctcacgcccaaagcacgcaccggcgaaaggcccatcctctgccccaactgcagtccacctcacccctcgccccctcccccccctc

SEQ ID NO: 23176 - DNA, 114 bp, Zea mays
  Clone ID: MRT4577_121142C.1
cgtaggtgccgtcccatttggtaaaagggggtgatttaaaggatcgtcaagatcgacgaccccgtatggatgtgttgagtttagttctggttatggacaagcgtcttgtgtctg

SEQ ID NO: 23177 - DNA, 640 bp, Zea mays
  Clone ID: MRT4577_121143C.1
gaagagccattcatacctgtcgcatgaagttgaggtttttttatctttgtggttttcattattgtcgcaactcatttgtttaaccattataatttgtcttgtcctgaatgtcactaactccgttacctgcaacacttgtttcaggcaccattcattcagagtcaactagtcaagtgtctaaggttcactgcgttaaatgagaccatctgtaatcatgacatggattaagatatttgtcagactgcagaaatgcagatcaatatgctgtttactgactcaatcaggatcccttaaagtggtaacatttacgacttctgatgtctgtgccttcatgttcagaagttcttgtgtttatttcagattgaagagagtgcagaaacagatctcggtggtgatcttcttgaactgaagagggaaatctgggtgtgctctgctttgatcaattggttgcagaatgtcatatatggatattatgccttgctgcagtttgctctcttcctgtaatttggtgttttgatgatgataagagtttttatggccattatcttgtgaaaaaataacatttggaagttaatacaaatgtactaggttctgtaaaaaaaaaaaaaactcgtgcattatattattttaatattattaa

SEQ ID NO: 23178 - DNA, 316 bp, Zea mays
  unsure (1)..(316): unsure at all n locations
  Clone ID: MRT4577_121144C.1
ccaaccagaatttcttgcacntactgacaatgtgtgagagagagaggattagggggggcatcggcagggctgctctcctactgaccctgctggccgagagcctggccgtggagatccaggccgaccccgggtacggatacaccccgactcacacgccggccaccccgaccccgaagccggagaagccacacaccaaggggcccaagcccgagaagccgccaaaggagcacaagctccccaaggagcactggcccaaacctgagaagccgcccaaggagcacaaaccgacgccgtccacgtacaccccgagccccaa

SEQ ID NO: 23179 - DNA, 430 bp, Zea mays
  Clone ID: MRT4577_121145C.1
ggatctgcaggctctgcagtcacttttatacatgaaagacaatgatgaagtgttcattgagctgggttatgacaaggataagaagaaggaaaatgctgagcgtgatgagcgtgccaagaagtctgtgagcattaacgagttactgaaacctgctgaaggataaaggtactacggcgagacgtggtcgaggaaggcgccgtgatgatcgcggtgattttagaggcgtatactagagggggatacagtcatggtccatctgctgctgctccatccattgaagatcaagctcagtttccaagccttgatggcgaagtgaacgtgcgcccagctgctgatgtcaccgagcgttgagttgtctgctgctgtcatatttaaattgatgccgacgttaaatatctgtgccacatgttaaacggaacagataatgatg

SEQ ID NO: 23180 - DNA, 454 bp, Zea mays
  Clone ID: MRT4577_121146C.1
atcaggtactactacactggcgccgacaattgatcgagccagcctcatccaaaggtagaacggggatggggtgcttattaggtgacgagcctccatctcaaacctactgaccttaattatcgatgctaacacacactatacatctcaagtattccaacaggatcttactttcattacagggaatggataatggaacattgcgagagaaatctctatatccctgcactggctggcgcgaataatggaagctctctggtgatcatgtcaagaggaacacaatatgcccagcagtactaccaagtaagggatacattttctttcaaatgcttaaacaaaaaatgcaaggagggcttctatgtcactgctatcgtaacaactgtaaaccaatgcgcaattatcatgtcccgcaatgcttgtttcacttgctacagagtggagcttgatttcttatatt

SEQ ID NO: 23181 - DNA, 500 bp, Zea mays
  Clone ID: MRT4577_121147C.1
gggcaccgctgcctgcggcgcgggcgccgccgcggcgcagcagcggacggacgcggcgcgagggcggaggcagcccggcacccggcgccgcctccgcctccggtactgatgcggcgaggacggaggcgcggcggcggcggcggcggcgcgggatgtggtcgtcgtggaggaggaggagacagcgggcagatgcggcgtcatgtcgggagaaggtagctgctgtcgctcggtctctctcgctgggctgggtaggtcgctgccggaaaatctgaaaaaatcctctcccctttccgctgcctcgttcgtctccttcctttcacagtttggtgattcgcgaatcgcgatgggaggggagggtggggtgtggcgtccctcaagctcggcgcgcggatatatacggcatccgctgcggcgagatgcgctgtgtcctaaacctcgccggtgagttggtggggcggaaggcgcggggcgacgacgtggcagcggcgttgggaggaaaa

SEQ ID NO: 23182 - DNA, 691 bp, Zea mays
  Clone ID: MRT4577_121148C.1
ctcgagttttttttttctttttttttttttttttttttttttttttttttttttttttttttttttttttttttttttttttgggttttttttcgtttaaaaatctatcactcacagtttttttttcttgctgaaaaaggccctttaggcccccggttccaaaaaggcaggtggtttcaaagtatttcccctgaacaaaggggcttgcccaaatttaaaaggggttaaccaggggaaggaatcctaacctttccaaggatcttgtccgggggataacccccgttggggggggttaaaggaaatgggggggagaaaagggaaaaattcaaaacaggggtttaaggggtttaaaaattttgccgggaggaaaattttaaacaaaaatagggggggatgggcctttaaggggaaaatgggggcccattttgatttacggcccccctccaaatccccctccccaaacaaaggggtttgaatcccttgcccccctctcaatttttaattcaacccccaacccaaacaaaaaaacggggggtccaaatccccgggggcgggttggggaaaccccccccaattcccttgaaaccaacccacccccaagggacggggaattcccctaaaagtcccacctaaaattttaaggcccctttcctttggtggccgggccacaaaggaaaacacctaccctcgg

SEQ ID NO: 23183 - DNA, 218 bp, Zea mays
  unsure (1)..(218): unsure at all n locations
  Clone ID: MRT4577_121149C.1
tggcgaccccatgggggatgccaantantgagctatgctgctgctgccatgcatgtantactaaatatgggtcgaggggggcaataatgaaaggaataaaacattcatattctancatcatagggtgggagagtgtcttnagntgtggcacctnagaaactatcctctttcanattttgtgatgggcaggcactctaataaacgatttgctggatttt

SEQ ID NO: 23184 - DNA, 142 bp, Zea mays
  Clone ID: MRT4577_12114C.1
agctcagctactccagattggacaacttgacaccatgaacgttcgactccatgcccttgctgtactggctctagctggtagcgccgattgcattacaagaggatggcttggataacaaaaagcatggactaatctaccgact

SEQ ID NO: 23185 - DNA, 888 bp, Zea mays
  Clone ID: MRT4577_121150C.1
ttgggtacctcgaggccggccggggattctacccggcgttgtcatcaacggggaggcctcacccacccctgtctcctgcgatgcgaaactacgcatcggcggcggcgtgggagggcccgatggccgcagagctcaagacaacgggggtcgaggtgattgccgacggcgtgcatgtgaaggggtgggtcatctagtcccacaaaggccccatcctcaacgccgcctctctcagacggtgcgagcccccggcgtagccgtcggtgggcaagccttatcggcccatgtggtcctgcctcctcactgagttctgccatagaggtggacactggtggtggtgtcctcctccttctagctgtggttgcctccgctcgtcgccgtcgggggcggtagcttcagatccccagcacagcttcaagctggccctcccttggatgaaatgtctattccatacattccgaggaacttgttacacgcaattgagtatctacattctgagggactagtttggaatcgagggccacaagttaaagcatcaggtcaatggtcccgccaacaattaaaccagatggcggattggagcttgatgttgggatgatgcatgcacctttcaagtttcagaatgttgtcctcaaatgcagcttgtggttgttgaacctattctacttgtttttggatttaagttatagtttattaaacatgtttgatgtttaatacttgtgtcggatgatttatgcttcaattatgtggatgctagaaaaaaattgtatatactcatgttgtttcatgaaattgtatgcacgatttggtttgaattcaaaaaaaagcaaaaaaattggtttttggtttagtgctgtcgcttgaaacgaagaacacctccctagttcttga

SEQ ID NO: 23186 - DNA, 364 bp, Zea mays
  Clone ID: MRT4577_121151C.1
ataaactgattatttttcttattctatattatttaggccggccagggggcgaccgacaaatttggagcaacccctgcaaattttagcctttagaaacaggccatgctccattcattgttggtcaccgagcaaaacatgagccttgggggattctttagctacccgggacaaaacagtttttttccgcgggacaagtgcgttattgagagaggccaaccacgtctctttatctaacaggagatctaactgcacaccagccgttgtggcagacaaaaagcgtttactccttcctccccatcatagggcacgggcggattcaggggctcaattgcaggggttcctggaaaacccgacgcgggaggcg

SEQ ID NO: 23187 - DNA, 469 bp, Zea mays
  Clone ID: MRT4577_121152C.1
ctgcagccatgccgaactagagcaggggctctacaaacatggcgaaggcgccataggccatgggcgaggacctacaacgtagacttcaagatcactggtgctacagccttatggcattaggaaggggcaagtcaccatggccaagaggcccttcatggatgctacctctcagaggcaggcgatgctgtcccaaacgtagggggtcggcgctgtgcgcatggacgacgataagcttggccattcagatggtctacgagggggggctgaaaaaccgggtggaccaatgatagacgttctcaaggacgtgggaagcgaagatgctgtccgagccagtgatgtggagaccctctataggtcaaacattcgagcgaaccaaggtcagaagcagatgagcaggggctgctgggctgatgagcgcaacaaaccttacattgtctaaccgtgacacaaaaggacctatcttaggatg

SEQ ID NO: 23188 - DNA, 455 bp, Zea mays
  Clone ID: MRT4577_121153C.1
acggcggacactggtggtggtgtcctcctccttctagctatggttgcctccgctcgtcgccgtgcggggcggtagctttcagatccccagcacagcgaggatgacattgaagacatccaaaagcttcaagctggccctcccttggatgaaatgtctattccatacatttcgagggacttgttacacgcaattgagtatctacattctgagggactagttcggaatcgagggccgcaagttaaagcatcaggtcaatggtcccgccaacaattaaaccagatggcggattggagcttgatgttgggatgatgcatgcacctttcaagtttcagaatgttgtcctcaaatgcagcttgtggttgttgaacctattctacttgcttctggatttaagttatagtttattaaacatatttgatgtttaatacttgtgtcggatgatttatgcttcaatt

SEQ ID NO: 23189 - DNA, 834 bp, Zea mays
  Clone ID: MRT4577_121154C.1
ccggccgggaaaatattcgtgtcatacatccacagcctcgtctccctcatattttggtgtgtttcatccctttccaatccatttctcaacgtatcggatcatccatagccctcccgacgactgtacagattgcaccacatgtctcatttagagaatctgttgaagtacccatcataattcactcttaaaaaattttagcctactcttaataatcagtttttagagtagaaattttaacatccttttggagttgctcttaccaaactacaatagaattgcaaagttgctggtacgcattactatgtgctacatactttcatgatacaagtgggttatgatgttttatgtgtcaatctctcacaatccacctcttatcgaacaagctctaaggtatttacattgcatggtattaatttattttatatttttttataatcttaataaccccaaaacatgtaaagtttatcccacgttagtgattgttcggtagggatggatcgagggggattggaggggattaaatctccacgaaccgtcgctccacttacttcatagctagcaatagattagtgggcggcctgttcaccatatacgtgtctcccttgggctacaaaatggatggcacacacaaggtacagacagaggcaaggtgacacacccatagagactaggggtggacattcgggttaccaaaaatttcgggtcggataattcaggaatttttaattttaggttttgagaatcaatacccgaaattacaacgggttttacatacccagaatttcgagttcgggttcgtgtattcctgaaactaccgaactgttgtgtcagctt

SEQ ID NO: 23190 - DNA, 2173 bp, Zea mays
  unsure (1)..(2173): unsure at all n locations
  Clone ID: MRT4577_121155C.1
ggacgcggtggacctgggcttgttcccagttcattactgccttttgatgtttcggttgtacttcgtgggccatactggatacgcattatatatcgcaagaaattttctgttgacatgcgctgctttgctggggatcaggtttggctccagccagctactcctcctaaaggtggaccttcagttggtggatcgttgccatgcccacagttccggcctttcataatggaacatgttgctcagggtctaaatgctcttgaacccaacttcatgaatgctacacaggctagtggacacttaaataacaatgcaggagttccacaaactgctcctagtgcaaatcgtttaaatgctacccctggtgtttctatggtcaggccaacatctggtgttgctaaccatgtagcagccagtttgagtcgagcaggaaatgccatgttggcttcttcggctcttgcttctggtattagtggaacttctgtgcgacttactgctggagctggtctccctgttcacatgaaaggtgaactaaacacagctttcataggactgggggatgacggtggatatggtggtggctgggttcctttggcagctcttaaaaaggtgctgagagggatcctaaagtacctcggagttctatggttgtttgcacaattgcctgaacttttgaaagaaatactaggatcaatcttaaaggacaatgaaggtgctctcttgaatttggatcaagagcagcctgcactccggttctatgtcggaggatatgtatttgcagtaagtgtacatcgggttcaactgcttctacaagttttgagtgtgaaaagatttcaccaccagcaacagcagcagcaggctcaaagcaatgctcaggaagagctagcagcagttgaaatcaatgaaatatgtgactactttagcagacgtgttgcctccgaaccatatgatgcttctagagttgcttcttttatcactttgcttacattaccaattttggttctgcgcgagtttttaaagctgattacatggaagaaaggtctttccccggttcatggggacattgctactgcacagagggctcgcatcgagctttgtttggagaatcactcaggatcagcttcgtctgataacaccgagaacagcagtttagccaagagtaatattcatcatgatagagcccacagttcagtagaatttgccctgacatttgtacttgaccatgctcttattcctcacatgaatgtagctggaggagctgcctggcttccatattgtgtatctgtgaaacttcgctattcttttggggacaacaatcatatagctttccttgctatgaatgggagccatggtgggagagcctgctggttgcagtttgaggagtgggaaagatgtaagcagaaggtttcaagagctgtggaaactgtgaatgggtctggtgtagctggagaggtaggccaaggaaggctgcgaatggttgcagagatgatccaaaagcagcttcaactctgtctacaacagctaagagatgacccactttctgcaggctcgactgcatcatgaacttgcttggaatgagctctatcaaggccattgatgtctgtcatattcagcatggcctttggctttgttaacgtgtagatgtgaaggaatacacatttggtagcagtgacagtttcgcctgaggcttgctcagatgacaattttgtacagtataaatggtggcggttgactctgatggacctttagttagcccatttgaacgtggcctgtaacatagctagggtgggtaataatgtgccaaggtggaattgctcagggatgcaaaatgatcttcgggaattggttgtctgtatcatctactgtaatcgtgtcccttttctccctttctgatggatagttcatttttggattcgttatcatctttcttctgtctgtactatgttaatctagacattggtggatctggtatatgtgttgttgtacatgatatattggcactggacttgagactgacgcatttgacgtcttagtattagcaggacatctctagttgtgttcagagtgattggacccaaaaaaaaaaaaaaaaaaaaaaaaaaaaaaaaaaaaaaaaaaaaaaaaaaaaaaaaaaaaaaaaaaaaaaaaaaataaaaaaaaaaannannnnnccctcaaa

SEQ ID NO: 23191 - DNA, 316 bp, Zea mays
  Clone ID: MRT4577_121156C.1
aaaaacaaaaaaaaagggggccttccttccaaattttgggtcccccaaagggagggaaaaggcctttcccacccgcttcctttttttccaaaaaaagggccccaagtgcccctttataaaccaaaaaggtggctttccttttaagaaaaaccccccaaagggggcaaaaacaggggggggtcacctgtttttaaggggctttatagccgggggggaacaaaaaaattgggcccaaccccccccttccggggacggggggggcaccccggaaattcccgcccggtccccgagggggacccctttttcccttaagggg

SEQ ID NO: 23192 - DNA, 139 bp, Zea mays
  Clone ID: MRT4577_121157C.1
atcatacatgacaactccgctcacttcgacgtcactaacaattctgcagcctaaatggctaatgttacgcgccctacagctgtgcattacctctcgcgtatgacaagtttacccacagctatacctgctacactgtgca

SEQ ID NO: 23193 - DNA, 233 bp, Zea mays
  Clone ID: MRT4577_121158C.1
ggggagcgaaggggaaattttttcctcctaacaggaatttttttcaaaaaaaataattccctttttaggggacaacgggcccgcaccccaaagttgtctgggggacgacgacctaaacctttttcgaacacatttatttattcttcaagggccttattcttgggtgcccgttttttacctggggggggggggagcggccccctgggtttcccccttattttcggaccggttcc

SEQ ID NO: 23194 - DNA, 167 bp, Zea mays
  unsure (1)..(167): unsure at all n locations
  Clone ID: MRT4577_121159C.1
tgggtacctcgaggccggccgggagattcgccgccgcccacagcccacccggtcgctggggcctccccgtcgtcgccgctcgctcgacattccccgtgccgctccgcgcttcccatccccagagcttccccaagtcactgcgngctacnngtttccccgaccgaagg

SEQ ID NO: 23195 - DNA, 683 bp, Zea mays
  Clone ID: MRT4577_12115C.1
cggacgcgtgggcggacgcgtgggcggacgcgtgggcggacgcgtgggggccaaaaggtctgatataccactttacaaaggagacgagctttttaaaaagctgccccaacagttgggttcaaggcctgcaagtgacatcagctaacaacagcttcacacagttattttgtcaattctaaatttgaggctgtgttgattcatttgttgagctgatttttgtcgaattttgattatacgctgaggacaaacttcggtaaggtgtacaaatttggctcgtggaagaggcttcagaatgcaatggagcggctgacaaagggaactgactactggtggtgatgaaaacggcttgggtcttcgggggctagtaatgacaattgtacagatatgggacacaacgatacatacacttgtattttacggtagagtttgttagcttgtgtttagggaataaaaacgtaaatagatacagattcttttcgcactgcggtatttttttaatccctgactatatgttaaccatcttcatttacttccagctgcctgagggtttagctgtagcggtttgcgctgtcagaatttttacattttacagcaatacgaggcccagttccctaatgtagtggttccaaaccacatcgaattttgttgaacatttattttcggatgtcagttttaattgtgag

SEQ ID NO: 23196 - DNA, 685 bp, Zea mays
  Clone ID: MRT4577_121160C.1
acgacgctcctccacaacggtgccgtgctcgaggacgtcgacggcggcggcggcggcatcgagcggcacggcgtcgtggagggctccgtcatccacgtcgccctcctcgatggccagcacctgccgcagccgcaggacaagaggacggagaagaggcgtggcgagggaccggcgccgccgctgcgggtgatcgtcgtgtcggggtgcgccgagggacgcgtggagatggccgtgggcgcgcgcgccgcggtgtcgatgctgcgggcggagctggagcgcgcgcgcggggcgggggcacggttcccgctcccgcgcgacggcgcctacttcttcatacatgaacagagcgtgatggacgagtcgagatccttcgagtggcacggtgtggccgccggcgacgagatcgtcgtgttcaacagctccgtgacaaggaaccaggcgtagactacttgtggtacggttggcagctcttacacgcgtgcgcgctcgtcatggagcacttctaactcgtggtttctgaatttatctctttagagcaagtttaataatgggtctttaataatagtgcttacattgggctctaaatctttcccatgtcatttagagccaacaataaaaaatattcatataacgatgttgactataaaggttggtattttagcatggaaaaaaaaaaaacggacgc

SEQ ID NO: 23197 - DNA, 208 bp, Zea mays
  Clone ID: MRT4577_121161C.1
ctctggtttggtttttttttttttttttttttttttttgcagtcccatttctccctccttacccccccatcccctcccagcccgggaccaccaaattttttcagtaaacttaaaagatattgggctctactacccaactgggatttacaagcccctcgaaaacccctggtgtacctaccaaaagactggaagccggaaaagaaaaccc

SEQ ID NO: 23198 - DNA, 861 bp, Zea mays
  Clone ID: MRT4577_121162C.1
cccacgcgtccgcccacgcgtccgcgcttggcttgataaccaagggatcgtacaaagctcgccgctgatggagctaggtgctcccgtccatagttttcacaagatgggctgccaatccaagatggtaatgatatgttgagtttggcattccatcaacaaagaaactgtcgcgagatgcattggaggctctggaagtttcacaacaacacacaaaaaaagtcttcccaaaagaagtcccagtcgacctatagctatagtcctcattcttgacgcttcaggttcaagaaaaggaactttatgatggaaaaatggacttcagtctgctcaacccttacatgttactgtgccggccgagatgtgcttggtcgctggtggttgagatttcagatcaggagctctggagtctagactctggactgcagcgagccaaatcagtcaccggagtcaccggtttgtttcccagatcgcggacagcggcaacctgcaaccgcttgctttcgtccttgaattgccagcgtcattgccatcatcgcaaagtagtgtagaaaggttgtttggcttcaggcggtctctagtagcagcatttctatcccacttcatatttcactgctagttttaaactctactatataaatagtatatttacaatgtaaaacaatattatgtacgtttatatgcacactcttactagagatggcctcatagagaaagaactccaaacttatacaacccctgatttgaaaaagtggggcttagcaggtttgtgctattgtatttgcatgaactttttgtatgatgtttttttgatgtaatatgttttaatgataagtattgtaggtacgaaaaaaaaaaaaaaaaaaa

SEQ ID NO: 23199 - DNA, 223 bp, Zea mays
  Clone ID: MRT4577_121163C.1
gcggtttgctagagctagctctcatgcgggacgtgtcatactactaataaggaagcggatagtgaggaagttgaccgctaactcagacacgtataaacttattgcaacatatgtattgagacatttaccattactatctcaaagaaagctagtccaggggtcatataaagatgtcgaatcacatttctcaaacaaaaggagtaaggccaccgcactagaggat

SEQ ID NO: 23200 - DNA, 611 bp, Zea mays
  Clone ID: MRT4577_121164C.1
atggaaaccacactccactctataactgaacacttgattgcacagtggtgatctagcataggtgaatacaatggatcctaccaagctccgtgagtgcagcagccattacatcgacggagacgacgacaaacgctggctctcttcgtgcggaacgacaacgatgctctgactgtggggcctcgcgtacaccattctagctggaggactaccacctgatcgagaaggcgggacacttcccgcgcgagcgcatgctgcagcgcgtggtgcacgcgcatggaggctcctactgggtttgttcgagtgcacccaccacgggacagatctgacgtgcgccgatttcgtgctcgcgcgcgtgtgcggacggccctgatcgttctgcttcaacatggtgaaggacaacccggcggcgcgacaacactatagttctccggcgcatgtgtctcgcggacttcaggattgaaaacttacttgagtgccccacctgtggctgtgggttcgactgcaacaacctgctcatgctgaagaagcccggcgccgccaccgccaagctgcgcctgcggggtgccttctagaacttcacttgtgcagatttggtgactggtgctggaagc

SEQ ID NO: 23201 - DNA, 166 bp, Zea mays
  Clone ID: MRT4577_121165C.1
aatttttgttttatgctttttttttctgggggcgggatccgttaaagagaaaacttccactcgttataagaaaaatagatggaactggattagtagcagacaacacaggaaccaccccgatacaacacagatcctagaaaaaatgattctgccctactacaaaaat

SEQ ID NO: 23202 - DNA, 491 bp, Zea mays
  unsure (1)..(491): unsure at all n locations
  Clone ID: MRT4577_121166C.1
tccggnaattcccggggaaaaaaaaaaaaaaaaaaaaaaaaaaaaaaaaaaaaaaaaaaaaaaaaaaaaaaaaaaaaaaaaaaaaaaaaaaaaaaaggaaaaaaaataaaggaacaaaaaaaaaaaaacaaaataaaagcaaagaaaatggcatcttatataaagacaccataaattcaattaactggaccgaaattttcacaacattggaccggggggaaccccctggggtgccccatcttcctccgccttgcagcgcgaccccttttcgccggctggggtactcccaaaaaggcccgnaccggncgctcttcccaccagtggggcggcctaattggcgaaggggccgccccctgtagcggggcattaaccccgttggttgggggggttacgcccaaggggcccgctccacttncccgccccctagggcccgntccttncgctttcttccgttcgttccccgccacggggcccggtttcccccgcggggc

SEQ ID NO: 23203 - DNA, 248 bp, Zea mays
  unsure (1)..(248): unsure at all n locations
  Clone ID: MRT4577_121168C.1
agagcacagtacgtacaccacacaaaataagttatagacnatgcaagaagcagaagatgtagtggaaaaaaaaatcggagattnngcatttggccatacagaagatatcatatccctgaaaaaaggaacatgttctatttctaaaagaaccagcagagaaaatatatatagtagaagaaatttttaaaaatcagtagaaatagttgaagatatagtacatcaagacatatcccagaaacaagagttta

SEQ ID NO: 23204 - DNA, 168 bp, Zea mays
  Clone ID: MRT4577_121169C.1
aagagactgacagtccatgaagttctacggtatccttgggtccatgttggtggttaggctcctgacaagacgctggactcggctgttcttgctcgcatgaagcagttctcggccatgaactatctgaaaaagatggctctcagggtgatcgccgtgaacctggccgaa

SEQ ID NO: 23205 - DNA, 312 bp, Zea mays
  Clone ID: MRT4577_12116C.1
tcctcctggttgacatatatagtactaggatcattatttactgtacagacaacaatcacccaaagggatgaattctataaccatacgaatgcaagcattcagctacacacttacctcaaggcacctgtctcctacactcatcacaatcccaactcttacgcaccaccattccacagccaccactaacctgctaacttttccgcgacatctaacaacaatcatgcatctgtccggctcgaacacgaacacgaacttgaaacctgacagcaccacttaaccctacagaacagctatcacctccgtcatctacaa

SEQ ID NO: 23206 - DNA, 1074 bp, Zea mays
  Clone ID: MRT4577_121170C.1
tcgagccggccgggtcccctcttttgattcccctctcttcttgcaagagggtgtaagaaaaccaagccgccgccgggatactacactacccagctcctctccagtctcaacccagcccgcctctcgaacttccagaaccgtcctctcgctgcctgcggctgctatctctgtcatctagaggagagtgtaagggcactagatagagagtgatggcttctcctgatccatcggcggcagatgccggcaccgggggcgagtcgacgagccaggcggcggccgtggaaccgatccggatgccgacggtggaggagatcaaggggcaggacatctggaacaactgcgccgttcgcagcgtcgtcagtggcgtcatgggaggcggtcttggtgtgcttatgggactattctttggagctttggaaaatccgataatggcagagcaaatgacagcaaggcagcaaatagtatacacagcaaagcagatgggtagtagaagtataagtaatgccaaaacctttgcagtcatgggtctgattttctcagcagctgaatgtaccatagagaaggttcgggcaaagcatgacactaccaatacagcagtagctggctgtgtcactggaggagctttagctgtaaaaggtggccctaaagctacatgctttggatgtgtggggtttgctgcgttctcagtggcaattgaaaagttctttgatcggcatacttgaaatgggtgttgtgaatttgaacgctttttggccatgttcgtttgatcccaaaaccatagggattgaggtggattgaaagagattgaagaggattttgacttgtaggggatttgatcccctcaatccctatggatcagcacaaaacgaacagagccttagctgagcatgagcagcgttggcaggagaacctgattgtttgcaacatccagtcatctacaactcatgaaggactgtaacctaaattttttttttacttattcccagtttcttgcctggattcgtaattactgaactaccgaaacgcctaagagatctaccctgatcaatatcgatgcacgatgacattgaccag

SEQ ID NO: 23207 - DNA, 234 bp, Zea mays
  Clone ID: MRT4577_121171C.1
cacccatcaccactcagtatccgcatcgcccggaatggtggcaccctcccacgtcctcccgttcctgtcccactccgacaagatgtgcctgctactcgctccgtgcccactctggctaccaagctggtctgctgcgctgctatggtcgtggtcgggcaatcgggcttgaccactcggctcagatgccctcacaaaggagaaggccaaaagcgacatggataaactgttcctagg

SEQ ID NO: 23208 - DNA, 1014 bp, Zea mays
  Clone ID: MRT4577_121172C.1
ccggggcggatcccctcttctgattcccgtctcttcttgcaagagggtgtaagaaaaccaagccgccgccgggatactacactacccagctcctctccagtctcaacccagcccgcctctcgaactctcgctacctgcggctgctatctctttcatctagaggagagtgtaagggcactagatagagagtgatggcttctcctgatccatcggcggcagatgccggcaccgggggcgagtcgacgagccaggcggcggccgtggaaccgatccggatgccgacggtggaggagatcaaggggcaggacatctggaacaactgcgccgttcgcagcgtcgtcagtggcgtcatgggaggcggtcttggtgtgcttatgggacttttctttggagctttggaaaatccgataatggcagagcagatgacagcaaggcagcaaatagtatacacagcaaagcagatgggtagtagaagtataagtaatgccaaaacctttgcagtcatgggtctgattttctcagcagctgaatgtaccatagagaaggttcgggcaaagcatgacactaccaatacagcggtagctggctgtgtcactggaggagctttagctgtaaaaggtggccctaaagctacatgctttggatgtgtggggtttgctgcgttctcagtggcaattgagaagttctttgatcggcatacttgaaagccatgttcgtttgatcccaaaaccatagggattgaggtggattggaagggattaaagaggattttgacttgtaggggatttgatccccctcagtccctatagatcagcacaaaacgaacatgccatgttctgagcatgagcacgttggcagaagaacctgattgtttgcaacatccagtcatgtacaactcatgaaggactgtaatctaaatttttttacttattcccagtggattcgtaattactgaactaccggaacgcctaagagatctaccctgatcaatatcgatgcacgatgacattgacc

SEQ ID NO: 23209 - DNA, 2187 bp, Zea mays
  Clone ID: MRT4577_121173C.1
aataattgattgccactgattccagcaaggttctaataaatcttgtagatgcaacctcgctttgcctgccgccgccagtcttccgcctccgccacacacaaatgtccagtttctttgccgtagctgtagctttggtgctctcatctctcatccatggaaccacgatggccacagcgagcagcgaagagagcttcttccagaagtgcccagcgtccagctgcagcgaaggagggccggagatccggttcccgttccgccttgcgaccagccctctgtcatgcggtgcgcccggcatggagctggtgtgctccaaagcagacaccgtcctggttcacccaaaccttggcttgtgtaaggtaactgccatctggtatggcggcagcactataaccatcgtcccactcgcagcagaaccagaacccaagtgcccttttcagaagatcatctccaccaatctatcaaccgatgtgtatagaccttatggggatagggcaaccttagtgagctgttcagcagagttcatagtaccaagccatccggccagccttgctggtcccatctcttgccttaccaacgctagccgccggttcacttacttggtgccgtcttttcgaccaatggatttccttcccttagactgcacggttctttcgaatagcatctcggtaccttaccctgcttctgtcaacgcgggcttcaacggaactgcaagaggagccgtcgcatttggcgagacaatgttagaatggagagttcctaacattaccgatgtctgccgagactgcgaagctgaaggaaggctctgtggatttagctctgagagtaggcaagcattctgtaagagtaagaatcacagttcacgtctcaaggtcattgcagtaacgacgccagtagccgcagtcctggttctttcagcaatggcaggtgctgcattattacacctggccctgaaatctaaatacgacgacgagatacacaggaaagtggagatgttcctcgagacctacaggacgctgaaaccgagaaggtacacattctctgaagtcaggaagatgacaagacggttcagcagcagacttgggcaaggcgggtttgggagcgtgtacaaaggcgagctgccgaacggaggagtgcctgtgcctgtggcagtcaaaatgctggaggactcgacgggggaagaggagttcatcagcgaagtcgcaaccattggaaccatccaccacgccaacgtcgtccggcttctagggttctgctccgagaggtcaaggcgtgctctggtatacgagttcatgcctaacgcgtcgctggagaagtatatacgctgctcctcccaagaacagtcgttaataccaacggccagtaagatgctggaaatagcgacagggatcgcccgaggaatcgagtacctgcaccagggctgcgaccagcgcatcctccatttcgacatcaagccttccaacatcttgctagactacaacctgaacccgaagatctcggatttcgggctggcgaagctgtgcgcgagggaccagagcgtcgtcgcgctgaccgcagcgagaggcaccatgggctacattgcgccggagctatactctcggaacttcgggacagtgtcatgcaagtcggacgtttacagcttcggcatggtggtgctggagatggtggtggtgagtgcaaagaggaggaagtacagcccagcagagaccgaggaccagaacgacgacgtttgcgttccagagtggatatacgaggaaatagtcaccggacaagagcccagggaaatggcacgaggagagagagacatggtgaggaagctggctatcgtggctctctggtgcattcagtggaacccaccgaaccgcccgtccatgactacagtggtgaacatgctgacggatagcttgcagagccttaagataccccctaaaccatttgtttcatcctttgttggccagtaaccatgaagaaaaagctctagagaccacatggtgaccattcagatagatattcgtgtctatcacttgtcggcatatgcatgtatcagtgatgatgccctgtgtctgtcgtagttttgtgtcatacccttttttttcctccttgtaaccactagattgtatacattgcaattttctggtggtttaaccatgttcacgaatttgtaatgacattattagcaggacgttacat

SEQ ID NO: 23210 - DNA, 424 bp, Zea mays
  unsure (1)..(424): unsure at all n locations
  Clone ID: MRT4577_121174C.1
aggggggggggcgggggcgagagggaagagaggcggcggcggacgnngagnaccggagcgncgaaggcggccgcacccgggccaccgacgaccacgcccacaacaacgcccacagcaccgacggagaggaccacgagccgaagaacaaccnggaccgggagagggggaggacccgcggagaaggcaaagagaccccaaacacggaggacgcgaggcgcagcgccaccgagggcangaacggcaaggagcgcgacggccgcaacagcaccgagaacgaggcccagaccagaggcggacgcggaggcggcggaggcggacacggnggcgggcgccgaganggaggcggcnacggcggnggcggaggaggccacggaggaggaagaggaggcgacggaggggggggggggaacggaggcgagaaccg

SEQ ID NO: 23211 - DNA, 2409 bp, Zea mays
  Clone ID: MRT4577_121175C.1
ctggccccggccgggagcattgattgccactgattccagcaaggttctaataaatcttgtagatgcaacctcgctttgcctgccgccgccagtcttccgcctccgccacacacaaatgtccagtttctttgctgtagctgtagctttggtgctctcatctctcatccatggaaccacgatggccacagcgagcagcgaagagagcttcttccagaagtgcccagcgtccagctgcagcgaaggagggccagagatccggttcccgttccgccttgcgaccagccctctgtcatgcggtgcgcccggcatggagctggtgtgctccaaagcagacaccgtcctggttcacccaaaccttggcttgtgtaaggtaactgccatctggtatggcggcagcactataaccatcgtcccactcgcagcagaaccagaacccaagtgccctttccagaagatcatctccaccaatctatcaaccgatgtgtatagaccttatggggatagggcaaccttagtgagctgttcagcagagttcatagtaccaagccatccggccagccttgctggtcccatctcttgccttaccaacgctagccgccggttcgcttacttggtgccgtcttttcgaccaatggatttccttcccttggactgcacggttctttcgaatagcatctcggtaccttaccctgcttctgtcaacgcgggcttcaacggaactgcaagaggagccatcgcatttggcgagacaatgttagaatggagagttcctaacattaccgatgtctgccgagactgcgaagctgaaggaaggctctgcggatttagctccgagagtaggcaagcattctgtaagagtaaggatcacagttcacgtctcaaggtcattgcaggtacgtggtttcagtgcacttttgacctattgagtgttctttctatttcttaacaacaaaaccgcagcacgctctcatatatagtcgtctcatccacaaaagatctgaataatcgattgcaatctaataacagactgatgttctccaaccctgtctgttcagtaacgacgccagtagccacagtcctggttctttcagcaatggcaggtgctgcattattacacctggccctgaaatctaaatacgacgacgagatacacaggaaagtggagatgttcctcgagacctacaggacgctgaaaccgagaaggtacacattctctgaagtcaggaagatgacaagacggttcagcagcagacttgggcaaggcgggtttgggagcgtgtacaaaggcgagctgccgaacggaggagtgcctgtgcctgtggcagtcaaaatgctggaggactcaacgggggaagaggagttcatcagcgaagtcgcaaccattggaaccatccaccacgccaacgtcgtccggcttctagggttctgctccgagaggtcaaggcgtgctctggtatacgagttcatgcctaacgcgtcgctggagaagtatatacgctgctcctcccaagaacagtcgttaataacaacggccagtaagatgctggaaatagcgacagggatcgcccgaggaatcgagtacctgcaccagggctgcgaccagcgcatcctccatttcgacatcaagccttccaacatcttgctagactacaacctgaacccgaagatctcggatttcgggctggcgaagctgtgcgcgagggaccagagcgtcgtcgcgctgaccgcagcgagaggcaccatgggctacattgcgccggagctatactctcggaacttcgggacagtgtcatgcaagtcggacgtttacagcttcggcatggtggtgctggagatggtggtggtgagtgcaaagaggaggaagtacagcccagcagagaccgaggaccagaacgacgacgtttgcgttccagagtggatatacgaggaaatagtcaccggacaagagcccagggaaatggcacgaggagagagagacatggtgaggaagctggctatcgtggctctctggtgcattcagtggaacccaccgaaccgcccgtccatgacaacagtggtgaacatgctgacggatagcttgcagagccttaagataccccctaaaccatttgtttcatcctttgttggccagtaaccatgaagaaaaagctctagagaccacatggtgaccattcagatagatattcgtgtctatcacttgtcggcatatgcatgtatcagtgatgatgccctgtgtctgtcgtagttttgtgtcatacccatataccttttttccttgtaaccactggattgtatacattgcaattttctggtggtttaaccatgttcacgaatttctaatggcattattagcaggacgttacataaaaaaaattagtaactggaaaggtagaagttacagcttacatt

SEQ ID NO: 23212 - DNA, 679 bp, Zea mays
  Clone ID: MRT4577_121176C.1
cccccctcgagttttttttttttttttttttttttttttttttttttttttttttttttttttttttttttttttttttttttttttttttttttttttttggaccttaaaaattttttttcctttgttttttttccacaaagggaggggggaccaccttttttccccccccaccggggtttttcccccgaaaactttttgctcggggatcaaaccccgggccttcctaaaaacgggggttttatttgtttttttgaccctttggcccaaaaaaccttttttcctcatttcaagcccccggccctggtttttttggcccggggttttcctaaaaaaaaaaaagggggaccccccggccccctttggaaaagttaccccccccccttttgttggaaagaaattttgcccccaaagcggggggcaatccccggggttttgctcctttttgggaggaacccccgggcctgcccataagggggttttcaaaggggggggtcccccaaagcttcctccccaaaccccttttttgcttaaagattacccgcggggaaccccctttttccttttagggcaaacgggggggccaaacccttcaggttgggggccttgaaaaggggataaaaaaattccttctcgtttggaacccagtattcccggcccccttttttcccattaaaat

SEQ ID NO: 23213 - DNA, 378 bp, Zea mays
  unsure (1)..(378): unsure at all n locations
  Clone ID: MRT4577_121177C.1
gcgnaagtatttttgatttttgtttatgttttttttttgtttataattacaatttggtttctcattcaaatttcctagatcaaacataatcatggttggttctgttttgatgaacaccgatataggattttaacagtttggggtgacccaattcttcaagggccaacaccattaatgtcattggtgctgcatggattatttaggaactatgagtgggacaagccgcacaatgatggtaggtattgagctgctgtcaagaatgccaccgaactccgtaactctagttgagatccacatcacacacatggctgttggtggggctcctacatgattttgggttgcaccatgtttgctaatgcttggataatggattgtggc

SEQ ID NO: 23214 - DNA, 180 bp, Zea mays
  Clone ID: MRT4577_121178C.1
gctaaaaaaaacaatactctccaacaattttttacaaacctaaaaaaccaattactactgttcgtacttttaaactcctcaccataactcaacctaaacaattccactctttacttacttaatcattaaataccactaccaaaactaatccaccttaatctactatgatcatctacatat

SEQ ID NO: 23215 - DNA, 173 bp, Zea mays
  Clone ID: MRT4577_121179C.1
cgctcgctagcttacttgagtctcgcctccatctctaccagtctcgtctcggtcagaccacgaagaattaagcgacgacgatgagccctagtaagctcgccgtcctcactgtgttcgccgtgctcggctccgtgtcatcccagggcggaacctactactacactcctccggct

SEQ ID NO: 23216 - DNA, 240 bp, Zea mays
  Clone ID: MRT4577_12117C.1
atacagggttccacccacgcgtccgcttctatcaataccatcaatcatgattcatcctattactataagcaccaaatcaaatatgcagcgtgaggcctttaacttcatatgccatgaagctagtgcttgtggctatcgctgaaatcgcttccttgtgaagtgtcttttgatcacttacatgtcaatgattcttgtggtcaacaacagagccatgagctttagcttaatacacaacctctt

SEQ ID NO: 23217 - DNA, 148 bp, Zea mays
  Clone ID: MRT4577_121180C.1
taaataaaaaaaagattttttataccgggctcaatttgcattcatgagtgcggctgcttggaacaagaaaattcttatgcggggagcacattttgcctaacggggttgtagatggcccaaaggtttcccttgggttgttgttcctccg

SEQ ID NO: 23218 - DNA, 340 bp, Zea mays
  Clone ID: MRT4577_121181C.1
ggggtctacccaaatttggacctgggccctttgcaaagcaaaatgaaactcccggtcctgtttttgccagttaccaaacgtaacttacggggcccccaaaaaacccccccccctccgtaactccccagcttttccaaagtaataatcctaattcctcggcgggggggtcaaatgtttcaacagccacaaccttggcagtcccggaccagggtacccctttcccccccgttacaaaacccttttttgccgtccaaggacaatggacaccaccggcccccccattaccgtttttgttcctgacctaaagggcacaaggacccgcgttttttttgcagctggg

SEQ ID NO: 23219 - DNA, 269 bp, Zea mays
  Clone ID: MRT4577_121182C.1
gggccacccccccctatggaatttgtttgcttaaaaaggggggtcgcgggtggttttattggtttgctactacagacagaaaccagcaagggcccctggcacgctcaatttcgactggggaggaacgagtttcaatacttgggagatggcaagggggtcaaggtttttgcccccctcaaagccaaatacaagggccccttcttaccaaacgccccccttcatggacgttggggtccgccctttttggatttcttttaccacaaaaaccc

SEQ ID NO: 23220 - DNA, 263 bp, Zea mays
  unsure (1)..(263): unsure at all n locations
  Clone ID: MRT4577_121183C.1
cgggnccggaatcccggggcggacccacccgtccgtgcatgataggattattaaactggggttatttttttttgtggtcaaatggtttaaaccaatcccagcaaaggatttggcatggcccatggtggcttttgttgccatgaaccttataaacaggctgttggatagagttgatggtttggtcaaggagccagacctgaaggacatccccttaacctttgaggagttaaaggcattggctgatttggtccaaaaatggaagc

SEQ ID NO: 23221 - DNA, 229 bp, Zea mays
  Clone ID: MRT4577_121184C.1
cggctcgagatggatcatcaccggtacctctgggcggacggcatcgatgtggatatccctactggcttcgcaggatggttcttctgcatcactctcaggaagcttgtctgggttatccttcagcctctcttctatgcgtttagacccctgttcatcaaccccaagccaattacccatctggaagtcatcaacaatgtgatccaggtcacttttgacgtcctcgtctatt

SEQ ID NO: 23222 - DNA, 263 bp, Zea mays
  Clone ID: MRT4577_121185C.1
gccgccctccttttttttttttgttttgacagcaactaattttatgggagggtcataaacaaagctgggaaaccaacaaaaaaaaaagaacagcgcaatatttcgtccacagaccgccgccagtcgtcacctttggcgggatgatggctccaccattcacgcgttaacatactgccgccaaaaaccccaccagcgcgagcgtaagtagcgcgggcgcgtacactccggccgtgggcacggcgaggttgggggacttggacggt

SEQ ID NO: 23223 - DNA, 733 bp, Zea mays
  unsure (1)..(733): unsure at all n locations
  Clone ID: MRT4577_121186C.1
ccggccgggctccttcccgcttgggcgggcgcggcaccttccggttccggtttccggggcctcgggcctcggcctcatatatatatacacgcgcgcggccgtcccctctctataccccctagcatgctcggctcgctccccggattgatcgagctcgctcgttgcagagatggacccggtgcctcccccctcctcttctcgccgggccgccgctgctcccggcccctgctgccgcgcgggccgccgggtgggcgatcggcgcgctgctcacctgcatcttcgccgtcgtgggctcactcgtcggaatcttcattggtgccttcatggggatgtctaccgaaagcggcatgttccgcggggctggtgttggagcagtttctggagcagtcttctccatagaggctgttgagtcctgcatcgagatttggaggtccagccattcaggaaaatacagcattctctttgtgctggacatcatctcgagcctcttcagcggaagaattgtgtgggagaaagtcagtccagcgctacagcgtgcagtgcaaagccagatgagtctaatgagcacaccgttcatcgacaacagtgaccttttcgaaaccggcagtacaggaggcatgtcaagggatttgattgataggatcccaaagacgaggttcagtgctgctagcaactgtgatcanggaactgatagcagctgctgcccagtctggctccaggatttcggagcacg

SEQ ID NO: 23224 - DNA, 305 bp, Zea mays
  Clone ID: MRT4577_121187C.1
gggagggaaaataatgccttatacagaaacaaaggagacgtccatagttgcaaaacaaaaatttcacggaaaaaattttggccggaaaaaaaaaaaaacctcggaaaaaaaacaggggggggaaacaccaaaccacccctgggttaacaataaagggggcctataaaagtccctttaaagacgggcctaatttttgaactagtgagaagaaggcttttccgggaaaaaaaaacccggcccctgaaaaaaaacgtttgggggaaaaaaacctgcccttaaaaaatcttaaaagcctttgcttaaaa

SEQ ID NO: 23225 - DNA, 1299 bp, Zea mays
  Clone ID: MRT4577_121188C.1
ggtacctgagcacacgccggcgctcttcttctctttcccttcgcattaatggccgctctctccctatcccctttcgtctcgctctcggagtaggacactcgcccgcttccggcttaaccttcaagattctccctcctcctcctacttcttcccgcttgggcgggcgcggcaccttccggttctgggcctcctatatatatacgcgcgcgaccgtcccccttccatactccctagcatgctcggctcgcaccccggattgatcgagctcgcccgtcgccgcgatggattcggtgccttccccctcctcttctacccgggccaccgctgctcccggtccctgctgccgctttgacgcgctgcggagggcgtgcgccaggcacgccgccgccgccgcgcgggccgccgggtgggcgctcggcgcgctgctcacctgcgtcttcgccgtcgtgggctcactcgtcggaatcttcattggtgccttcatggggatgtctacagaaagcggcatgttccgcggggctggtgtcggagcagtctcgggagcagtcttctccattgaggctgttgagtcctgcatcgagatttggaggtccagccattcgggaaaatacagcattctctatgtgctggacatcatctctagcctcttcagcggaagaattgtgtgggagaaagtcagtccagcgctacagcgtgcagtgcaaagccagatgagtctaatgagcacaccgttcatcgacaacaatgacctttttgaaactggcagtacaggaggcatgtcaagggctctgattgataggatcccaaagatgaggttcagtgctgcaagcaattgtgacaaggaaactgatagcagctgctgctcagtctgcctgcaggattttggagcacagcaatttgtgagggccctgcctcagtgccaacacatattccatgtgcggtgcatcgacaattggctccttcggcacgcatcctgcccactatgccgggccggcgttcatattgaccatatacatatgtaaataaactcgcagggtggcacctggtgtattttcatagtgaatacccgtgctcctgttggatatcacaagtatagctggatgtatacataggttttctcctttttttttgttacttctccggtcttatgtggggctatgctttcagctgcacgtttttgtcgaagtaatacctggattggctggatatgtacatcttgagaacggattgactaacaagctccctgaattatggtaaaaaaaaaatcaaaaaaaaaaaaaaaaaaaaaaaaaaaaacac

SEQ ID NO: 23226 - DNA, 123 bp, Zea mays
  Clone ID: MRT4577_121189C.1
gaatattacccgcgaaaagaaaccatggggggaaaaagtgacgacgtggttcctctctgtgagctgtgtccgtcgcccataagaaaacccccttccggctgcgtggctcctacggcaccctga

SEQ ID NO: 23227 - DNA, 537 bp, Zea mays
  Clone ID: MRT4577_12118C.1
gctggacggggccgtcgtgctgacgctcgcgcggaggctgctcgacgtcgacgccacgttagggctcccgctcacgcatgtggtccggcagctggtgcaccagctggccgggacgcatacagaatccgacgcctgctcgctgacggggctgctcacactcctgctcgtcgcccgcggccccgggagctacaccgcatgggacgtggcacaaaaaaaggctgtagcgttcgacgacatcacgctgggatggcgcagtgcgtggccaggcctggccgtgatgttcgcgctgggttgctcctccgtcggctcccgacttgcctgaaccctcgggctcctggtgactgactgctgcacgctgagacaatgcactaccatctcgacatagaatattggaccggtcttttaactgtccgcctctattgcgagcggcacgtgcacacgcatgatcttcagctagccatggtggaggtattgttggtctccaggaacctttcgtacacaatgctcaacatcgactggctgatctatattactggc

SEQ ID NO: 23228 - DNA, 406 bp, Zea mays
  unsure (1)..(406): unsure at all n locations
  Clone ID: MRT4577_121190C.1
cccgcgtccgccccgcgtccgcccagcgtccgcggacgcgtgggcggacgcgtgggccggcgcgttggtatgcanggatgacccggacacgtgcctaactgcgttgcagtgtccctgcttgctggttgtgctcaacgttgaggctgttagggaggacatgccttggacaactacttgtgtgtgcggtgctgtatttgttgatagagggatcacgctggcgattctgacggcgatcttttacggtgttgatccgtggacctcatttctgattggagaaggtcttgtgttcaaatagtggttatgttccacctacactggcatttttcgttaggggcttcataggaaatatatttcaagaactctccgtgtgagccatgcattgtgcactgctgcttgcactggtgtg

SEQ ID NO: 23229 - DNA, 1614 bp, Zea mays
  Clone ID: MRT4577_121191C.1
cattgggtccctcgaggccggccgggcagcggccttgtgatgacggtctcgcattaatggccgctccctcgctatcccctttgtcgtctcgtctcgcccccttccggcttaaccctcaagattctccctcgcctcctcctccttcccgcttgggcgggcgcggcaccttccggttccggtttccggggcctcgggcctcggcctcctatatatatacacgcgcgcggccgtctcctctctatactccctagcatgctcggctcgctccccggattgatcgagctcgctcgttgcagagatggacccggtgcctgccccctcctcttctcgccgggccgccgctgctcccggcccctgctgccgctttgacgcgctgcggcgggcgtgcgccgggaacgccgccgccgccgcgcgggccgccgggtgggcgatcggcgcgctgctcacctgcatcttcgccgtcgtgggctcactcgtcggaatcttcattggtgccttcatggggatgtctacggaaagcggcatgttccgcggggctggtgttggagcagtttctggagcagtcttctccatagaggctgttgagtcctgcatcgagatttggaggtccagccattcaggaaaatacagcattctctttgtgctggacatcatcttgagcctcttcagcggaagaattgtgtgggagaaagtcagtccagcgctacagcgtgcagtgcaaagccagatgagtctaatgagcacaccgttcatcgacaacagtgacttttcgaaaccggcagtacaggaggcatgtcaagggatttgattgataggatcccaaagacgaggttcagtgctgctagcaactgtgatcaggaaactgatagcagctgctgcccagtctgcctccaggatttcggagcacggcaattcgtgagggccctgcctcagtgccaacacatattccacgtgcggtgcatcgacagttggctcctccggcacgcgtcctgcccgctatgccgggccggtgttcacatagaccatatacatatgtaaatgaactcgcagggtggcacctggtgtattttcgtagcgaatacccgtgctcctgttggatatcacaagtatagctgtatacataggggttttttgctctctctttttgtcacttcttgagacttgcttgtgtggggctatgctttcagctgcacgtttttgtcgaagcatgatgccttgatatgtacatctggaaaatggaccgactaacaagctccctgaattctggcactgtgcttcaaaaaaaaaaaaaaaaaaaaaaaaaaaaaaaaaaaaaaaaaaaaaaaaaaaaaaaaaaaaaaaaaaaaaaaaaaaaaaaaaaaaaaaaaaaaaacaaaaaaaaaaaaaaaaaaaaaaaaaaaagggcccttgggtttttacccctgttaaagggcaaattccaacaaactgggggccgtaacaaagggatccaactttggacccaattttggggaaataagggaaaaagcgtttccctggggaaaagggtaacccgttaacaattcccaaaaacaaacaacccgaaagaataaagggaaaagcctgggggcccaaaggagggaccaaacccaaata

SEQ ID NO: 23230 - DNA, 786 bp, Zea mays
  Clone ID: MRT4577_121192C.1
aagggccaccggccttatctccctggcgcgtctcctgcttttccagccgtgtgctctctctgccgagcgcggtctctgtccccttcctggcgctcggcacccaactcccctgcgcacagctcaccgaagctcgccggcgctcctcccaagctcgccctgccgcgcgttcctcccagctcctgctcgcccagccatctcctcttctctctccctcggccgcggcactccagctcaccgcgccctgctccctctatctcccctggctcgcggttccctctctcctccctccatctctcctgcagcacgccgacatcctccgcagctcggagttttccttgcacgtgtgtggcttgcttcctgcacgacggccgctggccatctctagctcctgcgtgcacacttccggccttctgtttgccgcggcagccgaactcctctgctccccagccgtgctccctgctagtgccgtccgctcagctgaggtttctctccatggccgtcgagccccctgttccatggctgcgcatcctgttgcctgctcacaccctgctctctctgaagcgcgtctgctccagctcccccagccgtcgagctcctttgcacgcgcgtgcgtcctcgccacgccgagcgccgtgaagtctctgcccgccgcggctcgattctttcatcccgcgtgtgtcccctgcgtttctgtgctcggcctctggtactcctttacgcgcagccgcggtcgactgcttggctacgggtcatcccgcgcgctcggggcaccctggtattccagct

SEQ ID NO: 23231 - DNA, 469 bp, Zea mays
  Clone ID: MRT4577_121193C.1
acgggctctttcttatgaccgagaggtcccacacatcattcaaaaaactatgttattgaactatgactgataatcattttataagaggggaccaccatggttggaaaggatagcaagaacactgactgggttctaaagaacctgtagatgctagggccctatatggtgcgcctgaaaaacggggccagcttgaggacctgacagcgtgaccacgcttggggacttattctgcgaacatacatcacactggctatcgttaagagcggcttgtataaggcccgatgcgccctatactgagtattattacgcacgactgtccgacctgtcacgacggccggactgaaagaacaatggtgcaaatcaacttaatagtgttggacgatataccattcttgtagagtggccaaatagccataaggtgagtaccgatagaacttactgaccgttgctctacctggatgggaatggg

SEQ ID NO: 23232 - DNA, 107 bp, Zea mays
  Clone ID: MRT4577_121194C.1
ggatgcgtgggcggaccggggaaatatggggggctatataggtattctgaagagaccaaaagggccaaaggagctggacgaaaactaataccgggacaaggataaga

SEQ ID NO: 23233 - DNA, 385 bp, Zea mays
  Clone ID: MRT4577_121195C.1
atgactcttcttttggggagttcctgaaatctcctccccctatatttccgtacatgctttcgcacaaaagccgatccttcggtggatcgattccttcaatagcaacggtcggtcataaggtggctaatcactactacttattaagttagcatgcgtagccagccttgtgtgtcctgccgtgtctgctctgacacgtgaggccacgcttgctcttgcgcgtatgctctccgggttatatagtagcacatactttttgcgcaagtatatacactatatgctcctctagtggaaatgaagatacggcctaagagagactagctatctttgtcgggacactttgtacaggttaacaatatcaacgcgcatttgcttacgggaataaact

SEQ ID NO: 23234 - DNA, 240 bp, Zea mays
  Clone ID: MRT4577_121196C.1
ctattatgtttgtgctactacttgatatgccatgttgtactatttaaggagtaacacaaactttacacgaaaccaaagatgcatccggaaggtacaaatggggaggaggatattgctaccagcgagccatgtgggacgcccaaggagggtcatgcagcccacggcccaccagcaccatatgcaggaggaccaccaccaggctgtggcgagaccccttttgctgcagcaggctgccgcgga

SEQ ID NO: 23235 - DNA, 268 bp, Zea mays
  unsure (1)..(268): unsure at all n locations
  Clone ID: MRT4577_121197C.1
cttgcgcggcgnacgcatccggagcctcggagggcatcaaactcgccagctttctctgctcctcctcccctgctccggagaccgcccctcacgacacccgccgaaatccctcgacggggggggcgggactctctcttcttcgaccactttgccctcatgtggcctactcacctagggcggcctcgatggggacccgccctngcctctgccnngctnggtntgctctcatttctactctattgatttgnctatgatagcgtgcctcgct

SEQ ID NO: 23236 - DNA, 451 bp, Zea mays
  Clone ID: MRT4577_121198C.1
cgggctcacgctgcgaccgtcttacaactgcgacaattgctgccattgcaaccaaccttggttcgacaaacccatacagcgatactaccaacagcccataattagagggagccctatttgagattgcttatgacttatagctcaataatgaagtgagtgcagaatgatgatggcggatgcccagacataacaattacctcgcccggaacggtcgtgctaaagtggcgatatcacatgcccactgtgaactaggaaatagtggacactatcgcgctccaacctgggagctgaatgaccagagctagctcctgggccagaactacattacctcacaactggcacacaacttacgacgaataaacaacactgtcaagcgtgactagcgtatccaatgagctaactaacattgattgagtcatgctcactgctggcttctgagtgaaaaaaccag

SEQ ID NO: 23237 - DNA, 393 bp, Zea mays
  unsure (1)..(393): unsure at all n locations
  Clone ID: MRT4577_121199C.1
attcggctcgagagggcaggccctgccgcactccttaaaatagagcactaggaaaagaagtgttgcgtgtgttgcgtggtgggggacgaggccagagcgccccaaaaccaataaccccagaaccccgacctagggttacgccatcgccatgggatctgttgtctccacccctgtgncaccacctgctcctcccccatccctttcttatgttttttgagacgccctacaggccccgcctttcctggatcctcctgtaacttttctttgtggaggagaattatgatgagaaggtggactaccttaacctcccctgtcccgtgccctttgaggtgattcatctcgaggctcttatttattttaagcctgaacttttttaaggatttagatttgact

SEQ ID NO: 23238 - DNA, 356 bp, Zea mays
  Clone ID: MRT4577_12119C.1
ggttggtggttcaaattgcagtgttttttttgaaaaaaaaaatataaacaaaccagccatgcttgtcttacacaggtatccccaatacctcaccaccccatgcatgctaaagggacaaccaaaagggtattccccttaagctaggcataccccggccttgaatgaaaggcatttctagagatataaattttatatgagggtggtccacccgccactacatggaaaaatattgacaaattcttacttctacacgcggcaattatagcgcacagcgcattatttggggacgggccacctaaaaaaatgtcaaacgtgcctcccccctattttttcggagagggggggaattgggccct

SEQ ID NO: 23239 - DNA, 201 bp, Zea mays
  Clone ID: MRT4577_1211C.1
gagctgacctgacggcggccgcccccctttttttttggggggattgtggaaaagaatcggttgttccacacacaataaccaaaaggcgcggccgagtttcatacacaaagcgacttagtgccttggcacgcaatttgaacaccgtgacaagcaggaccagagtcaccgaggccaaaaacaaaagaagggggggggacttat

SEQ ID NO: 23240 - DNA, 343 bp, Zea mays
  unsure (1)..(343): unsure at all n locations
  Clone ID: MRT4577_121200C.1
cctctcaacatgcatgagatctttcacgcttccctatcacaaactattaatactgctgctgtcacaattcttgctaacttcaatgattcccacacgaccgctaccccccacgccgccgctattgctggccctactgtgatgcgcatcatcaacttagtcaacagcaacctgctattgattatgagtcttgacaacaacgctaccatcgaccgagaaaagaaagngctcaacttcgaacatggcggcgacacttttaacgtctctctccataccattgaggaagacatttttgacggcaagggcactcctggtgtaactcaccttgcggcggaggactttgaca

SEQ ID NO: 23241 - DNA, 811 bp, Zea mays
  unsure (1)..(811): unsure at all n locations
  Clone ID: MRT4577_121201C.1
attgggtccctcgaggccggccgggtaaatagaaatcttagctcatacatcactccaccaaaacatcagtgctataagactagctcatacatcactcgtgctataagactagctccaccaaggagctctaaagggtcctgtaccctaaatttagaggacgaggtcctctactccctccaacagtgtagtctaaacggtccactaaatttagaggacgttgttggatcctctatatataaagtttctataaacggttctctatttatttgaatactttaaacaatcggtttagtaaaactaaaatatgtacaatacatttggtagtatgacaaatacgtatgtataaaaattaaaaattaaaaaatgtctttgatataggtatttacatatagaggacgttatttagagggcattgttggagagaaaatagatataggagatagaatcttttagaaaagactgtaaaaaacggatatagatgatgtatacagaggatgttgctggagatagtgtaagaaccttaccttgtgtactgctcgttttcaaagcaccgcgggcacggcaaggaaataatagaaaaaggcacctgctctgctcggacggagaagcggattccgcagcaaacgacaactcccctgcgcctgcaaaagggaaaagaaaaggtcaaagtgaagaagatagaaaccatttactgggatcgcttccataaagatataagatttaagccccgtttgtatagttggaattgaatttcattctaataatagtaatttagacatatatcaattaangctaaattcagttttatgag

SEQ ID NO: 23242 - DNA, 262 bp, Zea mays
  Clone ID: MRT4577_121202C.1
gacatcattttatttctcgatgcaaaacgggaacaaacatccatcccggtagttttgggggcgcaaaaacaaatgaaacgaagtttacaaaacaataaacaactaatatttcgtcgctacagacaaggaaagcagagctgtcctcaatcggtgtagcacttgttgctccccttcccatccttcttcagcttcttgccccgccgacggcggcgctcggcgtcctccacccgccgcacggcgcgctcaagcgcgtccacgcgct

SEQ ID NO: 23243 - DNA, 167 bp, Zea mays
  Clone ID: MRT4577_121203C.1
aggacctgttcgagctgggcggccttgcctatgtcgagaagaataacgcgcgcatggccggcgccctttacgacaccatcatcgcctgcggagggtactacgtctgccccgttgtcaagtacgagcgctctcacatgaacgtgccctttaccctggccaagggcctc

SEQ ID NO: 23244 - DNA, 492 bp, Zea mays
  unsure (1)..(492): unsure at all n locations
  Clone ID: MRT4577_121204C.1
gctcacccctccctctcgctctccatttatgggtcagccggggagggaccgacgcataataaatgtanagtgtcgggaggggtctgtctctcttgggggctgggtgcaacgggcatggcgacgtcctctcgtcgggtgcccttgctgctgctgtgcctgggcgtgctggggtcctgctccttcncggcgggcagctggggccggganctnnacatcacgtggggcgacgggcggggcaagggccttgacaacgggcgggtgctgacgctgtcnctggaccgcacgtgcggctccgggttccagtgccggcacgagtccctgttcggcaagatcgacatgcagctgcggggggggtgnggcaactccgcctgcaccgtgaccggctactacctgtcggcgcagggcggggcgcaccaccagatcgacttcgagttcctgggcaacgggtgcggggagccctacacacgtcacaccaacgggtccacgcggggg

SEQ ID NO: 23245 - DNA, 298 bp, Zea mays
  Clone ID: MRT4577_121205C.1
cggaactgcaagcatacagctctactcttgttatggactgaacgcgcgaatcgaaacggtgagcgtgaaccatggtggacgaatacagccgcttctttaccagcatgccagggccggcgacaactacaacagaggcttcaacatcttgttcggcacttatgactacggacgaagctaacgtggataccactagctggtccgtgattacgactacatgtctatatgtagggactggtacaccatgtactgtagttacaactacgcgtcgggcacctgtagtggcggctacaacaagttc

SEQ ID NO: 23246 - DNA, 249 bp, Zea mays
  Clone ID: MRT4577_121206C.1
gcgcaccgactggccaccatccgttttgaagactccatcgccgaggtgcaggacggtcgtgtggtggagcatggcagccacggggacctcgtgtcccgtctcaacggcgcatactagaggatgctgcatgtgcagctacaccatggctgatcctgcgtctggaatagatactggtgggcgcacggccggtttcgatactgtaaggcggggttagcgtggtatgtctcaaccactgtcggagaagacgtg

SEQ ID NO: 23247 - DNA, 347 bp, Zea mays
  unsure (1)..(347): unsure at all n locations
  Clone ID: MRT4577_121207C.1
gggaggggcaaatcacatgcctgttagcccaaaactccagatgggacaccttcccaaggggccttaactggtcagcttttaatatgctgggccaccactttnctggtaaaaaaggttctttacctggagggtagcccccaacttcctcttattaccaaaaaacaggggggtaccggggggggaaaaaaagaacccttgggaatgacaaaaggaatccccccctcaccttttcaggttggaattaagcctggacagcccttcggctggcactgcttcgaacggaggcaaaaggccaaaatctacctggggaataggaacatccacaatgggcccgctaaaaccatttt

SEQ ID NO: 23248 - DNA, 756 bp, Zea mays
  Clone ID: MRT4577_121208C.1
ccttcctctttcttgacaggaacttgagcttagtctgggggattctagagctccagcaaagagcgcttccacgcctgctgcactgactcctatacacgcaggtgcgggaggagaaggccatgagcttgcgctggagctaggagtaggagctgccaaaagagctgaacaagacaaccaaaagacacccgtgcaaccagaacatgtgcaggaagaagaagaagaggaagaaacatgcccatacagcgagtcacctgccgagctgagcctcatcggctgccctttgctgcctgcggcctcagcagaaatagggtccgtgaattcttcagaggtgtgcgtgcgacgaggatttggtgtggacgctgttctcgtggatggaggagacgcagcacaaggaagaccggctttgtcgacttcgttcttgccttcggagtttctcgttcggcggcaggctgatgatcaagaagctgctgcagaggatgaggagatgagtggggttggcgggggagcgaggaagaagctgaggctgtccaaggagcagtctgcgttcctggaggatagcttaaaggcgcacagcacactgaccccaaaatgtgtcaaccctgttgtgtttactctgttttactgtatctgtggaacatgttagtgcccttgacagcatgttaagggagtgaatctattctagataagggggtccaatccacaaatttggtgcaataaactcatttctcgtattattactaaaaaaaaaaaaaaaaa

SEQ ID NO: 23249 - DNA, 2632 bp, Zea mays
  Clone ID: MRT4577_121209C.1
gccggccgggtcgggagcttctcgctcgtggcagcatcgccatcggcccagagccccagactactgcgccaagctgagcgctgcgggtgaggggtcgcgcgcgccgccggctaccagggccggccggccgccccactctgctatagctgtggatcagtggatgcgcgtccgcccctgtgtgtgtgtacccgccgaacgccatggataggagcgggaagatgagaaagaggaagaagcgcggtgacgaaagggccgctgccggtgcgccctcgccctcctccgcctctttcgacctccactttttccccgtcctccttgccgccgcccgaaccacacgccaatctagcagctcctcctcccccgccgcgctcgctgcccgcctcctgcggcgtgtgctctcccactcgccgcagacgctctcccctctcccggcctccctcgtcgcgctcctccccctcctcctctcctccagctgctcttctgtcgccgcgctaagctgcgaggtgcttggcgcggcagcgctgcggtccattgaggccggcgagacgctggcgtccgacagtggcatcgccagctgcctggcgaggacgctgggaagtagaaaccagcgagtcattgaggctgcttgtaattctatattggatctctcggcgtcttcagtcggtagggagcgacttgcaggctcacctgttctgccgaggacattgtggaatctgtttatggttttgcccatagtcgaagcaccgagtgcccagaaagctctacagaagcaaataaaatcatgtgtttaatcattgacacagtggttctcttggtgaattcttgtaagattggcaatttgcagaatgtacagcaggagatggcaaggaatgttctgtctttgctgtacaaaatctggaagaaaactcaacccttaagatcatcgactgattgcaacaagtggaaccccgtccgcgcctcccctcgtcgtctcgtctcgcctcgcgtcgtctgcgctcgcggctcgtcacaggtctcggcgggagaggggcggcggccggtccgtgtccgtgtccgtcgacggttggttcgggaatggcgcaggcggtggtgccggcgatgcagtgccgggtcggagtgaaggcggcggcggggagggtgtggagcgccggcaggactaggaccggccgcggcggcgcctcgccggggttcaaggtcatggccgtcagcacgggcagcaccggggtggtgccgcgcctcgagcagctgctcaacatggacaccacgccctacaccgacaaggtcatcgccgagtacatctgggtcggaggatctggaatcgacatcagaagcaaatcaaggacgatttcgaaacccgtggaggatccctcagaactaccaaaatggaactacgatggatctagcacaggacaagccccgggagaagacagtgaagtcattctatacccccaggctatcttcaaggacccattccgaggtggcaacaacgttttggttatctgtgacacctacacgccacagggggaaccccttccaactaacaaacgccacagggctgcgcaaattttcagcgacccaaaggtcgctgaacaagtgccatggtttggcatagagcaagagtacactttgctccagaaagatgtaaattggcctcttggttggcctgttggaggcttccctggtccccagggtccatactactgtgccgtaggagccgacaaatcatttggccgtgacatatcagatgctcactacaaggcatgcctctacgctggaatcaacattagtggaacaaacggggaggtcatgcctggtcagtgggagtaccaagttggacctagtgttggtattgaagcaggagatcacatatggatttcgagatacattctcgagagaatcacagagcaagctggggttgtccttacccttgatccaaaaccaattcagggtgactggaacggagctggctgccacacaaattacagcacaaagaccatgcgcgaagacggcgggtttgaagagatcaagagagcaatcctgaacctttctctgcgccatgatctgcatattagtgcatacggagaaggaaatgaaagaagactgactgggaaacatgagactgcgagcatcggaacgttctcatggggtgtggcaaaccgcggctgctctatccgtgtggggcgggataccgaggcaaaagggaaaggttacctggaagaccgtcggccggcatcaaacatggacccgtacattgtgacggggctactggccgagaccacgatcctctggcagccatccctcgaggcggaggctcttgccgccaagaagctggcgctgaaggtgtgaagcagctgaaggatggttcaggcaccaatataaaccggtccgcgacaagattgatctttgtgtccatggcgtgggtcttgcgactctctgctcggcggtgccactctgtacaaaatcacggctgtctttgattcatcggatattcggatacgtttgtttgttactttttgcttggacacccaccatgtttggaacttttttgggctccgtttgggggctgaacgatggtcagtggaaattttaaaaattcgtcgtctcaaaaaaaaaaaaaaaaaaaaaaaaaaaa

SEQ ID NO: 23250 - DNA, 463 bp, Zea mays
  Clone ID: MRT4577_12120C.1
ggataacccgacaacagtgtctttacaaaaatgggtcgtcggttacataagcatatgcgtgccaaggctatttctccagaactgtgaacaggacatattatatcgcctatgtacacaactacagtatgagagcagcagacgccaataacttgtgtcaaggggtggtaccatacaaatcgtgtcactggaacgagttttgagcccttaacaaagggcaccatctgactaggaggaccctccctggtccccgaagatacgtttgacggaagtctgtgaccatgcggcgaaggccctcaaggaggggaaccttgggctcacagccgaggagctttttagcgcagctgatgccatgcttgcgcttgtgcggatcatctgcggtgttaggacggaactccatgagcgcctttgggtcaatggtgaactggaccaccttaggcaggtgccgcatgctgaattctccagg

SEQ ID NO: 23251 - DNA, 322 bp, Zea mays
  unsure (1)..(322): unsure at all n locations
  Clone ID: MRT4577_121210C.1
tacacttcgcagttccaaaccctactcccctccgcctccctccttccggatccttccttccccccaaccctccccgccgtttctccgatccgccgccagccagccgccgccatgtcgatccgcatgctgaaccagaacgcggaggtgatgaacaagtcggcggcnctcgccatgaaatcggcgccgccaagggccgccaagacgtcctcaagagcaagatcggccgccagggcagcctgcagatgctcgtgggtggagctggtgacatcaagatgacctaggacgggcacacacttgctcaacggaatgcacacccaaaacc

SEQ ID NO: 23252 - DNA, 386 bp, Zea mays
  Clone ID: MRT4577_121211C.1
actcgatggcttgcagtataggtgaatttgatggcttggaaaggctgagggaagataaacttctttcggaacttcatccttcgtttgcctctagcaacggtgatctggagttgcgatatgctttgaaaactcgagactagatcagttttaatcttcagctactaatttatgaagtcactgtccatacggtggtgatgcaaatgagatctgcatctggtgaacggatttatgtaaaaagaatattcaatgtgaaaaaatggtgaacctgtttttctgatgagtcttgctaggttaatttaccaactttgtaaatatataatgaactgaattgtgaatgtttgcagtaggtgaacatgctgtctaatatttatattcactgttcattt

SEQ ID NO: 23253 - DNA, 712 bp, Zea mays
  Clone ID: MRT4577_121212C.1
ggcacgaaacaccgagctttatcggctttctcgttctgaggtatgtacagacactatactacaggtacaagcaagccctatgttgttggcactctaattcacatatcctacaattttacgcacactccagctgagctttatagctcagtttcctggagctggagtcatggtctggtccattttgccagtagtggtgcttgcgctgcttcctcatcagcgctgtctgaaacgacagcttttgtgcccttgtccttcattcctgggttaagcatccaagcgaggcagaacgagattgccaagaagaaactcgccacaataaagctgaaacctttgcagtcgaagggcgtttcctctgaaatgaagtaagaggtcagtggactcataaatagtggtgccaacaatatagctacagactgcacggttgcaataaaaccttgcgcttttcccttcaaacagaggacacgcttctcaagcttttcattagtcctctggtactttactgcttctccgactgaagacgccgagagatccaatatagaattacaagcagcctcaatgactcgctagtttatacttcccagcgtcctcgccaggcccctggcgatgccactgtcggacgccagcgtctcgccggcctcaatggacagcagcgctgccgcgccagcacctcgcagcttagcgtggcgacagaagagccaggtagtcctacaca

SEQ ID NO: 23254 - DNA, 1087 bp, Zea mays
  Clone ID: MRT4577_121213C.1
ctctcccacgccgtccctgcatcctctcgacctcgccgtcatcactcgcatccctgccgtcgcgcgtgctcgacccacctcacagtcgggcatgaccttcgaccaccggccctccttcaccgtcgaccacgcgctcagctgcgcctaggtcgccggcaccgacgaccacgaggatgacctgctcctctgtgagacctgctgctccggcgaccgtgacctgctcctttgcgaccgcgagcttcacatcttctgcctcctcccatcgccgccaaggtccggccggccgccccaccctgctatagctgtggatcagtggatgcgcgtccacccctgggtgtgtgtacccgccgaacgccatggatcggagcgggaagaggagaaagaggaagaagcgcggtgacgaaagggccgccgccggtgcgccctcgccctcctccgcttctttcgacctccactttttccccgtcctccttgcagccgcccgaaccacccgccaatctagcagctcctgctcccccgccgcgctcgctgcccgcctcctgcggcgtgtgctctcgcactcgtcgcagacgctctcccctctcccggcctccctcgtcgcgctcctccccttcttcctctcctccaggtgtgtaggactacgtacgtcacaagctccgcttccgcccgccctcaatttgcaggaaagccctgccctgcgccttgcatacatgcccttctgatacgacgtgtgctgcaacgtggattgcagctgctcttctgtcgccacgctaagctgcgaggtgcttggcgcggcagcgctgctgtccattgaggccggcgagacgctggcgtccgacggtggcatcgccaggggcctggcgaggacgctgggaagtataaaccagcgagtcattgaggctgcttgtaattctatattggatctctcggcgtcttcagtcggtagggagcgacttgcaggctcacctgttctgccgaggacattggtcggaggatctggaatcgacatcagaagcaaatcaaggacgatttcaaaacctgtgttggatccctcagaactaccaaaatggaactaccatgggtctag

SEQ ID NO: 23255 - DNA, 2448 bp, Zea mays
  Clone ID: MRT4577_121214C.1
cccccgaggtcggccgccccaccctgctatagctgtggatcagtggatgcgcgtccacccctgggtgtgtgtacccgccgaacgccatggatcggagcgggaagaggagaaagaggaagaagcgcggtgacgaaagggccgccgccggtgcgccctcgccctcctccgcttctttcgacctccactttttccccgtcctccttgcagccgcccgaaccacccgccaatctagcagctcctgctcccccgccgcgctcgctgcccgcctcctgcggcgtgtgctctcgcactcgtcgcagacgctctcccctctcccggcctccctcgtcgcgctcctccccttcttcctctcctccaggtgtgtaggactacctgctcttctgtcgccacgctaagctgcgaggtgcttggcgcggcagcgctgctgtccattgaggccggcgagacgctggcgtccgacagtggcatcgccaggggcctggcgaggacgctgggaagtataaactagcgagtcattgaggctgcttgtaattctatattggatctctcggcgtcttcagtcggagaagcagtaaagtaccagaggactaatgaaaagcttgagaagcgtgtcctctgtttgaggggggccggccggtgcgggacgccctgtaagagctgatcagcactcaacaagcgatcgatcaagcggaggcggaggaccagcagtaggagtagaatgggcggggatgcggcggcgatgaggccggtgctgcacctcatggtcgggctggtgctctacggcgtcgccgaggagatgaccgtcccggcgcttgtcgacaaggtcaccgccgcgctctgccccgccgacgaccagtcctgcccggaggccctctacctcaccggcctgcaggcttcggttggagggatcttcaggacggtagggttcactctgatgggccagctggctgatgagtacggccggaagcctctcatcctcctcaccgcctccacctccatcatcccattcgctgtgctcgcatggaacagttcaaggactgccgtgtatgcctaccttgctctgcgcaccctctcgttcatggtcggccagggaaccatattctgcctcgccattgcttacacggcagatgcggttgagccatcaaggagggcggctgcatttggcttcttgacggggattttctctgcggcacacaccttggggagcgtgctctcgaggttcctgcctgggaagtggattttcgaggtctcaattgtcttgctgatctgctctatcctctacataaaagtatatttggttgccactgtttacagacctccttctgcgccttctcggcatttggccatgccattctctgcttgtcaaattaccgcaagaacgttgggaatctatcaaggtacaacattagcatagtcaaaaacagcgcaaacactcaggagaatctcatatgttgccttcttttacaaattgggcatgattgccattagcgacgttctaatgtattacctgaagtccgtatttggctttgacaaggatcagttctcagagattctaatggttgtcggcgtcggttcaatcttttcgcagattctggtcctccccttccttagccaaataattggtgaaaagggcgtcttatgcatttcaatactcgcatccattgcttatgctttgctttatggtgttgcatgggcttcgtgggttccatattttagctcttcattgggtatcatctatgttctggccaaaccagcaatatatgcgataatttctggtgaagtactgtcaactgaccagggaaaagcgcaaggttttattgcaaccgtgcagtctgtagctatattgttggcaccactatttatgagtccactgacctcttacttcatttcagaggaagcgcccttcgactgcaaaggtttcagctttattgtggcgagtttcttcttggcaatctcgttctgcctcgcttggatgcttaacccaggaatgaaggacaagggcacaaaagctgccgtttcagacagcgctgatgaggaagcagcgcaagcaccactactggcaaaatggaacagaccatgactccaggaaactaagctataaagctcagctggagtgtgcgtaaaattgtaggatatgtgaattagagtgccaacaacatagggcttgcctgtacctgtagtatagtgtctgtacataccccagaacgagaaagccgataaagctcggtgttttgtgccatccagccttcactgtttcaggcaaatggatctttatgttattacttcttgttaaaagacgctaggaaatagaggtatgtccgcacttcacgggactttatccatctcggcggcctgttgtgtttgcccccttcttcgccacccacggcggcctgttgttcaagtacctgtaagggcgacaacatctcgaataactcctgccaaatcgcc

SEQ ID NO: 23256 - DNA, 387 bp, Zea mays
  Clone ID: MRT4577_121215C.1
cgtgcgtccacgcgtccggacctgttcttgaggctgtttgttctcaagatctagttttccaaccggggggagtctccagaagttcgctcggcggcatcgctttcttgttgagcatggtgcatgtcaagatccactcattgtttcaggtgcactctttcctcagtgctacattctacctgagatgtatcaagattcgctacacaatttttttcttcccaactggacagattggcaaccttgcagatactcgtaatcggactctgcatggtgtttgaagggttcacagctgtttcatggggcatcaagcccgccgttatgccagataaccaacacgaacagttttgactctttaatcattcatttctggtgagaatgcaccgcaaatct

SEQ ID NO: 23257 - DNA, 1342 bp, Zea mays
  Clone ID: MRT4577_121216C.1
tttattagatagaggtcggacgcgggctctctcggtctgtccaatccaactccagacgaggcaacgactcgtcagtggtcagtacactacaccgtaagcgtcgccggaatcgatcgacccaaagctccctttagagcccgagctctatccaacccacgaacgggatcccgatgcccatggcggcctcggttctcgccggagcggcggcctcgcccccgctgacgtggcggagatgggctcctcttctcgccgcgtcacatccacgggcgaacccgcctcccgcactgcgcctgcgggcgcccgctcctcctctccgggcctcctccgttccccgcgattcctgcgccggagccgccgtccggaggacgccgtgtgcggcggcggcggcattaggtggaggtgtgaaggcggagtccacggagcgggaggcgcccgatcgggatgctctgaagcgggtggcgctactcgcgcttggctgctgcgctgcagccgccgcgctcggctgcggcgcggcgcgggcagcggcggaggactccatcaaggcgtcaggattcgggctgcgggtggcggagtcgctgcggaggctcggatggcccgacgacaccgtcgtgttcgcgctcgcgacgctgccggtgatcgagctgcggggggcgattcccgttgggtattggctgcggctccatccagtccgcctcaccatcctatccgttcttgggaacatggtgcctgtaccattcatcatcctctacctgaagaaactcgcaacgtttctgtctcagaacagcgcgtccgcgactcgaattatggacctcctctttgagcgggcacggcgcaaggctgctcctgttgaggaattccagtggctcggcttgatgctgttcgttgccgttccattcccaggcacgggagcgtggacaggggccttcattgcatctgtactaggcatgccgttctggtcaggttttacagcaaatttcgtgggagtcgtccttgcagggctgctggtgaacttgctcatgaatcttggcctgaaatacgcgatcgtcactggagtagttttgttctttgtctcaaccgtcatgtggagtgttcttcgttcccttaagaagtccgttaatgtcaagtgatctagtagtctttatcaaactgttcctaatcccttcagagttcagccttgcgtaggaagcttagttgtgtaattttaagtggaactttcagcttccaagtggatttacaagagagagtaacactccatatctccagcgagctgagaattggccatgcttatttaagtcgcaagtaaaaatgtctttctcatccaaaaaaaaaaaaaaaaaaaaaa

SEQ ID NO: 23258 - DNA, 1153 bp, Zea mays
  Clone ID: MRT4577_121217C.1
tctatccaacccacgaacgggatcccgatgcccgtggcggcctcggttctcgccgcagcggcggtctcgcccccgctgacgtggcggagatggactcctcttctcgccgcgtcacatccacaggcgaacccgcctcccgcactgcgcccgcgggcgcccgctcctcctctccgggcctcctccgttccccgcgattcctgcgccggagccgccgtccggaggacgccgtgtgcggcggcggcggcacttggtggatgtgtgaaggcggagtccacggagcgggaggcgctcgatcgggatgctctgaagcgggtggcgctactcgcgcttggctgctgcgctgcagccgccgcgctcggctgcggcgctgcagccgccgcgctcggctgcggcgcggcgcgggcagcggcggaggactccatcaaggcgtcaggattcgggctgcgggtggcggagtcgctgcggaggctcggatggcccgacgacaccgtcgtgttcgcgctcgcgacgctgccggtgatcgagctgcggggggcgatccccgttgggtattggctgcggctccatccagtccgcctcaccatcctatccgttcttgggaacatggtgcctgtaccatttatcatcctctacctgaaaaagcttgcgacctttctgtctcagaaaagcgcatccgcaacccgaattatggacctcctctttgagcgggcacgacagaaggctgctcctgttgaggaattccaatggctcggcttgatgttgtttgttgccgttccattcccaggcacaggagcatggactggggccttcattgcatctgttttaggcatgccattttggtcaggttttacagcaaattttgtgggagttgtccttgcagggcttctggtgaacttgcttatgaatcttggactgaaatatgcaattattactggagtagttttgttctttgtttcaactgtaatgtggagtgttcttcgttccctgaagaaggctgtgaatggcaaatgatctaatagtcttcatcacactgttcctaatcccttcagagttcagctgtgcataggaaattcagttgtgtaattttaagtggattttcagcttccaaatggatttctaagagaaaggaactgagaattggccatgtttatat

SEQ ID NO: 23259 - DNA, 384 bp, Zea mays
  Clone ID: MRT4577_121218C.1
tccttagcagtggtaacaacgcagagtacttttttttttttttttttttttttttttcttttttttttttttttttttttttttttttttttttttttggatcaaaaagggggtaatttcgggcctttggccgcaccaaacaaaatcaagagggaaaaggagaaaacgaggggggccccactacaaaagcatcagagaattaaggatagaaaggagaaccactagggaaaaatgaaacggtttatacaacagtaaccgccacacccttttcaagggaaaatagccctgaagcaaacacactttaggcgggggcacccactcccctcctgtggggggccccgcgaactcggcagggccaccactgattaagggggaatattggaa

SEQ ID NO: 23260 - DNA, 474 bp, Zea mays
  Clone ID: MRT4577_121219C.1
gccaaaaatgggggacccggaaaatcccttccccattttccgcacaggaaaaagggtggggggggcaaaaaatggggaagggggaacccaacccggaggatatttaagggggggggccgggatgggggcccccattctggaaacggaaagggggggataccgggacaggggggatgggggggccacccggggggggggcgggagcccggaactttttagcccgggggggggccggattggaaaaaaggggggccccggggtaaaaaggaggggggaactagctaaaagccgggggggccccacggggggaggggggggccgaggttccggtttttttggggctgggcctgggggaaccaggggaaaacgcccccgggggggagctcctttatggggacgccctcggggtccgagaaaactttaagggggttaagaaacgaaatgggggggggggaggggaaacccttgggcggg

SEQ ID NO: 23261 - DNA, 318 bp, Zea mays
  unsure (1)..(318): unsure at all n locations
  Clone ID: MRT4577_12121C.1
gcagcgcagcactgcaagcacactttcatgcaatcactgtggtaggttgttaaaccggagtagttacagttcatcaccancacaatggcttccaanggttgcgctcttccttgctctgaggcctcgtgtttgcctgcaccgcgcatggctgcgaaccaactgttctggccagtcgtccaacgccgcagtcgtgccgatcgtcgtcgacagcacggggctgccgatcgagcgctcagctcaagtgtcgcacgtctaggctcgtaaggtggctaccagtacgacatgtgccgtgctgaggctgtgactgagcgatgtgct

SEQ ID NO: 23262 - DNA, 400 bp, Zea mays
  Clone ID: MRT4577_121220C.1
cggacgcgtgggttcttttttcctatttatttttatgagcgatttttctctttttggggtgttttaatttctttttttttgcccccaaaacaaaatcaattgtttcaattatatcgactctaccaaaacatttgccttcacgatataaaaataactaaattgtatttcctaataacccattaagtcttctaaaaacttgatgggaacacatctgagactccggccaccattttatggaaagagaccgctaaaaccatttcttataacaacccattgtgcaaaacgtcccttaaaaacttgaccaagaactacttgtttaaacgcaccaagcttaattacctactcatgcgaactgacaacttttacataggcgtccataaactcaattacttggacattg

SEQ ID NO: 23263 - DNA, 307 bp, Zea mays
  Clone ID: MRT4577_121221C.1
ggtcggggaagctttccaagagggggctgcgtggccgcctttccccttcgctgattcccggtacagagtgctccatccatcacatcctgtagctatcttatatttcgaccccgagaagatgcctgcctcacacctgtctcggtcctctggagactcttactcgtcacaccgtagaccctgtccaccgcaactagatgtgactgcatctcgccgctcccgacataggcatgactgggggaaattcctgaacaactacgctggtaccctgctcccaaaattactatacaccggccactgtaatcatcat

SEQ ID NO: 23264 - DNA, 734 bp, Zea mays
  Clone ID: MRT4577_121222C.1
ccaccctcggcgactccaaggagaggctctgcggcgccatccagctctccaacctcttcggcatcggcatcggcgtctccattgccgcctccgtcagcatgcaggcgatccggagggccggctgcttccactaccgagggcacgaggacccgtgccacgcctccaccagcccatacatcgccgtcttcggcgtcatgcagatcgtcttctcgcagatccccgacctagacaaggtatggtggctgtccaccgtggccgccatcatgtccttctcctactccaccatcggcatcttgctcggtgttgttcagattgtagaacacggaggaccgagggggagcctcgccggcgtcatcggtgctggcgccagggtcaccatgatgcagaaggtgtggcgcagcctgcaggcttttgggaacatcgcgttcgcgtacggtttctctatcatcctgctcgagatacaggacacgataaagtccccgccgccgtcggaggctaaggtgatgaagaaggcgacggcagtgagcgtggcggtgaccacggtgatctacctgctgtgcggctgcgtcgggtacgcggcgttcgggggcgcggcgccggacaacctgctcacgggcttcggcttctacgagcccttctggctgctggacgtggccaacgcgttcgtggtggtgcacctggtgggcacctaccaggtcatgtcccagcccgtcttcgcctacgtcgagcgccgg

SEQ ID NO: 23265 - DNA, 160 bp, Zea mays
  Clone ID: MRT4577_121223C.1
cattgggacctcgagccgggcccgccgctcttggtgaggcccggctgaccacgcgctatctgcccaagcgggaaaaggagctggagggcggctcgctctactggattcaccagcacatcatcgtgggccgcagcccgatcctgggcttcgagcaaaagcc

SEQ ID NO: 23266 - DNA, 290 bp, Zea mays
  Clone ID: MRT4577_121224C.1
gaactgcaacataaagcacatgtgccaactggcagcaaaatatttgctcttactcttggctttctgagtgctgtcgcaccatttccacatgctacgctctatgcttcttttccccgaccttaccacggtttggttgtgaaaacccatcttaaccctatggatccaacagcatcagtgcattaccttataccctgtctcaacaatcaagcctatacgagtccttgggcattatgcacaaacatagcacacactcaacaactggtacaaacctgtgctcttagaacacagtt

SEQ ID NO: 23267 - DNA, 119 bp, Zea mays
  unsure (1)..(119): unsure at all n locations
  Clone ID: MRT4577_121225C.1
acatcggagttcgatgngcatgcggggctacaggcgtccaggcacctgagacaccgaggttaaaactcaacatatgcgtcaggagataaggacgcccatactcaacctacttaactgcc

SEQ ID NO: 23268 - DNA, 109 bp, Zea mays
  Clone ID: MRT4577_121226C.1
aatcaaatgcgggggataggtctcttaaaattgacgttacatcatttaacaatttactggagctatggaaggacatgggaacgaacggagccaaggccggaacttgacg

SEQ ID NO: 23269 - DNA, 320 bp, Zea mays
  Clone ID: MRT4577_121227C.1
ggggggggttttttttgtgttggtattttttttttttttatttttttgaaaaaaaaaaaacgttcctttttataccaactggggagttactaaggtctttcagaaaacaaacacaactttgggttttagctttgggacccaggtaaaaaatttgggggcctttattttgtctaacctgtttttaattatcatggcccctttctaaagggggggttataatgagatcatatgcccccccattgttttggggggtatcgtgttttttgtggaatttgacgcttgggggtatatttctcggagagtttatcaaggtggttgtc

SEQ ID NO: 23270 - DNA, 546 bp, Zea mays
  Clone ID: MRT4577_121228C.1
ccgggttttacccacgcgttctttatttacttatagtattgagtgatggacgtaacatcttcagcgaaggtgaaaagaaagtcaaaaacgccataaaattagctcgtttgagtagagtgttcattgtttacatcatcattgataatcccaaaaatgacagctcaatttttgatattcgtgtgccacatttttctgctgatcgtaagacggttacaatgagatcatatttggatacttttccattcccttactacgtaattgtgagagacttaaaacaactgccactggttttgagtgaagcgatgcgacaatggttcgaattagtctcaagtgaacaataaatttaagtcaaaataaagcgcatattcaataggaggatgattaaggctgatgtcatttgaaattgattattctgcttacatccttgcattgactaagtgtcaatttatgttaactgaagtattttacaaattaactaatgtaattatttttatttcgatgttttatgaaacattgaaaagccatattaaataaaatatttcctcg

SEQ ID NO: 23271 - DNA, 371 bp, Zea mays
  Clone ID: MRT4577_121229C.1
aggacaagcagccggcctcgctgctgacgaatccacagaatgcctggtttggtgaagactaataacaccaatgcatcttctaaacgttaacaagtgaaagtcataagaatgcggactgccaagacagactacagggccaccataaggcttattaaccatgacagaaacacagtcatcacacccaaatacagattctgtgctcaatctaccaactgggacatacctgcccaaatcatatgtgctagtctagcggatgatatggttcttgcttctgcctactagcatgatttgccacgatctaggtcttgaagatacgatgaccaactactcaaatgcctactgcactggtcttctgaagcttcgacttgtgc

SEQ ID NO: 23272 - DNA, 794 bp, Zea mays
  Clone ID: MRT4577_12122C.1
tttgaatggtccttatccaacagtaacaattcacagaatccaaagtggaaagcattacagcaggtacaaaaaagaaacaagggggaagcacacgggctccttttaaaactttaaagtacactacagcacaccatcaggaaaaaaaaactacaacacggaagacacacgatacaacacttgaaccgttgttcttgcgaccaaaacctgcctttctgaactctgacagagcgaacataaattgtcaacaacaggaaagcggccttccccctggtaccaaaggtatacagatagtacaactttcacctcctggtcaggtgcatgatgatcctcttattgcaataggggctgttccgaatggcattctcataagggaggatcgcttcaacaaggacatcgtacagacggcccctggtgtggtcaagggcagtgcgaaagacataattggcgaaacggtcctgcagcagttgttcgaaatcagaaccgctgagcatgagtaattcttgtattatgacagctttggcatcgtccgggaaaaacattaagcatttctccaccacattgctgctcccctgctgctttgagagataaacatactttccttcaaacagagatgccaagtgtgcatttgcggaaggaatttcctgttccaaaacacattggaccacgtagttcccaaatggatcctgggcaagttcaaagccatgaagacatatttccataatcagattggccaggtatctaccacgtgcttttatgcaactttgtagaacaaagcatccatggcaatgtacctc

SEQ ID NO: 23273 - DNA, 422 bp, Zea mays
  Clone ID: MRT4577_121230C.1
gaatatgaaagcttggaatttactactactacttcagtacctcaaaattttcaacaatttggaggacaagagaagaaaaggtccacattgatagagtaagcatgcaaagtaaaacgcctgttacgagcagaacacttaaaaagttagcatggaacccggaattacgacaacaaaagagtttaccttgataataggtgaaatgcttgtgtaaacattaaaagttgagtaatcctggctcctgagtgactgaatagatgatatgctgtccatggatacccgtgattattttctaaaaataatgagaactggggcgatctgtcaaaagatcatggatacccttgaatcacaggagaaatatcttcttgatgccctattgaaatagcacatatcaatagttctataaacaattgggaacataggac

SEQ ID NO: 23274 - DNA, 1010 bp, Zea mays
  Clone ID: MRT4577_121231C.1
cctcgaagccggccggggcacactaattcggcacgagggccgaccaaggctcgcacacgccgtggccgccccgcgcgctcgcccgccgcgtcgtccctgtccctgatccatccccagtccccagcaggccagcggccacctcccgctcgccgccgcttgtggccggaggaccggaggtacatgggccaggctctgcgccgcgcctcggggcgcgtgaagccccctcccgcgccctcgccgcccgcgaggcaaccccaccctcccccgcctccgccccaggcgtcgccggcgcccgctggcggcgcgacgcaggaccggctcgacgggctatctggtgacgatatcacggctccaacagaacacggtcatggtgtacttgaggaacgtgatccaagttacgacgagatgctcaagcacatggttgggagaatcactaccaagcccggaggaaaaccagaaatgggtgaagcttccgttgtccagcggtacaacaggccgctcccaaaggtcagaacgtcaaaggccgaacctgggcaaggtgggggaaggcagctaccgtcaggcgctctgaacgtccagcacatccaggagatcatccgactgtaccaagggaagtcgactaaccaccagggcccgatgagcgtggatgacatcgcctcgaggttcggagtcgaagcctctgccgtccaaaacatcgtgcggtttgtttcgctgccccaggacgagggcgtcgagaagaaagaggagcactgagggtccacgtggccgtgtagctacctctgagcctttggtcttgttcccaagctcatagataactgctgcttgaatgtgattttgatagtgttgtttaggttttctcctgctcctgctatccaggataatgaagttagtatggaagggctctgttccataagcacctgctgctatgatcagtggacgctaatatctgtttctggccagctccccaaaccacgccataaggagtccattttggttttcttggctgcctc

SEQ ID NO: 23275 - DNA, 425 bp, Zea mays
  unsure (1)..(425): unsure at all n locations
  Clone ID: MRT4577_121232C.1
gaaaaaccgggnccacccaacccgtccggaaaaaaccaaaaacctttttaggggaaaatgtattaacgggagttctgcccactgaccatgggggttcaaattggacaccacccgatcactcaaggttggtattttgctctccatgttgcattggggcaggtcattgcggggtgtatatagtttagatattacgagcctcacacagatcaaatcttgaatcgtctataaaagctactcgagaccaccacgaattagggtttcaaccgcgatggcggccttctaggctggcggatctagcgcgggcgtcgctggccaagcgcatggcggctgtcaccggcgtggcgaccgtgcatgaacctgctaccactgctgggcccgttcatgatggagaaagcgcgcgctcgatctcgcggttcttcggggcg

SEQ ID NO: 23276 - DNA, 1432 bp, Zea mays
  unsure (1)..(1432): unsure at all n locations
  Clone ID: MRT4577_121233C.1
attcggctcgagagcttgtaaagggggacagggatcctgagccattgccgtgctcaccgatgctgtactctgggcaggcgcacactaattcccagatgaacaagtttcttgagacaatggctgattggtacaggtatgcagataaccggaagaagattgtagggttctgtgcttatgtcataaggagctcactagcaaagctctacgcggcaaggtatagactgaagtctcgagctaaggtctacaagattgcttcacgggatcttagccgtcctttgagagaaagcacaaggaatgatgcaccagaatactctgatcttttgaggatggggctagttgatgttattgaaggtgtacaatttgcgcgcatgtcatcgattccaacgtgcgactacacacctttccctaggaactgggtgccacaccatgaacttatattgcttgagtatattaagctgcaagatccaaagttcttttgtgaacttcacaagactatcaaacgtcaggaaataagttcaccgcaggatgatgtatcaaagatggtgtggtattataaagtccacggtgtttatgatgacaaaagatccttagttggcgccaaggaattgagaaatgatgaaattatcaatgggaacaagcaacttctattggatacatagttccgagtcctatgttcccaattgtttatagaactattgatatgtgctatttcaatgggcatcaagaagatgtttctcctgtgattcaagggtatccatgatcttttgacagatcgccccagttctcgttatttttagaaaataatcacgggtatccatggacagcatatcatctattcaggcactcaggagccaggattactcaacttttaatgtttacacaagcatttcacctattatcaaggtaaactcttttgttgtcgtaattcagggttccatgctaactttttaagtgttctgctcgtaacagcggagcattactgtttcccagttgttagcagaactagaatacagaaatacaggcagtattaaagtgctgacttgtgaaacttcccagatgccacatgtttagcattatgccaattcccacatgtttagctttgttaaataacaggcgttttactttgcatgcttactctatcaatgtgtactttttcttctcttgtcctccaaattgttgaaaattttgaggtactgaagtagtagtagtaaattccaagctttcatattcattatcagttcaaatattagatgtaggggtgtaccacactgcaatcatgcaagttctgtgtgtacgggcataaactagacattgaattttcnctgtaatccttttcttttgtttttgtttggtttttcttttgtttgcgtttgtgtccccgttgtaaaggtttttattctttttctctctaatataaagatgtgcagctctc

SEQ ID NO: 23277 - DNA, 105 bp, Zea mays
  Clone ID: MRT4577_121234C.1
catgattaggaccctgctgctgtccactttggtggctggagccctcagttgtggggtttccacttacgcgcctgatatgtctaggatgcttggaggtgaagaagc

SEQ ID NO: 23278 - DNA, 607 bp, Zea mays
  Clone ID: MRT4577_121235C.1
ccggccgggaacggaatgctggccacgcacctgtcgttgtcaagacatctgctgcttccgctgagtgacatgaagacgactcgactttgggccgcgctgatgacgcatctgccactactactactctcgtccgacgtaccgtgcctggcacactgctctacgaccccctatcatccaggataggacgagttgagcccttccccaccagcatccaccggcacgtggtcacctgcaactgactgccggctgctgatgactccggcggagctgctactcttggaagccaacgtgctctcgacggaggagacagctgctggtgctaccatgatacttctactacgacactcaccagacgatgtccccgtctgactcactgagccattaggctgcacacgtaattataatgcttgcgctgtaatcgctctcccttacgcgaaatacacccatcaggagatgaaccatctgatctgatcctctgcgtgttcccctacacaatacgtagctcggcactatggacatctcgtgttagcaagagcgcatgtgcacacaccagtagaggtcgggagtttatctcagcatgctatgtgtatgctagtgagggaaattt

SEQ ID NO: 23279 - DNA, 266 bp, Zea mays
  Clone ID: MRT4577_121236C.1
aagggggtctatcatttcataactttccctactctactaccaaaaatcataccggaatacaacataaaaacattcctcacaaacaaaccactcacgtcccctaaacaagcacatgccacttgagcctctaatacacttcccataaacaaccctagaacaggaatacccatacttcccacaccacccaaaacattctacacgctttcacatgataaaacgactcaagaaaatataaaacactaaccctgcctgaaaaattattaaac

SEQ ID NO: 23280 - DNA, 421 bp, Zea mays
  Clone ID: MRT4577_121237C.1
gggggagaatggccatttgggttacctgaaaagaaaaccacattccctgatggggtcccagaagcaaacaaaaaaaaaaaaggggggccccgccaggaaaaaaatcccaaggggggaggggccccgcacaaaagttgttggtaggtggtacatttgaccgaactcccctacccataggggttttttatgaaacgcccaattttgggacgggggccagtttaagaactttcccgtgaaaatttgacggggggggacacgatagcaacacaaagcccgttaattgggggtcccgaggaggaaatattaggggttccccgttttttttggttaagattgcaaccactcttaaccggattccttttttgatatacccttcctttaaacggataatttggggtttttcggaagaaaggttcctttt

SEQ ID NO: 23281 - DNA, 282 bp, Zea mays
  Clone ID: MRT4577_121238C.1
gtgaaattctcgagcccaaagatggatgcatatgctgtgtttcattttgctaaatgatatcaattaaatggtatatcaattctataaattggatatagcaataaataaatcagcaaaattcttttattttagatagaagaaatgtttcttctatctaaaataaaagaatgtacccttctatccatatccaatttgcatcgataaaataaatccaaattccagattccagcagtagatgaataattgcaaatttttgtgtgtacgagattagaataacttaaa

SEQ ID NO: 23282 - DNA, 516 bp, Zea mays
  Clone ID: MRT4577_121239C.1
cacacaccgcacattctgcaggcgctccgacttgcaatgggcatttatgaggatgctctcgtcctcatcgtgaactttcgataccaagatgcgtttcaatcgactttctgtcacttgaagccttgattacatggatacattggttataattccagtctcgtcagatggtacatcaattttaggactcaaacttgcaatcgcagtttgatcataatagaattaacggattccatacagagctggaccttttaacattcaagggactctatcatacttggatcaagtatactatatagctttagaaaacattcatgtagagatcctataaaagaatgttaagcgcatagaagactattcattaataaacataattttacttaatagtgattctcaacaaaacagttagatgttagatcactgggagcatgagaaaggggtaaaattctcaaactataaggtaataaaatacaatacttatgtaaaagatctgattaatatctgtaaaaggtatatcaa

SEQ ID NO: 23283 - DNA, 436 bp, Zea mays
  Clone ID: MRT4577_12123C.1
ggttgggtttttttaaaccaatcccaaacaaacggggttcattttatacaaaccgttttcctaaaaacccccgtgtggaaataaaacaaaccctacttcccctgggggaaaaaaaaagacccacccgttcctgtatgtgtaacaatgccccaacacaattctttaaggcaaacctttatttatttgcaaaaccacaacctgtgaaccatccttgcttttttccaaaaaaaaaaacccaaccctttcaacctgttttggccaagccattaactaaaaaaaacagccttttactattaaaaacaaataccccccaccgtccctataaatcattacccccatcccgaaggccaacacaattagaccggaatcctttgatgttttcccctgccttattttcccaaacgaaggctttcttttaacccctttatttttttaa

SEQ ID NO: 23284 - DNA, 1051 bp, Zea mays
  Clone ID: MRT4577_121240C.1
tgctgatgtgtgcagaatctgagaaagtgcatctgatggaagttcctgttggatgtttaatctaattaactttgttttttatgaagtagcatgaagctgaatatagtccaacagtgcaaaagcataggtctttcatttgagcttgctggtcaacttgtacagagagtgatcatattccttctttttttacgttgattacacccaattagtatatatagttgcatacccacttggatgatttagttagtgaggaacacaagtgaagatgagctttgcactgttcaatgcttctgcttggaagaaggatgctcttgtggccgcagttcgttgttatctggaaagtggcttgctactgagcattctcttactacatgatgtaaattgtgaatctccatcaaggctggcttatggctgaagagtcagtatcatagtttcctttgatgggagaggacagcaaagccagctaatctcgctatccaagaaatcggctagtagttttttcccttttgaaccttgtcacgatgccttgtcttctggataaagttcacgcaggtttcaaataagaaatcacatggactatcagacttgtatggaatatggatgctgtacaaagatttctaatgtacattagtctaactttttttttcatgatccccgaaatgccgactatcaccagcgcatgtacatgtatatatacatacactaaaggttggggcatttttaccacgtgctggtctctatgtatgacgcctttggttccgtccaacttttagtctttcacatttttgaaattttgtgacattatagtttttttgttaggatagcgtctagtactgggaatttgttgcagaatgcaaaataaattccgtgctgtacaacttgtagccgagtttcaggtcgtcgagtgaagtgatggtaactgctcgccgaatttgcactatgcggtctgtggatatagctacttgaatgaaaagtttgtttccacatatccaaaaaaaaaaaaaaaaaaaaaaaaaaaaaaaaaaaaaaaaaaaaaaaaaaaaaactcgag

SEQ ID NO: 23285 - DNA, 194 bp, Zea mays
  Clone ID: MRT4577_121241C.1
gaacaaaatgagagggggggatattaatatggggggggactattcattattcgtagactacttaattggacgatcatatgcacactccatacaccgtcgcacatggggacgtaattaaactgaaccagagtggtggcatattgcgatctagctaggatattcgcccatgccgggacgtacaaccagatgttatg

SEQ ID NO: 23286 - DNA, 260 bp, Zea mays
  Clone ID: MRT4577_121242C.1
attaaagtctatatagattgaaatttgtaactttggttttaagtattctttccttttagaaacttcctaatgattaagatatactttaactgttctgtgttcagaatctcaaagactaattaactttaataaacattcttgcaagtactaaaaaggaaggacaagaaaggggatgaaagggataagtgtgacagaagcatgagtgaggatcaatgtcgcatgtaatggaatgactcttggattaagagcgtcagtgtgga

SEQ ID NO: 23287 - DNA, 298 bp, Zea mays
  Clone ID: MRT4577_121243C.1
ggtccacctaatcaaagtttatataaattagagaaacaatccggttaggaatctttccgacccaacaaggccttagcgagcgaagtggtcatttccccctctcttctttatgggaggaaaataggaaatggtgtgccaagtgtatcctcaaccattctactgttccaaacgtgcatacataggcatacagtcgatccagttgcaacaccatagtagcggtgctgctccatctccatccagtagcctggcctggttttttggccttcagatttgactttgcgtttcttgccccaaacac

SEQ ID NO: 23288 - DNA, 1872 bp, Zea mays
  Clone ID: MRT4577_121244C.1
ctagttctagatcgcgagcggtctctcgcgatctagaactagtgttctagatcgcgatgcaaaagttcgtggaataagtgggggtgagaagaagcgcctctcacttgcatgtgagttgattgctagcccttcagtcatctttgcagacgaaccaacaacaggccttgatgccttccaagctgagaaggtcatggagactcttcgtcaacttgctcaggatgggcacactgttatctgttcgatacaccagccaagaggttcagtctatggcaaatttgatgacatcgtactactgtcagatggagaaactgtatacatgggacctgcaaaagaagaacctctaacatacttctcatcattagggtaccagtgtccagatcatatgaaccctgccgagttcttggctgatctcatttccattgattatggctcaactgaaagtgtacagtcatcacagaaaaggatcgaggatctcattgaggcgttttctaacaaatctgtggtcactgaaggtaacaatttaattgcaattccagaggatcctgaattgtctgccaaacttgttcggaagactacagtgaagaaaagacatggttggtggaggcaatttcgtttgctttttaagcgagcatggatgcaggcttttcgtgatggaccaccaaacaaagtgagatcacgaatgtctgttgcttcagcagttatatttggatctgtgttttggcgaatgggaaaatctcaaacatccatacaagacaggatgggactacttcaggtggctgccataaacacagcaatggctgcattgacaaagactgtgggagttttcccaaaagaacggagtatagttgacagagaacgagcaaaaggttcctatgcacttggaccatatctttcatctaagttgttggctgagattcccattggagcagcatttccattgatatttggatcaattctctatccaatggctaaacttcacccaacattttctagatttgccaaattctgtggtattgtgactgttgagtcatttgctgcatcagcaatgggtctcactgttggagcaatggctcctacaactgaagctgcaatggctcttgggccatcccttatgacagtgtttattgtatttggaggatactatgttaaccctgacaatactccagtcatatttcgttggatcccaagaatctctctcattagatgggcctttcaagggctttgcattaacgagttcaagggtctgcaatttgagcaacaacattcatatgacattcaaacgggtgaacaggccttggaaaggttttcattgggaggaattcgaattgcagatactctggttgcacagggtaggattctgatgttctggtactggtcaacctaccttcttctgaagaaaaacagaccgaagtatcagcagctccttccaccattggaagaagataaaaataagcagcaggtggaataagcttttcatttgcagacttcgaaagaataaattaagtatatctggagtcaaagcgaggccgcgttttctgcatagtatctggagaccccagcattatggacgagccgaggcagtatacaatccgccgcccagaagttttcttttttatttttagatcctactagttgtgaagtcagctcaatgattgcctggggctatgggctgtggccatgccgctgcaaataaactatctccaaatcgccgtccaaagtacgaccactggcaaataaactagtttcttatggtttaatctctgtacgtgtcacagcctcctgttggccggagtgagatacaataatcacgggtgtagtgcctataaatgcgtgcccatttcggctcaaaaaaaaaaaaaaaaaaggccccta

SEQ ID NO: 23289 - DNA, 240 bp, Zea mays
  Clone ID: MRT4577_121245C.1
taggctccaaaaatccaaagccgtcccttatcaaccgtcccttcgatccctggggcggcggccgggaccatgacgaccggatccaacggcgacggaggcggcgcggggtcctggtacccgcagggcccaccgcactacgggtacggcggcgggtccgcctccttccgcggctgctgctgctgcctcttgctgctgctgacattactggcgctccttggtctggccttcgcgctcgtcgtc

SEQ ID NO: 23290 - DNA, 458 bp, Zea mays
  unsure (1)..(458): unsure at all n locations
  Clone ID: MRT4577_121246C.1
acaagataaaaataagccgcaggtggaataagcttttcatttgcagacttcgaaagaataaattaagtatatctggagtcaaagcgaggccgcgttttctgcataatatctggttatgggagaccccagcattatggacgagccgaggcagtatacgatccgccgcccagaagttttcttttttattttttagatcctactagttgtgaagtcagctcaatgattgcctggggctgtgggctgtggccatgccgctgcaaataaactatctccaaatcgccgtccaaagtacgaccactggcagagtgccagtagtactagtttcttatggttttctctctgtacgtgccagtagtactagtttcttaatcacgggtgtagtgcctataaacgcgtgcccatttcggctcaaaaaaaaaaacnnnnnnnnnnnnnnnnnnnnnnnnnnnnnnnnnnnn

SEQ ID NO: 23291 - DNA, 438 bp, Zea mays
  Clone ID: MRT4577_121247C.1
ccaaacaaagttaaaatggcttaaaattaaattcgggggaagtaattaatatccttcctacgggatatcaaaaaactgaagttccaaatgactcccaacttactttttagtagccgcaaagtacccctttttttttttcttggaaaaccccctttggcttataacagttgaccatcaaggaattgcaatgatcctcggggagcaaaaaaaaaaaaacttcccaacctgtcttaggaaaaaacattttaccccccccgcggggtttcccctgggtgaagtaaataaacagacggggagttttcgagcttttaccctacaagcagtttgttttcctccaaaaaactgtaggtagggccctccaggttaaagggcccagggcccttgcggatcctcccggaaatgtcatagggggaaccatggcttgggcaaaaccagccc

SEQ ID NO: 23292 - DNA, 178 bp, Zea mays
  Clone ID: MRT4577_121248C.1
acgtcgcacgcccgcgtacgtatgctcggaattcggctcgaggcttcgaaccgttgttccagaccaaaattcatccttgaggacgggggagtttatggattctctgtacaataaaccaacaaaaaaaaacaataaaaacggccgcccgccacctagtgagctctttcacccggaatct

SEQ ID NO: 23293 - DNA, 360 bp, Zea mays
  unsure (1)..(360): unsure at all n locations
  Clone ID: MRT4577_121249C.1
gggggggattttttttttttttccctttccccccccnnnctttgggggggtgtggccggcccccccgggggccctcnnnctggccgttccttcccggggggccgtttggaggggcgttttccncccccttggccgccgttccttggggttccggtctcggtcccacccttggggnnttcctggcccttgctgtttcctgggtgaatttgttttccggtgccctttccccccctttttccacccggnngcttaangggttaaccctggggggccttttggggggcccccccccctttttttgggttgcgctccttgcccggtttccggggggaaacctgtttcccccttccttttttgttt

SEQ ID NO: 23294 - DNA, 350 bp, Zea mays
  Clone ID: MRT4577_12124C.1
cggcccggttttccggtgtcgacaccacgcgtgctttttactacacgctgaccacagtcgaccgtcggcctatcaaggtctaacagtatgaaggtgcacgacctgcagagtacgaggacggaggatctgcaggcgctgtctgatgagcttacgccggaggtctcagtgctacacgtagcctaggcctccggcggctctcccatcaagatctgcaagaccatggttgcacgcacgctccatctcgcgcgtgcttaccgccacctggaaggatcagaacccgggcttgcgcgcggcggacaacaagaataagattcttgcgttatacctgcgcctcaagaagagacgttcca

SEQ ID NO: 23295 - DNA, 512 bp, Zea mays
  Clone ID: MRT4577_121250C.1
ttttttttttttttttttttttttttttttttttttttttttttttttttttttttttttttttttttttttttttttttttttttttttgggcccaaaccccccgttaaaaactagtcttttaggggaagacaaaattacggacccccccccctacttggggttgttccaacaataccagggtttttccgggggggcggaaaccttaaaaaaggggggggggggaaaaatttacccgggaaaaatcctaaaaccgcccccaggatttgggggcccccccaaatcccagaaaagaacccccgttggaaaaacttttccggcaacgggtttccccttttaaacaaaacccaataccaaaggggccccccccccttgatttccccaaatttgggagggggggggtttttgcccaaaaaacaaaaacaccctttgagccccccggtttttttttttatgcgtaaaacaccccaagatgggggcaaaaaaaccgttgtggccaaaaattcccttcc

SEQ ID NO: 23296 - DNA, 402 bp, Zea mays
  unsure (1)..(402): unsure at all n locations
  Clone ID: MRT4577_121251C.1
ggcttggaacctttgggctgatttatgtgcttgagtaggagtcataaccacccttaacaaacgaagtcatctccaagttacccgagaagggggacccaccagatagtttcaccgttagatcattcgatacagagattataatatccggagttatacacgccgtcagtccagacgtaggagcccggattaaggaataagcacccgtaggccagtataaggagaatgtgataactccctgtttaaaatcagacgaggcgtataagaagagggtcgacctacggcataagatggccctaagactacctgacccggtcgattccctctcgcaaacgccctccgctggtaccgactcactcgcccccggaagacgtaaacgaacaaaccggctcccgtcggcttcna

SEQ ID NO: 23297 - DNA, 735 bp, Zea mays
  Clone ID: MRT4577_121252C.1
cgggagaaggggagaaagcggcgatgcgtcgccgtctccgtcatcagcagcgaccctgctgatgccccgcgcctggtgctgctccttcgtcggtggctcgatcagcctcgacctctgtctgtctgcttccatcctcgtcgcgtacctcgcggcgtgaggaaactgccgctgaaatcctcatcgatgacgtccttctacggatgagtgagtgtccttcctcaacagatctctgccatctcgcttctccagcgcccgtaggtcgcccgcgtcgcgcctccgccgtctcgcttctccatctccacgccatgcatgtcgcaggccttgcctttgtggctttatttgtcgcccatcgctcgtcggcgcgcggccatccgtgacgcgggagctcgcggcgcctgataaggacgccgacgaggcgcatgcagcagcggctgctgccgccggatcgggcggacagcggcgcaggaagaagcaggagcttgccatcacatgcgtaggcgttggccctgcatcagccgactgccgaccaagtcctctgcacctccgtgctgagcctaccgcctagcagcagcaacaggtctcggtaatatcattgcttaggaaaaacaagtgatgttttctatcattagacttcctctcattacaagagagagtgatgtgccacaaaactgttgtcacggtgggacttggtcgtgattaacagcgaccatcgcaatgaagccgtgtctattttat

SEQ ID NO: 23298 - DNA, 535 bp, Zea mays
  Clone ID: MRT4577_121253C.1
tccggaattcccggctcgacccacgccgtccgtacatggtataatcttggagctagaaactgtaacacaatccgaagctacaagaaagcgctatcgttatctaagtcacttctcattgacaacaacgttccagttctgtgaaattgacctgggtgatatgctgcctcctagctcattagctccattcatggatgaaatcaagaagcgagagaaacagaggaaacgaactgccaatattgatgaaagcgatagagtgaaagccgaagttgctgctgctgcacaggcatctgcaatgctgtttgaacatacaagcttctctcccagtagtgggccacatggcgattttatgttctctctggatgactttgaagctcttggaaacaatgctggacccttcacgagtccaccagccagcgaaagaaagcttttcttcgatggtgcacggcttggctttgcgtctgcccaagactcgccttctctaagagttgaatctggggatttgactggcaaaagtgaaagcacgggggaaccaggg

SEQ ID NO: 23299 - DNA, 1105 bp, Zea mays
  Clone ID: MRT4577_121254C.1
aattcggcacgaggcttaaacctgttctccttacatgtcatgttgacaatcatctacattatctagctgtctggtagtagcatttttgtaaaactaacatacaaatctagcattaacttttgccccaaatttctaaaatctattatgaactacaaacaagttccaagtattccttttcacatgaatatgagcacactttttaagccatccaataacatttaatcaacatgtatcgtctacattatctagctgtctggtagaagcatttttgtaaaattaacataccaatctagcattaacttttttccccaaatttctgaaacatattatgaactacaaataagttccaagtattcctttgcacatgaatatgagcacccttttttaagccatccaataacatttaagcaacatgtatgcttaaattccacaatactgaccaattacacaaatgtttgctactatttcaatttttgttgtcacatcatttaaaggttacaaaatattgaactttagttgctacgacctacaatacttgaagaagagatccaggtttcccagacacctactttcgaggacaaaaccatcaatgaattggttgaaattgatccagatatattccatgaaggtagatggtggttcccatcttgcactaaatgcaacaagtcttcaattcagacctctactaaatatcgctgcatacgtgtgattggacagaaactaaatttaggcatgtcacagccttgcatattctaatgcactacatgatatagaggcataaaattacacacaaaagaaaaagaatactatctatgcaagatggactcgaaaatcctttcaacatgtggatcaatctaattattttagattttttctaaatttgcctttcaatggctgaagtcccattttgatgcaaatgaaaaagcgaacatcctgtagactgctgttgctgtgcatctcaactgttttggtcttccaatctttttggaagtattattatttttactttcacttactcttataattgcatcatgttacacgatgttgacgtcaatatggatatacacccaaacaatctaaattcaaggtcttgtcaaagcaaact

SEQ ID NO: 23300 - DNA, 199 bp, Zea mays
  Clone ID: MRT4577_121255C.1
cgcaactgcgaagctccccccagttcccacggtttcccccacgacgccggcgatgggcaagcggaaacagcgcggcggcggcgacggagaacccggcccggaaagccgttcttgccgaagacacaagcccttcaacggggtcggtttcaaacttccctacaccttcaagtccttcgatctctaggcggtgtttatcgag

SEQ ID NO: 23301 - DNA, 604 bp, Zea mays
  Clone ID: MRT4577_121256C.1
tgcctgctgcgccgccaccgccggcaccgacgacgccgccgcctgcaccggcggcaccatcccaaaactcatcatgcccttccggctttcctaactcagcctcattcgctcgaggcgtgagagagtatcttcgccgtggcatcattctcatcttgtccgctgtcaaggtcaccccaggcaccagcaccacaagatgcttttgctatttctctaccaacatcaccatccccgttcccttctcgccgcccattatggtgcccaaccccaatggacccctcgcatgcgtgccaggccgccaaatatgatatagcacgcctgagattcagcgtgctggcacgctggcacacgcactagtatactatatagtatatacgtacactatatatatatatatatatatgaataagctccatctgtctgcactcgtgtgcatgcttgtctgcatgcggagactaattcacatgttacacttctatacattggcatgtaagaggagtttacacaaagtaaagacacagatgatgtaacaatgtgtgacatgttcatgttattgtacgtgttcgcaaaatatcgaatatatatactggaactatatatattactt

SEQ ID NO: 23302 - DNA, 898 bp, Zea mays
  Clone ID: MRT4577_121257C.1
ctcgaggccggccgggagctaccgagactaaactcggctgtgctgtgtctgtgtgggtggccttctccctcccgcgcgccaaaggcccacggcggcacggccacgggcagccgccgcccgccggccgctgcgagccaccacaggctggatcctgcaccgctggtggtctcccggcccgtcagatcctgatatatcttcaaagataaagagagaaaatcataacagatggcggcggcggcaatcgcgaccgtgtccctcagttcagttcctcgcgaaaagcggccccggcactgtgccagtaccttcaacttcaacgcacggcagttcagtaactccagctcccactgccactctttcacgctgagaccaggagtgccaagaccccgagccgcgtgccgggtcatcgtcgcgcaggccggcggcggctacaaggtggccatccttggcgcggcgggaggggtcgggcagccgctgtccctgctggccaagatgtccccgctcgtctcggcgctgcacctgtacgacatcgccgccgacgtggagggcgtggccgccgacctgagccactgcaacaccccggcgcgggtctccggcttcacgggcgaagacgagctcgcggggtgcctgtcgggcgcggacgtcgtggtggtcgccgccggcgtgccgcggaagcccggcatgacgcgggaggacgaccggttcggcgccaacgcgggcgtggtgcgggagctcgtggcggcggtggcggaccacgcgccgccgggcgcgctggtgcacgtgatcagcgacccggtggactcgacggtgccggtcgccgccgaggtgctgaagcacaagggcgcgtacgacccgcggaggctgttgggcgtgacggcgctggacgtggtccgcgccaacg

SEQ ID NO: 23303 - DNA, 468 bp, Zea mays
  Clone ID: MRT4577_121258C.1
tttttacctggaaactacatttattagagtatcatactctgattctcaacggtagacttcactagttttaaaatcttatcaattgtaacggtagcaattcataaactgccatacattgaaacatccaagaatcaattgaatggagcaatacgtgtcttccatactttgggcttgaaaatatgagaatgatgatgctttacagctttgaaatagcatatgtaggcagattattaaaccttttaggaagttccaaatctttccatcctttatcatcaagtttagagaagtaacgattaacatcgctatcactaagaagctccaatttggaaggttcccactttgggtttctgtctttatctatcagtatagccctacaaccctcgaagaaatccttgctgtagtgtccttttagaatatgacaaacaactctataattagaaacaaggcattgtccaacaccttggagcc

SEQ ID NO: 23304 - DNA, 270 bp, Zea mays
  Clone ID: MRT4577_121259C.1
atcgttcaacggcggagttaattcggcgcgcgtcgcggcgcgggctcgtcggtgtccgtcgctgccgtcaggctaatggcgccttttgggtttaacgagcgacgccgacgggcgccgtccgccgcgcgacgtggccggtgtgctttggtgcggggctccgggcgatccgccgtccgcgtgtggccatgatccgctcagggaacgcttggcctatcgacggtaggcgatcggagcgcacgggcgccggcgcgcgtcgttctccgttcatgc

SEQ ID NO: 23305 - DNA, 259 bp, Zea mays
  Clone ID: MRT4577_12125C.1
tttttattttattttttaactaacaatgtctatttattaatgggcgaatttcatattgaaactaatattcttttccattctcccctttttacatattgaaattaacaaataaggtttaaatggcaaatcaaataaattttatggatcaattaacatgtttatacccaaattaaattactttaatatatatattatcaatatttcaaccatatacatgcattgtcatcctactttctattccttcgaaccttctttattt

SEQ ID NO: 23306 - DNA, 554 bp, Zea mays
  Clone ID: MRT4577_121260C.1
tactcgaccctattcgttggatatagccgcagtgacaataatgacacgtttgatgtgcaaaaaaaaaaaaaaaaaaaaaaaaaaaaaaaaaaaaaaaaaaaaaaaaaaaaaaaaaaaaaaaaaaaaaaaaaaaaaaaaaaaaaaaaaaaaaaaaaaaaaaaaaaaaaaaaaaaaaaaaaaaaaaaaaaaaaaaggctttttcttggccgggggggcgctttaaaaaggggaaatttttgaaaatttcaataaaattgggggccgtttaaaattttttttaaagggccaaattccccttataggggggggtttaaaaattaatgggccgggttttaaaaacgtgggaatgggaaaaaccttgggtttcccaaattaaatcgctttgaaaaaaatcccctttttccaagttgggtaaaaaccaaaaaggccccaacaaatcccctttccaaaaatttgccaaccttaataggaaaatgaacccccctttaacgggccaataaagccgggggggtgggggggttcccccaaggggaaccgttaaatttgcaaggccc

SEQ ID NO: 23307 - DNA, 772 bp, Zea mays
  unsure (1)..(772): unsure at all n locations
  Clone ID: MRT4577_121261C.1
ggccgggacaccacacttattagcttcctaatttcattattgtatttcagtcgagttgctaaacaacacgaactcagtcgtttgagttttgaggaggcaagcaagaggacccatcgatggcctccttgaagaaccactgcaagtcctgcaagctcaggggctacaacagcggcatggacgcgtcccctctccccaatgcgacggcgagcctggtgtgctacggcgacgcggagagcaagtaccgggtgctgaaccagacgagcacggccaccgacacgaacggctacttcatcgtgatggtgtacgacgtgggcatgttcgaccgccgcagctgcaggctgtacctccgctcctcgccgacggcgctctgcgccgcgcccttcatcccgtccaaccccaagctggggctcaccctcgtgagggaccgcgcggccacggcgcccaggggcgcgcgcggcatcttccaccccaagaccgcgctcatgtacgcgccggccaccgccggcaagtgtccgccgtactgatgtgatggtccatggatggtgcgtacgtggtcgggactcgggagtcggagcggcggcgggccaatggagggggtgttcactggtgcatgggcggcatgcatggatcgtcgtccgtggggtttggtcaagaggacaatgtcagaggcnaaaaaaaaataaaaaaataaatagggaccagtatgtaantgattggtgtcacgacgtacgtatcgtggtcctcgttttagtcgatactcgatggagtatct

SEQ ID NO: 23308 - DNA, 414 bp, Zea mays
  Clone ID: MRT4577_121262C.1
gggggaacctaacccaaagtttattttcaagaagggcacagggaatgctcatttccgaacaattcaatgtcttgtttcaagccagcctgcttacacattggccctcaacttttgttatagaagacacattactgaacaagcaaacaacccagaacagacttggcttattccattcaccgattggcagggcaaccgtttcaagcagatgggtttattagggcggcgaccttttggacagacgggcttttcattagaccagaccaccaggcctttacatgcgggtgggggtcgagcacaaatgcgtagggcgtatcgaacaggcggagagtgacagacacatggtttaagtcggcgaggctgatggaagtctccaccaaggtacttgcccttggtcaggcggtggcctcgtacacc

SEQ ID NO: 23309 - DNA, 154 bp, Zea mays
  Clone ID: MRT4577_121263C.1
gtcttttattataacacaaaaaggaacgagggggttttatagaacacacgactggacacaaccacggcacattagaaaacagggacgaaggtagaaactaaacaaatgccacataagtctaggcagatgaacactggagaacacacaatgcgct

SEQ ID NO: 23310 - DNA, 819 bp, Zea mays
  Clone ID: MRT4577_121264C.1
cctcgagccggccgggacaattcacatgagtcacattggctagaggtggaaggatagacatttatccgttgcgggtaatgccagacaaaagattgcagtaacttgaaaccgaatctgcctgaccgcgcgcgctctcgatctcaagctgcctagctgtcgagttgctaaacaacacgaactcagtcgtttgagttttgaggaggcaagcaagaggacccatcgatggcctccttgaagaaccactgtgccgtggtggcagcagttgtagtggcgatctgcttcgtcgtcctcgccgccgccctcccttcgcatgcgtcgacggcggtggacgagccggcgaagtataagcccagcagggcgccagcgccgtcccctgcatctgcatcatcatcctacgtcccgccgccggtccagcccgtgatcgtcgtccagggcgtcatctactgcaagtcctgcaagctcaggggctacaacagcggcatggacgcgtcccctctccccaatgtgacggcgagcctggtgtgctacggcgacgcggagagcaagtaccgggtgctgaaccagacgagcacggccaccgacacgaacggctacttcatcgtgatgggtgtacgaacgtgggcatgttcgaccgccgcagctgcaggctgtacctcgttccccttcgccggacggcgctctgcgccgcgccccttcatcccgtcaaaccccaagctggggctcaccctcgtgaggggaccgcggcggcacggcgccccaaggggcggcgcgcggcatcttccaccccaagaccgcgctcatgtacgcgcccggcaccgc

SEQ ID NO: 23311 - DNA, 1382 bp, Zea mays
  Clone ID: MRT4577_121265C.1
ttcttagcttccgaatcaattattgtatttcagtcgagttgctaaacaacacgaactcctcagtcgtttgagttttgaggaggcaagcaagaggacccatcgatggcctccttgaagaaccactgtgccgtggtggcagttgtagtggcgatctgcttcgtcgtcctcgccgccgccctcccttcgcatgcgtcgacggcggtggacgagccggcgaagtataagcccagcagggcgccagcgccgtcccctgcatctgcatcatcctacgtcccgccgccggtccagcccgtgatcgtcgtccagggcgtcatctactgcaagtcctgcaagctcaggggctacaacagcggcatggacgcgtcccctctccccagtcagtctctcgaaaaattaatccacagaccactcatcgttttgcaggcccagctgtttctctactcacccagttgacgccagaactgaagctaatatatagctagcgttgtgaacgaataaaacatgcgtgcatgcagatgcgacggcgagcctggtgtgctacggcgacgcggagagcaagtaccgggtgctgaaccagacgagcacggccaccgacacgaacggctacttcatcgtgatggtgtacgacgtgggcatgttcgaccgccgcagctgcaggctgtacctccgctcctcgccgacggcgctctgcgccgcgcccttcatcccgtccaaccccaagctggggctcaccctcgtgagggaccgcgcggccacggcgcccaggggcgcgcgcggcatcttccaccccaagactgcgctcatgtacgcgccgggcaccggcggcaagtgcccgccgtactgatgtgatggtgcgtacgtggtctggactcgggagtcggagcggcgccatgagggggtgttcactggtggtgcatgggcggcatgcatggatcgtcgtcgtgggtttggactttggtcaagaggacaatgtcagaggcaaaaaaataaaaataaaaaaggagaagtatgtggtgattgttgtcacgacgtccgtattgtgtcctcgttttagtcgatactcgatggagtatctgttgactgttgctgttcgttgagtctgtgtaaccgtttcttcgtcaatcggtcaatcctgcctttggacaaaaaaaaaaaaaaaaaaaaaaaaaaaaaaaaaaaaaaaaaaaaaaaaaaaaaaaaaaaaaaaaaaaaaaaaaaaaaaaaaaaaaaaaaaaaaaaaaaaaaaaaaaaaaaataatgaaagactaacaaaaacttggggccccccaaatctgttgctgctgggcccccgaaataattatctgcccgttccttgaagggttcccacttttctttttagggggtgtttttaaacttggggg

SEQ ID NO: 23312 - DNA, 271 bp, Zea mays
  Clone ID: MRT4577_121266C.1
ccttcccttataaaattttttttacaacctctttttgatatcttcttagagccattctaggggcgggggtgttccagatttgtttatcctccatggcctctcgtcacacacttaagtcgaagcccaagggcaaggtcgggaagaatgccaccgtcgactacgaggactccaccgttttcgcgaccacggtgctgcttatgaatgaagtgaccacatggactatgaataaagctaatgtgggggctcactaccactttattccccttgtcat

SEQ ID NO: 23313 - DNA, 361 bp, Zea mays
  Clone ID: MRT4577_121267C.1
cccacgcgttcgaaaaaaaaaaaaaaaaaaaaaaaaaaggacaaacaaataaagagaaacggagaaaaagaacgcgagcatacaaaaattaagcactctatctatacattgacactcataaaaaaaatacatgtacgggggggttcgttttagggactcaaaatttccttggccttccctggatcaattggctttttgtacacccccctctaaatcaattgtagtgccgtctagtgcacaccctcccgtcgggaaaaccctcagtttcccccacttaattgcgcatggggcctaccctcttttggggggtttgctgcaactgtggatgctgccccccgggctgattcctacacctttgcct

SEQ ID NO: 23314 - DNA, 130 bp, Zea mays
  Clone ID: MRT4577_121268C.1
cgggcttctaaagcgtggatggattgttggagctcctggctgccccgcgactagatgatatctatttgcatctgcaaatattgaatgtaaaaccttaattttactattaacttcttagactacatttgtt

SEQ ID NO: 23315 - DNA, 407 bp, Zea mays
  Clone ID: MRT4577_121269C.1
ctctccagtgcgaccgagtgtgctcaagctctgatcgattctccggcccattcgacggaggaaactgacctgcgcctactcgctctcgctctctaccctattcccggcgctgataggggaagacagaatggcacgtacacgccataaagcaggacgcacagacacgtgcacgaagggcatcacggacgggtgaggtgactaagctggcgcacggaacgacaacgatggcgaggagcggagctggataacagcacggagggcgaaaacggaccgcagacgcagcggagacaaactcgacagggaccacttgcggcggcacggatagggctactggcacgccatacgcctgcagaccaggctgcgaggctgcggaaggaacaggcatatacgtgggcccaaccacctcc

SEQ ID NO: 23316 - DNA, 190 bp, Zea mays
  Clone ID: MRT4577_12126C.1
aatcctacaccaacaccttccagattatacgcaaggcattctacctcaccaccaacgacacacacaagcgccagttacttcttttgacggacactgacatgccctactgatacctacatctccaccacctacgaaaacacatacctaaccacaatttcataatttacgaatacatctggagccatcacga

SEQ ID NO: 23317 - DNA, 382 bp, Zea mays
  Clone ID: MRT4577_121270C.1
attattgtcagacacacgatgtctcgtgaatgtgcacgttatattcacagtatggaggcgtggacgatctaagaaaataagccttgatgtgtaatagtctaatagtaatcagcagtcgagaagcactatgcttctccagatactaatatgcgacctggtctatatctaaaccacatgtggtatgagtacatatgagctgtcaggccatgtgctatgagaacagctgaatgtgtacacattctgaagcacacataactccatgactgactgctcattcttattcacttcccatgtgaattgtggaacccttgcaaataaattgagaacaatacaccgctgggagagatagatctaccatcaggatactactagacattcaagg

SEQ ID NO: 23318 - DNA, 405 bp, Zea mays
  Clone ID: MRT4577_121271C.1
tcgtttttctttttcttttttaactcaagaccgatggctcccaagggcgagtataatcccggggcgaataagccggcggaggatgagcccgctgtggataatacgactgttgggaagaagtccaaggcggagaagcgggtccccgtgggcaagtccgtcggcaaggagggcggttagggcaatcgttgcatgaataagggcatgaagagcgtggagacgtacaatatctacatttttaaggtgctgaagcaggtgcacccggacatctgcatttcctccaaggtcatttccatcatgaactccttcatcaacgacatcttctagaagctggccggcgaggccttcaagctttgctctctacaacaagaaatgccaccattacgttccgtgagattcatactttcc

SEQ ID NO: 23319 - DNA, 394 bp, Zea mays
  Clone ID: MRT4577_121272C.1
aataaaacacctttactacagctaccatcccaaatttttcagcctattttcctcatagaaggtgctcttgtcagattcatcaacggggtctacacagtggatatgccttaacggcacacactatatgatctgattcaaactgacatacctcaaacgacatgcttcaggttgaagttatggtatccttaaaggagggagctgtaccttggtaaagaccatgcctgtactatgtgccattgatcaaaacaatagctggttcacattcagcgactttcaggaacctgcaactgcccgatcctgtctatcgatccatgcaaaacaacttacaatggtcaatacttatagatcaatgctgcacactgatattatggggggagctatttcacactcaaca

SEQ ID NO: 23320 - DNA, 301 bp, Zea mays
  Clone ID: MRT4577_121273C.1
tgacgctccgcccacgcgtccgctgacttttattaaaggatgtttgtttatttgggtattctttgtcatgaccataaattgtggtgtggttatagaaacattttctttaaagcaacacatttgtactaactttgtgttttcagtaaatgttctcaacaactgatccagttaccactttgcagatggatgaatcagttaggacaaatgtactgattgagagaacactcttttataatcacaccacaacctatgatcatcccaaagaagacctaagtaaacacacatgcttcaataaaagtca

SEQ ID NO: 23321 - DNA, 300 bp, Zea mays
  Clone ID: MRT4577_121274C.1
gtacgtaagctcggaattcggctcgagcaacgtttcataaacgttttttcggggatcgtcacatactccacggtaacaacataggcaaccgatgatgcaggcgatgttgctgagctagatgtgtccaaggggacatctctactgatcccccccaccaccgagcatgggactaacctggttggtatagatggtagctggttccgtgctttcaacggggactgccaatcatggggcccagtattaggcaagctacttctctgaatcttgttgaacctccacctctacccttaggtgaaaggt

SEQ ID NO: 23322 - DNA, 182 bp, Zea mays
  Clone ID: MRT4577_121275C.1
catgcgaatggtgacggcgacttctgccccttgaggacgcaccacaacagccagtcactggcccagcaggcgtgctactacggggccatcaagggcaaggacctgcacgcggtgagcccggggcggaagctgttaggggggcaaaggctcgcccgcgaccgggccaccgttgacgaggcctt

SEQ ID NO: 23323 - DNA, 272 bp, Zea mays
  Clone ID: MRT4577_121276C.1
tttttctttgaacattgatacaggctacagaagcggtttcataggatcttgggagcagggggattttttgaaggaaatgaatctcgtggatttttcttccttggaatgaagtcgtaggacctcttcaaatgcgagcatatatatcttatttttgaggaaacatgaacgactgtatgcaaatgattttcttgaagcattggtgtcattccatttctataagatttgaagtgtttctgtacaattacattgcttttcatgaccccatttggttt

SEQ ID NO: 23324 - DNA, 802 bp, Zea mays
  Clone ID: MRT4577_121277C.1
agtaaagcgcgtccactcttctggtatctttttttttttgttttcgacgaggggactacatttattcattattatgtacatgaaagaggctcaaggacgcctccactccattacatttgcaccgacaagggacaaggcaaaaccgtcgctagctacaagcgaagttcacaacagtgacagggatgggatcacacacgacacgacgagcagagttgcaaagcagagtagtacgacggcgtctatttgcatctacgtgtcatcagtagtgcagcatcacacgattcacgggagcactggtccgattttggcgatgatcagctcggatgagcctcctcaccattcttcgtgtcgcctctggcggcggcggcggccctcttggccgcctcggccttggccttgtcctccttcctcctcagtttctccagcttctcccgctccatcttctgtatgtagacgttctcggcggcgcgctcctcctcgctgagcaccctgccggaggccttgtcgctgaagtagcgcgacacgccctccatcctcctcgccacggccgcccacgcaggctggtgggcagtaacgctcgccgccacggtccttcttgtagccatcctcggtccggtcgcttccgcacccacgctgttctcacttcttgcccggcaagcaagcaccaagcagggttcgcttcctcaccaggaacacacacgacacgaccgcgtcgacacgttgccggtgacactagtagcggatcttttaaacctgatccgttccctggccggcctcgagggtcccaatcgcccataggagt

SEQ ID NO: 23325 - DNA, 629 bp, Zea mays
  Clone ID: MRT4577_121278C.1
gtcgacgcggtcgtgtgtgttcctggtgcggaagcgaaccctgcctgcttacttgccgggcaagaagtgagaacagcgtggggtgcggaagcgaccggatcgaggatggctacaagaaggaccgtggcggcgagcgttactgcccaccagcctgcgtgggcggccgtggcgaggaggatggagggcgtgtcgcgctacttcagcgacaaggcctccggcaccggcaggctgctcagcgaggaggagcgcgccgccgagaacgtctgcatacagaagatggagcgggagaagctggagaaactgaggaggaaggaggacaaggccaaggccgaggcggccaagagggccgccgccgccgccagaggcgacacgaagaatggtgaggaggctcatccgagctgatcatcgccaaaatcggaccggtgctcccttgaatcgtgtgatgctgtactactgatgacacgtagatgcaaatagacgccgtcgtactactctgcatggagatggaacgtttgctctcttttgcaactctgctcgtcgtgtcgtgtgtaaatggagtggaagcgtccttgagactctttcatgtacataggttgtcaataataatgaataaatgtagtccccttgcg

SEQ ID NO: 23326 - DNA, 861 bp, Zea mays
  Clone ID: MRT4577_121279C.1
gaaccgatccggtttaaaagatccgctactagtgtcaccggcaacgtgtcgacgcggtcgtgtgtgttcctggtgaggaagcgaaccctgcctgcttacttgccgggcaagaagtgagaacagcgtggggtgcggaagcgaccggaccggggatggctacaagaaggaccgtggcggcgagcgttactgcccagcggcctgcgtgggcggccgtggcgaggaggatggagggcgtgtcgcgctacttcagcgacaaggcctccggcaggctgctcagcgaggaggagcgcgccgccgagaacgtctacatacagaagatggagcgggagaagctggagaaactgaggaggaaggaggacaaggccaaggccgaggcggccaagagggccgccgccgccgccagaggcgacacgaagaatggtgaggaggctcatccgagctgattgatcatcgcaaaatcggaccggtgctcccgtgaatcgtgtgatgctgtactactgatgacacgtagatgcaaatataagccgtcgtactaggtactactctgcatggagaggaacgtttgctctcttttgcaactctgctcgtcgtgtcgtgtgtaatcccatccctgtcatggttgtgaacttcgcttgtagctagcgacggttttgccttgccttgtcccttgtcggtgcaactggagtggagtggaggcgtccttgagcctctttcatgtacatataggttgtcaataataataatgaataaatgtagtccccttgtcgaaaacaataaaaaaaggtcccagaagagtggatatctcgctttggcatgggtcccgacttttttaagtccaaaaaaaaaaaaaaaaaagcggcc

SEQ ID NO: 23327 - DNA, 183 bp, Zea mays
  Clone ID: MRT4577_12127C.1
aaagaaaccaccggagcctaaggtgatatgcattcaaagccgcgtgcccctgcataggagggcgtggaggaagatggcagtgcatgctagggttagcactggtagactctcttctgcactttcattgtaagctactgtccctactagttttggatcttctgctatcttttcgtgaagtgtttc

SEQ ID NO: 23328 - DNA, 562 bp, Zea mays
  unsure (1)..(562): unsure at all n locations
  Clone ID: MRT4577_121280C.1
ccggtcctcttaaaccaaaatacgccgccaagccaacggccccgagggccggccattccaagcggccaacggttaagngcactaagccaagacagccgccgccactgggggggcccctcctgggaacccaagcttgttgggggaccgaaacaaccgggtggggccccgggggccccgccggccccgggacattcccggcccttcggccaaagcttcccgcaagccaacgccgttcctattcttccccccccttcgtccggcccgccgccccgtcgcccgacccccgggaagggcgccgggcgccccgccccgcccgtgaacgcggaacattcacccatgcctgcggcccgcggncgcttgtcccgtcgccaagtcgccgcccaggcgagtccaactccccccccctgtncgcccgtcgcccgcaagcggcgcttccggacttcgccctttcgggcgcaagcgacgaaccccagggggagaaggcttgnaaaaaagctgcgccggaaaggcaggatggccgacggcgcccgacgcccccgcacgccgagagcccactgtgtac

SEQ ID NO: 23329 - DNA, 440 bp, Zea mays
  unsure (1)..(440): unsure at all n locations
  Clone ID: MRT4577_121281C.1
ccagtgtgctggcatccgcccttaagcaggggnaacaacgcagaggactncgnnnnnnccangctttttnnnnnncnncncgngcgcnangannganacccaagccaannaagccaccagcgcgggcccnggagaacggnacccgggcagcgcggcccgcccacaagcgnagacaggacgaagacgaaacgaaccaacgaaaacaacggggaaggcannngagaaaaaaagcaccgggcacccgaacncgaaggaggaagccgaagccagnccagcagcncgaaccccgacnancaacgaaaaagagggcagcccccccgaaacagccgcgccccgagaagcggggaggcaganangacaagcgcgggaaacgcaccgacaggcaaggcaaggaagaagccccaggccagccaacaaacggggagaccccgcggaagaaa

SEQ ID NO: 23330 - DNA, 302 bp, Zea mays
  Clone ID: MRT4577_121282C.1
tcccactcgtccgtccactctttcgcacactcgttctctcgtccggtcgaaatgaagctgagaggctttcctcctcggcgggtagatcttcctgacttacccaactacacagatcctaatgtctctaacacccttacgtccatctaggccgtcctctagcatatgctccagttgctatcttgcattctattttacaggcttactgttattaactctcacacttgttcttctttcctatgtctcttcaactattacttatgacaaacctattaaatcatctgttactctcgtactataatcaa

SEQ ID NO: 23331 - DNA, 877 bp, Zea mays
  unsure (1)..(877): unsure at all n locations
  Clone ID: MRT4577_121284C.1
ggtccccgtctcttctcagatctcacttgtcccgtgccgcgcgccctcccgcttccgatccccgcgtgagcgcaggccaaaaacctaacccctggtctcaccatcgcttcctccgcctgaggaggagcaggccggcggaggaggagatggtcttcatggcggcgctggaggccgatctgcgcgctctctccgctgaggcacgccgccgccaccccgctgtcaaagacgccgccgagcacgctatactcaagtgacatgtcaacatgtattgataacacaccaagctacgccctgcacacaatccttgaggcctctaccgtcagctgcccggccacaaggttgccgtggccacaccaacttgggaggggcaggccgggcaggcagcagaccgcaggtagcagaccacaggcagcaggccggacgcaggctcagcggcaagccacaggtagcagacgcccgcagccataccagagggaccgagggagaacatccgctcacagggtatgccgtggcatatacggcataccatgtagctccgccactgagtcgggggttatattgcttttgctcagatgcttggaaccgattttgtgaatttggttgtaccgattttgtgagttttggactggagatctcaagtccatatcaaaagcacattgttttcatggtttttttggagaagcgtaagcaccatatgcccaaagaaacacaaaccatgtggagctgaaggaacttcactggtttcttcaaagtgaagggtctatntactgctccntnccgttcactgtaagtcattttggcttttctatgtacatagctnttgctatgcacctagatactatgtgtctatctaaaaaaagccaaaatgactagattt

SEQ ID NO: 23332 - DNA, 323 bp, Zea mays
  Clone ID: MRT4577_121285C.1
gccttaactgctgcatggcctgctatggaggaaggtattgaaccaggtggttgagatcttcttctttatgccaccaacgtatctcgacaagaacagcacagcaaactaggactaaacgatgggtttaaaaattataaagaatacaaggcaggatccctacatgaccataagtgaatatgctgacattgatggggcaatactcatagcgaaacggatagagcaagaagacctgagttggggctataatgcaacaaaaggagagtacatatacatgatctatgccggcatcatgtatcacttgaaggtgatccgcaccgtacttc

SEQ ID NO: 23333 - DNA, 754 bp, Zea mays
  Clone ID: MRT4577_121286C.1
cctcgaggccggccgggccggggagtcatttctactttgtgtgtgtgcgatcgatcgcgtacgtgccgtgaagaacgaagaggatcgtcggagcggggaggaagaagaagaagaacaattgattggcaagatgcaccgcagagggagcagccgctgcagttccaccagcaccagcaccagttgggacggcgacatgaagctgctaacaagaaagaagaaggagaagcccaacacgggagaggagggatcgggaagccgacggaaggagagggagaacagggttcagctgcaggctgaggctgaggctgaggaggaagaagaagacgctgcggcgccacgacgacggctgcggcggtcggtgtccatggggagccggctggcgagcgcggcgagggagcagagggctcgcctctacatcatgcgccgctgcgtctccatgctcgtgcgctggaagcacgactagctagctaggaccagccgatccacacaagccatcctcctctcttcatctcatctctccagtcttcaccatatatgcgtgcttcctttttatttatttatttatgtatggtgtgtatatcacatcactcgggccggccttgcggttgaattgcatgcatccttcctgtgcccaatgcagctcacatcaccataccgatgaagttgatcccaaaaccaaattgtgtaccgcacggcacattacatgcagcagttttacggcagaaaaaaaaaaaaaaaaaaggcccctagggcc

SEQ ID NO: 23334 - DNA, 228 bp, Zea mays
  unsure (1)..(228): unsure at all n locations
  Clone ID: MRT4577_121287C.1
gagtagtaagtcggaaccggtcgagctcctcgccccgcctccactaccccactcccaggcgacgcacaggtacgtcgccggcggcgatgacgacgcgcttcaataagaaccgcaagaagcgcggccacgtgtccgccgggcacggtcgcatcggcaagcacaggaagcatcgctgaggtcgcggtaacgccggtngcatgcagcaatagcgcatcctcttcgacaagt

SEQ ID NO: 23335 - DNA, 355 bp, Zea mays
  unsure (1)..(355): unsure at all n locations
  Clone ID: MRT4577_121288C.1
ttttttttttttnnnnnnnnnnnnnnnngcgatttgattaccgaagttcggttacaaagaaccccgtctctgttgaggtgtccctaaggacgggtctctttaataatctaaatggttccacgattaagcttgagccttagatcttcttatgtgaaagacaaagtctatacaaaacactccacattttggagcctcttaccagcctttacaataatcgaacaccaacacaagtgcacaaaactgcaacaacacaaacactcacgcaaggtactatcaaaatccactctagaatacacaatctctctctaatggcacatgggaggctattggatctctatgaggtgttgctctagct

SEQ ID NO: 23336 - DNA, 390 bp, Zea mays
  Clone ID: MRT4577_121289C.1
gttccttgcttgcctcgccagacagcctgtatcctcctccccctcccccgtatccgtcgagtagcaccttacgctgccgccgtcgtcatccgggcgaccaccctgccaaccaccatttcgctccgcccgcctcgcttttccctccccccaaccaaccactcccctcgtcccacttcttgcgtcaccgacccaatccgatcctatcccacccgcacggccgcacggcaacccgccgccgccgcccgagatcccgccccagtgttccgtcccgtgtgatgcgcggatccggctgagggcgagccatgccgagcgtcggcgtgaagatctacagcgtcttctttcaagctcttcctccgccaccgcctccagtcgctggccgccgccgcccgc

SEQ ID NO: 23337 - DNA, 1092 bp, Zea mays
  Clone ID: MRT4577_12128C.1
caccgttgttcatgagcgtctctgaggatgaaaaaagtttggtcaatctggaatatcatcctcctgatggccacacacacctacagttatgcaatggaaggaagatattctctgttagatgctctcctgagagcttcattgttcaagttggagaggcagcagacatcttgtcccaagggaaattgaaatctacacttcatgctgtgagtagaccttcgagttccacagacatcagccgtgagacttttgttgtcttcctacagccctcgtgggacaaacttttagcttatcctggttactctttagatgctgaaggtgaacccattcttagcaagcagacttcaatcatcagtgatggatcagcagggccttgtaatgaagatgcatttatgcaaggaattctgaaaaaaattccccctctgtcgtcaaggctaaaagaagggatgacatttgcagaattttttcgtcagacaacaaaacagtattatggtggcaatggcatccaacaaaacaattgagcactagtaatacaatggcagatgcatatagttgtagcacacattggactgatgtattgacttgcatttcagaaccaatatgaaaacacaaaatgaaagcgtcctggtaaacaatgcatgctgctcatcctactcgatgactaagttttgcaattgttcacataacaattggcatttttaactgatattgacaacatatccaaggactggtgtccagaatttctgctaggccttctgtttcgcagtaggtgaattggttacataagcagcctttattcatgtcttgggatgctggtttgatctttttagtgtgaatgttgagggttgcttggaaattctttcagggagaagagcactaagaaaattaaaattgggccattcctatagaatatgcatgatgcttagtaattgaagaaatgtcaatgaaaattaatccggccattcatattgaactggaccatatcttgtttaatgctttcacgcacttggccaaatgaagaaatgtcaatgaaatgaaggcaatcttttctgttattgctttagttgaggccagaagttaataatgtctgctcct

SEQ ID NO: 23338 - DNA, 459 bp, Zea mays
  Clone ID: MRT4577_121290C.1
cccaacatgaagctgaccatcacccccaggtcaccaaagtcgcgcaaattccccattactcttgacctgaatggcacccccgctgaggtcaaggttgaggctgtgcaggccgccatcgcgaagcagttccctgagttctaccctgaccgccagcgtttgaccgtcgagaagactgctctggagaccggcaagactctggctgaatatggactcaaggatggcgactcggttgccttcaaggaccttggccctcagattagctggcgcacagtcttcttgatcgaatatggaggcccactgttgatccaccccctgatttactacctcccgtccttgttctacggcaaggactttacacacagctggatgcaaactgtcgcctactggatggtcatgctccatttcttgaagcgtgaatacgaaaccgtgtttgtacaccgattttcacatggaacgatg

SEQ ID NO: 23339 - DNA, 350 bp, Zea mays
  Clone ID: MRT4577_121291C.1
atagtagatgctgtcagtgtctttacctaggaccaagttgctacaaactaatcctttgaactaggaattctgagatgtgtagttcaattcaagcaatgtactgcttttctgttcatacatatatgcacgtttattggcgcgaaagtggccaaattcttcattggccggtttttccaccgatgagacaaaacaaaacgggactgtggaatctttgcctccaatgaaggggaagatacctgccatcgctttgtttagtcccagcttgtgctagtgccacactcaactagtgcatgtcttctgtgcttgaactcttctgccaagcaccgttttaatagattaattagtgtttt

SEQ ID NO: 23340 - DNA, 395 bp, Zea mays
  unsure (1)..(395): unsure at all n locations
  Clone ID: MRT4577_121292C.1
cctcgagccggcgggatagcgatactgatcgagacagcgtcattctactatagcatgccttcacatatgcgcccctatccgggnatcagtgtcctgagtcactcttccacggagtgccaaaggacctccaaccatgcctcaaagtttgtattggcagggccgcggttctgccagcgcataatctatctcccctcgatatatgaagagacactacttgactagagcatgagaaagtgcaggaccacctcgatggatatggccaacgacaggatggacgcatgttgactgcctggcgcagcggctgtaactaagatagtcaaccttcgaggagtaaactgatagagactatgtagcaaccaaagttatgaagatgactgattaacctgtctctggag

SEQ ID NO: 23341 - DNA, 824 bp, Zea mays
  Clone ID: MRT4577_121293C.1
cattgggtacctcgaggccggccgggacaaaccacagaaaccctagctcggtgtctcggtctcgatagctccctgcgaatctgcgatccacggcacggcggtcggtggtcagcgctcggcaccaggcaagacagcaagccagcacggcggtcggcggtacaaggcaggcaaggcacggcggtcggcggtacaaggcagcaagccagcaacagcaagccaagcgcgagccgcggatagcaccgtgatccgtgaccggccacggccagcagcaagacagcacgcacggtgaccggcaaggcaaggcggcacaacacaaggcagcaagccaacaagccagatttagctggtggtactaccgtggccagtggcagccagcgcggtgaacggggtctggccagcagccaagcgcggagctgcgaacagcgccctcgccggcaagccaccgtgccagaaaggctaccagcctaccaggttgcaggtgctcgagtggaggcttggagctggtgagctgcagaccttgtgaagttgtgaagtagtgcagctgcagaccttggaggttggagacttggaggctggagccttgctgccttggagctggcgagctgcagagtgcagaccttgtgatgtagtgcagctgttgttgttgtttgtgcttttgtttatgactttggtgataaagtactaagttgtgaactgtgaagttggaccgcaatttatgtaactctagtactttgtctctgttttcttgtgtgcgttgtggacttgtggaagttatgtaactctagtattttgcgattccaccaaaaaaaaaaaaaaaagcggcc

SEQ ID NO: 23342 - DNA, 1553 bp, Zea mays
  unsure (1)..(1553): unsure at all n locations
  Clone ID: MRT4577_121294C.1
acacctacactnanttgttgactatgcttaaggaaggcttgtggaagatacactggaatatttctataaaatggcagatgagaaaccacatgggccaaagttcaatattggtttctttaaccgcatgtttgaagggcttacagaagctggccgtattgatgacgccttgaaggtgtacgggaggatgcctgacaaggaaatcaaaccaaacatgaccacttttgaaatccttgtcaaagccttgtgcaaagaagaggacttggatcaagcaaggggcctagtgatggacatggcaagaggtggtattgtgcctcctcaagggttccgtgagtctgttgttaactttttcaaggaggctggtcgacaggaagaaattgagaaagcttttgaagaaaaacctatgccaacacctcagcctagaacagagtatcagcctaggactgagtatcactctcgcaatgcagacggtgctgctcaaataaaacaacctggctttagctctgctccagcggtgggacctgaatttcttcactctcagccacaacaatccacacttagtaacactccaaatcagcagcctgagtttggctcatctcgatcatggaattcaggtttcggtgctcctcaagcgcagcctggatatggtgcacctcagcctgtacagacaccacagccacagtttggtgcttctcggggtgaaccaggatatagcaacataggaaatcagcatgttcagtttcgctctccccagagagaaccaaaatttagcaaccatccaccacaagttgggtatggtgcccaattgcctcagtcaggatatcgctttgagctccaacaagaacaggttggatttggaaatcaagtagcacaacctgcacatgtggcttcaagacaaccctcatatgacacccgctggagctcaagagattatggatcaacccaagggcaactgggatatggtggtcctcaagcgcagtcatatgaatctcagttaccacatcaccagggaagttttggtatgccacatgtccaaaataacaatggcttctatcgatacaaccctggatatggcccatctaatggttcgcagggatttgatgctccccatggtgattctaaaactgctgagagtaccactcctgaagaccggcaacaagcagcatttctgaaagcatgagggctccaaacatattttggctccaaatcaaaaggtttctcagccacaaaatgaattaggtcttcagatattaagatatcaatgaataattttgaatcagacttcactattgttccgatgggtctcactgctgtaccttttaactgaaatcttctgctgtttctcagacatgatatggcagcatgaggagttgttttatcagttagcatatatgcatgtggttcaaaaattgaaatatgtccttttgttctcaggatgaacacttttactgattgtttaagttggaactattagtcgccataaaaaagcatggtgttttggaagtatatttatctatttgatattggcaatgtaatttttatttgcaggtattgat

SEQ ID NO: 23343 - DNA, 835 bp, Zea mays
  Clone ID: MRT4577_121295C.1
aggccggccgggctccctggtaattttctggaggatatgagtcaggcacatggcccagacatgaccttggggcaagcatggatagccagtgagccagccttcataatcttcttggttttcgacgctctggctctcttcatctcgctcgccgtcgtcgtggtccagacgtctctgatcgtcgtcgaacagaaggccaagaagaagatggtcttcgtgataaacaagctgatgtggctcgcgtgcctctgcatctcggcggccttcatagcgctgacctacgtcgtcgtgggccgagacgacgagtggctggcctggtgtacgatggcgatcggcaccgtcatcatggtggccactctgggttcaatgtgctactgcattgtcgctcacaggatggaggagaagagcatgaggaggatcaggaggacctccacgagccagtcgtggtccatatcgatcgactccgaaacggagctgatgaacagcgagtacaagaagatgtacgccatttaggataggcaacggccatgcttgccatctgagtcctgtatatactggtacccacttccacttgccttgcccgtgaccagtccatggcattggattgactgagctatattttagtcctggacatggcgcctgtatgtaactgcagacagtctgcagcctccgcccacgaacgtagatagggtgtagccacctttttgttggcaaaatatgaacatttgccaagcacgatgcccctaccttatgctgtattttggtgggtgcggcaatgaaaaccatgggattgtatctgtatagtagaatagtatggaataagttgaccttgtgtcaa

SEQ ID NO: 23344 - DNA, 232 bp, Zea mays
  Clone ID: MRT4577_121296C.1
cttcttttttataaaaaaaccatagcaaagcttttccaccttgactaaaaccataacagaggccaaagccacagttccacttacacacacgaaataagcggcattactaccatgagatgcgggacatcacagcgcttgctggagaagcagacaacaacgacgcgcactaccagggggggacgacccgggggccatggtgacggacttgggacccgcctagacggcatgctac

SEQ ID NO: 23345 - DNA, 579 bp, Zea mays
  Clone ID: MRT4577_121298C.1
ccggccgtcatgatggtaccattccctaactccagacaactctggatgtgaatgtgacattatgtgcgcctacatgaggacaaagttgcgatgtgtgagatgctgctgatctttccttgaagccgatggaggctgacctcccatcgacctcctctcccactccatagcgttcaactatgcaaggcagtgcctggaggatcaagagacatgggatggcaagtcgacggtcgtgacccacaaccacaacgctgctgtatggtcaaacctggaccagatcgctgccacctaccgtatcatggggacatgacaggacatcctgatcttcctgcatgggctgaagtgagggacctgcttccagatcgcgatcgacaacgatatgttctggtcgacaccgccctttcaggtgcacatcgcgaacatgaactatgacgctactctggagtatcacatgtactgaacaaaggcgctagataccttccatggccacaactgctgagagaagacaatctgaggagaacatgcatcctctcactgcatctccgacataatatgagccatcctcttacaccgtctccttcc

SEQ ID NO: 23346 - DNA, 360 bp, Zea mays
  Clone ID: MRT4577_121299C.1
accccccaagtccagatcattgattgcagacatgagaaaccacaccttgtgcatagaaaggactatggtacgatgtggaagattacagtgctgccacgttaatgcaaacaaaagctattactgtataaattgttcatgccttatgggataactgtgactgtgacaagaaagaactggggccagaaaaacacgattgatgtggaaagagtttcaggacgttgtacttcatagacaacgacagggagctgcacatcaagaccgatgacaagagctggttgatttggacggtagcgtatggagattcatgttggaattgaggagtgcatcactgatacctgtggatgtgttaacaaaatggaa

SEQ ID NO: 23347 - DNA, 188 bp, Zea mays
  Clone ID: MRT4577_12129C.1
tccatcttcctcaactggaaaagctactggtaccaggaccccttgaacccacactgcaaggggcacttctaccgaaactgcatgatctggacgcacgtccatccttattcttcccaaacaggtggagcgtatcccagacctgcatactggcgatgtcccctccgaatacaaccagacaacatgccacc

SEQ ID NO: 23348 - DNA, 194 bp, Zea mays
  Clone ID: MRT4577_1212C.1
tcccacgttttttagcttctctaacatcacgaagaaactgattcacaaagataagatcccattttcttttactgaatgcatccagctcgcagacaaagattttggacaacctttgctatcaattgttcatatctgtgcttcagaacaacagcattgtcaagcagcctagattgttagtacaccatctctccttc

SEQ ID NO: 23349 - DNA, 301 bp, Zea mays
  Clone ID: MRT4577_121300C.1
ggaaagctgggacgcctgcagtgtacctgaggcacggaggcccctgttcgacccaggcgtccggttctaaatcgcgagcgggcgaccttgttttttgttttgagataacaaaaacatgagcatgccatccttgctgtctggaaagcctatgtattttatataacactttatctatgtgttttaaaaaaaaaagagtttactttatttcactgggggtgggggccggccgaatcttcatgttatcgtcgaccgggtgctaaattaatgacctgttattgcgggccccccacttttccctctg

SEQ ID NO: 23350 - DNA, 306 bp, Zea mays
  Clone ID: MRT4577_121301C.1
tcggtcaccccaactattactgttgccttaggagggtattgttaaaaagcttgtgggcaaatagcgactctacaagtctacgcatcacctcgcattactctgaagccattgatgcctacatttcctagttttgaaaaaatacttgtctcactcatggtgcagccacatggtaactttgggctaagacttgctggagcatatgtaatggctattcctggtctatacagatttgatgatgctaccatcaagaaacaaggggcaagcatgtctttgtggcccaagacgctataagtacctataatggat

SEQ ID NO: 23351 - DNA, 455 bp, Zea mays
  Clone ID: MRT4577_121302C.1
gggggcctcggccccgaatgttcttccttttctctgatgcacttctcatggccaagcctcgacgcccattgcatctgctgcagagtggcacctttgcctgccgggccctctaccccatgggcgagtgtcaactccacagggtctttggccactcaggaggcccttgtggtggactgctcagcctgtcctttccccatgagaagctactgcttatgtccacagaccaggaggagctgtcacactggtaccacagtctgactttggccatcagcagccagaagaactagcagaatcttacaattccagagtccaggatactgtggggataggtcagaatcaggggttcaaaggaatcttactaacaaaacacggactcttcatggtttgagaagaatcattttgtgtttgcctgagaccaagacacaccatgtcccttgaccagctcttaaagaatc

SEQ ID NO: 23352 - DNA, 425 bp, Zea mays
  Clone ID: MRT4577_121303C.1
ccggccgggccgggctcatcgtgcctgccacacataggttccttttcactcctctacctccgcgcgataaagctttccgcatactgagaattgcttccgacggctgacactccacccgaggaacaagaacccgaagaactgcatgtcgactgagatcagcgaggacgagacgcaccccttattcgcgtgctgcggagtcgtactgcgcttcgagtatgtctattcgggtgtgacgcagcagtacgcccaccgcacaagaccattgtcgggagtggatgatattgtcgagatgttcttgaaggtcactgtggatggcatcgaggcggcgcgtggtgttggtgtgctcgttgtatacagtgtcatcatcgacgtgagaactggaccgtacagccagctcttgcccagtgataataccattttgatga

SEQ ID NO: 23353 - DNA, 177 bp, Zea mays
  Clone ID: MRT4577_121304C.1
cccacgcgtccgatttaatctgttacatgatttaacactagatggggatgggaatcacacatgtatctgatgtatatataattcccaattcccatggcaaggaggccctactgataaaatcattaatgaactttcttcaggcataattgtactaagaagtcacaaaaggataacttc

SEQ ID NO: 23354 - DNA, 528 bp, Zea mays
  unsure (1)..(528): unsure at all n locations
  Clone ID: MRT4577_121305C.1
cccccccccccncgaccgaagggccccgncctccgggggacgccggccgcatcgccggaaccctagccttgcgtacgagctcggccttagcggnggngtngttaatcccggggcttcccggacgacgttgcagttgtcattttctgcctgctctacctttcccgaccagtcctgnctccgtgccagctggggcgcttggtgcttgntnctntntgcggttccgcttttgccggtccggcgtagcctgcgtnttccgtgccgnttccttttttgcctgtttcccaccgggccattgttgggtttcccggtcctgcttgnccctgtcgttcctaccacctggtggtcttttttgttgtttttgtgtttgttgtnggtttgcgggtttgtcttgtttaccgttttctgtgttggttgggcnttntgcgtttttgggtggtttttgttttgtttttttgtgtttcctttttggtgttttttttttttggtgtggtggttttttgtgtttgttttttttcttctttttttttt

SEQ ID NO: 23355 - DNA, 845 bp, Zea mays
  Clone ID: MRT4577_121306C.1
actttgtgtatggtgtgtgtgggtgggttgggggggggggggggggggtcatggcatacaggcacagtacccgcaaaggttttgttacagcttacgaccgcattccgtgatggcggattgcgcaacaggactggcacatttttcttcaaagagcatctgaacaaaatcaaggtcccagtgcttgcccttgctggagacgaggatctgatttgtcccccagaagctgtttatgaaactgtgaagctaattcctcagcatttggttacatacaaggtttttggaggacccgaaggccctcactatgcccattatgacttagttggggggagaaaggctgtccatgaagtatacccatgtataataaagttcctgtttcaacatgacgaagtgtcttcatgagtctttgccattcatgtctgtaattacaatgttcaagaccacgtcgaaatacatagtaaaattcccagactggaactaaagtcccataggccatatcattagaagcacaggggagactaatcttgctggttgctggcacctcgccgaccccgtatgaaaccttaagaaccgatgtacgtacgtatgtaattgaatttgaggttgcaaatgtagtttcaactacttttgaagggttcgtgagtggcgtggtcacaatactacagtatactttagtcatgacggctctcagcggcaccggttgtgaacaagaactcgtgtatatgttgcagttccacaaccaaagacaggcgcactgcgcagatctccaccagactagacaactttcatggcgttgtttctgctagtattatatcctaccaattaaataaaacacgagccaagttagg

SEQ ID NO: 23356 - DNA, 352 bp, Zea mays
  Clone ID: MRT4577_121307C.1
cggaccacacccttccgccaaggcttccggggacccttggttgttgtctaactggcaccttagaaggcccattgggggcccaccattggcggccaaatttttttgcctcctaatgctcctgggcttttttgaaggggctgttaccgggccctttttcccgaatggttaacaggctcttatggcttccttttttcccccgtacctttaaccagcggggtcttgggtttgggaaaccccaattcttaaaccttttaggttccaccaggcattcgcagttggctttttacctttataaccctggttcctccaacattaataagccctattccagcagttacttttggtgcttttt

SEQ ID NO: 23357 - DNA, 110 bp, Zea mays
  Clone ID: MRT4577_121308C.1
gcgacgcgcttgcgcacgaagccgcccggccacggaacgctagaagcgcccgtcagttggcttcagttcgaagccgcgcccacttcgctagggttctagcccacacgcaa

SEQ ID NO: 23358 - DNA, 491 bp, Zea mays
  Clone ID: MRT4577_121309C.1
ccggccggaatccagccaaaaaaagccacgacacgtacaggaaagggagataaatcattgtaatatgggtcgtgtttggatggtgctcggcgagatcgtactggcacgagcatcgtggaggcaccgcgcgcgggcctggtgcggcctttccacatcgccaggtagggcgccgccgtccatggcaagacagacagcacgaaggctgtgctacaggtattagcatcgactgccgcgctgtcactggaaaccagacacatcctcataccccagggagacttccttgccactcaactcaacttcacaggtcccttgctggggtgacgagaccatcctggtgtatgccaagctgatgtagacaactgacctaacctagtacaagtgaccatggtaatggcaatcgagagtctatgcgctgtgataaactgttgcatcaccgcttaaggaaaaccttgacgcctatcggccggtcgtgatgtagcatgaactcctgc

SEQ ID NO: 23359 - DNA, 1585 bp, Zea mays
  Clone ID: MRT4577_12130C.1
cgttgctgtggggggaaaatcgggaagccttcggagaaaagaaaagggcaaccgagaccgtgagagaggggaagcggggagccttgtccgatccggtgcagcccgcgcgtcaaactcccgggtaactgtggcatatgatcccaaatcttgatccacttgaagtgttcagtacattctgtagttggtttcaagatgacaagtaagaaaagtaacagatctacagtcacaccacacactgctctgcatatggaatgggacaggatttcttgccctatttgtatggagcaaccccacaatgttgtcttacttatatgcagttcatacaagaatggctgcagatgttacatttgtaacacaagccatcgtcactctaattgccttgatcggttcagaaaaatgaatggtgatagtaagacgttcacggagcccaagactcggaagacatgttgataatgagggatcttatcataccgatgtaaacagtggcccaaatccagatgacatatctagatctgaatttgatttcgctaaccatcaagaatttgagaactcaaccttaactgttgaaggtggtattgtatcgggggaatgccatgatgccatgcaaggctctgctgaagttaagtgtcctctctgtagcacatctgtatctggctggattcctgctggagatgtgagacagtatctagacaataagttgagaacttgctctcatgaatcctgcaaatttactggaacctatgaacaactgcgtgaacatgctaggactgcacacgttcttacaaagcctgctcatgtagatctgtccaggaaaagagcttgggatcgccttgagcgtgagcaggaggtcggtgatgtcattagtgcaatcaggtcccaggtacctggggcaataatagttggtgactatgttattgagactagagatgacatgtccccagacatagactctggcgacgatgaaagtagtgaatggtggtcagaccaagttgaatcaccagatgctagacttgatcccccaagggtttggccacatgaagccctagggtcacctagcatttggtcagatgaaaggcgtaatttggcaaggataccacagaacaacagagtaccacccaggttttcattaggcagtaggcgacccctgcattcaggttggcaggggggtcgtcggtcaagcacacggaatcgactgcaacggggcttctcaaatcaccactctggacaccgtagcaactatcgtggacatcgtcacttgcttctggataggtcctatgttggtacccgagattcaggctccggcaggagcctaaattcgtcagtggtgccaagcaggcggcagcggctgcggtacacgcacagaagccactactgatggaagcaatatcagttctacgtgtagagctttattggttaatccattcatgctatctttgtaaatatatgttaaggttatgtttttatttaatgtatttaatctgtctaaacaatctatcctagatgcaaaaagaactacattatttatcataaatgtcatttgtggtgtctctgcattcctttgatggaaaaaaaaaaaaaaaaaaaa

SEQ ID NO: 23360 - DNA, 356 bp, Zea mays
  Clone ID: MRT4577_121310C.1
agctcggaattcggctcgagctgatctgcgtacacggtttccctcttcctgccagcagtagagtgagagtgatgtaacgagtggttgacaaggcgaaatggggaagggagctcatgggagctatgcgccggcggcggacggcgaggtggaggagaacatggcggagtagctgagttgccaagaacaccctcaagatcatgcccttgaagctcccgcccgccggcccttataaggtccacgggcccatgaaagcaatggggatttgcggcagcaatgtccactacctcaaggagacgcgcatcggccactcaatagggaaggagcccatgcagatcggacacgagtgctccggcctg

SEQ ID NO: 23361 - DNA, 162 bp, Zea mays
  Clone ID: MRT4577_121311C.1
tttattccacctgctcaaactgtcgtgcttaagcttgtgctgcaccacctgacctatggggagggcgtcaagcacctggcccaatgcctgatggctattccttcactgtatgatggctggatagttattattttttgacattatgattgaccactctgggcc

SEQ ID NO: 23362 - DNA, 834 bp, Zea mays
  unsure (1)..(834): unsure at all n locations
  Clone ID: MRT4577_121312C.1
cattgggtacctcgaggccggccggatgatgttctgtggacatggcgtcactaggcaccccagcgcatgttagcagtaacaagaagcccttgcatcgttggagttggaaggcgaagcgtgtgaggtgcgcagtgtcaccccccacatggcgtgaagggcggcgcacggtgtcgttgtctcttgttctctcccacttgcttctcattcctaaccgtgatactgccctagcaagtcctttcgataagtatgttaagagaaaaaagcttgatcctctggaggtttatataccagctgtcatacttacagagtttcagatcaaggacttagaaaaaacattagaggatgaggaaccccaatttgccccctgccggtctctacttcgttctgggcctgcagcatcacttcgtgtaaatattagagcagtggcacagtatgcatctgacagtggcaatggtaaaacggcattcaatgatgttgatgaatgtctgaggtcgctggaagaacttgattccttgcttcttcatgcatcaagaaatgatcctgaagcctcagtcaaatcaatgaaggcaaaaatcaattctgcccttggcgctctggacagcctcttacaaaccgtaccttctgatgtgctgagtaaaggaaaggttatagctgattcatacagggaaccggaagacgaggaaacagggagtttggaccctgatttaagcaactagaatcaatactatggatacctaaacatacttgctcgcttttgagtagccagcatagttaagactacggaaactatgttcccnangcagaaccttaaaacacaaatagcattgtgtatcg

SEQ ID NO: 23363 - DNA, 135 bp, Zea mays
  Clone ID: MRT4577_121313C.1
catatacatatctaccttgcatatatgtgtacacaagtgaatgcatgaattcatcactggtgtacacatatacatatctaccttgcatatattgaggtgaccgaggatacaagatgcaccatggttagttttgtt

SEQ ID NO: 23364 - DNA, 1181 bp, Zea mays
  Clone ID: MRT4577_121314C.1
cagcacgcacacacagacacgtacagagctggtagataggataaaagcagtaatgacttccacgaccaccaccatgtcctctcttgccttggccctcgcgctgctgctcttgagcggtgacatcggcggcgccgcgcggcagctacaggagctcccgaagcctgacctgccgccgttgcccaagcccgaggtgccaccgaggccggacctgccgccgctccccaagcccgaggagcagccgccgttgcccaagccggagctgccggtgccaccgcagccactccccatcccgccgcagccgttgcccaagccagagctgccggtgccaccggagcctctccccgtcccaccgcggcccgagctcccggtcccgccgcagcccatgcccaagcctgagcttcccgtcccaccgcagcccctgccgaagcccgacatgccggtgccacccgagtccctccccaagcccgagctaccggtcccaccgcagcccctgcccaagcctgagcttcccgttccaccagagcccctcccaaagcctgagctgccggtgccaccgcagcccctcctcaagccggagctccccgtgccaccggagcccctcgcaaagcccgagctccccatgccaccgcagcccctccccaagccggagctccccgttccaccagagcccctcccaaagccggagcttccggtgccaccggagcccctccccaagcccgagctccccgttccaccggagcccctcccaaagccggagctgccacccccggtgctgcctggcgagcttccaccgaagccagagttagtcccgctcccgccgaaggctgaaataatgccgccgctgccgaagccatgatcgatgagctacgacgacttcacgggcgcacatatatatatatcgatcgacactgcgctccacgatccaaatatatacgatttgtctactttccattcgatttttttgctgattcatctgcgtgtttggtttggattggacgagggtgtgcatagctaggtagcgcatcttatcagaattgcagcgtggagtgtatattgccatgccatctgattcgtgaccgcgatctgtctatgtactcttgctgagatccatatgtatatacctaataaatggattcgtttgtatatttacttatttgacgacttaagtgattacgctcaat

SEQ ID NO: 23365 - DNA, 492 bp, Zea mays
  unsure (1)..(492): unsure at all n locations
  Clone ID: MRT4577_121315C.1
ccggccgggnaaaangtcantactcgacgcctctacatttctttttcatctgctcctccgcctccgcctgatccatccaagacagggatcgccatgtcggactcggaggagcaccacttcgaatcgaaggccgacgctggggcgtccaagacctacccgcagcaggctggcaccgtccgtaagaacggcttcatcgtcatcaagaaccgtccctgcaaggttgtggaggnttntanntnnnanantgntaannntgnnnannncaaatggcactttgtcgncatanacatattcaatgggaaaaagattgaagatattgttccttcatcacagaaatgggatttttttttttgcccccccccccccaccagctgattgacacgcctgacgacgtatccgtgccccttcctaatcacaacgtatcatcaaattttcatccccgccctccctcctcaccgccccctcccctccccgccctccccccccccccct

SEQ ID NO: 23366 - DNA, 267 bp, Zea mays
  Clone ID: MRT4577_121316C.1
tctggtggaagcacgtgtccttatggaaggagggataagtggcgtgctcaatcaaagggaagcggggaataatccagggaagtacctgtagcatcttggagtgctgtaccaaggacagggtgtaatgcttggaatggctttaggatgcataacatggatgcgcaacaacaatggatatggtgcatggactgcttggttggacaaagcacatctcacatttaatgaaataaccagcatcctgttgaatggttacataggtgtgctacc

SEQ ID NO: 23367 - DNA, 883 bp, Zea mays
  Clone ID: MRT4577_121317C.1
ccggccggagctgccggtgccccggagcccctccccgtcccaccgcagcccctgccgaagcccgacgacatgccggtgccacccgagcccctcccccagcccgagctcccggtcccgccgcagcccatgcccaagcctgagcttcccgtcccaccgcagcccctgccgaagcccgacatgccggtgccacccgagtccctccccaagcccgagctaccggtcccaccgcagcccctgcccaagcctgagcttcccgttccaccagagcccctcccaaagcctgagctgccggtgccaccgcagcccctcctcaagccggagctccccgtgccaccgcagcccctccccaagccggagctccccgttccaccagagctcctcccaaagccggagctcccggtgccaccggagcccctccccaagcccgagctccccgttccaccggagcccctcccaaagccggagctgccacccccggtgctgcctggcgagcttccaccgaagccagagttagtcccgctcccgccgaaggctgaaataatgccgccgctgccgaagccatgatcgatgagctacgacgacttcacgggcgcacatatatatatatcgatcgacactgcgcgcgctccacgatccaaatatttacgatttgtctactttccattcgattttttgctgattcatctgcgtgtttggtttggattggacgagggtgtgcatagctaggtagcgcatcttatcagaattgcagcgtggagtgtatattgccatgccgtctgattcgtgaccgcgatctgtctatgtactcttgctgagatccatatgtatatacctaataaatggattcgtttgtatatccaaaaaaaaaaaaaaaaaagcgggc

SEQ ID NO: 23368 - DNA, 734 bp, Zea mays
  Clone ID: MRT4577_121318C.1
tctcttcccgcgtccggccctgactcccggggccggcgcagcccatgcccaagcctgagcttcccgtcccaccgcagcccctgccgaagcccgacatgccggtgccacccgagtccctccccaagcccgagctaccggtcccaccgcagtctttgcccaagcctgagcttcccgttccaccgggggccctcccaaagcctgagctgccggtgccaccgcagcccctggtcaagccggagctccccgtgccaccggagcccctcgcaaagcccgagctccccatgccaccgcagcccctccccaagccggagctccccgttccaccagagcccctcccaaagccggagctgccacccccggtgctgcctggcgagcttccaccgaagccagagttagtcccgctcccgccgaaggctgaaataatgccgccgctgccgaagccatgatcgatgagctacgacgacttcacgggcgcacatatatatatatcgatcgacactgcgctccacgatccaaatatatacgatttgtctactttccattcgatttttttgctgattcatctgcgtgtttggtttggattggacgagggtgtgcatagctaggtagcgcatcttatcagaattgcagcgtggagtgtatattgccatgccatctgattcgtgaccgcgatctgtctatgtactcttgctgagatccatatgtatatacctaataaatggattcgtttgtat

SEQ ID NO: 23369 - DNA, 1640 bp, Zea mays
  unsure (1)..(1640): unsure at all n locations
  Clone ID: MRT4577_121319C.1
ccggggtatatcccgcgcctcttttgtttattagatttgtacattttttgttgatctcgtggcatggtgcgtgtgcgtagaaaaaatattattaaaaaaaaaaaaaaaaaaactgctgccgcggcagcccatgcccatcatccagcacgcacacacagacacgtacagagctggtagataggataaaagcagtaatgacttccacgaccaccaccatgtcctctcttgccttggccctcgcgctgctgctcttgagcggtgacatcggcggcgccgcgcggcagctacaggagctcccgaagcctgacctgccgccgttgcccaagcccgaggtgccaccgaggccggacctgccgccgctccccaagcccgaggagcagccgccgttgcccaagccggagctgccggtgccaccgcagccactccccatcccgccgcagccgttgcccaagccagagctgccggtgccaccggagcctctccccgtcccaccgcagccacttcccgtcccgccgcagccgttgcccaagccagaggcagagctgccggtgccaccggagcctctccccgtcccaccgcagccacttcccgtcccgccgcagccgttgcccaagccagagctgccggtgccaccggagcctctccccgtcccaccgcagccacttcccgtcccaccgcagcccctgccgaagcccgacgacatgccggtgccacccgagcccctccccaagcccgagctcccggtcccgccgcagcccctgcccaatcccgagttgccagtgccaccggagcccctcccaaagcctgagctgccggtgccaccgcagcccctcctcaagccggagctccccgtgccaccggagcccctcgcaaagcccgagctccccatgccaccgcagcccctccccaagccggagctccccgttccaccagagcccctcccaaagccggagctcccggtgccaccggagcccctccccaagcccgagctccccgttccaccggagcccctcccaaagccagagctgccacccccggtgctgcctggcgagcttccaccgaagccagagccagaggtagtcccgccgaaggctgagataatgccgtcgctgccgaagccatgatcgatgagctacgacgacttcacttcacgggcgcacctatatatatcgatcgacactgcgctccaccgtccaaatatatatatacgatttgtctactttccattcgattttttttgctgattcatctgcgtgtttggtttggattggacgagggtgtgcatagctaggtagcgcatcttatcagaattgcagcgtggggtgtatattgccatgccatctgattcgtgaccgcgatctgtctatgtactcttgctgaggtccatatgtatatacctaataaatggattcgtttgtataaaaaaagaaaaaaaaaaaaaaaaaaaaaaaaaaaaaaaaaaaaaaaaaaaaaaaaaaaaaaaaaaaaaaaaaanaaaaaaannannaaaaaaaaaaaaannccaaannaaaaaaaaaaaaaaaaaaaaaaaaaaaacctttnntttttcccccctttttaaaggggaatttttggaatttccctaaacctgggggggggttgggctttgtttttggggg

SEQ ID NO: 23370 - DNA, 740 bp, Zea mays
  unsure (1)..(740): unsure at all n locations
  Clone ID: MRT4577_12131C.1
gactcctatagggcgattgggtttctcgacccacgccgggaggtgcgcggggggaaaaatcgggaagccttcggagaaaagaaaagggcaaccgagaccgtgagagaggggaagcggggagccttgtccgatccggtgcagcccgcgcgtcaaactcccggataactgtggcatatgatcccaaatcttgatccacttgaagtgttcagtacattctgtagttggtttcaagatgacaagtaagaaaagtaacagatctacagtcacaccacacactgctctgcatatggaatgggacaggatttcttgccctatttgtatggagcaaccccacaatgctgttttacttatatgcagttcatacaagaatggctgcagatgttacatttgtaacacaagccatcgtcactctaattgccttgatcggttcagaaaaatgaatggtgatagtaaggtccgtgcttcacactcaacctattcggtgctttcaaactccaatatcagaactgtccaaccaagagctcactataatatgatttccagacgttcacggagcccaagactcggaagacatgttgataatgagggatcttatcataccgatgtaaacagtggcccaaatccagatgacatatctagatctgaatttgatttcgctaaccatcaagaatttgagaactcaacctttactgntgaaaggtggtattgtatcggggggaatgccatgatgcccatgcaag

SEQ ID NO: 23371 - DNA, 169 bp, Zea mays
  Clone ID: MRT4577_121320C.1
agatcttcaaattaaacatttaaatcctatattatatttaagatatttctccctagccaaaggtattggagagcggaaatgacgacccttccgtagcgcgcacaaagtatagagaaactgtcaattctctttgccaccacagtctcatccggccctaacattttttttt

SEQ ID NO: 23372 - DNA, 514 bp, Zea mays
  Clone ID: MRT4577_121321C.1
gggaacgccgctcccctccggcgaaatggccccgaacgaggtggagggcgcctgtgccggcaaaagaaacggtaaaggggaacccttgttcgagaagaggccgaagcagttcggcatcggggcgcgttgccgccaagaaggacctgcccggttcgtaagtggcccaaggcgccgatccagcgccagcgccgatcctaagcagcgcctaaggtgccaccggcgctaaccagtacccgcaccctcgacaagaacctcgctaccaacctgtaagatgctttaaataccggcctgaagacaaggctgcaagaaggagaggcttctgaagagggctaggctgaactgaagaaaaactgtgaagccaaaaccattgtgttaagttggccttaaccatgtgactacctattgacagacaaggctcacttgtgtcatcgctcatgatgtggatccgatgactggttggtggttcaccctggcagaagatggagtccttatgcttgttaaggaaagctccctt

SEQ ID NO: 23373 - DNA, 305 bp, Zea mays
  Clone ID: MRT4577_121322C.1
aaaaaaaaataaaactaaaaaaactaaaacaaaaaaacaatctaataaatacaggttggttactaacatcaagaaagacacatcacatataagatcatctgactaaacttgagtggcccgttcttaataacccaagctactgttaaatctcttccaagaccaaactttttcaccatccacctcatatctcattacaccggcgatcttttcaaacctaagttccttaaaaaaccctatcgtttccaattttaccacttttatgataaatgctattttccttgtgtgcccacattaaacataggccc

SEQ ID NO: 23374 - DNA, 285 bp, Zea mays
  Clone ID: MRT4577_121323C.1
caaggttgcagggggggctttttcctctatctacaaccaagttggcgcatgggggcacatgctctcacttactgacccctttgggttttaagagatagccaactgtttttttttgttggtaactccctcacaaaaggggggcattacctttgtatggccgggggatcagtctaccgcattatagttgggggtccatggccagcctacaattgcaccttccaatactttgttttggaccaatgtgggcaggcattgcaggggagcgtacttgcaccttttttctgg

SEQ ID NO: 23375 - DNA, 438 bp, Zea mays
  Clone ID: MRT4577_121324C.1
ctgcttacaaggaaggcggactgggccccaacaaggaatacagccctaggcaaagaaagcgcctatccgatgggcaaaacctccagcaaagcgagatgatagggcaatatggggaaaagagaaggctaaaaagtccacggtagtaccttgacaagaactacatcttcaatgtgatgaaccaggtgcaccctgacataggcatctacttcaaggctcatgtccataatgaactccttcatcaacgacatcttctagaagctcagcgtggcgagtccaccaagctgtcgcgctataacaagaagcccaccgtgacctcccgcgagatacagagctcggtgcgcctcttgctaccaggctagcttgccaagcacgccgttctgcgaggtcaccaagagccgtcaccaagatcacattgtgagtacgtgcatagtactaggc

SEQ ID NO: 23376 - DNA, 768 bp, Zea mays
  Clone ID: MRT4577_121325C.1
ccggccgggacctgcaaagtcgtagacctgtcaggccgagaaaccagtcatggccatgaagaccgcttttctggctgctagtctcgtgttgcagtccgcccgggccatcgacgttgagggacttcttgctgctcctcgtcgaagcaatggcattctcagtcccaaaggcgaccgagcactcttctcagagaccaagttcaattggaccactgaaaaggctagcacagcttggtacttcctcgatacccagactggagatgtcaagaaagctccatttggaagcgctgcttcagaggtcgtctgggttggcgatagtgacgacagcatcctctacatcaactcaaccaacgagcagatccctggaggcgtgacactttacaccgccgatctcagcaaagacagctttgagccgaccctggttgcatctctgcacgctccactatccggcctcaaggctgtaaagacagactccggaatcaacttcgtcggcaactgccttgcttacgaacacaacggctctgcgtacaacccagagcttgtcaccgcgcccaaaacctctggccaactgtacgatgccaactttgtgcgccactggaactactacattaccgccgaacgcgtttcggtcttcagcggtgtcttgagcaatctcaatggcacgtactcctatgatggaaagcttaccaatttgctctcgggcatgaactacacaattacccgtccggaaagccccgttcaagcctcttcgagcgatcctggcgactatga

SEQ ID NO: 23377 - DNA, 256 bp, Zea mays
  Clone ID: MRT4577_121326C.1
ccttgactgcgagcaccagcaatgagaacaaggtcatgctgtacaggctctacatgtaagccacgtttggagcatgccttaccgatccgtgcggactaattcaccgaaaggtcaagcccaagcgtaatgcactggaacgctgttgaacgcatatagaacgatgactgcgacgaatgactacattactaaactgaaccagttccaggaggaggctgccacctcttacaaggatctgaatggggagggcatacagctt

SEQ ID NO: 23378 - DNA, 131 bp, Zea mays
  Clone ID: MRT4577_121327C.1
cactggctaaccacgacggcatcttttgcagagtggctggagtgttcctgctagtgccaaacgtattgatgcagaccatgccttcatctatctcagacgggagagaggcgagctcggccgaggagatgatc

SEQ ID NO: 23379 - DNA, 548 bp, Zea mays
  Clone ID: MRT4577_121328C.1
ctggccggcgtgtcacacttgactcgccttcaaaagctttggagctgcctgctcgcggcgtcctcatatacagctgccgtgcaaggggacgctagctgttaggcggaagtggggggaccgagtgaccaaaccactgtgcttgataagagctgcgtgctgacccacctgcgctcgatcatgggtgacggagaccggctgcgggacatatgcccatacgcggtattgtacgcctggctagcgcacgcacggaactgcatggcccacagcctgacctgccctaagacgaacagtgagagtgggcatcaatgagaccacgatgcggaccgcgctctctgctagagcatctggtgcgacaggtggcaggagatcatgatcaattcatgacgggcggcgcgacagcctgccgctgcaaagagtggtggtgcatccatcaagcgtgcgaagctgtttatcaagaaccacgatgagcacgtttaagaagcggtccgctagtagatagccgcacaaggaccatgccgaatgcttcaaacgtaccatcgacgatgacg

SEQ ID NO: 23380 - DNA, 839 bp, Zea mays
  Clone ID: MRT4577_121329C.1
tatacatcaactagtcctgcagatagtatgtcagtctcagaccatggagcaagcagcagcagaaaccaggatactttacaagttaatcaaacaagggatgcaccctatccagctgaggagagcatttgttcattcaaatcaagtagtcctattgatcatgcttttgaaggcataggattaggtgcttccagtgcaggaaagggaccaacctccaaatcagcagcaagtttttccaagctcagtacacctggctcaaacagtctgcatgagagccaaaatgctgttggttctcaatccaaagatgctgataatcacttctgggccttcagaatcggcggccatctggtttacttggatggacgtgcttgtgtacatgaaggtgcttttagcattgactctctcaaagttgaagtagcatgtgtatattatcttcagatttctgatgaaaaaagggccaaaggtctattgcctatcattggggagctaaagtttcgtgggaaggtattggaagatgcggtatccatatattatgatgaccagctcgcttctgaacagaagtgtgttgatgttgttattgatgattgggtgccaaagcagctgatgaagttgtatgttgatttctgcatgaagtcattagaagcacccaataagaagctgctgacgaaactatataatcttgagatctccgaagatgaaatcattgtttctgattgcggactgcaggatatgtcaattgtcccctttcttgatgccctaaggatctcacataacactagcagtttttggatctttctcatattttataggaaataaacagtctgaagacttcgcatatattt

SEQ ID NO: 23381 - DNA, 271 bp, Zea mays
  unsure (1)..(271): unsure at all n locations
  Clone ID: MRT4577_12132C.1
gcgtccgcccnaaccacaccgataaccctatttgcgctagccccccggcgatgtcgggggccgagcgctccggcgagctgtttgcgtgccccgtcccactccggcgggcgcccttggctgtgtctgtggtgcctgagcggatgagggcttggggcgccatatctgcgcagtcggaggcaactgacgagggggtaggcaaataggtgctgacagctgctgcgatcattaaaccttctatcgatgtcaccaagcggatggccctctctacaga

SEQ ID NO: 23382 - DNA, 2507 bp, Zea mays
  Clone ID: MRT4577_121330C.1
ggggcagtagcattgatgaaacccccaatcactcatccgtcatacgcaaaggcaatcacatccaatgtaatgcttcaggcggtcagcctcggaactacaagttctttttctatgctcaaaaagatggggctgctgctttgttccatgttgaatgtagtgtcaacacagcatctgcgaaggcacagcccaaaatcaagccccccccccccccacgctggggcaagcattaacgagagtgtttcagacagccttgtccaagtatgggcggcctggccgccgggttccttccatctgataataacggggatatttgacataatgaatctgctggaggatagacttcagcatgcaaatggagctgttgttttggcaacgattaaagtttttctccatttgacaatgtctatgactgatgtccatcaacaggtttatgaacgtattaaagcacccttgcttactctggtgggtgctggcagtcctgaacagtcatactctgtgctatgccatctacatcttctggtgatgcgtgctccaatgttattttcctcggactataaaagcttctactgccaatttagtgatccttcatatgtgaagaagttgaaacttgagatgttgactgctatagcaaatgaaagcaacacatatgagattgtcactgaactatgtgaatatgctggaaatgttgatgtaccaattgcaagagagtctatccgggcagttggaaaaatagcactgcagcagtatgatgttaatgccattgtggacaggcttctacaatttcttgaaatggataaggattatgtgactgctgaaactctagtcttggtgaaagatcttctcagaaaatatcctcaatggagtcatgattgtatagcagttgtgggaaatatcagcagcaaaaacattcaggagccaaaaggaaaagcagctctcatatggatgttgggagaatattcacaggacatgcatgatgctccatacatccttgaaagtcttgttgaaaactgggatgaagagcactctcctgaggttcgcttgcatctcctgacagcagtgatgaaatgtttctttaaaagacccccagagacacagaaggcactaggggatacattagcagctggtctatctgacacccatcaggatgttcatgacagagcacttttttactacaggcttttgcaatacagtcctaatgtagcagaacgtgtagtaaaccctcccaagcaagctgtctctgtatttgcagacacacagagcagtgaaatcaaagatcggatattcgatgagttcaacagtctatcagttgtatatcagaagccatcgtacatgtttacagataaggagcatcgcggaccatttgagtactcagaggatcttacaggcttgactgaggatccagaaaatgtaatttctgcccaaagatatcaagaaaatgataatgatcttttgctaagtacttcagataaagaggacaatggtacaagagccagcaatggttcttccacctctacatacaatgctccttccgatttgattagtccttcattgataagctcgcaagcaccagctgaaacttcactagtaaatactggtgggacatattcctcacaatcaaacttcagtctcgatgaccttcttggccttagcgttactgaagctcctgctttaccacaaccaacactggcccttaactcaaagcctgtgctagatcctggtacgttccagaggaaatggggccagctagcattggcactgtctcaggaatgttctttgagtccacaaggggcagtagctttgatgaatccccaatcactcatccgtcatatgcaaagcaatcacatccaatgtattgcttcaggcggtcagcctccgaactacaagttctttttctatgctcaaaaagatggggctgctgctttcttccttgttgaatgtattgtcaacacagcatctgcgaaggcacagctcaaaatcaaggctgatgatggaactgctgctgaggcattctcgagtttgtttcagtcagccttgtccaaatttgggctttcttgatcctgagtaatttgtctgagcgattcaccggtccacagttttttatgggtttcacagtttgccccaactccactgtcttggcttgtccagtacttgtgatcatattattggagaatcagagtagaaggtgcaaaagggtactggagttttgcggagctaaaaatcctatttgtactatttgggtgaactgtgcatttgtacatgactacatgtcacccagataaatagctgggttatttaggactgtactgtttgatgttctgggttatttaggattgtgatagtttgatgccttgatctcttctgaagggtttcgtttccttgaaggatgtagaaacaacacgcaacaacccctttcatgtatgctatttaccatttcttgcacagatgatcaataagatgtttcgtcttccattttgattcgtaaaaaaaaaaaaaagggggggcccggt

SEQ ID NO: 23383 - DNA, 642 bp, Zea mays
  Clone ID: MRT4577_121331C.1
gggccaacccccgcgtccgcccacgcgtccgcccacgcgtccgcccacgcgttcgcgttcgcgtgggtgaaacttgagatgttgactgctatggcaaatgaaagcaacacatatgagattgtcactgaactatgtgaatatgctggaaatgttgatgtaccaattgcaagagagtctatccgggcagttggaaaaatagcactgcagcagtatgatgttaatgccattgtggacaggcttctacaatttcttgaaatggataaggattatgtgactgctgaaactctagtcttggtgaaagatcttctcagaaaatatcctcaatggagtcatgattgtatagcagttgtgggaaatatcagcagcaaaaacattcaggagccaaaaggaaaagcagctctcatatggatgttgggagaatattcacaggacatgcatgatgctccatacatccttgaaagtcttgttgaaaactgggatgaagagcactctcctgaggttcgcttgcatctcctgacagcagtgatgaaatgtttctttaaaagaccctcagagacacagaaggcactaggggatacattagcagctggtctatctgacacccatcaggattgtcatgacagagcactttttactacaggc

SEQ ID NO: 23384 - DNA, 783 bp, Zea mays
  Clone ID: MRT4577_121332C.1
tggggccagctagcattggcgctgtctcaggaatgctctttgagtccacaaggagcagcttcattgatgaatccccaatcactcatccgtcatatgcaaagcaattacatccaatgtattgcttcaggtggtcagcctccgaactacaagttctttttctatgctcagaaagatggggctactgctttcttccttgttgaatgtattgtcaacacagcatcagcgaaggcacagctcaaaattaaggctgatgatgggactgctgctgaggcattctcgactttgtttcagtcagccttgtccaaatttgggctttcttgatcctgagtattttgtctgagcgattcactggtccacaatttttttccggcgttcacagttttgcccccactctgccgcggtgccgcctaagcttgtccagtacttgatcaaattgttggagaatcagcgtagaaggtgcgattagagggcaatatattattatcactaaattcagcaagagagcaatggagttttgcggagtaaaatcttatttgtattaattgggtgaactgtgcatttgtacatgactacatgtcacctagataaatagctaggttatttaggattgtgctagtgtgatgccttgacttcttctgaagggccttctttttcttgaaggatgtagaaacaacacacaactccccctttcatgtatgctgtacttacctttatttcttgcacaggtgaccaataaagatgtttcttccattttgattcaaaaaaaaaaaaaaaaaagcggcc

SEQ ID NO: 23385 - DNA, 288 bp, Zea mays
  Clone ID: MRT4577_121333C.1
cactcgttctatgtaaatgggaacaaagatgctgtgggcgatgaatcgtttgagatcatacggggaccggctaacacggagggcgccctggacgcctacgtgtacacagcgaccggtccgaccgggccaagcccgataaccctgatgccatcgttggccgacctgcccgtgctggtactgcggggagaccgagaccccttcaccccgatcgacaggcccgttaggaagtttttaaccaacctccacggacagcttccgaacttgaccctactacatagtggatggcgt

SEQ ID NO: 23386 - DNA, 340 bp, Zea mays
  Clone ID: MRT4577_121334C.1
tcctgcaccgactgctagctactattctttgatgacttgaaaattttgcttcgtgaactcgatcggagagttatttctgttttcttttttttccatgtacaatcgtctgttcttatgctgctacagctacacacacctaggtagtaatagtagtaacaagctgtatcagagcgtgagcgtgagatggtccggcaacgacgccggacggcggtagggcgaaccgcgcgtggcgacccggcccttgcgcctctccatgaactgctgcagcgacaccttcctcgccatgggcagatcatccgccttggtcggcggcgctcgcagcgcccgcggtgcgccttgc

SEQ ID NO: 23387 - DNA, 616 bp, Zea mays
  Clone ID: MRT4577_121335C.1
aacacaaatatttctatctagaatgcagcaccacagccatggcgatctcacccatgtttttacagcagccctttgttggtgctgcattctagatataagcatttgtgttgtacccaataatgaagtcagatgcatccacgcggctcattgtttaggcaacaccggcaagggactggcggaaccactggaatgggaggcaccggtggggaagccgggtcttatggacccggtggagaccaagccaagcaactccggaaggaaccgatgcttcatcgaactggctcgggcagctcctcatcgtccgaggatgatgggcaaggcgggaggaggaagaagggaggaataaaggagaagctgatggagaagatccccgggatgggcggcaagaataccgatcatcagcagcacaccaccggggctggtgctgcctatggagaccaataccaatctgggcagcaacaggagaaaggaatgatggacaagatcaaggagaagctccctggctcccactagttcgctccaaccgagccgttaccgactatatcgcatcatcttttatgtgtgtttgtgtcctgtgaccggactctccggtccggtgaaggagagggtagccact

SEQ ID NO: 23388 - DNA, 399 bp, Zea mays
  Clone ID: MRT4577_121336C.1
tgttcctttcagaagatatcgttgttatttaaacattaaaacttgtttaaaattttatttcatgtctaaacatttagaagtaaattaaatctaatcatgttgcgaaccgctgtcaactcaataaacacaattgtttttcgttctaataaattaggacttttgagttgtcgatcgaaacatactttaccagacttgccatatgattacaatgctttagaacccttcatttcggctgaaataatgcaattgcaccattcaaaacatcatgcagcctatgtaaacaatttaaacatagcagaagaaaaattagctgaagcacaacataaaaaagctatttcagaaaccattgctttagctcctgctttgcgttttaatggaggaggccatataaatcattcg

SEQ ID NO: 23389 - DNA, 197 bp, Zea mays
  Clone ID: MRT4577_121337C.1
tcgcgcttcgaaacccccgacgcgaaggaagctagggaaccctcgcgagtcgcgttgcctcgcccccgtccccttcagctggcccgccgccgcctcgaatccgccctggctcggagggcctcgcgcccccacggatcggattctcgaggttggtggatttggggctagggtttggggattgactactatcgtggggt

SEQ ID NO: 23390 - DNA, 423 bp, Zea mays
  Clone ID: MRT4577_121338C.1
acgcccacgcgtccgaaaaaaaaaaacataaaattaaaaaataataaaaaaaacaaatataaaagggaaaaacgggcaatttaggaggagacaaaaaaaaaaacgcatgcatcttacaagatacctcttttataaactcatctataataatttaatacccctgaatattccaactctacttactttaaaaaccctggcttttccaaactttatacctttaaaacccatgcctctttcgactgattccgcattaacaaaaaggccctttcctaatgtcatatccaaccatagtgcaccctatatggcgaattttacaaccctttttcaagctcattaaccattgtgctcctccctattactcccaatttaacccgtacaatttactggttcctaacacccagtcctttccattttttaccttcc

SEQ ID NO: 23391 - DNA, 284 bp, Zea mays
  Clone ID: MRT4577_121339C.1
aaacacaacgggggaaaaatagtctattacatcatatgcccgaaacctcccccttgtattcacaataatcaaagggggaaaacaaaacgtaaatacccccggccttaaaaagaaaccaacggggggttgcccctaacccaccccaaaaacccgccgaaatcttggaactcctggaaaacaccttccacgatttcattttttcctgaacaggggttgcaatgctaacaacctggggatgggggggtttggtgtgaaaaacccgggtagatgcccaataaacatac

SEQ ID NO: 23392 - DNA, 392 bp, Zea mays
  Clone ID: MRT4577_12133C.1
accactttcccgttatgaaccctggaccgactgcgtgccctgctcgagaccagcctcaagccctaactgcctgatggcataggcggtccagcatcttgagtaaggaagccctgaccgctcaccgagttctatggtgaatagtgaccttgacgtgtacgatgatgaaatgagactgcataccgatgactcagccgagcacaataccggtacatcgagggtgtcatcctccgacgagaacatgcgctacttcaacgctatgatccttgggccggatcagtcagactataatggtggatgaactaaagctgcactctttacacctcaggaatatccaatgcctggcacaaaggttaggttgctgactaagatctatgactacaacatggacaaca

SEQ ID NO: 23393 - DNA, 466 bp, Zea mays
  Clone ID: MRT4577_121340C.1
gaccattgaataagaaagcccccccgcaagaaaaaagaggacagaagaagaaaagggggggacagacaaagagggaaaggaaaggaaggggggacggacaaaaaagggcaaagaggaccggggacggaacccggggcccaaaaccaagcgggggggggagggggccccccccaagcaagcaagcaagctaactcctccggccggaaccgaaacgccgaaaaccaaacgaacctgggggggcgcacaaaggggtgggccctgggaaaggccccaaggccggcggccctgaaggcaaaaaaaaaaaccagggggcccaagaaaaggggcgcgccaaaaaagagggccccgaagaggcaggggaagcccgagagccccacccggatgggggagggctggcaccgggggacggacaaagacaacaccggcggggaaacccgggccggccggggggggccctccgggggcc

SEQ ID NO: 23394 - DNA, 276 bp, Zea mays
  Clone ID: MRT4577_121341C.1
cggacgcgtgggcggacccatgtggtcgcggcgtacccggcgctcatggtcgactacctacggcagggcgtgcacaccggtggcgcggcgcgcacgggcgcggtggccggcctgacggtgctgctgtcgatggggaactttaccgggctgagcgtcagggggtggggagccgaggagctgggtgctcggtgcctggcgcacgccgtgctcatgacggctatggcggagccccatgtgcgcccgcggtggcggacggtgacggaggagggctatttt

SEQ ID NO: 23395 - DNA, 589 bp, Zea mays
  Clone ID: MRT4577_121342C.1
ctcatctttctaccgtccttgattgcagtccttcctcccccaagtccctagagcctagacgaatggcgctgcagctcactgttccttcttcagttcactcatgtagtcctattcatgtatgaggtttttcccttttaaattcatatgcagaacatggtttgagcctcccatcactcagtccacactgtagttgacagacatcaactgtatttgtggttttaatagtttgtatcaggagagtgcatcttgatttactaaaggtaatgtagtctcaagtttatgtataatcagttctaatcttgttttttattgaacaatatgtgtttctaggtccattaaccagactaaagtagtgcatattttaaattgaatatttttcttcttttcggtgagaagtgaaaagtggaagacatttcagttctgcacttctaagtaaagtatttctcttatactcttgttccaatcactctgttattgattgtttaataaatcatttcatatgagcagagcccttttctaatttctgatacctgtgaggagtcttatatcatttgtgtttaggctattatttatgattaaatattttttt

SEQ ID NO: 23396 - DNA, 368 bp, Zea mays
  unsure (1)..(368): unsure at all n locations
  Clone ID: MRT4577_121343C.1
nnnnnnnttttttgttaaggacaaggggccaactgcaaatggatacaagccacacggcagcggaagagggacggctacaccacagaggacacgccccgaccagggacccggcgaagccgcagccagcaacaagggcacacaacccccggaagagggttagacgaccacacccatcgagcggcacaccagcgggcaccagacgacccacagacccaggtacagcacgccgcgtaaacggaccatgggtaactgaccaccgagggggccgcgcacccggtggtgagggcgatccgcccggatgaggccgcccgccagggtgcgggcagcctccggcggctggccggggcagatcggacgccgctggcctg

SEQ ID NO: 23397 - DNA, 383 bp, Zea mays
  Clone ID: MRT4577_121345C.1
atataaaaagagcagctatagagatattcttgaaatactgctcgagaagactggtgggaacgacgcccaaacatcacaaaggcgagctctgcacaccaagggacgcgtcagttacagcttcttaaatactaatgccagagggggaaaaaaggctggaaatatgaaacagaaacaagagagctagcagtgaaatgaaccacagtattccaggatcgccggacgaagtacgcccttacagcagatctaagagtagtctaaggtacctaggaagagagacatgaatatatctaggaccatgacgcctgaatgccccacgtacgcgataacacccactgtagcgtaccacctgtgtacgcctgatgcatcttcatgctccgagcgcg

SEQ ID NO: 23398 - DNA, 503 bp, Zea mays
  Clone ID: MRT4577_121346C.1
tcgagcggccgcccgggcaggtacaagttttttttttttttttttttttaatttttgttttaattagtggaaactgggtaacataagaaaagagcctgaaggaatgaaggacgcaggaatataaaatacatgcgtacaggaatactacaggaacaaattgctaggtgacacagctgataacgaaaagatgaaggctgatgagcaaaaaaaaaaaaaaaaatttaagggagaatactggaaatatccatgaaaaagattgacggtacagcgtgcgtctatagggggggcttaggccggtaaaaagtgggattaaaaagaagtggttgagggtttaaaagggggggaatgagaaaaaaatggggggggaaaactaaatcgcctggaagtaaattcccatttaggaagttgggcaaatagggaagaaggcagaatggatagggtttgctaaaaaaagtttagccaaaatggggaaaggatggggaaagaaggggagaattaagttc

SEQ ID NO: 23399 - DNA, 285 bp, Zea mays
  unsure (1)..(285): unsure at all n locations
  Clone ID: MRT4577_121347C.1
ttcctttacccatcatgcgccanncnaatcagaccgcttccttattaagttagccggcgcaaatttaccctctcctcntctctctcctctccctgcccatcccccatatccttcacctcccgctcctcgatccccacaccctactcccgcatgccgttaccaacaaaatcgctcgccctttatgaggaggagaagaggaagggctgtattgcttctccgccttctatttcccattcccactacaactaccttatcaatcttctcctcatttaaaacagcggtgtt

SEQ ID NO: 23400 - DNA, 678 bp, Zea mays
  Clone ID: MRT4577_121348C.1
ggccggcagtgtgcgtgggaatagggtgttggagatgtggagaattcggccttagagaggaaaacaaaggaaggacagggatcgtgaaagccccattttttttttttttaagtccacacttaacacggacaaggccacggctacggcaggacgaagggcagctcttttctaggcgaccgtggcgatgtcggtggtttctctttaaacaaggtgttggccgtcgttgccacactccctattggcggaaccctgttgactcttgccgggttcactctcctcatgaccgtcgtcggcctcgccatcatcactcctttgtttgttatcttcagccctgtcattgtgcccgccgtgtccgttatcggccttgctatttctgggttcctgacgtcgggtgcatgcgggcttactgccttgtcagccctctcttggattctcaggtacataaggcaaggtcggggcgtatcgatgatgcaagaattggacttggaccatacaaagaagaagatgcaagaggcggctggctatgtcggacagaagactaaagaagccgggcaggcgatccaatccaaggcgggggctcaggaaaccaaggcataagttcagaggcggatcccggggacgacgccgcgtcgtcgtcgagattggaaggatgagccagtcagtttgatatggacgagt

SEQ ID NO: 23401 - DNA, 499 bp, Zea mays
  unsure (1)..(499): unsure at all n locations
  Clone ID: MRT4577_121349C.1
aagcagccgggcgcaggggnaagggggcagcaanncagcncccncgccnccgccgcggcaccggcacnacgagggcnncgcnaccagccagccagcacacncnacgaggcgccancnnccacnccaggggngganggggaagccanggccanggagaaggccgccnccnnccncnccncccncnaaggcggcggcggcggggagccggcggcgacggggaaancnancncananacccnancaagnccngcaggggncnngccgngncacaggcgcccancaccnccacngggnnccggngggancggcagngggnggnggngaacgccaaagggcgagcanacacccagagggnggagcccaagcnngcncnggnccaggnggagnngccgccggaggccnncgcngagaaccggcagcccacgcccgacgaccaccngggnancagagcacccgngaaggacacacngaagaaaccncnaanaacggaacacgccac

SEQ ID NO: 23402 - DNA, 364 bp, Zea mays
  Clone ID: MRT4577_12134C.1
acacaatcacctgaatgaacatttgttatgtaatagaaaaaattttgtttctttttttttttttttttttttttttatttttttaaggtacccccccgggcggcccgcgcgacagggggaattacccccccactgggggccacaccggggggagccaaggccagaccaaaacatcgggggaaatcggcaagcgggggagaaagggggaaaataagaacgaggagaataacgaccaaaaaaaaagccgggtaaaaacaaggccagcccgggggccccaaacggggctgatggccccaagcaaaggggggggggcaaacgccccgttggctgaggggaaaaagcccgaccacgaaggcaaaaagaa

SEQ ID NO: 23403 - DNA, 293 bp, Zea mays
  Clone ID: MRT4577_121350C.1
aaaaaacaaaaaaaaactaaaaaaataaatttaaaaaaaaaaataaaaaaaaaaggggaggattataaaacggcggccgctttctagattccaacatttacttccacttgcatgccatttattagcttttctctcgcactcccttaattcactccactactccaccgtttataacatcttcccttgcaaaccctctgtgtatcccaacttattcacttatcaggatattccctttttgccagctggcgtaaatacgatgagctccctaccaaacgtccttctcatcagttact

SEQ ID NO: 23404 - DNA, 268 bp, Zea mays
  Clone ID: MRT4577_121351C.1
cccacgcgtccggtttgctggtccttgtggttatctaaaacacaagtatatatatagggatcgggagctattttgatgctggcgatcatggttctaacgcccttggttttttgggcccgttcctttagctaacgattctgtttgttaatttcttcgggtttttttggagtacagtgatcatgaacctgtgctctaattgccacaaggggattattactcatcctgatcaggccaatctggtattcttcggttatttcttgaatttttt

SEQ ID NO: 23405 - DNA, 1918 bp, Zea mays
  Clone ID: MRT4577_121352C.1
gaaccaaaatcaccagagcgcctctcctctccctctccagcagccgctcccgacttttaccttcctacctggtgctgtagcatccgccgcctcccgcagaacccgaagatggcgtcgtcggcgtcgaccctcgaaatcgaggcccgcgacgtggttaagatagtgctgcagttctgcaaggagaattcgctgcagcagacgttccagacgctgcaaaacgagtgccaggtctccctcaacactgttgacagcatcgacaccttcattgccgacatcaatgccgggcgttgggatgctgtgcttccccaggtcgcacagctcaagctgccacgcaagaagctcgaggacctctatgagcagattgtgttggagatggctgagctccgtgagcttgacacggcccgtgccatcctccgccagacgcaggtcatgggtgttatgaagcaggagcagcctgagcggtacctccgccttgagcacctccttgtccgcacatactttgaccccaatgaggcctaccaagaatccaccaaggagaagcggcgagcactgattgctcaagctgttgcttcagaagtctcagtagtaccgccatctcgtcttatggcactgattggtcaggctttgaagtggcaacagcaccaaggattgttgcctcctggcacacagtttgatttatttagaggaactgctgcaatgaagcaggatgaagaagaaacataccctacttccttatctcatcaaataaagtttgggaagaaaactcatcctgaatgtgctcgattttcacctgatggtcagtaccttgtttcatgctcagttgatggaataattgaagtctgggattatcttagtggaaagcttaaaaaggatcttcaatatcaagccgatgaaagctttatgatgcacgaggaacctgtgctgtgtgttgattttagtagggattctgaaatgctggcatctggatcacaggatggaaagattaaggtttggcgtatacgaactggtcagtgcttgcgacgccttgagcgtgcacattcgaaaggtgttacaagtgttacattttcacgtgatggaacccaaatattgagtacatcctttgacactaccgcgagggtacatggcctcaagtctggaaagatgctgaaagaatttcgaggtcattcttcatatgtaaattatgccatcttcactactgacggtagccgtgtcattacagcttccagtgattgtactgttaaggtctgggatactaaaacaacagattgcttgcatactttcaagccaccacctcctttgaggggaggagatgcatctgttaattctgtccatttatttccaaaaaatactgatcacattgttgtctgcaataagacttcatcaatattcatcatgactttacaaggacaggttgtgaagagtttctcatcaggtaagcgagaagggggagattttgttgcagcttcagtttcaccaaaaggagaatggatatattgtgttggtgaagacatgaacatgtattgctttagctaccaatctggtaaactggagcatctgatgaaggtgcatgagaaggatgtcataggcattacgcaccatcctcacaggaacttagtagccaccattgctgaggattgtatgatgaagatatggaagccttgactttttttctttttaaaaaaaccttgaaccgatgattaaataggatgtattttgttttgtaatttagataactggtaggcgctacagctatggactcgttggtgcttatgttgccccatgtcttactaccattgtatcctgtactagatttagggacctttcaatggtgtaaacacagcttactacgactcctcgctacaagttcattatggttaatttggttatagcacgctggatgctgattgtgtccgcagac

SEQ ID NO: 23406 - DNA, 580 bp, Zea mays
  Clone ID: MRT4577_121353C.1
gtgcaagtaatataaatttaaaagctgacttggacagcactgacttaaaccgtgcgtcctcctgacgctcaaaaagcaagcgaaaaatgaacgagagcaggccatccggccggacgtggaccttgctatgccatggctcttctttgcttttaggaaactctgtgatcccaatgcattctagcgcacagcaaaggtacgtgcccaagctgccctactgatagcggagcacatgaatctgaacttgaccacctatcggtcgacctctgtcatgtacaatagctaaatatttcatgcaatccactcattcggggagcaaagcgagtggcaacagatgagcagagaccgggcgctgtacatacctaagacgacgacgctcaagcctcgaacctgtctaaacatgcatatgctgaacaacgtactgcgctacttaagctagtagatggatgcgtccataggctaataccatgattaactagctcggtagctctcttgcctcttcatgagatcatgccgcacgttctcccacgcgatctaccactaccgaggcacgtgaagaacaagtccgtgtgctgacatacaa

SEQ ID NO: 23407 - DNA, 476 bp, Zea mays
  unsure (1)..(476): unsure at all n locations
  Clone ID: MRT4577_121354C.1
aacccagcaaaaagcaacggaccgagagcggaaggntaccanccggggggggggggggcgaggacgacaccccgtctcgggctcgaggcgaagacagagaccggagacggcacaagacgcacgaggagccaaggaccgaaagaaagcagaagatggagacgagcaccaaccaagcgagccagaggagagagagggaagggaagcgggggcgggggggaccccccagaggcgaagaagaaccgactaccgacggacgcggagaccagccagcaggcgacggaagagggggcgaacaacgaggacaggaaccgcgagcagaaacaccaggcgagggaggaccaaaacaccaacaagaacgggggggggcagcgcaacaacacgggcacacgacccaagagcgaagacaggcagggaaacaggcgccnaaaccgcaacccgaaccgggaggacaaagaagagcgccacaacgagcagcc

SEQ ID NO: 23408 - DNA, 216 bp, Zea mays
  Clone ID: MRT4577_121355C.1
aaaaaaaattgatttcatttgtagaaaaagaaactggggaacaaattgcatagcccaagaaaacccacctttgtaacgagcagagcccatgcagatgcggccggccatagtcaaataacccaagctagccggggggccccacaacagggggggggggcaaggccaaaaaggggggacgggacgtagaagaaaatgggccaaaagatggaactaaaa

SEQ ID NO: 23409 - DNA, 185 bp, Zea mays
  unsure (1)..(185): unsure at all n locations
  Clone ID: MRT4577_121356C.1
gcacgcgtncgtaagcttggttcctctagcacggccgccctttgttttgttttttgggaacaatactttgtgctgtggatttcaattggtcattcaggtcattgggcacactgcccctgccacccatggggatgcgggtcccagttttcctcagtcgtcgccgctcagcgactcaactggctggc

SEQ ID NO: 23410 - DNA, 339 bp, Zea mays
  Clone ID: MRT4577_121357C.1
aaaaaggaaaagcatttccgagatgaaacaacaacgtaaaccgccataatttttttaaaaaacccgggagcaatgcaggggaattaacaacttttacaacatcgggggttgtaaaccacacaattttttaaaacagacccccataacacgattgcgggggcaacttttggcaaatcacgggataagggcaacacactggcctgatgctgggttatcagaaaacttctttagtactcgtcacccttgtcgccatccttgccctaatggaacttagaaccgaccttcttgtatttcttttgaagcgccgccaggttctcacgggccttaaagaactcacct

SEQ ID NO: 23411 - DNA, 306 bp, Zea mays
  Clone ID: MRT4577_121358C.1
gggattgcccgtttaaaaaccggcgaaccccttggttttcctaattcggcctataacacccacttactttgggccgctttccggggaagcaaggcctccgggccgggccacgggagggtcttctagatctccggcatcatcagtaacaaatggctgacggtgaggacattcagccccttgtttgtgacaatggaactggcatggtcaaggctggttttgctggtgacgatgcgccaagggctgtgtttccaagcattgtctgtcgcccccgtcacactggagtgatggttgtcatggggcaaaaag

SEQ ID NO: 23412 - DNA, 707 bp, Zea mays
  Clone ID: MRT4577_121359C.1
aggtgacactatagaagaccttcttcttcgccggccatgacacgacctcacatctcctcacctgggccatgttcctcctcggcacgcacctcgagtggcagcagcggctcagggaggaggtcatccaggagtgcggcagcgccgaggtgccgctcgacggcgacgccctcaacaagctcaagctcgtaacgatggtgctgtacgagacgctccggctgtacggcgcggcaacgatggtcgggaggcaggcgacggcggacacggacctctgcggcgtgaaggtgcccaagggcaccatcatcttcatcccggtcgcgatgctccaccgcgacgaggaggtgtggggtgaggacgtcggcgtgttcaacccgctccggttccgggacggcataggcagggcggcggcgcacccgaacgcgctgctgtgcttctccttgggcccgcggtcgtgcatcgggcagaacttcgcgatgctcgaggcgaaggccacgatggcgctgatcctgcggcggttcgagttcgaggtggcgccggagtacgttcacgcgccggttgacatcctgacgctgcagccgtccaaagggctcccggtcgtgctcaagctcttggatgccagtacaaaagattggaagccatcacaagctccgtccaaatgtcctacaatgctcatgtgacctgccaagtcattgattaggcttctatcctgc

SEQ ID NO: 23413 - DNA, 264 bp, Zea mays
  Clone ID: MRT4577_12135C.1
tgggaaggacatatatttgtaaaagatgaaggctgtatctattttttattctttttaaagtttgttcacttaaattcttttgaggatgggatgtatttttcttgctgttcagtgcttttttcttagcatctgttgttctgtggtcacagtgaccttagctacgtagcagactttcccaaatgtattgattacaaatagacagttgttacttagcaagacctgaaaatatgtctgcaggtttctccttgaagcaaatgtgtggga

SEQ ID NO: 23414 - DNA, 519 bp, Zea mays
  Clone ID: MRT4577_121360C.1
gccggccgggtccgggaaccgcgaagcactacactacacctctccacacacacccgacgacgatcacacacacgtagaagatcgagttcgttcgatcgtgaccgtgacgcaggaagctataagctagccaagacaggaataataatggcggcgtcgacggtggcgagcctctctgtcccggtgacgacggcgaccttcgcggcggcggcggcggcgggcggcgccgacgtgctgatcgtcgtccaccatcaagtgtgcattcgattgtccttggaggagtgtcctgtaacttcgcgaggtgcttattgtttaagccttgctgcttttgcttcttcatgatgctaccctactactaccatagcagtgcttagtgccatggaaaagggtccatagataaactaagcttaactgcttgagaaaaagaaaaaggcagaaaaaaaacagatgtggctatagatatacagcagagctcagcaaaggagccttgtctgagctctgatgtctcccctgccgtcttcc

SEQ ID NO: 23415 - DNA, 277 bp, Zea mays
  Clone ID: MRT4577_121361C.1
tgatagtatgcctgctcgttcagataactacgtgggctcgatgatgggaatcaatgaaggagacgcaggctgtggcactgacctcgctcgaagctttacaggtacagcattagaattatgcattcaatcaataaccatgatctgtattatattacttatggtgagcaacctgcgccttaatgcgctcgtacggacgatgatcacagtcaagatagacatacttgtcttatagcacgtcaacgattacatatcttcgttctataagtttcttttttcg

SEQ ID NO: 23416 - DNA, 327 bp, Zea mays
  unsure (1)..(327): unsure at all n locations
  Clone ID: MRT4577_121362C.1
caaaccgcccgcagttccgttccgcaagaccagatcgcccgcttttctcctccgggggttttgttcttgcatattgcgatgagccatcgaccgaattgatccacgaggccggggcacccctagtgccatggagctcatccaatccgccgtgaacgaggcgtngaaggggctgtcgcgcggctacccgcgcacggcggctcggacgagtggcaccgcgctagcgacgcggcgacgggagccggggcctctggaccggtggcgactgacagagcgctcgaggtgcgcgagcccccgaatgcactgcgcatggcgggcgtcagcagccgg

SEQ ID NO: 23417 - DNA, 856 bp, Zea mays
  Clone ID: MRT4577_121363C.1
agttatgacgtatgctgcccgcctacgtatgctcggaattcggctcgagtgaacgccaaggtgtctgctcaaccttctcaccggcgccactgccgccgccagcggagggggcagcatcatcaggaagaaaaatactcatgggatcctgaatgcggtgagctgggggcttctgctgcccatgggagccatcttcgcgagatacctcaagacgttcaggtcggctgacccggcgtggttctacctgcacgtcgcttgccagctgctcgggtacggcgtcggggtgtccggctgggccaccggcatgaagctcggcaaggagtccaggggcgtcacctacaccgaccaccgcaacatcggcatcgcagtcttcgctctcggcacccttcaagttctggcgctgttcctgcggccgaagaaggagcacaagttccgcgtgtactggaacacgtaccaccactcggtggggtacgccgtcatcgtgctgggcgtcgtgaacatcttcaagggcatgagcatcctgggcgtggagcagcggtggaggaccgcctacatcgccgccgtctgcgtgctgctcgtcgccgccgcggcgctggaggccgtcacgtggggcgtcgtcctcaggcggcgcaaggccgacggcaagaccttcagcagcgcacccaacggccacctgccgcattccgtctccgtgtgagtgggctctcgattgtatttaccggcttgttatcgttagagtttgctggggttttggcctgccggcttgtattgtatgtccgttttggacggtcctctgtagctctgcatacgtacatgcatacatggcattttgtgtatgtgtatgcatccccttcccttc

SEQ ID NO: 23418 - DNA, 220 bp, Zea mays
  Clone ID: MRT4577_121364C.1
cgccctttcttttggggaaaagattttatttttttcacaggaccagaagaccaaaccgaggggaggggcataaaactccaaaaaggggagccggcccccactcagggaaacccagagacaccccattccaccccgaccaattcaccaaaacgaacaataccttgtcgaggaaatccaacacgccccagcaggggccggacagcagctggcggcagcagaa

SEQ ID NO: 23419 - DNA, 1637 bp, Zea mays
  Clone ID: MRT4577_121365C.1
cggacccaaaaatccgcaacccttctctttttcctgagtttctcgtttcccctccttgggctcggaggctacagttcctgccccacccgcaagactgcccccgcgcgcggccgcggccatgtccttcccgcggctcctcctggccgtcctcgccgccacggtggcggcggcgtacgcgcccgcgcgcgcggcgggcgccggcgccggtgcctgcgcggcggagaaattgtccagcaaccgcgtgttccagacgtgcgccgacctgccccgcctcggcgcgtcgctgcactggtcctacgacgccgcggcgtcgtccctgtcggtggcgttcctggcggccccgccgtccgccggcgggtgggtcgcctggggcctgaaccccaagggccagagcatggacggcacgcaggcgctggtggccgtccccagcggcggcggcggcggcgcgtacgaggtgcagacctacagcatctccggcacctcgctcggctccccgggggcccccctcgcctacccgacgtccgacctcgccgccgagctcggcggcgacggccgcgtccggatcttcggcacgctcaagctcccgaacggcacgggcgccgaggtcaaccaggtgtggcaggtggggccctactccggcgggatccagatacacgaaatgaaaggcgacaacatgaacgccaagggcacgctgaacctcctcaccggcgccaccgccgccgccagcggtgggggcagtatcctcaggaagaaaaatacgcacgggatcctgaatgcggtgagctgggggcttctgctgcccatgggagccatcttcgcgagatacctcaagacgttcaggtcggctgacccggcgtggttctacctgcacgtcgcttgccagctgctcgggtacggcgtcggggtgtccggctgggcgaccggcatccatctcggaaacctgtccaaggggatcacctactcgctccacaggaacatcgggatcacagtcttcgctctcggcactctgcagatcttcgcgctcttcctgaggccgaagaaggaccacaagtaccgggtgtactggaacgcctaccaccactcggtcggctacaccgtcatcgtgctgggcgtcgtcaacatcttcaagggcatggccatcctcgacgtggagcagaggtggaagacgggctacatcgccgccatctccgtcctcggcgccgtcgccgtggccctggaggccgtcacgtggggcgtcgttctgaggcggaggaaggaggaaagcaagagctacaacgacctccaacgccggccgcttgccgctgtctatgtaatatatatatatatacctcatcgtcgtcgtcgtcgggggcgtctcactatatatctatctgatctgatctgatcttcagagtagtaggccttacgatgggttgggttagctagctagtgtgtgtatcttcattgtatggtaggtgtctctgtgtgtgtgtgtatactgcacgttcgtatactggagatgagtgagtgtgataccggccggcggcattggtctttggctgttgcctttttgtttctgttcgttcgtgaatgctgatctgatcatgcacttgcgttctgggatcccctcaggcggtgcaaggtcgacggcaagacct

SEQ ID NO: 23420 - DNA, 670 bp, Zea mays
  Clone ID: MRT4577_121366C.1
cttcgttacatgtatacaacagtttacttcaaaatttagagagagggggagaggggggagatgattatgatgacgtgcacctttacagacgatgatgttcctgtacagttatcatgacgtggaaactagctccacaagtctcactttccatacggccgtaggaacctcccttgtgatctcctgccaactcaaacggggggggggtcttctttcaaattccaaaaacttttccatattggttgtcaaatctgctgaatcttttgggtgcgtgagcctgcatgagtgcagacctacagcatctccgggacctcgctcggcgccccgggcccgctctccgcctaccggacgtcgggcctcgccgccgaggtcggcggcgacggccgcgtccgcgtgttcgcgaccctcgtgctccccaacggcacgggcgccgaggtcaaccacgtctggcaggtcgggccctactccggcgggatccagatacacgacaccaagggcgacaacatgaacgccaaggggacgctcaaccttctaaccggcgccactgccgccgccagcggagggggcagcatcatcaggaagaaaaatgtgagttggtcggtcccccagaccccagaccccacccacccttcgtctgttcgcgttattaacaaggcatgtccgcattccttcg

SEQ ID NO: 23421 - DNA, 158 bp, Zea mays
  Clone ID: MRT4577_121367C.1
tgtttgccgttaagtctgaccccagggcgaacaagagtgatgcatccaaatatctggctgttcatctccggtttgagattgatatggttgcatactcattgtgttactttggtggtggcaaagatgaggaagacgaactagaagcttatcgccaaatt

SEQ ID NO: 23422 - DNA, 2094 bp, Zea mays
  Clone ID: MRT4577_121368C.1
ccggccgggacaaaaagtgcttcttctgctcaggcacgtccgcgccccacgcccatcggctcccactctctcccaccaactttgaagcactcacttcactcgcgcttgcttcagcttcacccacgccaacgcaggcaagtacgcgaccattcccccctcgccaagcgcgcgggaagaaccaaccaaccagaaccagggccatggccatggccacggccggcgccgtcatcgcggcatgcatcctggcgctgctggccccgccgccggcgcgcgcggcgggcggcgggcggtgcgcgggtgagtccttctccgcgaaccgcgcctacgcggcgtgcaacgacctgccccgcctcggcgcgtccatgcactggacctacgaccgcgcgtcgggcgacctccacgtcgcgttcgtcgccgcgccggccgcgccgggcggctgggtggcgtgggcgctcaacccgtcgggcgacggcatggcgggcgcgcaagcgctcgtggcggggcccttccccgacggcggcggcacgtgggccgtgcggacgtacaacgtgtccgggtacgcgctcggggagcccgggcccatcgcgttcccggcgtcggacctcgccgccgagctcggcgccgacggccgcgtcagggtcttcgggacgctcggcctcggcgccgccgccgtaggcggcgggggcgtgctgctgaaccaggtgtggcaggtcggcgccgccgtctccagcggcggcgtcccggcgccgcacgccatgggggcggacaacctcgccgccaaggccaagctggacctgctgagggcgaccaccgtagccgccggagccgacagcgccaccaggaagcgcaatatccatggagtcctgaacgccgtgagctggggcctgctgctgcccatgggcgccatcttcgcgaggtacctcaagacgttccgggcggcggacccggcgtggttctacctccacgtcacctgccagctgatcggctacggcgtcggcgtctccggctgggccaccggcatgaagctcggcaaggagtccaggggcgtcacctacaccgaccaccgcaacatcggcatcgcagtcttcgctctcggcacccttcaagttctggcgctgttcctgcggccgaagaaggagcacaagttccgcgtgtactggaacacgtaccaccactcggtggggtacgccgtcatcgtgctgggcgtcgtgaacatcttcaagggcatgagcatcctgggcgtggagcagcggtggaggacagcctacatcgccgccgtctgcgtgctgctcgtcgccgccgcggcgctggaggccgtcacgtggggcgtcgtcctcaggcggcgcaaggccgacggcaagaccttcagcagcgcacccaacggccacctgccgcattccgtctccgtgtgagtgggctctcgattgtatttaccggattgttatccttagtggcgtgtgtgactacgatagtaggtttagagtttgctggggttttggcctgccggcttgtattgtatgtccgttttggacggtcctctattgctctgcatacgtacatgcatacatggcatttttgtgtatgtgtatgcatccccttcccttcccttccagtgttgtgttgagctcatctagaaaatgggcacagctgggggcatcacttctcgagagtccggtcagcatcccggaggatccgcgacgatcacgcacacaacgcactcgggccacttttctgccgaagttgcgaaacctgctccctgtggaccatgatggatggttgtttgtgatgtcaaaacgcatcgctatcttctatcgaaaggtacgtgtagtagtgtcccggctacatttaccctgggccgtgagttatgttgtgtttggttctatgtcaaagtaagattagatgggctaaccggcgccactgccgccgccagcggagggggcagcatcatcaggaagaaaaatgtgagttggtcggtccccactccccagacccccacccttcgtctgttcgcgttattaaatgcacattccttcgtttcttcgattctgaccccatcagggcagttcttcgatacagccaagacaatcagctggc

SEQ ID NO: 23423 - DNA, 256 bp, Zea mays
  Clone ID: MRT4577_121369C.1
ggataaaaaacactcccacactcgtcgggcccctagacaacgccaacatctacactaaccttactgacaccagctccaccgggaatgcacacccaccctcaacccccaacacctggactacaggcccaccgacgtcgcccactatgaggaccacacgttacaccgaaactcgcacgccagcactcagcaccttctcctgcgacacgcccagccccaccacgagccgaccggctacaactactcatcgaacgaagac

SEQ ID NO: 23424 - DNA, 283 bp, Zea mays
  Clone ID: MRT4577_12136C.1
catgtatctctaaggacctaaaagcactttatgtagtttttaattaatcttaagatctggttacggtaactagaaaagcctgtctgccaaatccagtggaaacaagtgcatagatgtgaattggtttttaggggccccacttcccaattcattaggtatgactgttgaaatacagacatggatcttagttgatattttgggcttagggcagtgagggcttaggacaccccaagtggtttgggaaaggaggatgggagtggtgggtttatagggggatgaggag

SEQ ID NO: 23425 - DNA, 344 bp, Zea mays
  Clone ID: MRT4577_121370C.1
aaggacttacttgcctacgatggaaccgctgctgctgatgcggacgacgaggaatacacgaactcgaagccctgaaccagctattatgatatgtggcctaagacatgtcctgaaccttaccatgcataggacgatgataggggagactctggtggatcctgtcctgaatcaagtggtgctgttgcaacctccatatcgaacgattatggagggatgaactatccatcactgttcaggtgaaaaccgggaagtgatggggcctgacagcagactatgcgtgaagaaccaccctcatattcgacgtcggttctacagaagaaggaatcatttgaaaacccccttgg

SEQ ID NO: 23426 - DNA, 1582 bp, Zea mays
  Clone ID: MRT4577_121371C.1
gggacacccgcaccagcctcttcagcgccctgcacccaagctccagctccgatccgtaacccaaacaaacgacaccttgggcttggagcctactgtgccaccggcccgcccacgagaccccgcggccatgtccatcccgcggctcctcctcctcgccgtcctcgccgccgccgctgcgtgcgcgcccgcgcacgccgccggcgccggcgcctgcgcggcggagaagttctcgggcaaccgcgcgttcgcggcgtgcgccgacctggcccgcctgggcgcgtcgctgcactggtcctacgacgccgcggcggcgtccctgtccgtggcgttcctggcggccccgccttccgcgggcggctgggtcgcctggggcctcaaccccagggcgcagagcatggacggcacgcaggcgctggtcgccgtccccagctccggcggcggcggcgcgtacgaggtgcagacctacagcatctccgggacctcgctcggcgccccgggcccgctctccgcctaccggacgtcgggcctcgccgccgaggtcggcggcgacggccgcgtccgcgtgttcgcgaccctcgtgctccccaacggcacgggcgccgaggtcaaccacgtctggcaggtcgggccctactccggcgggatccagatacacgacaccaagggcgacaacatgaacgccaaggggacgctcaaccttctaaccggcgccactgccgccgccagcggagggggcagcatcatcaggaagaaaaatactcatgggatcctgaatgcggtgagctgggggcttctgctgcccatgggagccatcttcgcgagatacctcaagacgttcaggtcggctgacccggcgtggttctacctgcacgtcgcttgccagctgctcgggtacggcgtcggggtgtccggctgggcgaccggcatccatctcggaaacctgtccaaggggatcacctactcgctccacaggaacatcggggtcacagtcttcgctctcggcactctgcagatcttcgcgctcttcctgaggccgaagaaggaccacaagtaccgggtgtactggaacgcctaccaccactcggtcggctacaccgtcatcgtgctgggcgtcgtcaacatcttcaagggcatggccatcctcgacgtggagcagaggtggaagacgggctacatcgccgccatctccgtcctcggcgccgtcgccgtgccctggaggccgtcacgtggggcgtcgttctgaggcggaggaaggaggaaagcaagagctacaacggcacctcacacggctcgtcgctgccgcggcgttggaggccgtcacgtggggcgtcgtcctcaggcggcgcaaggctgacggcaagaccttcagcagcgcacccagcggccacctgccgcattcggtctccgtgtgagtgggctctcgattgtatttaccggattgttatccttagtggcgtgtgtgactacgatagtaggtttagagtttgctggggttttggcctgccggcttgtattgtatgtccgttttgggcggtcctttcttgctatacattcgtacacgcacccatggcatttttgtgta

SEQ ID NO: 23427 - DNA, 243 bp, Zea mays
  Clone ID: MRT4577_121372C.1
gacacaactagcggagggaataagaaaggacttacaacaatgggtttcaaggcattaatccttcttgcggttcttggcctttttgtgaatggaacaaatggggtcaataatccaaaatggttaattggttcggatggcaataatccaaaggttcttccttcaagtaattcaatggggttcggaaaaccagctgtggaagcctataggctacaacaagcgcttggggcgagcgtcttagaacaa

SEQ ID NO: 23428 - DNA, 392 bp, Zea mays
  Clone ID: MRT4577_121373C.1
gggaagcccccccaaacggggcctttttttgcgggggggccatgacgatcttacaagctaattttacaaaaaaaggttttttttacaacatgttctgggtttatgcttaaaacaaattcatcaacaaatgggaacttttgcggctggggaacagggcaaataaacctccccggattgggacaacagcggattttttcaatacatgggactagagctcaatcgcttttaaaaaacaggggactaataagggttgaaaacatgggataacgctctgaacttgggacgattaaccaaaaaaaggggcctcataaggacacacattgtgggggcaagaaaatccaagaaaatgctttaagctacagggcttttgcccttttttctttggaggtttt

SEQ ID NO: 23429 - DNA, 2303 bp, Zea mays
  unsure (1)..(2303): unsure at all n locations
  Clone ID: MRT4577_121374C.1
acatatgctccgcatctgcacagcttccagtatgccctcccctccgccccctgcccgtccgggccggctcagccgccaccctcccctcctctccccctgcggcgtcgttcccggctcatctgccaaattttccctgtcgcggtaagcgatagggttcggcgtccgtcttctatacccgcccttcttcgtttccattgttccggcgttctgggagtaagcttcggcttcatatacggcgttcttggtcttttgcggctcgacctctctgccactcgctggagcggctcgaaatcactggctgccctatgatcacggacaagggcctcgtcgctgtggctcagggttgcccggaactgaagtcgctcaccatcgaggcctgctccggcgtggctaacgagggtctcaaggcaattggccggtgctgcgccaagctacaggcggttagcgtcaagaactgcgcacatgtcgacgaccagggtgtgtctggcctcgtctgctctgcgacagcctcgttggcaaaggtccggcttcagggtttgaacatcactgatgcttctctcgccgtgattgggtactatgggaagtcaatcaaagacctgaccctcgctcgcctccctgctgtcggcgagaggggattttgggtgatggccaatgccctgggcctgcagaagctcaggtgtatgactgttgtctcctgcccgggactcacggatctcgctcttgcatctgtcgccaagttcagcccaagcttgaggcttgttaacctcaagaggtgcagcaaggtctcagatggatgtctcaaggaatttgcagaatcatctaaggtcctggagaacttgcagatcgaggaatgcagcagggttactcttacgggcattcttgcgttcctcctcaactgcagcccaaagtttaagtctctctccctgtccaagtgcgtcgggatcaaggacatctgctccgcacctgcacaacttccggtatgcaaatcactacgttccctggccatcaaggattgcccaggcttcaccgacgccagccttgccgtggtgggcatgatctgccctcagctggagaacgtcaatttgagtggccttagtgcagtcaccgacagcggcttccttccactgataaagagttcaaacagtgggctggtcaacgtcgatttgaacggttgcgagaatctcacggatgcagctgtttccgccttggttaaggcccacggcgcttcccttgcgcacctcagtctcgagggatgcagcaagattaccgatgcaagcctgttcgccatctctgagagctgcagccagctcgccgagctcgacctttcgaactgcatggtcagcgactacggcgtcgcggtcttggcagcggcaaagcagctcaggctgcgcgtcctctcgctgtccggctgtatgaaggtcacccagaagagcgtccctttcctaggcagcatgtcttcgtccttggaggggctgaatctccagttcaacttcattggcaaccacaacatcgcgtccctggagaagcagctctggcggtgcgacatccttgcttagagggaacaaggcggacgtcgccacatctccgtagcggtagcatatacttaagtctaagcctcgttagttgagttagagtctggtttctggctcgtgtttgtgtcttggtggggggtctctcccgtttgtcttagggccggttgttttccgaggggcgtatttttttgccgaggctcggtttttttttgcaggtatcctcctgtgctgtgaggatctctgttcgctgagcctttggcagccattaccatgtggtggcaccttgcccccctcctccataccaacctaagcccttgtgatcagtcattccaccatgcagtttctctcaagtcagtgtttgaagctctccagtattctgtcaagtaggcattcttttccactgctcctggatcctggttatagagttgcagacatcaacactccctttgattggtaccgtagctccgtgtctttgatgtgtgagtgtctgcaaatcttgctgctcaagtcagtgttttgttggtcatgggtgtgtggttgctattttgcggtgtccggttagggtgttcgttctgcggagcctttgccttgacaaccctgtgtggttgtttttcttctccggagacctgattttgcaggctggtggttggaacaccgtaatatttgcaaccttcttctgaagataaataaagcttgtgtttctgttcaaaaaaaaaaaaaaaaaaaaaaaaaacccnnnnnnnnnnnnnnnnnnnnnnnnnnnnnnnnnnn

SEQ ID NO: 23430 - DNA, 697 bp, Zea mays
  Clone ID: MRT4577_121375C.1
gggaccctcgaggccggccgggatagcatcggtcgttctcggatttccgccgacaagcagctacatatgagtagcatggacagaaaaaaatgtttcctattagctgtaccatccgcgacaccaccgattgaaaaggccctcccaaaaagttcgtcgcctggctccagaataaactggcggctactacctcaggctagacagaagcatcattgatgctgctgccagaagatgacacttcccatacatacgaaggtatcacaaaacttgctaattactgatacaccagtgggccttccatcccctgatccttgaaagaggtcgtgactacaggaaagatctgcactgccagaatcattgccgcctgagcctcctggagatggacttagcgctcgtacctccagctatctgtctcaaggacactaattatctcgtaccgtacacataacaacatgccatgcatatctgtcctaagacttgcagatctacctctatatgcgctctcaccgcttccacccattattctcgtgcacatttttctatcgcatgtagcggatcttccttgcacatgaaaatctagatgccgttttaccggattcctttggctcattacacaactgagtagtagattcgggtatgaaaatgattgaattttgcatctaggatgattgtgttggtactaaagatgacatgacactgg

SEQ ID NO: 23431 - DNA, 273 bp, Zea mays
  Clone ID: MRT4577_121376C.1
aagcctctgaggtgacgtcgtattacctcgtcgtcgtctcactcaccccgccttcacgcctccctcaccaaataaagtcgcgcccttttccgacattcacaggggggacaggaaatcagcgggcatggcctcgattccggcgacgaccttcgccgtcatcttatccgtcctcttctgtgccgcggctggcagcgccgttcacaatgagctccccgactacgtcatccatgggcacgtctatttccaacactggcgctcccggttcgtgaccaa

SEQ ID NO: 23432 - DNA, 455 bp, Zea mays
  Clone ID: MRT4577_121377C.1
gacggatgcatccacgcgtccatccactcgtgcggctgctacttcgctgctaccgccgctagctggttcaagtgcctcagagcgtgagccacgagaccggttacaggaaattaacaggcgtctaccggtcatggcgtacgtcaacaagtgcgggtgctcattgccatgccccggctgctaagactagctgtgcacgtagatagcgtcatgcagcgggagcacactacttgcggctgccgctagcacatgcagtgcaacgtgctcacgtgtggtcgggccacaatgccatccagccgctagaacaggatggctaactgctcctgcggtgcgttctgcaactgcgcatcctgcgcctactcctgatacgtgcgcctacgtctcgtgctaccgcgctgactaatggaaggagctgtctaatgaagatggacacgaagcatctatcactacttttaata

SEQ ID NO: 23433 - DNA, 976 bp, Zea mays
  Clone ID: MRT4577_121378C.1
gggatgaatttgtgcgtgatggttcatgcatctcatcttcatcgatctcacctgctgctgtctagctccttgagtccttgtccagtccagctagctgcttgctttactccaaagtccaaaggcaaatgtagtccttcccttagcctgcgtccacaagccaagcaacagattaataacaaggcaacgcgcgtactcaacaaccaaagtaagctactagctcgatcgtatcgtacgtactgtaccggttgttctttatatataatgcgcatggatggcgctgcggcggagatccatctctcactcaaccgcgcgcgaagcacacgagatagagctgctagaggctagagcagtagagctagaagaggaggacaacaaccatggatgcggcggcggcggcgaggggagatacgaagaagaagaagatgcttgccaccctggtgggctgcaactacgccggcacgccgtacgagctgcagggctgcatcaacgacgtccacgccatgcgcgccgtcctcctcgcccgcttcggcttcgcgcctgccgacgtcaccgtgctcaccgacgaccagcacgggcgcggcggcggcggcggcgtgctcccgaccggagcagccgtcaggcgcgcgctggatgacatggtggcgcgcgcggcgcccggggacgtgctcttcttccacttcagcggccacggcacgctcgtcccgcccgtcggcggcgggcggcgccgtcgccgcgacgacgaggccatcgtgccgtgcgatttcaacctcatcacagacgtggacttccgggagctggtggaccgcgtgccgcggggcgccaccttcaccattcctgggacaggacggcaccaaggccaagagcaactgagcaaggagaggtggttgctgcgccatcaccatgcatgactcacacgctcgaaactcgcttgcttgatccgctgccatttattattattcattaataaaaccactac

SEQ ID NO: 23434 - DNA, 553 bp, Zea mays
  Clone ID: MRT4577_121379C.1
gctatgttccgggtgaaggtgctgaacacgctgctgtatgaatctgcaagacgtggtaatctggagcaacagcaagtccttcagacagcatgattggagacactggccaccaccactatgatgaggcacactatactgtacagcatctggtcaagacgcaacactgcatcacggaaaggatatactccatcgcgttctcgaatatttatcgcccgctaggtcaattttaaactaaaacgcaataaataaaaaaagcgaaggaagtagaagatatgtcaaaacacatgcaatttttgcatccatgaagatgtcaaacaggattttgaatactagcacctagcggattgaaataatgaagttgcagttctgcgagaactggattgtacgatagggatagacaatttagctgttgtcggactgtgtacatcgttgtaccatcaccggaaatattgtacaccgagaagccatattgtaattacggcatgagaacagtaacactttgatcatgtaatacagtacataggtgtttaacaaaggttatgaacgtgtaaaa

SEQ ID NO: 23435 - DNA, 286 bp, Zea mays
  Clone ID: MRT4577_12137C.1
gtggatcatattgaaaggcgtgctgcaggtgcacgacggctctgatatacgggcgctcgtgtggatgaagtcagtgttcacgaagttcgtcttgctcatcgctcagaaagactcgacgctggatcgacacggcatgctgtctgtgagattagctccatccagccatcacttgcatcgctactgtaccctactgtccatatgatgctcttcgatctacggatcgataactacatcgtagtcgccatgtacttcactcgcaggtatcatgagatcgtgtccaagacct

SEQ ID NO: 23436 - DNA, 1870 bp, Zea mays
  Clone ID: MRT4577_121380C.1
gatgaagaagcagttcttcgccgagatatatacgaccgcccacctactatgaattgggggaaaggtcgtgtcaccttgcttggtgattctgtccatgctatgcagccaaatctgggccaaggtggctgcatggctattgaggatggttaccagctggctgtagagctagagaatgcctggcaagagagtgtcaaaactgaaactcctatagacatagtttcctccttgaggcgctacgagaaagagagaaggctgcgtgttgctattatacatggactggcaagaatggcagcaatcatggctaccacctatagaccgtacttgggtgttggtctagggcctttatcgtttttgaccaagttgcggataccacaccctggaagagtcggtggcagattcttcatcaagtatggaatgcctacgatgttgagctgggtgcttggtggcaacagctcaaaactagaaggaagacttttaagctgccgactttctgacaaggcaaatgaccagctttatcaatggtttgaggatgatgacgcactggaagaagctatgggtggagaatggtacctcatcgcaacaagtgaaggaaactgcaatagcttgcagcccattcatttaattagggatgagcagaggtcactctttgttggaagccggtcagatcctaatgattcagcttcttccctatcattgtcctctccacagatatcagaaagacatgctactatcacatgcaagaataaagctttctatctgactgatctcggaagcgaacatggtacctggattaccgacaatgaaggtagacgttaccgcgtgccaccaaacttcccagttcgtttccatccctccgatgtcattgagtttggttccgataagaaggctatgttccgggtgaaggtgctgaacacgctcccgtatgaatctgcaagaagtgggaatcggcagcaacagcaagtccttcaggcagcatgaatggagacactggctaccaccactatcatcagccacactgtactgtacagcatccggtaaagacacaacactgcatcacggaaaggatacactcgttctcgaatatttgtcgtctgctagttcaattttaaactaaaacgtgacaaatgaaaaaacgaaggaagtagaagatatgtcaaaacacatgcaatttttgcatccatgaagatgccaaacaggatcttgaatactagcacctagcggattgaaataatgaagttgcagttctgcgtgaactggattgtacgatagggatagacaatttagctgttgtcggactgtgtacatcgttgtaccatcaccggaaatattgtacaccgagaagccatattgtaattacggcatgagaacagtaacactttgatcatgtaatacagtatatagttgtttagcagcaagagcaagtcctccaggcagcatgaatggagacaccagtcaccatcccatcatcagcgacactgtactgtatagcaatcgggagatacacgatactccaacgcgtaaaaaaagcgtaaaagatacgtcaaaacagatgtgatttttgcatccatgcagatgcgaaacaggattttgaatcctagcacctaacggatttaaatgatgaagtttcagttctacgagaggaactgagttgtacgatagggataacttagctgttgtcggactgtgtacattgttggtatcatcacccaaaatattgtacatctagaagccatattgtaattacggcacgtatacagtaacactttgatcatgtaatacagtatatagttgtttacggcacgtatactttgatcatgtaatacagtatatctggcgctgagtcagatagggtatgatttgttcttccacc

SEQ ID NO: 23437 - DNA, 315 bp, Zea mays
  Clone ID: MRT4577_121381C.1
atgcgactaaccttattacggtgtttatagataaatgatatggcacattttaccttaaatctgatccgtttgcataaacaattaggaggcaaagaagccggcttgggctattaaacccattcacatcccaggaattccatatctgagccccaaacggaaagggtaaggggtacccggctccccccgttcagtggctgcacacatctatttttcatttaaacaagccttgtctattagacaaaaacacgcattatactcccaagggaaaaaaccctctcccccggtgtattgaactcaatgaaaaaaaaaaaccag

SEQ ID NO: 23438 - DNA, 1891 bp, Zea mays
  Clone ID: MRT4577_121382C.1
cccacgcgtccgcgctgcaacagatccttgctcgagcagttggcgatgacgctatattgaatggaagccatgtagtcgattttacagatgatggcagtaaggttactgccatattggaggacggtaggatatttgaaggtgaccttttggttggtgccgatggaatatggtcaaaggtgaggaagacactattcgggcactcagatgccacctattcaggttacacctgctacactggaattgcagattttgtgccgcctgatatcgatacggttgggtaccgggtatttctgggccacaaacagtacttcgtctcttcggatgtcggtgccggtaaaatgcaatggtatgcttttcacaaggaagaggctggtggcactgaccctgagaacggcaaaaagaaaagattgcttgagatatttgatgggtggtgtgataatgtcatcgatttggtaaacgcaaccgacgaagaagcgattcttcgccgagatatatacgaccgcccacctactataaattgggggaaaggtcgtgtcaccttgctcggcgattctgtccatgctatgcagccaaatctgggtcaaggtggctgcatggttactgatcgtaacaagtggaggaaactgcaatagcttgcagcctggccatttaatgtgggatgtggaaactccactcgtcagagtttcctccttctaatgattatgagcatgcctatcattgtgcgtgttgctgttatacatggactggcaagaatggcagcaatcatggctaccacctatagaccgtatttgggtgttggtctaggacctttatcgtttttgaccaagttgcggataccacaccctggaagggttggtggcagattcttcatcaagtatggaatgcctgctatgctgagctgggtgcttggtggcaatagctcaaagctagaaggaagacctttaagctgccgactttctgacaaggcacatgacgagctttatcggtggtttgacgatgacgatgcgctggaacaagctatgggtggagaatggtacctcttcgcaacaagtgaagcaaacaacaatagcttgcagcagcccattcgtttaattagggatgagcagaggtcactctctgttggcagccggtcagatgctaatgactcagcttcttccctatcattgccctttccacagatatcagaaaggcatgctactatcacgtgcaagaataaggctttctatctgactgatctcgggagtgaacatggtacctggattaccgacaatgaaggtagacgttaccgcgtgccaccaaacttcccggttcgtttccatccttccgatgtcattgagtttggttccgataagaaggctatgttccgggtgaaggtgctgaacacgctcccatacgaatcagcaagaagtgggaagcagcaggggctgcagcaagagcaagtcctccaggcagcatgaatggagacaccagtcaccatcccatcatcagcgacactgtactgtatagcaatcgggagatacacgatactccaacgcgtaaaaaagcgtaaaagatacgtcaaaacagatgtgatttttgcatccatgcagatgcgaaacaggattttgaatcctagcacctaacggatttaaatgatgaagtttcagttctacgagaggaactgagttgtacgatagggataacttagctgttgtcggactgtgtacattgttggtatcatcacccaaaatattgtacatctagaagccatattgtaattacggcacgtatacagtaacactttgatcatgtaatacagtatatagttgtttacggcaaaaaaaaaaaaaaaaaacatgtaatacagtatatatggaaatgcgtcagatagcgtataacttgttcttccacc

SEQ ID NO: 23439 - DNA, 584 bp, Zea mays
  Clone ID: MRT4577_121383C.1
ctccccctccgccaacactcaagcacttgaggcgacactgactctccagtcatggcgccatggctgctgctcctcctccgcgcccctaagcgaattttgttgaacgccctccactacttgctttctctgctactcctccatcatacacattgacctgctcaatgcgcataaccggatcaccgcctctgcgaggagatctgtatgtcacgcgacctcgccgcagaaataaaaactccgttctccgcaagaatgaaccaagcgcccacaacgcttcacttccgaccccctgcaagatctgtgtctacacagtccgagcaatgattccacactagaccaataggatcgatatacctctgtcgaggatcaacatcaaggatgccttcccggcgacgtacaacaagacctggcgtatggacatctctgacgctcttaatgttctgagggtacatcctggacacaattagctgactcctcagagagctctctatggtacgccggatggaactactcatgacatcatcatggaacttgatgaaaatcatgactagatcgtccaggatgcctactagaggaagaagcaactg

SEQ ID NO: 23440 - DNA, 432 bp, Zea mays
  Clone ID: MRT4577_121384C.1
tttgggctgatttatgtgcttgtacgggcttgactaaaagaatcatatgaacctccgtggcctacttacgtttcgtaaacctgggaggaggaagttctattactactttaacattcgattcgtccctactacggtctcggacgcctggagtggttacagtcgtagtagcgttctcccatagaaggcctagagtaccagaagacaatgcagagaagatggtggaagtggtgactgaggcgactgatctggcggtggaggtgattgagaaggctgttgatgaggccgtgtaagtgccttttggtagcgaaatctctaagtaggtagttcttaagaccaagatgactgtggacgagactgaggaagacgttgataaagtcgaggtttcgaccgagaaggccgatgagacaaagaaagaggcggacctaactgctg

SEQ ID NO: 23441 - DNA, 311 bp, Zea mays
  Clone ID: MRT4577_121385C.1
gcgggacctactagcgacaaaccgctcttctaaacaaaaacctctcagctaatatggcggaatcttatacatcgatcacaggcctctcccatggcgtcctgccaagaacgctcaccctcagcagaaccagcacagccgtgaccagaagaacgccgcccgcatatggcaacgccagtccccactccggccgacgaaccgctatcggcctcttgctcactgtcataacaagctggaccatgtcctagccctcacgcgccgaaaccgtctagaccatcaagattgaaacactcgtcttcaacgttcgcatgacc

SEQ ID NO: 23442 - DNA, 303 bp, Zea mays
  Clone ID: MRT4577_121386C.1
ccttgttgtccacttaaacatgcaccagaaataacaattggaggcattgatcagcgatgttaatgatcagggagaaccctcgtataccctagaggactttcttattaaggaaaacaaaccgcatgccatagctaagaaatgcttatgctcacgagatacaaaaatgagaacatcgaactagtgagctaatcacttgccatgacactatttccaaccttacatttgaaaggataaattgatcgctaagggcgagaaattaaatgatagtgatgaccttcttgacaaccttagaaatgataatgc

SEQ ID NO: 23443 - DNA, 289 bp, Zea mays
  Clone ID: MRT4577_121387C.1
cggctgccggcaatttccgggggcgacccacccgtcgcgcgcccgtcggcgatcttctatccgcccgtcgatgcaaagatgcagcatcttctgtcagagaccctcactggtagagactgacaccctcgtagggggagtcttctgacaccattcatcagcctgcaggccaagatccatgacaaggagggcatgcctccggaccagcaaggggtcatctttgctgggaagcaggtcgatgacgggcgcacactttcctactacaacatacataaggagagcgccctccacc

SEQ ID NO: 23444 - DNA, 154 bp, Zea mays
  Clone ID: MRT4577_121388C.1
attcggctcgagcggaactgcgaggttatatggcccctcgcgggtagctgcctcaagcggaaatgataacgcgatacggacgctcagagcccggggtccggcgattcaacatagaatactactggtcttggaggccttcatgatgactggactg

SEQ ID NO: 23445 - DNA, 273 bp, Zea mays
  Clone ID: MRT4577_121389C.1
gggcgaccacgcgtccggctttggatcgattgttttcgtaactcgtgagggactgagggtctcctattgacaggggttgtgggattctgttcgaagattttcgcacggtatcaatggcgaccgccgggaatgtgatcaagtgcaaagcttctgtggcatgcgaggccggcaagccaccgtcgatcgaggaggttgaggtagcgccttcttaagccatggaggtgcgcgtcaagatcctcttcacctcgctctgccacaccgacttttactttt

SEQ ID NO: 23446 - DNA, 301 bp, Zea mays
  Clone ID: MRT4577_12138C.1
cacatgcaaccaaacatcacaggggaggggtctacacacacagatagggagacacatacttcaaagctaaaataccacatcctgactgagctcacagccaggatgtattctctgcaactgtaagcacataacctgatcacacgcgcgtgccgttacgggcagtcatttcccgaagagcgactggaaccacaacaccccctaggagtcagccggcgcggagctgcttttcggcgaagaatctttctgcggactgctgtgcagcttgctaacctactatccttgctccttgggccgatgcacc

SEQ ID NO: 23447 - DNA, 840 bp, Zea mays
  unsure (1)..(840): unsure at all n locations
  Clone ID: MRT4577_121390C.1
cctcgaggcggcgggatccctaacctcccttcgatactggctacagttgccactcacaatatgccttctgccactcgccccagctacgcccgcaagttgaccacaacttcgggcgactatgacatgtcatacaccccagacgtccgccgcagtctcggcacctacggcctcacccctccagccgtcgagagctacgatgtccagaccgaccgatgccttcgcctccttgccatgaagcccactcccctcgagaaattccagtacctcgtccacctccgagccaccaacgtccacctcttctacagacttctcggcgagaacatcaaggaattgactcctctcatctacaccccgaccgtcggcgaggcctgcttacgatggcacgagatctggacccaacccgagggcatgtacctctcatggagcgaccgcggcaacctccgcaagatcctcgacaactggccacacgaggtcgacatcactgtcctcactgatggttcccgtatcctcggtcttggtgaccttggtgtcaacggcatgggcattcccgtcggcaaacttgctctctacacggcttgcgctggtatcaagcccgacagcactcttcccctcactctcgatttgngaaccaacaacaaggccctccgtgaggaccctctatacatgggttccaggatgcccaaggttacccccgagcaagaaaaggattcctcgacgagctcatggtcgncctttacgaccgatggcccagcattggtattcaattcgaggatnttcagaaacccttccccgcctangacgctaccagaacaatactcatggttcacgatgacgtccagg

SEQ ID NO: 23448 - DNA, 362 bp, Zea mays
  Clone ID: MRT4577_121391C.1
acagcacacaggttttgttttcacctatggagggtatggtggatccaacagggatagttcatatggtggatttggcagcacttatggtatccgaggcctcgtacatatcatgttctctaggtaccgatgaggatatggtcgttgtcatctacgggggcggcatgtatgaaggcgacatgtatggaggaatggaaggttatcgagtttatggcacgggctgaatgcgtggtatgggcatttgaccataccgctatgagcatccaaattctgagggccctactgcatgcccgccagacttgaggctatccttcctccaagtgatgcatggaggggtcaatattttaggacataaaacaatgctt

SEQ ID NO: 23449 - DNA, 306 bp, Zea mays
  Clone ID: MRT4577_121392C.1
gccgcctaacactaacaaggattgaaccgccacagttgtttaacaggagagatcaacaagggccagtgcataacatatctatgtcgtcagggcatcatggacatcagcgagcgggctgacgcagcagtcagcacgcaagactgaggcttcatactaggtgctggacggccatatcaatgtgcacttctggcggcttcagagcaacagcttcaacaaagtgaaggttgtgatcccctgccagctgcctagcgagggaaaggaagggcttgtcaaagtgggaattgctgttggcggaaatctcatagg

SEQ ID NO: 23450 - DNA, 1148 bp, Zea mays
  Clone ID: MRT4577_121393C.1
ttttgccgttgctggcagcttaaggtatgaggtctctcttacctactactcgtcagtgattgtttgtttcttggttgtcgcttgtggagctggctgctgccctcttgttgtgggctctttagatgtcgcttagtcgtcgctgtggtgctacgaatgctactctctggttgttattgtttggtgtcgctgttggtgttttttgtgactgcccactagttacggacaatgttgtttgttacttggtgatcctcatggagctactctctggttattgcttgtgtgttgttctctgggtatcagcatgttgcagaaagtaaccgttaattgtctacaggcagatgagaggagaggagctccagaggctgagcgtccaacagctacaggagctcgagaagaccctcgaatccggcctcggctctgtactcaaaaccaaggtaggtatgccctgctgatatactcatgagttggtgacagcatcagactgtatacagtacagtaatgatgcatagcataaccatctcttttcttttcttgggaaaaaacaaattgcagagccaaaaaatccttgacgagatcagcggtctggaaagaaagagaacgcagctgatcgaggagaactcaaggctgaaggagcaagtgacacggatgtcgaggatggagacgcagcttggcgccgacccagagttcgtgtacgaggaagggcagtcgtctgaatccgtgacgaacacgtcctatccgcgcccgtccaccgacaccgacgactgctccgacacatcgctcaagctcgggctaccactcttcagctccaagtgacggagatttgacatgtccggtagcggagcggtgccgattgcttgcccttctccactctagataggtctggattgggggagagcaagcactgctggatcgggaagacccaagtgaccaacgcgtcgcatcagaataaggcattttgagtgctgtatgatgtgtgtattctggctctgaaagtgagacctgcttttgttataatacatacatacaggcagcatggcaatacgtgacggggtacccgctgcctgcagtccgtgacctgtctgtcgtctctgtttctagtactcgctataatcaccctgcaattacctgtagctggtcatcgttaggag

SEQ ID NO: 23451 - DNA, 1430 bp, Zea mays
  unsure (1)..(1430): unsure at all n locations
  Clone ID: MRT4577_121394C.1
tttttttttttttgaagtcaaggagagaattttttaattaagtctgaaattcgaccacgaaacctgaagaaattactccgaagctttaaccattacacactatagtcctttttgcgttnggctaccttctcccccttctggttgttacgagaatagtttacacatcccaatttattcgtcagcaagattacaatcgaacaatagttgcattagcataatatatataaatttccgtcacaaatacaaaaataaatacacaagacctgttacgtttatatggcccagcgtaagttggcaggtgttggcttatttcctggaccggaattacggatcagagccagcgtgggtgccatttacgaggcgaaggagctgaagccggcgtcagcgccaccgccgacgcggtggaaccgggagacggcgcagtccgtggcgaagaggcccgacgagcggtacttgggcgcgccgcccatgacgggcatcttggcgccgatatcgagcttgctgacgtagtcaggacggtaggtctggcccagcacgccgtcgacgtccgcggtgaggttatggaacttgtaggaaacgtcgaggtgcacgaggctgtcggcgcccgtcttgccgtagccgtggatccggtcgtccctgtcggtgatgggcacggcgttggcggagatggcgaagacgccgtccagctccaccatgacggtgttgacggcgtccatgcgcgtgacggagagccccgggagggccttggacgcccagcgcgcgttctcgacggcgtcgacgtcgacgggctcggcgtccaaggtgagctggatgtggtcgtcctcctcgtcccactccgcggccctgcgggcgcccacgtagaggcggtggtactggtcgccgcctgcggcggaggtgaccccgagcgcctgcacccacgtgaagtcgcggttgagggccgggttgtggttgccgatgaagtgggcgttgatgtggaggcccgcgtcggagacgaggcagaagtccttgtccttgtttccgtggaagtagaaggtgttgccgtcgccgccggtgaagcgcgggtcgccgcaggaggtgccggggaagatatcacacatgcagaagctgaggcagtaggcgcagaagacgaggcatttgttagggcaatcctttgggcaacccacgtagcatgccgggccaccctcgtcggagcaggcggcctggtagtcgcgcttgtggccgaacattccgggggtgagggcgaagaacttgcatttgccggagggcttctccccgggcttcaacttctgaggcttgcccctccacgccgccgccgaggcaaccacgccacacgacgacagcgccaggagcgccaccgccaccgtgaccgccaggcacttgacaagactgctgctgctagccatggcggatagcgaggtcgtcgaagtcgg

SEQ ID NO: 23452 - DNA, 432 bp, Zea mays
  Clone ID: MRT4577_121395C.1
ctttgcctcccccctgtccgtccgcccctggtagtaggagctgtaaattggaacatgattcctattgaatgagatgcaataattgtttcatggaacactgattaaaattagcattttcattctcacctactcttcatccttatattggcttacatgcttttttggtacgtactcaatacccatcttatgaaatcgtgctcaaaggctcagattccatttcatagttcaatgattgtgattcagatgtatgatgctactggagcactaattcagtatatgtcgaaggattcttgtgttacaacttacatgagctgacagtatgatgatgaatccatctttttttgtgtcagatgttatgaggccttaaaaccagtctgttttgaacttttagttcttgtttgctgacgctcgagttaattgtagggagccaag

SEQ ID NO: 23453 - DNA, 183 bp, Zea mays
  Clone ID: MRT4577_121396C.1
ggtgcaaaaaaactaatctgcttggtgtccgtacccattggtaatgggcaaccagaatcattcatagtctttaaatcaagggtttgcctttcaaaacaaatttcttcccaagaacacatattttcaacccgcacttgaacagacttaccaggtaacaataacttacgggcctacatgaaggcg

SEQ ID NO: 23454 - DNA, 601 bp, Zea mays
  unsure (1)..(601): unsure at all n locations
  Clone ID: MRT4577_121397C.1
ccggccgggcaagtgatttcataatctatcggcatccaatggcagcaaccgccctgagaaggacaatcctccgggggacggcggcctgcttcacgcgcccactcaggatcacggcttcgccaaggaagaccagtgtcangcccgcatgccaacggcagactgctgcaccggcaaggcacctacaaggcacaacctgagcatggcggagggcgacgaggagctgcggcgcccgaccaaccctacatactggacttccgcagagactaaggcatcaacatacccttctcatgccgtgcgccgtcctgaatcctcctgcgtgcacttgagggaagcctccatgctcacagcgatcattgcgcacacagacatttatcacatgacaaccaggatcgcacgacggcttgcatggtcacatgggctgcgtacccgcacgctgcgacagccacatcgatacgcacagagaggatagaactcctatgaactctaatatagctatgacaccgcctaatgtcgcgctgagtaagtgccaccatcatgaagtaccggccgcctataatatgagacatgacaactcaatacctcgagcgataaatatatatac

SEQ ID NO: 23455 - DNA, 273 bp, Zea mays
  Clone ID: MRT4577_121398C.1
cctaattccagcaaaaggtttttgaatcccgttaacctccccaaaaaaattcccctgttcttttaaattcccctttaacccccaatagtttacatccggcccaaagctttatcattcccaccctaccaatttggggtaaaattggtcctagctttccaggttcccctaaattcccctgcaaacccctttataaaaaaccttcccccatttccgatcagggcttttattcccataattttctaacacaggttccacgttgtcccaaagtctttt

SEQ ID NO: 23456 - DNA, 456 bp, Zea mays
  Clone ID: MRT4577_121399C.1
cccggccttcttcctccgccttcccttaacccccatatcgccatacacttctccactcctcccctgattaccacccccggcccccgcctcgatccaatccggttttttcttcgattcggcgcgtggcaacctggtcagtccaatccgtccgtgaagaatttatccgtattttcgtttgcgtcgcatcgtttctgcgaaggatttcctgttcgttttgggggagaaaggcgtcgtccttgatgtctactatcgcgaccccgccgccgccgattgcgcaagagaaggccgccagccggaataagcgcaagtaccgtgccgagccaccttccaccgagttgggcccatacgggctggagtacccgctgacggcggactgcatgggattcgagtttatgtcgcctgagaaggctgccatggcagcagcggtagccgctgccgagggtgtcagccttgacc

SEQ ID NO: 23457 - DNA, 223 bp, Zea mays
  Clone ID: MRT4577_12139C.1
tttctcatctgcccgatagacatcatgcaagggaggggtcttaacaaagggacggacggcaactggcgagagaggttcgggctaggcctcgtggaggacagtgttggtctccaatgtccctctcattgcaacagtgctcgacattaaggggttctttaacttgtcaggagatattgatcatgtcaacgacagacagtggcagataagtgccaccaacttgcat

SEQ ID NO: 23458 - DNA, 193 bp, Zea mays
  Clone ID: MRT4577_1213C.1
ggaaaacaaggttcttgtattttttattctattactggacagaatgggaagacatgggtagagattatttttctacgtatgtccaaattttgacacctcattcttcattatagggttaattgtttatgaaaacttgtcacagatcacgcgcaacgcttagacgggaacgagaccatcaaagatgctaccaaaa

SEQ ID NO: 23459 - DNA, 539 bp, Zea mays
  unsure (1)..(539): unsure at all n locations
  Clone ID: MRT4577_121400C.1
gcagcagcagcagcangcagcncagcaccagcagcactggggggaaaagctagaggctagagtcatggatgaccagcgcgacctacctctaaccatgagcagctgcccatcctgggccagcgtgctagagccccagaaagcaattgcaaccgtggagtcctgtacaccagtgtctctgtcctggtggctctgctcttggctgggcaggccaccactgcttacttcctgtaccagcagcagggccgcctggacaagctgaccgtcacctcccagaacctgcaactggagaaccttcgcatgaagcttccgaaatctgccaaacctgtgagcccgatgcgcatggctactcccttgctgatgcgcccactgtccatggataacatgctccaagcgcccgtgaagaatgttaccaagtatggcaacatgacccaggaccacgtgatgcacctgcttacgaagtctggacccgtgaactacccacagctgaaggggagcttcccggagaatctgaagcaccttaagaactctatgaatggtct

SEQ ID NO: 23460 - DNA, 167 bp, Zea mays
  Clone ID: MRT4577_121401C.1
ctatctatctctttaaatacaccacataggggggtgacttaaagcattggcgggtgtccaacaacatacataagagaagcagaacagctggtggtgcaaactcataaaaccaacgtgtcacagacacaaaacaaatctgtcaagagaccataacgtttttcaccccc

SEQ ID NO: 23461 - DNA, 321 bp, Zea mays
  unsure (1)..(321): unsure at all n locations
  Clone ID: MRT4577_121402C.1
cagaacaagcaaaccccggccgggaggaaagcagcgagcgggcaagggccaggcgcagaggggaaaggccagagggcaagccgggcaccacacagaggcnaagggaaaacgagcggaaggcaagccgggaaaacaggcgggagcaaaggccaccgccacaggccccagcnccaccaaccagcaaaaagcagaagcgcaaggccagcaaacagagaagcgagacacaaaagccagaacggagaaaggcacaaggcgaccagaaaaggaaccaagcaccaagcccccgaaggaaacagcggggaagaanaaaccagcagggac

SEQ ID NO: 23462 - DNA, 1199 bp, Zea mays
  unsure (1)..(1199): unsure at all n locations
  Clone ID: MRT4577_121403C.1
ctcgaggccggccggggaagctgccgctaaaccctaaacccagcaccagcgcccccaatcctccaacttccactcgagtagggttctgccggccgtttcctcgtcgtcgcaatggagttctggggtgaagaagtgaagccaggagccacggtttcttgcaaagttggtgatggtttggttatccacctttcacaggctgccctaggggaaccaaagaaagcgagtgagaatgccattgtgtctgtcaaaattgatgataagaaactagtgcttggaaccttatcagttgagaagcatcctcaaatctcttgtgatctgaataatgaaattaaaatttctactgcaaaggttcccgtgaaggttggtatacaaaatgctgatgaagatgaaacttctagtggtgatgatgatgatttcactgatagtgatagtgaaatgtctgaggaagatgagtccagtgatgaagatgaagtgtcaagcgatacagatactagtgatgattctggttcggaagaacagacacctaccccaaagaagactgaggtagtagttggcaagaagagggcaattgaagctgagacaccttctggtaagaaggctaagtctgaacaatctgctcagaaaacaggcgacaaggtctcaacttctcatcctgcaaagcagtccagcaagactcctgcagacaaatctacaaagacccccacagcaaacaagaagtcccccaaatctgggagccatgcctgcgagtcatgcagcaaatctttcggcagtgcgtcagcacttgagtctcatcagaaggcaaagaagcatgaagcctagagcacgtgctataccatctactcgttatcaaaatcagtggtcttatttttgaacttgaaaatgtccaagtttggaacttgcccagtagtcatctgattagtggccttatttttctttgaacttgggaattgtctagtttgggacatacgcggtatgccttgttaagaacatgggaaatgtcaggttagaacaggtcctgctggcccagttttggtcgtcgtcgaatgttgctaatgttggaactgattattgtgacccgtaaggccgtaagggagtatctttgttatctggtagtgcctagtgcaaatcacatttttcttcanaaaaaaaaaaaaaaaaaaaaaaaaaaaaagggaaaaaaaaaaaaaaaaaagcggccc

SEQ ID NO: 23463 - DNA, 1398 bp, Zea mays
  Clone ID: MRT4577_121404C.1
acttcccccggccggggacgctgccgctaaaccctaaacccagcaccagcgcccccaatcctccaacttccactcgagtagggttctgccggccgtttcctcgtcgtcgcaatggagttctggggtgaagaagtgaagccaggagccacggtttcttgcaaagttggtgatggtttggttatccacctttcacaggctgccctaggggaaccaaagaaagcgagtgagaatgccattgtgtctgtcaaaattgatgataagaaactagtgcttggaaccttatcagttgagaagcatcctcaaatctcttgtgatctggtatttgataaagattttgagttatcacacaattcaaagacagctagtgttttcttctgtggctacaagtcacctgttcctctgtttgagtctgattctggtgaagatagttcagatgaagaggttgaacccgatctaattccaatgcagaataatgaaattaaaatttctactgcaaaggttcccgtgaaggttggtatacaaaatgctgatgaagatgaaacttctagtggtgatgatgatgatttcactgatagtgatagtgaaatgtctgaggaagatgagtccagtgatgaagatgaagtgtcaagcgatacagatactagtgatgattctggttcggaagaacagacacctaccccaaagaagactgaggtagtagttggcaagaagagggcaattgaagctgagacaccttctggtaagaaggctaagtctgaacaatctgctcagaaaacaggcgacaaggtctcaacttctcatcctgcaaagcagtccagcaagactcctgcagacaaatctacaaagacccccacagctgacaagaagtcccccaaatctgggagccatgcctgcaagtcatgcagcaaatctttcggcagtgcgtcagcacttgagtctcatcagaaggcaaagaagcatgaagcctagagcacgtgctataccatctactcgttatcaaaatcagtggtcttatttttgaacttgaaaatgtccaagtttggaacttgcccagtagtcatctgattagtggtgttatttttctttgaacttgggaattgtctagtttgggacatacgcggtatgcctggttaagaacatgggaaatgtcaggttagaacaggtcctgctggcccagttttggtcgtcgtcgaatgttgctaatgttggaactgattattgtgacccgtaaggccgtaagggagaatctttgttatctggtagtgcctagtgcaaatcacctttttctcagttgttaaacatcttgcttttagtgttcgttttaaaaaaaaaaaaaaaaaaaacaagtgctgacgcactgccgaaagatttgctgcatgacttgcaggcatggctccc

SEQ ID NO: 23464 - DNA, 611 bp, Zea mays
  Clone ID: MRT4577_121405C.1
tcctcgtcgtcgtccttgctcgccggcgccttccggtacgccaggtacagcagcagctgcgccgtgcccaggacgaggccgatggcgttggggacctgtgtgcgtggtggtattatacgtgtacatatgtgatatgtgtgtgtgcttgcgagtagatcaggaaatggagagggtgtgaagcaacgcggacgctgtacgcaccccgatgaagtagtccttgacgagcagggagtagatgctccagacgccgccgttgaggaagaggaagaaggagagggagaagggcatgtactccacgctccgggtcttcaccaccgtccgctgcatgcatggagtttgatgtatgtatcaccccagattactagtgctctattgtaaatgtcagttgctggtcatatatatttttataccaactagaattaatctgtggtacatagacaatatatataatgcattattttaagtatactactcagcctactatctcgagcagcttttctacccacatcactatattcaatctttattctacgtacaatatatacagtgcaaaacaaagttttaggtgaatatataggtgaactgctaaagacggtacacatctaatttta

SEQ ID NO: 23465 - DNA, 324 bp, Zea mays
  Clone ID: MRT4577_121406C.1
atcgtatcatctaacctgttcagcaggctttttctattttcgcagcccggtttgccgaccaggttccagggttccagagtagccaagctaatcccgagtatcgttcgcgcgatggcggaggagcattccaaccctcatccccagcaagctgtggagagggacgttattgtggagcagcaccaacatcctaggagggccccgaaactgaggtacctggacttcgtccaagtggcggtggcgcaagccgcgatgtgcctcgctgggctctacggtctctccaaggaccacgccggccctttccgacccagcgttgacaccgtctag

SEQ ID NO: 23466 - DNA, 720 bp, Zea mays
  Clone ID: MRT4577_121407C.1
tttcctcgagtttttttttttttttttttttttttttttttttttttttttttttttttttttttgaaaaaaaagacactccaggggggggcactacttttattgggaactgaaggggttttttcccgacccaaaaatatcaaaacaggggtggggaaatgaggtggtttgttttcgggtttgattacggggtattttttttatttgggggggggttacccaagaaaaaaagcggtgtgttccgcaaccccatgaaattcaaatccataagcttccccggcctgaaaaaatgagtccgttggggtggccccatgggcggactccctaaccgggggggggccggcgccgagcttaacttctgacctcagcacgttggtttcccttgggtgcgatttcaaatgacaggccaaactcccttggccttgcttttcccatgggtttgggtgccgtgccatacgagggtctgggatgggctgaacaggattgggaggggcatcgttactttcctacggcacaaaaaaaacggtggggctataccacaacaaaactgggtggttcatatggagcccccctcttcgaatttaactaggaatccagacttgcttttatatgggcggggcgcccacccctttgtttccttgccctgacctccatatttggtttggggaggagaggcaccccaggggccacagggccaggtttagggccccccctttttaa

SEQ ID NO: 23467 - DNA, 719 bp, Zea mays
  unsure (1)..(719): unsure at all n locations
  Clone ID: MRT4577_121408C.1
ggtaccctncgcgggccgtgccgggnaaaaagatcccatttccactcctgcctgttgtctgcctccaaggcaacagttttagtttgcttgcgctctcctgccttcggttcaccgcctcgatctccatgaatgcaagcaagccgccttttaaatacgaggctctcgcttgttactgaagctgcgcggcgtcttgtgccttggaacctgccaagtgccaactgccattggaggggtttctctacagtctacaaatacgtcgcgcgccatggacggcgactcgaagaagctgagggtgtggttttctggagtaggaaagggaggtagaggtgaacgccagtcttcagcggtgccaccgcaagaaagcgcgcctattggaagagaaatgaacagcagcggggaatttgatgctgcattcgcagccacaattgcagcagcagcatttgcaattgctgcccgtgaagagaagcttgcagctcagaagaagtatgtccccatcgaggaggtgccacgacccctgtcgctagtcaagagagctggaagcaccaaaaaacctgcgggaggcaacaaaatctcaagatggtttagcggcaaggagcctctagaacacgacgacgacggtccagtgaggaggcctctgaaaccagcacctggaaagcccgagggtatgcctgcagatcacaaggtggcacccaagattcttgagacttctctgagtgcga

SEQ ID NO: 23468 - DNA, 275 bp, Zea mays
  Clone ID: MRT4577_121409C.1
ctgcctcgctcttccccctcctatttaccgcccgcgtcgaccgccgccgcacgccttcccacccccgcgcctgcctctgcctgcctgctccccgacgccggggggccccacaacgatccggccccggccccgcgcggtcacagcaagccgggacatggcgcgcggctgtatcgcccgcctactcgccacgctcctcctcttcctcctgctcgccacgcccctcgcagacggcgcttccgatgcagaggctgccggcctcgcgcatggcgcgtccg

SEQ ID NO: 23469 - DNA, 339 bp, Zea mays
  Clone ID: MRT4577_12140C.1
gccacacgtaggctagcttccttctttacacaacaactgtgaatgctggctgaccgactatttgcggctgatcgagcatcatcattacatctgcacacatttctggcctatggaccgcatgctttccaactctcatcgacctaagagcatcaacaggggatgctgaagaacctctgtgaaatagcatattaccaccaattgagtattgaagctacctgcatgctgtctggggcgctccagcatcttaaattaactagctctggctttatataagaagcaaaacaggggcaagcatcatttggttccagaccttcgtactctatcttgcgagtttatagt

SEQ ID NO: 23470 - DNA, 2065 bp, Zea mays
  Clone ID: MRT4577_121410C.1
acccgggccgcactcacacgcaaactctaaattcgtcccacgcgtccgatcagaaagaaaatatcaactagactagatcgaattttaaacatggcgcctcctcctccagcgctggcagaggagactgctgccttccacccaagcctgtggggcgatttcttcctgacttaccagccgccaactgcgcctcagcaagcatgcatgaaagaacgagctgaggttttaagagaagatgtcaggaagattttgatggggccatgtgagttaccagagacactgggtcttatattgacgttgcaacgtcttgcactggattactactacgaaaacgagatcgacaagttactccactgtatttacgacgacgacgactctgattacgatgataaagatctaaacctagtttccctgcgcttttatcttcttcgaaagaatggttacgatgtgtcatcagatgtatttctagtcttcaaaacagaagaagggagcttcgcttatgctgatgacacggcaagcttgttaagcttgtacaatgcagcgtacttgaggaagcatggagaggaggtactggacgaggcaatttccttcgctagacgacgttgccttgaagcaggtatccttcgcacccctcttttcagaagggttgggatactagaggcgagaaattacatacccatctacgagaaggaggcggcaagaaatgacgccgtgttggagcttgccaaactgaactttaaccttcagcaaattgccttctgtgaagagctaaagcattgcacattgtggtggaaggatttccttgccaaatcaaagatggcttttgttagggatagaatagtggaggtgtatttctggatgaacggggcatgctatgatcccccgtactctcgttcccgaatcatactaacgaagatcacatctctcgtaacaataatcgatgacatgttcgacacatatggtaccactgaagactgcaccaagttccatgaagcaattggcagatgggatgaaagcgccctacctcttcttccacagtatatgaagggtttctacttatttcagttggagacatttcgttcatttgaagatgagttggggcccgagaacagctatcgtgtccattacctaaaaaaatcgatggagcgtctagttcagcaatactacagggaaataaagtggcgtgacgaaaactatgtgccgaaaacaatgaccgaacaccttcaagtgtcaatggaaagcataggatccgttgctctagcatgtgctgcatatgttggaatgggtgacgtcataacaaaggagacccttgactgggttttgagctatcctcagtttctgacgacttacggtatcgtacgactgtctaacgatgttgtatcaacaaagcgtgagcaaacaaaagaccatagtccctccactgtccattgttacatgaaggagcatggaacgaccatggacgatgcatgtgaaaagataaaggagcttatcgaagattcatggaaggatatgctacagcaatcccttgcgctgaaagggctcccaaaggctgtgccacgaacagtgtttgactttttaagaaccgcagataatatgtacaagaattgcgatgcgttcacttcttcagaagtactccgagaaatgatacgactactgttcgtggagccaatacctgaataatgaaccgaagctgcttgcttgtcagaaaaaaaaattatatatgtgcttttgaaataattgtcacagtcatgtttgaggacatgcgtggtgtgatattatgttacacgagataaagtcaacacctacatatatagggttgttgacacaaataattgtactgtgttcttggtctagcgtagtacaacagtcctaatgcttaattgttcacaggttatatttggaaacaaaaaaatgttaccctagctataatttttttgtactttgcatggattctcagataataaagaactgggtttcccttaaaaaaaaaaaaaaaaaaaaaaaaaaaaaaaaaaaaaaaaaaaaaaaaaaaaaaaaaaaaaaaaaaaaaaaaaaaaaaaaaaaaaaa

SEQ ID NO: 23471 - DNA, 269 bp, Zea mays
  Clone ID: MRT4577_121411C.1
gcaagacttggaattcgagctctagtgatcacatgaccattacgaggaggacgaactcccaatggacatggtacatggacaacagacgtgagcatccaaatgaagttcaagcagccatgaacgacccaaaacgagatagctggaacaagaactagggacctctacaaatgtatggacgctattgagtgataagggattgctacaccagtacaggaagctactgaattaacaaaaccccttggttgaagccaagcacaaatacctaacat

SEQ ID NO: 23472 - DNA, 606 bp, Zea mays
  Clone ID: MRT4577_121412C.1
ggccgcttttttttttttttttttctttttttttttttttttttttttttttttttttttttttttttttttttttttttttttttttcgagtcaattttttatccaaaaaaaagaacttgcaacttgattaaatttttagggtttaaaaaaaattaaactccaacaaaaccatagaccacgggaaaaattagcagccgaaactttacacccccacgccaaagagggggaaccgtcccgaagggaaaccctttccccgggaaggcgaaagcccgggggaaggcccaaagccacagaaggttatggccaaaccaggggcgacaaacacaggctggctcgagggcccggggggcccacgccccttcgagaagcacccaaccccttgcagggacccctacgtacccccccccccgggagcgcctatacccagggggggggggatcatgccggtacacaaaaccttgacccccgagaggccgaccccacaccttgggccctcgccaccgcaggggagcccaacggcctccgggccgcaggagcacccaccgacggggttgcctgtcacatccgggacccctacctaccacggcccactagggggacacac

SEQ ID NO: 23473 - DNA, 908 bp, Zea mays
  Clone ID: MRT4577_121413C.1
cttcccatttgtccccgagccaagcagccaaactaagaaagacccgcgagaacacgcgctccgcagtccgcagtccgcacgtctgaaatccaggaccatcaccaacccaaagccttgcgccttgcccggtccccgccttttcggagaccgcacccaatggccggctcaaccaaggtgctggccgccatcctgctcgtcgacctcgtcgccttcggcctcgccatcggcgcggtgcagagccgcccctcggcgaggctggagacggacgagaggcaggagtggacctactgcgtgtaccgcacggacgccgccacggcgctgggcggcgccgcgctcgcgctggtgttcgtgggacaggcggtggccgccgccgccagtcgctgcttctgctgcgggtccgtgctgcggcccggcggcgccagggcctgcgcgctcgtcctcttcatctcctcctgggtgacattcgtcatcgctgaggcgtgcttgctagctggtcttttgcaatccgcctaccacactggctaccggaaggtgtttttccagaacccgccggactgcgagacggtgcggaggggcacgttcggagccggcgctgcgtttgcccttttcacctgcgtgctcacctcggcctactactactgcttcttcaaggcgcggatctactaccaccgcccggaagccgccatcggcatgactccgttgtaaacagatttaccggtctctctgcagtaacagttttgatagcaactatatatgtctgttagggttttgcatatattatgttgggctggtatgtgacagtttttcaggaccatgtatctgactgagttgaactcaatgaaatatgatggctgctggtgctggaccggctcatccttagttccaaaaaaaaaaaaaaaaaagcggcc

SEQ ID NO: 23474 - DNA, 451 bp, Zea mays
  Clone ID: MRT4577_121414C.1
acaagcttttttttttttttttttttttttttttttttttttttttttttttttttttttttttttttttttttttttttttttttttttattttttttttttaattttttttttgagccccaacaaaaaaacccacctaaggggggagcaggaaacgggccaaccctaaaaaaaagggccccccccctgggggaccctagtggggaatccaagctggcggcctggggggactaggggttccccacacgaaatccctattggggttcgtaatccgatcactgttccctgcgtaaaaaagttggaagctcaaaggggaaaaaagggggggcccaatgagaaaaaaggggaaaacctaaggggctaatgtcaattcccaaaacccgaaggggaaaccggccgaaggaacggttttaaagaatggaacaaggcggggggagaggggggatgaaa

SEQ ID NO: 23475 - DNA, 345 bp, Zea mays
  Clone ID: MRT4577_121415C.1
cccaagcctccggtcgtccccctttcgcccgcggccccacccgccatgtcactcgcgtacacgcgcataaagtatcgctccagaaacactatggcgcggcagtcacccgtccgcctcagcgcagcgtcgggctcatgccgcatggcgccacaagccgcgggtgtccaccactgctgtggccgcgctcgagtaccgacctcgcgacctgactgggagattcaggtcacgtgcgatgacgcgaagatacgcgatgcgctcgatgctgcatatcatcaccgcaatttgcgccacttcaaaggagaacctacgggttacgacgaagagcatgccgagcaggggcctgac

SEQ ID NO: 23476 - DNA, 616 bp, Zea mays
  Clone ID: MRT4577_121416C.1
attccagctaggcaaatggcttcttcaaggatacttgctcagcaactgcaccagtctctcggacgtggaggtggcggtggaagggaggcccgaggcgagaacccccggtaagaccatccgctactcccccaaggggtaccccgaaaggccgcgcatcaagggccccaagccccgttccgcggagggcgaggacgaggcgctggagcacgaggaaggggcgtgcttctcgcccacggggtcggcgccccccgcgtcggacggcgtcgtcccgtccttctgttgaggggagaagacgacgacgaccccggcagacggctccttaactttgccagctctgtcgaccctgaacctttttttccctcccctcttctctcttttgatcgaggggttgccagctctggatctgaaattctgaacgcatgggacgcgagctgtgtgtagcatgaataactgcgtagtttgttggatggacgaactcaatcgcgctcgcatggaatggaactcttgtaatccaccctttgtacattaccatctagagttgctccttttttccatgagccaaaaaaaaaaaaaaaaaaaaaaaaaaaaaaaaaaaaaaaaaaaaaaaaaaactcga

SEQ ID NO: 23477 - DNA, 305 bp, Zea mays
  Clone ID: MRT4577_121417C.1
gggcccccttaaaaaaaaattttgagaaaaaaattttttgtttttacaaactcccccttttttttttgggggggtaacccaaacccattcgggggtgtttcaaagggttggttccattttaaaataaaaaccgggggttaaacatgggcggttttttttaattttcccaagggggcttggttttttttcacaggttttggcccaaaattggggccgcctttaaattaaacaaccccctttttgttttgaaaggggggttttttttttacccgggccaaggtccccttttacggccgaaagggggg

SEQ ID NO: 23478 - DNA, 609 bp, Zea mays
  Clone ID: MRT4577_121418C.1
attgggaccctcgaggccggccgggagatcctatcacgccggacgcgccgcagccgcgaaccacatcgtgacatccccgcacgcctcgcctcggctcggcttcgcaacccaacccaagcagatagcttggcgtctaacacatcgtctgcaactgcaatggccaccacaaccacgcgcgacagcgtccctcaccacccggtcccccgccgccggcaagcggtttgtcctctcgtccccgtgcctctcattctcctctcaccgcctgaccatcgccggcctccgccatcgacaccacaccgccgcggcgtcgaggacggcgaggaggcgggcggcgtccgcgtccccaatggtggcgaccatcgcggtgggcgacaagctccccgacgcgacgctctcctacttcgacccggctgatggggagctgaggatggtgacggtggcggagctgacagcgggcaagaaggcctccctgttcgcggtgcccggcgcgttcacgcccacgtgctcgcagaacacctgccggggttccgtggagaaggcgggcgagctgaaggcgaagggcgtggacacagtggcgtggcgtgtcggtgaacgacgcgttcgtgatga

SEQ ID NO: 23479 - DNA, 487 bp, Zea mays
  unsure (1)..(487): unsure at all n locations
  Clone ID: MRT4577_121419C.1
atctgaacaggttaggctaaaaattaactaagggtagacgaatgttcataaacggagacactactggtatatacatctctttcatgagctgggatatcacatactcctacgacacatgcacattattatttttatctggagaagcggacactgggaggccctggctaggaggaccagaactagtggtacttatatcagcacaaggacaagaaggacccgacgggcacccagtccaaccgcgccattgacgcctggttctggaagggaaccgcttgagcaaacacatttacgcatcaacttgcgaggggcggtgtgcttgatgaacacgctggtgtactacaacggcagagcttcctttggccactagntcgattggatcatgcaccattaccgcctgcaccaagggtgccaacgtacgttagtttatccagccgtgatgctccatgctggactgcaccttaagatggaaccttcctgcatgacctta

SEQ ID NO: 23480 - DNA, 310 bp, Zea mays
  Clone ID: MRT4577_12141C.1
ccatgcggacggacatcatgagctctcatgccgacccactatccgtggatgctgcaggacgatagagggcaggtactccagattattctaacatatgctacggtctggacaagtgttgatctacctggcctattgcagtcacatgtcccccaccatattttattagacacccctggtgatgaagaacacgcgcaactgcggctttagtgggacattacttggtgacccattacacatgaaggctgctccataccttacgaagatatccacgtatggaggcacggccatctctgtctcgtttgatgaacag

SEQ ID NO: 23481 - DNA, 197 bp, Zea mays
  Clone ID: MRT4577_121420C.1
gacccacgcgtcctcccacacgtactcttacatgtacaactattttacctcaaccaacataccttatccattagtatatgtttaatctccaataaccacaaacctatacaaactatcaaatttcattacattcacaactctctcccatatactatcatccaaataaacaatctcacttttcatcctgtcactccaaa

SEQ ID NO: 23482 - DNA, 350 bp, Zea mays
  Clone ID: MRT4577_121421C.1
gggggaggaaaggcaaacttaaaaaaaaaggggcaaacaacccgggggggagggtggcaaaaagccctaaaggaaacaaaacaacgaaggccccaaaaaacacccaatggcaagaaaaaaaacaggttaatttggcagccttcggaaatccggcaaagagaaccccccgggagcccacggacaacagctacccccaaggaaaggcagggccgaaaaagcggcaggaccaccccccaatctgggggccccaaaaaaccaaccgaaccaagacgggtacaccccccgggagggcagcaggcccggggcccggcacccctcaaagaacaaatcccggaaagcccgcgcggggc

SEQ ID NO: 23483 - DNA, 203 bp, Zea mays
  Clone ID: MRT4577_121422C.1
attgaaacaacgacacatataataataatgcaaaagaaagtacaaaccaaagcgtttgctcacacagcctaacatatatactccactactagctagcaatacgagtttattctagtgacctatatcacgaacaaaggtatgaaagaatcatatctagtgtataagttgcttgctcttatattaagcacttttagtacaatcat

SEQ ID NO: 23484 - DNA, 636 bp, Zea mays
  Clone ID: MRT4577_121423C.1
gccggccgggtcgggatccccctacccccattccaaagccactgcatctaccaagctgctgagctacccaccctcacctcactcacgaccacacacccaaccccgacgaggtctccagccacatcgaaaaagatcccgacgtgtggataccacaaagcgcacctgcgcattggattgcctctcctgccctgaaatccgacatagggttctgtcccccacatgatcaactgcttcctagctgaagtagacgagatcatcgagttcccagacatgctcaacctgtatcgttgtcaaaagacacctacatctagtctcaataacagctcataggatggccttccgcctggcgtgacgagggacactagaacgaacttcatctgcgggcgctctgagactcctgcagtggcacgagagatattggcaacagctcaactgtggactatgacaacgaaatgatactgagcattgtgacgaccgacgatgacgttcagatgaactatgagaaatttgaccagcgcatacatcggacatagtgagccacagataccatatactgaatccacactaaatcctgcgtaggataatagccaagatgagactttatattccatcgacttctatgagaaattctgctat

SEQ ID NO: 23485 - DNA, 228 bp, Zea mays
  Clone ID: MRT4577_121424C.1
acggacgcaccatcacagggtacaatctgtggcaaccattgttgttgccggtctgatgctgcatgactccacagtacagagggcactaacagacgcagttgttgcctgatggctgacaggctcatatagcaccactcgtgcttgctgacatgcccgctatcagaaactgctgcaattggtgaagacgcaggtatgcaaccacatatgccacaacaagcgagttggatg

SEQ ID NO: 23486 - DNA, 142 bp, Zea mays
  Clone ID: MRT4577_121425C.1
aggaacaaatgttctttcttggtgagtagagacagatgtatgtactatctatctatacacaaggactgatgcgtgtgaaagaacacaagtgttggggatcaccatgccatgactgaaaactcaatctttcctgcttaaggaa

SEQ ID NO: 23487 - DNA, 392 bp, Zea mays
  Clone ID: MRT4577_121426C.1
cccacgcttccgccaacgcgtccgggtttttgtccaggtggctggccagaaaccattaacgggttgcccaagcctggcggggtaaatggcttttttggcaggcggttttccttggggccaaaccacaccttgggggtttaactgggcccaggggtgggacccaagcttgggaaaggagggaccatttgggtttttggttttaactaggaaggaggtcccaggattttttagaaaacgggaccaggtttgggcctgccttccttggttgtaaccttagatgactgaaaggtccctttacctttggcggccagaccatttggcctttagtttttgcatggattatggggaggtctgttatataatatataatataaatattttatttatttata

SEQ ID NO: 23488 - DNA, 846 bp, Zea mays
  Clone ID: MRT4577_121427C.1
aaactgaatccatctggccattccagcccacgagcacttcctcttgcacctcctcacttccacagcaccacacgcagcatacccctaaaaaaccacatgcagcagacttgtctagggctatcccgccgccgccgccgtccgacgctggggctcgctgccgctggggtgtgatactgcaaccttcgtttctcgatggagaatagcaccggcttcctccttccagatctttgcatagctcgtcctcctggccgacctcgcatgtgcgccgccaccttgctgccatcccggcaagcgtcccgacagccgccgcttgcctcttcattctccgcccttcctggctgccctctgccttcgcctgcttccgtgacgtcgcctccaatattgcaaaggtttcttggacttagataaagcgatgtttagaaaaatcagtgcaacaacatcagctccaaggctagaaatatgtctctatattgactggaacatgttgttgtcagatgggcataatggtatccgaggcaagaaaactcgcactccagagtgctgccctaccacaatctctgcatcaattgcatttttctgaaatccacgtacgactagtctggtgccgttgcagagcccattagcagggtcgatgttcctgagtagtattattggaaaaaaaattagcttcggcatatgtggaggcagtccatttggggttagggtgtttaggaattctggttgatagtagttatgtcggtcgtcttctacagaatcgaagttgtggtacaccatctcctccccctggaagcgatcaatcctttttaggttgatcttgtctacgcagtcattccttgtgggataaat

SEQ ID NO: 23489 - DNA, 395 bp, Zea mays
  Clone ID: MRT4577_121428C.1
gattactggactggccctgatcatgatgctggagaaggtggttgatcctatggagaggatgttccttgagcggattggcgggttcattttggcggccacaatgacctgacaagagatgtgtatcttcccagactagtgcgactagtgtgatccgaacataagccacacgaaatgcttgtactgaaggaaagtactgtataggactaccgcaatttcaattagcgacgacgttattctgaaccgtgatactattagtattcgatattgtgagagaatatagagcctgtagctgccaaacttgatggtgcatgtaagctaggatcagatgatgttgtacaggacgaaccacacgtactgccaaaaacatttatagcatgaggtgatcaagggaacat

SEQ ID NO: 23490 - DNA, 498 bp, Zea mays
  Clone ID: MRT4577_121429C.1
gaattctctgggggaggtatgggtgaactatctcttgctgatagggctactatcgcaaacatggcaccagaatatggtgcgactatgggtttcttcccagttgatgcaaagacattggactacctgaagctaactggcagaagtgatgaaactgtggccatgatagagacttacctccgtgcaaataatatgtttgtcgactacaagcaggttcaagctgaaagagtgtattcatcttatctggaacttgacttggatgaggtggaaccatgtctgtccggaccaaaacggcctcatgatagagtgacattgaagaacatgcagtcagattggctttcttgcctggacaacaaagtagggttcaagggttttgctgtccccaaggaatcacagggtaaagttgctgagttttcattccgtgggacgccagcaaagacaaagcatggtgatgttgcaattgcggctatcaccagttgccccaccacatccaatcctact

SEQ ID NO: 23491 - DNA, 810 bp, Zea mays
  Clone ID: MRT4577_12142C.1
cgggttccttagcactgatttgatcgaaaggatgttgtgtcatgcgtaatcgaaaggatgttccaattcattatcatgaacaggtgcaacactggtacatttaattgcgttccgcacagatttgatctcctgtttctttggctgttagcttgcatgctggttagtacatatttgtgcttgtagcccattgctgagaccactgttgaaattgaaggtgcgtctcttgttttttagttttttggttgttgcgattgtgggaatcctcttctttgtgccactggctgactagaaaagttgatgatgttatcaatgtgaggtaattcagctacttatttgattcactcttctgcttaattttaattcatgagagatggtttaaaggggctgccataatgtgagcatttttatcttcctttttaaattctagcggacaccagaagttgagtttgttctggtttaacatacataatgtgttcaagctgttgtttcaaatacataatgtgttcaactacttatttgattcattcttctgcttaagtttaacatatgaaaacaatttttttataacagtataacacacatttgtacataagttatcgtgatgacaaatttagcctactttaactgttgtattaagacaacatcattctgtatcactaaaaagtatacaagtacaagtctcttcagagatgtcttctaagctcttcagcaagttatgcgtcaaagaagaaataggataggaattttgagtctcttttctttgttcccgtaatttgtactctgatcggtgaagcatagtctaagtactat

SEQ ID NO: 23492 - DNA, 379 bp, Zea mays
  unsure (1)..(379): unsure at all n locations
  Clone ID: MRT4577_121430C.1
tggcttggaacctttgggctgatttatgtgctctgtttatgtgcttggatcgtgtacgtcgactcctctggtcgtgtgtgtgggtaactagagttgtggtatagagtaccgaacctatctggggctggcgggctagtctagtgtggtggtgattccgagacgagctgtgtggtgtagataggaggggttgggggtggaggtgtggtgaggtctaaggtgctngtgggcgttgtctcctctgcgtggtactccgagtattcgtatgtatttcgtgtcgagtttgatggtgatgtttaatgataacgcggcgttggggagtggccgtggtggtctgggtatgtttcgtgttgaggtgctcgctgtgccgttggcggtggcg

SEQ ID NO: 23493 - DNA, 675 bp, Zea mays
  unsure (1)..(675): unsure at all n locations
  Clone ID: MRT4577_121431C.1
aattcggcacgaggctcgctcgcggctcgcctcctctcctccgctctgcaccgcgcgcctccttctctgctgcgggaaccgggaactgcggcggcggcggcggcttaaaccctcgagcccgccaccggcttaaaccctcgagctcgctccaaggccgtcgctggtcgatcgggctgaagaggcagaagccagccaatggcccccaaggccggccgtggcaagggcaggggcggcaaaggcgacaagaggaagaaggaggagaaagtggtgcccagcgtggtagatgtcacggtcgtcacacccgacgagtcccaggtgacactcaaggggatatccacggaccgcgtggtggacgtgcggaagctgctggggtcgaacgtggaaacgtgtcacctgacaaactattcactctcccatgtggcgcgcgggcaccggctggaggacggcgtggaggtggtggcgctcaagccctgcgctctccggatcgtcgaagaggagtacgcgacggcggagcaggcggaggcgcacgtccgccggctgctggacatcctcgcctgcaccaccgcgttcgccaggccccgggacggcgccgncaagcacagggcgtncaagcacgggcgncccgngacaccggccttctctcccacgcccgcctcngccggggcccatggcgtc

SEQ ID NO: 23494 - DNA, 410 bp, Zea mays
  Clone ID: MRT4577_121432C.1
gggggggcatgttcgctatcgcttccacggcaacgctccagctagcgtcatctgattgcatgcaggcgtttaggacccggccggccgtactgtaatctccgctgaaatgtcgcatagtaaaccttgtttattagttctatttttgtgtgtgtgtgtgtggagctaataatgggcttaaacgaaacctcgccgtcatgctgtcatgggttggtggatcccacgcaacgggggccgtggcaaggtggggaaggcggcgcacctggaggaggcggtggtgtcgctcaagtccacggcggacggggagaccgtgtaccgggtgagcttcgagtgggacgagtcgcagggcatcccgggcgccgtcctggtcaggaacctgcagcacgccgagttcttcctcaagacgctcaccc

SEQ ID NO: 23495 - DNA, 607 bp, Zea mays
  Clone ID: MRT4577_121433C.1
tccgggttcgacccagccttccgcgtgcgtagtcgcgggtctagcaaacctgagagcgccaggaactacgagcgctagccctacgcccgcacgtccccccctgtcttctgtaaaggacccgtgttgtagcacgcctgtccatacccgaacgaggctaactatgcttgactgcggctactacagcagcaactctggaggcggctcgacgctatactgacacacaaatggcttgtccgacatctgtatagggccgacagactaatcgacaccatcctagtatctcattacctccacaattcccctcaggaataatctgcatcccacacaagttctatccgcactaagccaatgattaataggcatacgcggcgcaacgccactccacctattctcacactttaaataggtaggacggtgcggacgcttcggtgagccgcgccacggaaccgggagctccaagcctgccccgttccagaagatccaattggttgacactgtacgaaccacaagacaggaaacggtgccaacctgtgcgctaacctacaacccacaactggtgttcaaggccatcagactgaccgacggcacgcctggccttggccatacg

SEQ ID NO: 23496 - DNA, 408 bp, Zea mays
  unsure (1)..(408): unsure at all n locations
  Clone ID: MRT4577_121434C.1
cggnccggaanncccggggggacggacgcgnccgcccacgcgnccgnaaaaaaaaaaaaaaaaaaaaaaaaaaaaaaaaaaaaaaaaagggaaagaaaaaaaaaaaaaaaaaaaaggaaaaaaaaaaaaaaggggggggcgcccaagaggacccaagcnaacgaacgcgggcaggcgacgacaaagcccnccaaaaggggcaccaaaancaaaagcacgggccggcgnnnaaaaacgccgggacggggaaaacccggggggaaccgaagagaagcgccgggaagcacaccccccnnncgccagcgggggaaaaagcgaaaaggccggcaccgaccggccnncccaacaanggcccagccggaagggcgaaggggacgcgcccgganacggcgcaaaaagcgcggcggg

SEQ ID NO: 23497 - DNA, 274 bp, Zea mays
  Clone ID: MRT4577_121435C.1
gttcggcgggatccgttgtttaccagtcctttttccccttcattcgacacccgcaaacccgtgtttaccgggagaaatccctggttcccccagaaaaaaactcttccaagcaagcccgagtttggacccacatgaggggcgggacccaacgctgtcgcctaacattgccacactttatgtttcaaaaaaacaaaaacagtgcaactcttgaagggggaaggaaattttttcgctttcctcaggggccattcccccacgggtcgggaataaaaat

SEQ ID NO: 23498 - DNA, 1388 bp, Zea mays
  Clone ID: MRT4577_121436C.1
ccggcgcgcgggcccgagcgcggatgctgccgccgctactccagttccactccacctcacgagtctcacacacctcccccctcctttttagggagagaaagcaacgaaacgccgagagaggcgtgcgagcgggagcaaggagatggagcgggcggcgccggtgaggagctcccacacctccacggccgacctactcgcgtggccgcagccccagggccccgccccagcaacgccgtcgccgccgcgccggcccggtcagccgtcggaggctatcaggaaggtggtgttcgggggtcaggtcaccgaggaggaggccgacagcctcaccaagaggaagccgtgctccgcgcccaagtggaaggagatgactgggagcggcattttcgctgccgggagcaatggagacgctggggaggcagctgctgccgcgaagcccgcccgaacctcctcgcgccaggcgagcagtactgtaagccacatctcgttcgctgaggatggaaccgatcctcccaaaaagcccacatcagtagctgaggtggcaaagcagcgtgagcttagtggcactcttcaaagcgaggcggatagtaagacgaagaagcagatctcaaatgcaaagtccaaggagctcagcggccacgacatctttgctgatactctggattccaggtctaacagggcaaggaacccatcgaacggcagcacagcctcacacgcacctgccaaaaatacaaacgccagcaccttctcgtttggagatgccaacactgacagcacgccaaagacggcaaggaagataaccggcaagaaggtcaacgacctcaccggcaacgacatcttcaagggggacgtgccgccagcttctgcagagaagcatctgagcaccgcgaagctgaaggagatcactggaagcaacatttttgcagatgggaaggaaccaatccgcgagcgtgtgggcggaaaccgcaagcctcctggcggtgagagcagcatcgcgctgatttagcataatccgggactcagtgtcgacccctagaggaggatttccaccagcaccaggcagcaggctgttggatcgtcagtttggtgtcttgttcctgatcaaggtgcggcagtgaagagccccgttttagtcttgatgatgtttattaactgttggtgtgtgcatgtttggtttggctgtgagataccaatgccgtcctcatcatggcagtgtgtagtgtgtacggttgatgtgtttttacaaataatagctcgagtctgaaccaagctcacgtcttccaccaccgtcaaattattagcagacgtgtatgtaccaagcgttaccgtcacaaaaaaaaaaaaaaaaaaaaaaaaaaaaaaactcgagactagttccctcgtgccgaatt

SEQ ID NO: 23499 - DNA, 310 bp, Zea mays
  Clone ID: MRT4577_121437C.1
gttaaaaaaaaaaaacccaatcccttgtccaaataaaggggggggttttaattgtttttttcccaagggtacaccaaaaaaggtggaattaccaagacgggggcccccctattttaagggggtggcgacccaaaatattggccctttttttttctgggaaaagggggtggattttcccccaccaaaagttcccccggggtggggggaattcctattttaataaaacccttttggggaattttattttttatgggccttctaagcgaaaggggctggcccaaatccgtctagacccgggggggacccctgg

SEQ ID NO: 23500 - DNA, 558 bp, Zea mays
  Clone ID: MRT4577_121438C.1
ccggccgggctcttcattaaaacaacgatgtccttccttctcgcgaagccaaccccatacttgccatctgcgccgagcacaattgggtaagatggccgccggcgctccacaaaattgctaggatttgggccttggcgagtctctcgggtgaggtgtctgggggccggggatcgttccgggtgaattgtgcgcgcggcggaggcctccccaccattgaattgctcgccggagcaattacttcaccaccgggccgcacttcctcatggacggacttctttgcctcttgaccgccaacgagtaagccactgaggaccaggtgttcagcaggtggagactgctgagtaggagctcgttgaaggtgaagagcaggtggccaagaggagtcctataatgaggagtacgagttgatctaggtggcgtctcccagtcagcttgatggtgccaaggaataatatttagttcgctttattgttatcatttatttctgtaagacttctgctatgtaataatgatacttgtgacatttatcacaaaaaaaaaaaaaaaaaaggggcggcc

SEQ ID NO: 23501 - DNA, 352 bp, Zea mays
  Clone ID: MRT4577_121439C.1
aaaaaaacagacccccaatcccaaacttttgcaaaacaaacatttttgggggtcctgtaccaacaaaggctcaaaaaacaccttttacggtttgctttatccaacaaaccgggagagatccaagcctcaaatttttgggccccgaacctttaaaccggcaaattccttgagggcctcaaaagccttgcttttttagccccaaaaggctacggtttggttccaaaccttcacttttttgtttttttgggcccccaattaaagggagctgggcctgcaccagggcctgttgtttttttggggccatgggccaccctttcctccttcaaagaaatgttcctctaagggtttgctt

SEQ ID NO: 23502 - DNA, 638 bp, Zea mays
  unsure (1)..(638): unsure at all n locations
  Clone ID: MRT4577_12143C.1
ctacactagccgcttgcttcgntacgaccggtggtgtagcgtgctgactggctcgatggcggaggcgctgggagcgctgtgccgcgccgggggatggtcctacggcgcgatctggcgccctgaccggcgcgacccacggttgcttactgtaggagaatgccactgtgaagatgaagcgagaaagtggtcgacaagatggtcaatcaggtccatgtcgtcggagaaggccttataggaaggactctaataagtggggagcaccaatggatttctgatgacatccccttcagtttctctcagataagcgatgaagataacctaggtttatgtcagggttatacttggtggcaacatcagttcctaagtggaataaagactattgctgtagtacctatgccggcgtttggtgtggcacagttcggttccatgcaaaagtttctggatcaagttaaaggtgcaacatttctgatggaaagtctttcatggtctccttcaacaaaagatgctcagaaagacgctttcatgtacaatccacaatttcaactcgattcttcaaccactagagagggtcttccacgcactaaggctgaaccagaaaacncaaggttnggagaatgcaatatccatagattctctga

SEQ ID NO: 23503 - DNA, 423 bp, Zea mays
  Clone ID: MRT4577_121440C.1
aaatcttaaattttgctcagacaaggaaaaggctctttttttaaaggcgggggatttgaccagtcctcacagacttaatgccacctaccggccattgaactagggggtgaaccaaatggggggggggggggcaaatcatatccaaaactctttggggaacgggtaaaacaccccacaagcagtagggcaaagctttggggttcaccgaattgatggggtaggcctttgtgctcgaccaatgagaaccctcccaagaattctgtccacaacaaatctaaacttttcagtgtcctttgccatatttaaaaccacctttcaaaagttaaaagggccaaaatcctaagccgtacctaaggggctaacctattacagtgttatgtgtggaagaccacctccccgaggtgtctaacttagatacaccct

SEQ ID NO: 23504 - DNA, 785 bp, Zea mays
  unsure (1)..(785): unsure at all n locations
  Clone ID: MRT4577_121441C.1
gccgctcgggccgncgggcggaggcttccctttccttcccacgcgaacaaaagaatcccaaaatccccatccccttccacgcgtgctacgccctcaatccccaattccccacgcggccggcctccccaccagctcccctccccccagctcggatctccgccgccagcagccccgccatggagtgcgagcccgaggagctgcagttcctgggccccgtcggcatctaccgggagtcggtggccatcctgcgcgcgcaccgcccgctctacgcccgcatcgccgccgccttcgtcctcccgctctcggccctcttcctcgcccacatcgccatctcccacgccctcttctccaccatcaactccgacgactccgccctcgagtcctccgcccccgggaccgcctcccagcagcggatcctccagcggctcggcgccgactgggccgccctcgtcctcttcaaggccgcatacctcctcgcgctcctcctcttctcgctcctctccaccgctgccgccgtcttctccgtcgcctccgtctactccgccaagcacgacgcgctcaccttcccgcgggtgctctccgtcgtgccccgcgtctggcgccgcctcgcggccaccttcctctccgccttcgcgctgctcttcgcctaccacttcgtcttcgccgtcgtcttcatcgcgctcctcgtcgccgtcgacaatggctccaccctcgccgggctcctcgccttcgtcgtcatcgtcgcctacctagtcgggctcgtctacctcagcgtcgtctggcac

SEQ ID NO: 23505 - DNA, 380 bp, Zea mays
  Clone ID: MRT4577_121442C.1
gttaggaacgagttcaagaatgacatcgcttgttacgttgactacgtgtcgactgggtgtcatgttcggctgttgtccaaggtgtagaatggcattatcggtatgcgatcggttttcttcaccccgcgatagccagcggcttctgagtaccggacgttcctgtcagggattctcgctcaggcaccgcgcagctccttgcgcgactacctgtacgctctccatacgtcgggctgctgatctatatttctcctgccaacaatgtgcgctctagcctgatcgctttaacgagtctggttacctgtgctactagtacgacgtgacaggtgccaacacacatagcctcatatccgtgacctgcgctcggaacattctctccacgc

SEQ ID NO: 23506 - DNA, 650 bp, Zea mays
  Clone ID: MRT4577_121443C.1
cattgggtacctcgaggccggccgcgatcaggcgacacgagaaccgctagatgatccaatccgacaccacgataaaaaaatgagtcgacgcctgaacatgatgaagaccgacgcagaacatcgtacgtggcagagggtagctgacatgaccacttcgatgagaaacatcaaagggcagtacttcacagccaccgctatcggaagtcacacaagctccgccatgtcatcaggctaagaacattccactagttaaagcctgtttagggtgctgtgactgataaaggactttatatcgaacctgcatattctctgcaacatgctgcacttattttgctcggaaggacgaataacatgatgtagccaaggagaacctggatgtatcgtccgagcatagaacggcgctggaaggattactatcaaaaatactgcgatgccatttattatcgtgatctatgattagccgatgactcccacctacatgaaatatggtgccgaagaggctcgcggattacctgatcaaacaaagctgctaagtatgctgtaaggctattatgaccttcgctcacttaagattgaccctcacgtggatcagttcatatgtgggctagctgcttgcacctggccgaattgcatgacatgaataattcatc

SEQ ID NO: 23507 - DNA, 372 bp, Zea mays
  Clone ID: MRT4577_121444C.1
gggcgccgactgcctcgacatctccggggagcccgagttcatggagcgcgtctagtccgagctccacgagcccgccgccaggagcggctccctcatcatctccgcctgcgggttcgactctgtccccgccgagctcggtttcctgttccactccaggcagtgggagcccccgtccgcgccggccaccgtggaggcttacctgagccttcagtcgaccaagatgatcgtcggtaacatcggcacctacgagtcagctgtgctcggtgtgttcaacgctggccagctgcaggcgctgcgcctttccagacccaggcgaccccggcccaatattccaggccctccacctcccaaagggtcgctgattgaaggtca

SEQ ID NO: 23508 - DNA, 858 bp, Zea mays
  Clone ID: MRT4577_121445C.1
gccggcctgggcacgaaccttgttagaaccagacagcggagatggtcgaatatgtattgataatttcaggatggctcttttacagaactgtactgatgctatgaaagaatctagaacacttgagatcttgaatgcgctggagccactcgcgtataggagaatggactttgaggagttccgtgcagctacaataagcccttaccagcttgaggctgtgccgcgctgggaagaaatcgccagtactgcattcgagtactttgagcaggaaggcaaccgtgctatcacaatcgaggagcttgctcaggagatgaatctttctgcagcagcgtattccatagtccgtgactggatcagaccgttggacggcaagcttagctttgtaggctacaccaagtttttgcatggactaacgatgcgaagcggcaacacaaggcggcaccattgattcccttgctgccgcggtggttgcttgaattggttccattggttttgttgatggggattcggagagatggtgttttgtccctcttcttttcttgccttagctttttgtagaatgcttgtagagagagagagagaaagggtaaaaggaaaaaaaaaagaaacggaaagtgatagctcaaaattgagttgtagaagaaaaggtcatgtttttttttttttgccttggttctggtacattgtttgctttcggctatgatgaatggcattgtacagttgtcagttggcacatgctacatggtgctgtgtcgaacactcgaacttgggttgctctcctctatcactgtataggatatagcggcggcaatgctcaactatcgcgtttaccggtgcccccttccttctctcatgagaaaa

SEQ ID NO: 23509 - DNA, 390 bp, Zea mays
  unsure (1)..(390): unsure at all n locations
  Clone ID: MRT4577_121446C.1
atcgagataaatctcaatcaatatattgattatttctaggaaacacatgtcggtntgagggcaccattgtcgagtacatctcatntgtnatctaaaagaggctcctccaacgatgggttgctgcaaggcgggggggggtcaaagagaactggttgtctggcagcaattgttgttgctgctgcaggaaggttgcgaccaatgggtttgcccctgcccatggattaagtnactgttgtcgctgttgtnggtccgccgccgngtttggcccagcccgttggttgaatggaagcaactgttgtcagtgggccgctgggtttgcctccgcttgctgtgtccgggctggttccctttgttgctgctcctgttgttgttggttcgttggtgccttgc

SEQ ID NO: 23510 - DNA, 170 bp, Zea mays
  Clone ID: MRT4577_121447C.1
ctaatacactcacttagggctagagggtccgcgcggtgaggtccacattggacgagtcaccggatctagactcttctactgcagagacgtctgagcgtcattatgttaataaaaagtggttcaccggggtgcgaaccactcggagggcgacctccactacactgtctgaa

SEQ ID NO: 23511 - DNA, 558 bp, Zea mays
  Clone ID: MRT4577_121448C.1
attcatgctttctattctaattcccacattcaaaattatgtttcaaatatgagtttcaaattctaatctatctgcaacatccaaaatgaaggcaaagtctatatttttataaacttatatgagatattttattcccttgtttagtttaagggctcaaaatatgccatgtaaactttcattttattttaagagaaaattaattttgaatatgtgatcaaattctaatttaaaaaaaaagaatatcttttattttacttatttagggaacataatgtattctcttttaccaagagtctttttatcttgattatgtttaagagcattctttaaatttcatgtgaataataacttatcctactagagtgacgatgtttttatcttatgtttactcaattccttagtattacttcctataaaagacatagaagaaataaatgaactcataacttatttctagggtttacaaatcctacccccttaacaaaaatctcgtcctcgagatttgtaagaaaagagatacaaaaggattggtttgtagttcaacttttagtctatagt

SEQ ID NO: 23512 - DNA, 847 bp, Zea mays
  unsure (1)..(847): unsure at all n locations
  Clone ID: MRT4577_12144C.1
ccggccgggccacgtccagcactccagccgcccatcgcccccgcttatttatcaagccgcgcgctccgcgcttaaaacccttgctcgccacgcagattttactacactagccgcttgcttcgatacgaccagtggtgtagcgtgctgactggctcgatggcggaggcgctgggagcgctgtgccgcgccgggggatggtcctacggcgcgatctggcgccctgaccggcgcgacccacggttgcttactgtaggagaatgccactgtgaagatgaagcgagaaaagtggtcgagaagatggtcaatcaggtccatgtcgtcggagaaggccttataggaaggactctaataagtggggagcaccaatggatttctgatgacatccccttcagtttctctcagataagcgatgaagataacctaggtttatgtcagggttatacttggtggcaacatcagttcctaagtggaataaaggttttttgctctatttcttttatcttttaagcatgaacaatttgctcgatacatacttgcagcagaaaccagttcattacttaaaatattacaaactattgagtattgaccagctactgaaaagtatacatcttatacagactattgctgtagtacctatgccggggtttggtgtggcacaagttcggttccatgcaaaaggtttctgaaagcttacagtttctggatcaagttaaaggtgcaacatttctgatggaaagtctttcatggtctccttcaacanagatgctcagaaagatgctntcatgtataatccacaatttcaactcgattcttcaccactagagagggtcttcacgcactaaggctg

SEQ ID NO: 23513 - DNA, 445 bp, Zea mays
  Clone ID: MRT4577_121450C.1
gctctaaagtgtccttgccgacgtcactgtccgatccaggtgtgcagactgctatatcctcatctacgttcagaatggtccgcacgaagcaaacgggtcgcaagtggaccggcggtaaggcgccccagatgcatctggccaccaaggcatgcgcgcatgtcggccccggccacagacggaataaagaagccgcaccggttcctcccaggaaccgtgcagcttcgatagatcctgaagcaccagaagagcacggagctgttaatgcggaagctgtcgtgccaacgcctagtgcgagagatcgagcaggacttgaagacggacctgctgtttcagttctctgccgtggctgtgctgcaagaggccgcggatgcgcacctggtggtgctattcgaggacaccaacctgtgcgccattcaagcgatgagggtgaccatcatgcccaaag

SEQ ID NO: 23514 - DNA, 138 bp, Zea mays
  Clone ID: MRT4577_121451C.1
tccgtctgatcagatccagcgcctaacccggcgggtccggcgacggtgagtggccggcgttcatgacaccggccgcggcgtggtgcgcgcagcaccgccttcggttccttctaccgttcctttttctcgcgcccgttc

SEQ ID NO: 23515 - DNA, 373 bp, Zea mays
  unsure (1)..(373): unsure at all n locations
  Clone ID: MRT4577_121452C.1
tttttattttttttttaatatttttttttgaaataaacgacaattggtattgaagaaatgtaaatatttaaggaaannggttgtgatgtgtggaactaaataactattacactagtgatcgttacgccaaagcactaataaaaaggtaaaaggaataaaaataagagcaatggataacatgacagggggaagtatttactgacaatttcggtggcaaacagaaagactaatagatctccccattcctgtccaagttcaccatttttcagctaatgtggtccatttattctactactagctgggagcttgttatgttttttgggcgggttttcactattcgaatctgggccatgtggatgcttactataatttt

SEQ ID NO: 23516 - DNA, 211 bp, Zea mays
  Clone ID: MRT4577_121453C.1
gacgctaccaccaggataacctgtgacatcagtatgcgggtgcgcaaacatttgacgagcagggctgaccaccaaccgtcaggatctagagagagagaagaaggatcccagtccttactacttgaggggctacctctaaaaaagcgactgagtagctgttgagccaacgctacaatacatttattgctaccctacaggacctggaaacaca

SEQ ID NO: 23517 - DNA, 385 bp, Zea mays
  Clone ID: MRT4577_121454C.1
ggatatcaaagctggtgcttgctttgtctaaccaaaccctgccttagacgggctgatacaattacacttgggctcttcactgcacacatctattatgactgtactatagacaatgcatgtatcggtctatagaccggatggctgttttcggctttactgtggacttgaaagacttccatgccttcttgggcgtcttgttgatcttgttcatggggaggagcacaactggtgtttttttgtggaccccgcttcagcggacagttacgtccatcacctgatttccgtgattatggtgccttcagatgggaaacaggacgtcacctggaatgatgctcgttttatatctgtcctttgcagcggtcttagagagatggaccactccttt

SEQ ID NO: 23518 - DNA, 413 bp, Zea mays
  Clone ID: MRT4577_121455C.1
attcggctcgaggaagaaagaatacgcgcagagtggactttgacctcagcgccgtttgggtccgaaccaagacgcacacaggacggtgcgttcaccaaacctaccttggtgggccccacttttcccccgaaccgtagcttcagagtgatccctttcgcaccctctatataatagcgccctcgccactcgcctcgacgcgtgactctcgcgggtggacaacgaaatttctcagccaaagaacaaggatcagaatcgtttaatcaagttgaggaagatggcactagtctccggaggaagatcaacactgaaccctaacgcccctctttacattcccgccgcgttccgccaagtggaggatttttctccagaatggtggcagctggtgacgacactgacatggtaccatgactact

SEQ ID NO: 23519 - DNA, 729 bp, Zea mays
  unsure (1)..(729): unsure at all n locations
  Clone ID: MRT4577_121456C.1
tcttactactcctcactaaccacctgacctgacatcatcctgccttcctccgcctggatcattatctctgttctactactgccaaaagtacgaagatgtactcatcaacaatgataactacgttgacacccccggaaaagaaatacttacatgatgatgactccactggtaccattgaaccgaggctttcccgcctctatgcccaccaccccgaggactaccctccccccctccgagatctacaatactgctcccctggtgctctcctgtacatccttcctacagatcctcttcgaagagaccctgtaccaaatgatccaggataccaacacttacgttcttgcccccaaggaccacatagtcctctcatcggatcaacggttacaaccccaccattgatcttctctgcactgataaggagaccaccaccctcgagcatgaccaccttcggatcgacctctgccagcactactangcagaatgcccgcgtttgccatcccgcgcgctactctccagatatgtcctaatcactcctcacagctcgccatcgacctgcacgatcacgagatggctctgtatgccatcatctgccacgacaacggtctcgtgtcaattgcccagcctgagaacctttgctacggccctcatgactctgatcactacgcttaccgctctgaaaacgtacttgctgcctgctacaaccacctccacaaccaccatgtactcctg

SEQ ID NO: 23520 - DNA, 230 bp, Zea mays
  Clone ID: MRT4577_121457C.1
accaaaacaaccacaaagggggggggttcattttcaataacccaaacaaacccaccacccgcagaaacacacaaaatccacccttcatccaaactatttaaaacatgggcatgaccaagccctgccatcaaccacaaaataaccccgtgcttgagcacacccaacaacatataacaacatggtgctacaacaatcactccacctatcgaaaaaaaaccttttataacagg

SEQ ID NO: 23521 - DNA, 396 bp, Zea mays
  Clone ID: MRT4577_121458C.1
ctggccggaacgagcgtgaaactgcgagagacaggcctgcttggtacgttggatatcttggggactcaaggtcgtctgactcgcaattgcgccccttgtgcgatttctcacgagcacgctgtcgatgatggcggtcagacagacacgcatgacaggagggcgtcgtgcgatcgcacgtacgcccagggtgggattcaactaggacacgcgtggtgcgtaagctgtactgtctcgagcatggcattcatgctgatggcactagtgcccgtcgacaggaccattagtgggaggagatgatgtctgtatcgcctgcttcaacgagactggcgctgtgaagagggtccgccgtgctgctgctgttgccttgatgccactgatatctgtgaggcgaggact

SEQ ID NO: 23522 - DNA, 575 bp, Zea mays
  Clone ID: MRT4577_121459C.1
gtccgatgctgtcgcgtgtcgggtagtctgagggcggggctcgtggctggctgtggctgactggttgctgctggtggtgagatggcccgtgagtctgccactgaggcagaagtaccggggtcgtgggaacctgtgttataatggcctatgagcatactcattaactattggaactgggtactatctatgttctgacacacagccttgacatgaggaaagttcatttttaacacacaaatactgccatctctgatgatggtgtgtatgagtgcattaagaatatgaggagtgaccctaactttgttaatctagaagacgtgcttgatgaccccaacatacataaattctacattgtttttgacttttttgaaagaaaaatggtttgcgatggtggtctatataaaggatctgcactaacatactcgcgagacatactatctggtcttatgtttctgcactctaataatgatattcatggcgatatcaaaccacacaatctctgggataccactgccggcactgagaatattggggatttcagagatagccatttttttgaggatgatgatgatatg

SEQ ID NO: 23523 - DNA, 305 bp, Zea mays
  Clone ID: MRT4577_12145C.1
cctatttgtgcgcggacgcgtgggcggacgcgtgggcatttgtcctattacaacaacaatccttggcacatctaaccatacaaaccattgcaacgcagcagcaacaagcactgagccacctagccgtggtgatccctattgcctactggcaacaacagctggttgcattcaacccacttgctttggtaaacgtagctgcataccatcatcaacaacagttgcaacagatactgccagtgctcagtcaattagccatggtgaaccctatagcctacctacaacattaataacttttttcatctagc

SEQ ID NO: 23524 - DNA, 667 bp, Zea mays
  Clone ID: MRT4577_121460C.1
cctccctcgagttttttttcctttttttttttttttttttttttttttttttttttttttttttttttttttttttttgggggaaaaaagcccctttattaaattttcctccccgggccaaagaaaacccccaaaaaaaaaaattggggggaccaaaaaggcaaaaagcgttttttttttatggggggcggaccttcttccccccccggaaacaaaaaaggacccccccaaaggccgggaaaaaggaccccatcatcagcccctgccaaacgggggggggggcccctacaacaggcccccatgtttggaaaccccttccccccacagggggccccaaacctgggcccccaaaaaaaaaaaagccacccacctttcctatgcagaaaaaaagttcacccttagcaggcaaacttcccaggcttttatgctatgaaaaacccgccaaaaacccaaaaaaaacaaccctacagctttctttatcaacctttaacggtttaaccctttaaacagtcaacctttttgtttttaaaaaagaccttcattttttttggcaaggacaaggggaaaaaaggccctcccacggccctttttgcagggttgctgcggctggaatccataaaatcattctgggggggacccaacttttcattttcagggccaacccaaa

SEQ ID NO: 23525 - DNA, 170 bp, Zea mays
  Clone ID: MRT4577_121461C.1
ctccgggaggggaaacccgggcctgagcgggttttaatatacagtaattttttcatgaaccgggaaaacccaaattacggtgcctcccgccgaaaataggggggggggcacttctcctagttacataagtgtttcacatttgccaccgttcaaagctctaaccggtggga

SEQ ID NO: 23526 - DNA, 434 bp, Zea mays
  Clone ID: MRT4577_121462C.1
tgcccccctggccctcctcctttcaaaaagcgcaagagatcaccagttccctaacgctttcatcttggagatccttgcaaatttcggctaaaattttgtagaataaaatttttggcttgtaggtggattgaataccccgctgcaatcgatggattttggttttaaagaaaacagtagtagcaccaggcttgccaggtgctcaaatagagaggtgctcaactcaaacaaactccttgaggcaacagaatagagatggctgacgatggtgagcctgtctgctctatggactgggatatgataagaacatggacccgattgacagccagcaacaccatatcaatagtttgtactccctgtcccaaaattattaaacatacattcattaattaacctataaatgcattttgtgtgaaaaaaaaaaaaaaaagggcggc

SEQ ID NO: 23527 - DNA, 357 bp, Zea mays
  Clone ID: MRT4577_121463C.1
ctcacacgttcaccgattctgtcaccatacttgcctagatcggccacctgtattaccagctatactctgctgaacgcatggctccagatcaacctgctgttgatataacacacgttgatgcaaacattgattttactaaccataagcttctagacatcctcactaattcgataattaaaccgaacaaatctactctacactgcattcctcactaccttagcactatcgataacgatataccgacagactactagtagcacgaatgacctcagtcattaaatgactcttaccataatgctaatcacgatcttacataagtacgtccatcatctgagtcatctacatctattcttacat

SEQ ID NO: 23528 - DNA, 532 bp, Zea mays
  unsure (1)..(532): unsure at all n locations
  Clone ID: MRT4577_121464C.1
ccccccccccggggccattggctagtgtacgcattcgccaccgaacgtgcttggccgccccgttcatattcaccattcccgcccgcccgacctcccgaagacatcttgactcttcagggtttcccccgccagccgcaccagaatcaccctcccgacatccccgttccccgacacccgcgccttcttccttcttccgaccgctttcaagtcactgngcaaggacactggcaccccgaagggtctcttccgttttggctgctttagccacttctgacttcttaaaactgccaaggacgcttgcctgagccacttggctgacgaccttggaagggaagtctctctcacttttcactctgactgaaaagttttttgaaaaggtttttgactgaccctgnggccctttcaaagacgaagactctcttttgaagaagggccactttactgccattaatgngttttttgaagaaaacccactcttgcanatttcaagcaagaagaaggaaactttgtttccccctttcttgccaagggg

SEQ ID NO: 23529 - DNA, 172 bp, Zea mays
  Clone ID: MRT4577_121465C.1
ggtacaacaaaccaatgctccagaggggagacgcccacgcacaacgcgccggtgcgtgcggggggcgtaccacacacagaagcgagagcgtgtgaagacagaggcgcggctcacggtcactgatgaaagactgagcgcgaagggagggtgggggggcacattcccgcagcag

SEQ ID NO: 23530 - DNA, 417 bp, Zea mays
  Clone ID: MRT4577_121466C.1
atatgagaaagtttcatgagagcgaaacctcgcaccatggccggggccatcctaagggggggggggagagaggcggttgttagcccgatacaaaaactaccccggaaaggaaaaagcccatgtatttcccgagccgggacgtgacggtatacggaaaccttagaaaggatggagacaccgtgaggggcctcagtaagaggtatatgtgctgcttaacggacttccaacgcagcaatctgatgaggcgagggtaggggacataatacagaagagcaccgcatatctggcggggtactaagcgcgccaaacggcctattgaaaatccagaggagcgaatagcgctcaaaacaggtagtactcataaccgcaaaaagtctctcaagggaacagcctgtggcctatggaacaatggaggca

SEQ ID NO: 23531 - DNA, 1265 bp, Zea mays
  Clone ID: MRT4577_121467C.1
tcgagcggccgcccgggcaggtacaagccacacattgatggtaggtattgtgctgctgtcaagattgccaccgcactttgagtagcttgttgagatccacataactcacatggttgttgttgttgctcctcctggattatggattgaaccatgttgtagattgcttggtgaatgtattgtggctcaatctgcctaagatcatgacaacattgttgctgcaatacctggcagctacttggttgtatcaaacgtgattggagaaaaggcattaccaaagggctgcactgctgccttaggaattcatgacaattttttagatttgagctactgctatagtagttatagctgcaccttgtagtctgtcattgcccaggagcaccatgagcaacaacatcaacaacaattccagggtcatgacaagcagcaacaaccacaacagcctcagcaatatcagcagggccaggaaaaatcacaacagcaacaatgtcattgccaggagcagcaacagactacaaggtgcagctataactactatagcagtagctcaaatctaaaaaattgtcatgaattcctaaggcagcagtgcagccctttggtaatgccttttctccaatcacgtttgatacaaccaagtagctgccaggtattgcagcaacaatgttgtcatgatcttaggcagattgagccacaatacattcaccaagcaatctacaacatggttcaatccataatccaggaggagcaacaacaacaaccatgtgagttatgtggatctcaacaagctactcaaagtgcggtggcaatcttgacagcagcacaatacctaccatcaatgtgcggcttgtaccactcatactaccaaaataatccatgcagcagcaatgacattagtggtgtttgcaattgaagaattgtgtctacctagccgttatactcctataacggtgttaagcaataaagtaccatacattaaaaaaaaaaaaaaaaaaaaaaaaaaaaaaaaaaaaaaaaaaaaaaaaaaaaaaaaaaaaaaaaaggaaaaaaatataaaaaaaaaaaaaataaaagaaagtttgaaaagaaaaaaaaataattatttatatagagaaaaataaaattaaaaaaaaaaaaagggggggtggccttttggggggaaaggtttaaaccctggggttgcccaactaaatggtttttttttggggccccctaaataaaatttgggggcccggttttaaaaagcccggggggggggaaaaaacccgggg

SEQ ID NO: 23532 - DNA, 238 bp, Zea mays
  Clone ID: MRT4577_121468C.1
ctggcagtggcccgaggcttttattgacgaacgacggggactctgtcgagcgcgttaaggcgcgtcgacgacggccacccagtcggccactttgactcggctgtggtggtttaaaattcttcagcttgctcccactgtctctttgtactaattgcagatcaagccttcttacgagggtttaatttatatgcaatgcctgacatttttgtgctaaagttacatatgatcacagttgttt

SEQ ID NO: 23533 - DNA, 445 bp, Zea mays
  Clone ID: MRT4577_121469C.1
gtactggagctagagaagcatttagacgagtcctttgacaaggccctagaaaaggaggaagtcgcagcagccgatcgcaaaagtactgaaactttctaggagaagcttgataagggatctgaagatgctgctgttcaagaagtgaattgcgacacctaaaaagtgaaggataaatttacacgtgacaatgaggctcatgtagctccacatcgagccgctaaattatctgaactttgtgcacaaatatgaggcacaacttaccaaagctcaggcggaaccagccgaatcacatgtacatgcacccactgaagatacgtggccagctattacagagctactaccacgcgagacaacaacagccgccctaggccatcaaaccgctgcgccagctttagaacttgatgaagcaactgagaaagaactgcctgcgaagcctgcacagcat

SEQ ID NO: 23534 - DNA, 836 bp, Zea mays
  unsure (1)..(836): unsure at all n locations
  Clone ID: MRT4577_12146C.1
accgaacaaccctcgatgctcgaaagatcgcgcggcgccttcccattctcatctccctcccacccctcgccgccgcctccccgtcgtctcgcctctcgccagatcgccatggcattgcacgcccccgtcctcgtgctgaaggactctttgaagagggaatccggcgccaaggttcagcatggcaacatccaggccgcgaaggctgtgtcagacatcatccgcactacgctcggtcccaggtccatgttgaagatgcttctggatgccagtggaggtattgtggttaccaacgatggcaatgctatactgcgggaattagacattgcacatcctgctgctaagtctatgattgagctaagccgcacacaggatgaagaagtgggagatgggacaacgtctgtcattgttctagctggtgagatgctgcatgttgcagaaacatttattgaaaagaactaccatcccactgtcatttgccgagcatacagcagagctcttgaggatgccatagctgtccttgacaaaattgcaatgcctgttgatgttaatgaccgtgaggcgatgctagggctggtgaagagctccattggtacaaaattcactggccagtttggtgacctaattgctgaccttgccatagatgctactacaacagcaggtgtagaccttggtcaaggaatgcgtgaagttgatatcaagaaatatatcanagtagagaagattcctggcggncagttggaggattcaatggttcttanaggggtcatggtcaataaagatggtgtggctcctgggaaaatgagaagggagatagtanatccacgcatcatcccttt

SEQ ID NO: 23535 - DNA, 550 bp, Zea mays
  unsure (1)..(550): unsure at all n locations
  Clone ID: MRT4577_121470C.1
tcgcagcacgcgtcttaagctggaccttaaacggccgccgcgggggggtttttttttaaaaaaattttggggggggtttttttttttttttttttgggtttttttgggcaccaacaaaacagccaaacggaccgggattcacaccagtacaactacaataaaaatatcaattttcaaggggttttgancggggtttccccaccaannactaaaaaaaattcagagggagagaaaaatttcttctacggggggccccgggggtaaaaatttaaggctaacataaaacccccctccggggttcccggggccccaattttgttgttacttttttnttatcctggggggggggnttttntgctttttttttttttttttccctttcctttnttgttttttttttttggctntggttttgcggtttgttcctctttttttttttttttttttttttttcttttttttttttttttgttttttgtttttgtgttgttggttttttccgtttnttttttnntttttttgttttttttttttttttttgctttttttt

SEQ ID NO: 23536 - DNA, 356 bp, Zea mays
  Clone ID: MRT4577_121471C.1
aaaaccaggctatactcaatcgagtttagttggtttttaaaaaatatatggagaatcaagttgctagctctaggagatgagattgggcatgttattcttcatatgtatatatatgggggggccgggtcttaattattcagggcatgatgatgatggtcatcagtagtttgctgccggggttggcacctgctggtgggggcgctgcccgatgaaaatgatgtcgtaaacaagcgccgcaatggccgcccccgcgagggggccgacccagtacacccaggggttttcccagaccccggtgacaacagccggcccaaaggagacggcggggttcatggaggccccgtcaaaggcccccc

SEQ ID NO: 23537 - DNA, 417 bp, Zea mays
  unsure (1)..(417): unsure at all n locations
  Clone ID: MRT4577_121472C.1
tgatnatgcatgtgcccacgcgtccgaccgatcggcgttccttgtgcgatatggcgatcggagcattccgtcccgaggaggaagacaactggcgtcgctagggggaacattgggaagactccggtgcggatgaatgcggtcatgtacgcgctgtctccctttcagcataaggtaatgccggggcttgtggataggacatcaccaccaagattcatcacaaggtcaccgtgaactggatctccgtcacgcttcttctcaccctcttgtgggtgcacctaccaatacgccatgtgttacaaggtgcatgagaagctttcccacatatatttaatgcgctgtccttaacagacagcactttgatttaacatttgtgtgagcaattttagttcaacgccttttaattgttcaatatgcaag

SEQ ID NO: 23538 - DNA, 347 bp, Zea mays
  Clone ID: MRT4577_121473C.1
cctttttccaccctcggaggtcacacgcattacctactgtaataagagaaaaggcctcctataaaacactttgtgaagggaccgttcttacaaaaggaacttcaaacatgtgctggagtgccactggcaacaaggccctcaaaaattagctagacgccatgcacacagcttccgatctatgtttgacagaggatgttatactgatctgcaatatcggtccaccaattgaacctctatagacatatactgtcagctttcctgcatgtggccttacctgtaccaaaagatcacacgttggattcactttcctgttctttacttacaaaaaacatctacaggtattgtct

SEQ ID NO: 23539 - DNA, 358 bp, Zea mays
  Clone ID: MRT4577_121474C.1
acgcctgcagggtgccggtgccggaattatatagccgtatcgaccagctcatttgtcggcggacgtcctttactgttatttgtaagaaacctcctctgggagcaactgtggcatctccctcgatatacctactagcccatggaaggaacttatgacacctccatctagatcaccacattacgaaggatcacactggcaccctgcatagttgcaatgttttgcctgggatcctataacacaacagaccgtcttttggtgaaagggataacctgactgacaagaaacatctgatgccaacaccccaatgcacctatgacatcgcactgacgcaaaagtgaccaaaaatgctatcctacgc

SEQ ID NO: 23540 - DNA, 809 bp, Zea mays
  Clone ID: MRT4577_121475C.1
cctcgaggccggccgggccgggctgttcatgccatcactgccacccagaagactgttgatggaccctcagccaaggactggagaggtggcagggctgccagctttaacatcattcccagcagcaccggtgctgccaaggctgtcggtaaggttcttcctgaattgaatggcaagctcactggcatgtccttccgggttcccaccgtggatgtgtcagttgttgacctcactgtcagaatcgagaagggggcctcctatgaggaaattaagaaagctattaaggctgcttctgagggcccactcaagggtattatgggctacgtggaggaggatctggtttccaccgacttcaccggtgacagcaggtcgagcatcttcgacgccaaggccgggattgccctgaacgaccacttcatcaagctcgtctcgtggtacgacaacgagtggggctacagcaaccgcgtcgtcgacctgatccgccacatgttcaagacccagtagagagatatatttctgcctccctatcgagggtcgtccccgatggcctttggtcgcagaccatctttgctgcttgtctatgctgagaataaatgtgaacggtgcccctggacgctggatccatgctggttttggacacggttgtctttttgtgttttaacttatatgctgccgtcctgtaacgaattcgcaagttttagttcttttgtgctttgttaagaataaacaatgaggtttcagttttggtggcgccaaaaaaaaaaaaaaaaaaaaaaaaaaaaaggaaaaaaaaaaaaaaaaaaaggccccta

SEQ ID NO: 23541 - DNA, 1350 bp, Zea mays
  Clone ID: MRT4577_121476C.1
tgtactggagaggtggcagggctgccagctttaacatcattcccagcagcaccggtgctgccaaggctgtcggtaaggttcttcctgaattgaatggcaagctcactggcatgtccttccgggttcccaccgtggatgtgtcagttgttgacctcactgtcagaatcgagaagggggcctcctacgaggaaatcaagaaagctattaaggctgcttctgagggcccactcaagggtatcatgggctacgtggaggaggatctggtttccaccgacttcaccggtgacagcaggtcgagcatcttcgacgccaaggccgggattgccctgaacgaccacttcatcaagctcgtctcgtggtacgacaacgagtggggctacagcaaccgcgtcgtcgacctgatccgccacatgttcaagacccagtaggctagtagagagatagatttctgcctccctatcgtgggtcgtccccaatggcctttggtcgcagaccatctttgctgcttgtctatgctgagaataaatgtgaacggtgcccctggacgctggatccatgctggttttggacacggttgtctttttgtgttttaacttatatgctgccgtcctgtaacgaattcgcaagttttagttcttttgtgctttgttaaagaataaacaatgaggtttcagttaaaaaaaaaaaaaaaaaaaaacttcttccccctaaccgcgcaaagacgaaaatggcgacgggggttcctcttccccgaccagagcaagagtcagagtcagagccagagccagcgccagagccagagtcagggcgtgccatgtttctgtgccacagagagcaaagacgaaggcggcggcgttcctcatctcctcccggatcagagacagcgcgtgccatgcctgcgccttagatctcatgattggcatgcgcaccagacttctcatagatctacggtctccttgggcgttctggagctgaaaggtggcaccttccgccgagatacggtgggtctacgtgtattcaggtacttgacagcagtcatcctcctttggaagctgaataacgaagtagatctattcttatgaaatataattgaggatggagtctgttgaggcgaaggcgaagacgctacccttcacgcgaagccttcgtcgtttcgctgcaccaacgaaggcgagatggtcggcgcagttgccctttgtcatctccatcgcaagacgaaggccagattcagactccgacgtagtctgttagtcccgcgtcctcgtctcgcccggaggcccacgcggaatttggcccactgtaagtctgtaacgggccccgcgtggacaagcatattacgggccctcatct

SEQ ID NO: 23542 - DNA, 239 bp, Zea mays
  Clone ID: MRT4577_121477C.1
gagacctttgcaccggttgctctactttaaaccattgggttccttcttgcatatgcggagtgctatgacataaagctctatcaaatgaatcaaaaaagtgcattgataaatagctgcatccatgaactaaaatatgtccagcagccacacttccttgaagaccctatatatcctaatcatgcttacaggctgtccaaggcgctttatgaactatatcaatctgcaaaggcttaatatta

SEQ ID NO: 23543 - DNA, 1001 bp, Zea mays
  unsure (1)..(1001): unsure at all n locations
  Clone ID: MRT4577_121478C.1
caagtacacctccgatgttaacattgtttccaatgctagctgcaccacaaactgccttgctccccttgctaaggtcattccatgacaactttgggcattattgagggcttgatgacaactgttcatgccatcactgccacccagaagactgttgatggaccctcagccaaggactggagangtggcagggtgccagctttaacatcattcccagcagcacggtgctgccaaggctgtcggtaaggttctttcctgaattgaatggcaagctcactggcatgtccttccgggttcccaccgtggatgtgtcagttgttgacctcactgtcagaatcgagaagggggcctcttacgaggaaatcaagaaagctattaaggctgcttctgagggcccactcaagggtattatgggctacgtggaggaggatctggtttccaccgacttcaccggtgacagcaggtcgagcatcttcgacgccaaggccgggattgccctgaacgaccacttcatcaagctcgtctcttggtacgacaacgagtggggctacagcaaccgcgtcgtcgacctgatccgccacatgttcaagacccagtagagagagatatttctgcctccctatcgtgggtcgtccccaatggcctttggtcgcagaccatctttgctgcttgtctatgctgagaataaatgtgaacggtgcccctggacgctggatccatgctggttttggacacgttgtctttttgtgtttaacttatctgctaccgtcctgtaacgaattcactaagttctagttcttttgtgctttgttaagaatataaacaatgaggtttcaattttggtggcgccatccggtctgattgcgtactagtatcatgcatatctgagctggtctttccggagtaacagtttttttttgtttcgtgtcaatgattctcagcctgttcatttggtcttaatccatatcggttactctaaaaaaaagaataaaaaaaaaaaaaaa

SEQ ID NO: 23544 - DNA, 181 bp, Zea mays
  Clone ID: MRT4577_121479C.1
aagaaaaatgcatcctggatttgagccctctgctcaacacgacggagaacgccagattaccgcacatactcaagatcctgtacggctccatcgggttcttagataacgacctacacgcgtacattaacgtgcgcgacatgaatgacacacacataccactcctcaggagaccaccatcgta

SEQ ID NO: 23545 - DNA, 602 bp, Zea mays
  Clone ID: MRT4577_12147C.1
cccagcgtgcgcggacgcgtgggcagccgcgtgggcaaccacggaaaaggaggaaggatcaggaggacaacccacagtaccagtcacacgccgagttgtaccgggactactactgcaggtacgccttcacggacgccgctcgggacgctgcccgagctgctccacacgctgatccacatcaggagggagctaagcagggtgcacatacaactgcagctactagtgctgcaaatgctcctccgcattcgccttcttccacccgaagaactactccaagaactgcttcttgtgctgcctcaagggctgctgcaaccggttctactatggggtgaactttgccaccaacctggactccatcaccaacttcaggaacatggacacgtacgtggaccagaccgtggtccaccccgtggcggacgcggtggtcgctcgggacaaccgtcccatcaacccttacgtacgacctggaggtgcacctgtggttggacctgtcgtaggggctcacgtacatggccctgtccatgctgctgtcgcacttgtagggccactcggagatgcagctgccgatgcagaactacgtcgaggactacttgcgcggcgcc

SEQ ID NO: 23546 - DNA, 1705 bp, Zea mays
  Clone ID: MRT4577_121480C.1
gcggccatgacagcccggggagaaacgacgctcgcaggcgctgcccgagatctcgcggaccgatggcaatggcatccgtccagtcagtgatccactcccatgcacgccacgccacgcctcggctctgttcgatctatttctcctcctactagtcctgttattattattgctatataatagcatatcccgcggacaccggccacccgatcaagcactgctgctcatgtgcgcagcgcgaggctcgagccgccaaagcagggaagcagagagcaagctaataagcaaccgcgtttcccagattccttggcactgcagcagctgcgtccaagcttgctaggtggtggcggcagcagcagcctgcgcctatgtacactgcaatggcagcgcgaccgctgcttcttccccctccggtcctcctcctcctggtggtgctggctgcttcgtcggccgcccatggctacggcgcctacggctacggcgacgctgctgctgagctcagggtcgggttctacaaggactcgtgcccggacgccgaggccgtcgtccgcaggatcgtcgccaaggccgtccaagaggaccccacggccaacgcgccgctgctcaggctccacttccacgactgcttcgtccggggctgcgacggctccgtgctcgtcaactccaccagggggaacacggcggagaaggacgccaagcccaaccacacgctggacgccttcgacgtcatcgacgacatcaaggaggcgctggagaagcgctgcccggggaccgtctcctgcgccgacatcctcgccatcgccgccagggacgccgtctcgctggccaccaaggtgggtgaccaagggcggctggagcagggacggcaacctctaccaggtggagaccggcaggcgggacggccgcgtgtccagagccaaggaggccgtcaagaacttgccggactccatggatggcatccgcaagctcatcaggaggttcgcttccaagaacctcagcgtcaaggatctcgctgttctctcaggcgcccacgcgatcggcaaatcgcactgcccgtcgatcgccaagcggctgcgcaacttcacggcgcaccgggacagcgacccgaccctggacggcgcgtacgcggcggagctgaggcggcagtgccggaggcgcagggacaacacgacggagctggagatggtgccggggagctccaccgcgttcggcacggcctactacggcctggtcgcggagcggagggcgctcttccactccgacgaggcgctgctcaggaacggggagaccagggcgctcgtctaccgctatagggacgcgccgtccgaggcggcgttcctcgcggacttcggggcgtccatgctcaacatgggcagggtgggcgtgctcaccggcgcccagggggagatcaggaagaggtgcgcctttgtcaactagctagcgatatgctggattgtactttgtaccctctcgccttaattaaaatttaaatgctggagtttcacctagtctcgagagaatcttccatttttactactacatagataatagatttaggaacgtttctaggttttatatgattgtgaaacgtttgggctgagctcatctgtaactgtaaactctgatggaatgcgataacgtgttccatattgtgtgaaccggctttgacttgggaagcggccatggatattctctccgtcttgtaacc

SEQ ID NO: 23547 - DNA, 541 bp, Zea mays
  Clone ID: MRT4577_121481C.1
gctgagcacgttgtccctctgttggattcacttctgaacaagtcaaaggaaacagagaagtttcgacttctgcattatcccattcgtcttcattaaatggagccccatattgctctccgattcttggaccaaggcccctaagggcgacagaactgattgggtgatgtatgaatacagaatggaagatgaggatttggtttctgctgggttctcaaaggatgcttatgtactctgcaaaattttcaagaaaaggggccttggtccaagaatcggagagcatcatgggagctcctagaatgaagacggatggaatattgcagaagggcggacctcgaaattttatagtgagctgagaagatgagacctgcgggagacaggctccaaggcaagatgaccagtgtggctgaggggtaacctggtggcgaaaacgggatacgccaagctatggaataatctgttgcgattctagcagatgggaaatcaacccaagaaaagaggttggtcgggtggcattttgaagagatcagtcgggatacctgcg

SEQ ID NO: 23548 - DNA, 365 bp, Zea mays
  Clone ID: MRT4577_121482C.1
ggcggtttcttccaacttgccgcacgtttagctcgtatcactggcgataacaaatatctcgactgggctcttaaaatctgggactggtcttgggaagtaggcttcatcgatcaccgcaattatcacgtctatgacggagccagtgtagaagacaactgccagaagacaacataccattcttttacttacaccagcggtatatatctttacggcgcggcagttctcgccaactacacggagaagccagaatgggtcgaccgctcaaagcgtctcttaaaaggcaccgattggttcttttcaccatttcccaacgcgaccaatgtcatgtacgaagctgcttgcgagaatgtcaacacatgcaacga

SEQ ID NO: 23549 - DNA, 544 bp, Zea mays
  Clone ID: MRT4577_121483C.1
gcacgctgtcagggtacgacgcgtcggcgcacatgaccgaggagacgaagaacgcaggcaggaacggcccggtcgggatcatcactgcgatcggcgtctcgctggtagtgggctgggggtacatactcggsgkcacgttcgccgtgaagkacatccccgccctcctgagcaccggcaacgacgcgggagggtacgccatagctcaggtgttctacytcgccttcaagggccgctacgggaacggcgctggagggatcgtctgcctgtrggtcgtcgccgtcgtyktgtacttctgcggcatgagctccatgactagcaactcgaggatgacttatgcgttctcgagagatggggcgatgccgttttcgtccgtctggcacaaagttaacgagcaagaggtgccggtaaacgcygtctggctctcggctttcgtctycytttgcatggcgttgccgtctctgggcagcctcgtcgcgttccaggctatggcgtccgtygcgacgaccgcggtctacatygcctacgcgctgccgatcctcttccg

SEQ ID NO: 23550 - DNA, 685 bp, Zea mays
  Clone ID: MRT4577_121484C.1
taagatgtttaggtggcgtttggttcacttctcgctcaagcctagctctaagagccagggccactggagcctggctcaagacatacgctcgttatgctcatatctgcaaagcctggcccaagatgctttgaggattgtgcaagtctggctctgtagcttcatacatgtaaccgaacacatacctagaggcgctagctccttgcaccccacgatgcaagcactcacagaaccaggcaaccaaacacgtccttacttgtttggtgttacttgtgtttgtcatctgacacttattatcgtgttagatacttgtgcagatgataaaaggggccactgtaaaactgctagcattataactttataagatgttactcctgcatacatcatatcactgagctatttgaactagtaaggctttggccagcagatcatgcatatggttgtgtaaagcactgtttaaagagtggagtttgaaatgagagataaagatgagtaatttgctgcagatagcctaacaactttttaattatttccccttgattttgtcatgattcttttatatgttggtatatagtaccttcttgttggcaaatggtatttttttaaatatgtattttcactgtgtttttgagttgtagggtctttaataaacaattatctatgcattgggagattgcctgtttgatta

SEQ ID NO: 23551 - DNA, 267 bp, Zea mays
  Clone ID: MRT4577_121485C.1
caaactcgtccgcaacgactcatcgatcgagagcagcacacactgcacgcagctagctaggatcatcaacagcggcggccatggcggactccatgatctcctcgtcatctctggctgtggcgcctcacggcctgacgcccctctgccgccgcgcctcctccttcgacgtcgtccgctccaagaagatgatcactcagcgctagaccctacgggattgtgggtggacttaccgtctacatctactcgatcagtataaagggccatggc

SEQ ID NO: 23552 - DNA, 625 bp, Zea mays
  Clone ID: MRT4577_121486C.1
gtgcgtaagctcggaattcggctcgagggccagcatgccaagtctttattaaatcatgggagccccacttggccctgagcttagcaatccttttacactaacatggttgtacagtgctcaatgtatgattctgtccctccattgtttgttcccacgaagtatttgcgtgcatataccaagaagtgcagatcagttgcctgtggctgtgggctgtggcacacaagaaccctgtcctagaaattaaaggtttcagtagatgtagatgagtaagaagtataggaccaactgagattatctaacagatcagttctcctagagcacacacacgatggtcccaaccccaactcgttcgatttttcaagcacctgtagagtgtaagtaggacccatccagcaaatctgatgtctttttcctgcctacatcctacccaacacaaagaacatgtatgatattacgtatcacatactggcgcgtagaagcagaaacatgctctctcctgtttgcagcttctgcaaccatggcaaggggacactccacaatttttcctgaaaaatatagggttttgcccaaacaacggaagtgtgggagttgggagacacacaagaacacagttccaacttcaatg

SEQ ID NO: 23553 - DNA, 441 bp, Zea mays
  Clone ID: MRT4577_121487C.1
ggggggagaggagcccactcccgctggcctgtagtcgtcatcgcgcgactctgtcgacaaccaatggttctcggccatggagctatcgctgctcaatgcccgtcgcgtagcacctccaccgcggtggccttgacggcctgatcctggcgcggtagtccgtggtccgcttccgcgtgagcgtctccaccgcgggcatcgtgtcgcccaagtccttgggcccgaagaagcgcagcaagactgagatctagtacaggcttctcacgccccgggtctacgatagggacttggacgagatggagcgcatcttcaacgcggagatcaacaagcagctcaacgaggtgtagcacgactccctgctacaggagtccaagacagactacaaccagacccagttatggcgcaacccccgagttcaaggccgccttctcaaggatggagtgc

SEQ ID NO: 23554 - DNA, 396 bp, Zea mays
  Clone ID: MRT4577_121488C.1
gaactgggcacttcaatccttttctttggatgcaggaaccgtaatatggtaagggtcactggttatgggcacaattgattgtgttattgttgtgtttatcagcaaaaaatgatggaattcgttctgaattaccacccttcaggactacatatatgaagatgagttgcaaactttccttgaggagggggcgctttctgagctaattgttgcattctctcggtaagggccaacgaaagaatatctgctgcataagatggtggaaaaggtcagatacaacattcacccttccttaatatactatcacttttcaagtgttttgagtattcaatgtccactagaaaatgtgctcaactagatttacttctttttgttaccaggccatagaaatttggaaca

SEQ ID NO: 23555 - DNA, 426 bp, Zea mays
  Clone ID: MRT4577_121489C.1
ctgacacgtggttccgcccggacccgtcctgaccaatcaacacactcagtctgcgcgcgtgtgcaaatggagagaatggatgcgttgccgatgaacatggaaagagcagtcggcggtgccccccagcgcttgcacggggcgcgctagctgacttgatgcccatggcctgcccgaccaccggtgccctctgtcgccaagcgttctttgccgtcagacatgaagtgcgcatgcgttctgtaggaaaaagaaaacccctttcgggtctatgacccgtgggcccaacgcatgcaccgacagaggatgatcgtgcaagggatctggcgctatccacaagatgcagttggtggacgcgctgaagaatggggacataacccattatgctcgcttatcgagtacctcccccaacatacactacctaagtgttaa

SEQ ID NO: 23556 - DNA, 429 bp, Zea mays
  Clone ID: MRT4577_12148C.1
gggaaaacaaccccccaaataccaggcattttttcccggagaaggactcccacgggacgggacaaaaaaaacacagggggggcatgtcaatgggccggggggggggctttaaacaccacccacttttggggggcaaattaataatacccccccccttaataaagcttccccaggggaattcgatcgattcattattgaacaacaggggaattaaaaaaaaaccctggggggggcaatccccctttttggttgccgcactaagggggccacaacctcgggggccttggacccaaaaataaaatcctcgcgcaacgggggggaaatgggcccctccacggggttgggcctgcccagggccttgagcgccaggggcccccccttttgggcggaagatattaaggggccaaaaggggggcccatcctgggggg

SEQ ID NO: 23557 - DNA, 214 bp, Zea mays
  Clone ID: MRT4577_121490C.1
atcacaacatagggggatttacatatgagcgaggggattaacattaaaaatcgaatacacctcatgataacctttctacatccaaactaactgtagcatgcctatcatgccaaacatattaccttacatcaaacatacattttacattcaatacatcttttttgtcttacctacattaacattacaaatggattactatcaaagattgtaattt

SEQ ID NO: 23558 - DNA, 406 bp, Zea mays
  Clone ID: MRT4577_121491C.1
gctaccgtatcggcggcctcccggtgggggaggtgcgacgacaccaataatatcccggcggcaggtgcgacccgctcggcctcgccgacgaccccatggccttctctgacctcagaggcgaccgacctcaacaacggccgcctcaccatggtctacctgttcggctacttcatccaggcggggggggcctgcaacggccccctctagaacctcgctgaccacattggcgaccccgtcaacaacaacgcttgggcctacgacagcaagttctactccggccagtgatggaagcgcctacggagacctttcagtatcctgatgcatatcatcgcacgctggttttaggtttgaaccatgatgtaaactatggtacataaaacaacgaataattgtgttcctcctcatt

SEQ ID NO: 23559 - DNA, 311 bp, Zea mays
  Clone ID: MRT4577_121492C.1
gcaagcggttcagggacttcattggtaaggctttcgacgacgatgtacagtgactagctcataggacagaacagggagccagcgaactaaggcaattaacacttcttaatttgggtggggttagtttgttcccacacaacaacagtggttcttttaagtaaaatcgtcggagcaatctgcagtagatcaaaacacttgcatagtgcagcaaaaggaggcttagatggtttcttgtagcatttgtgaattttaagcatttggtgcgtaagttaaagctgaataacacttcacttttaaaaaaaaaaaagaca

SEQ ID NO: 23560 - DNA, 661 bp, Zea mays
  Clone ID: MRT4577_121493C.1
taggattgaaaattccacggaagtttcggtacattggtttaggattttattggggaactgcagaactgtctatgatgggcttattgcagatattcttggagatccatacattattgcactctcaaggttgcagcagatgcttcctctaagtgtaatctttcctccggcctactcaatttttgccatggttctttggagacgatatatttttaaccgcgaagatccacagctttatcagtctctgtcaaacgcaataagcgatattaccagacatcaaccttttcgggagatttgcttccgcaatacacatcggctgtataatcttctggcttctgatgttggtgattcagagtttgcagcaatgcttgaaactcatagtcctgacaggaattcaaaaatactgccatttatacctctccgtgcccggctttttctggacgctcttattgattgcaacacaccaactattcagggagatggagcttcagagccttgtgatcccaaagataatgaactaaagctttcagagaggcttatgcaacttcttgatactcttcaacctgcaaaatttcactggcaatgggttgagatgaggcttcttttagatgaacaggctcttatggaaaaattgcagcaggcaagacaacacttgaatcacttc

SEQ ID NO: 23561 - DNA, 695 bp, Zea mays
  unsure (1)..(695): unsure at all n locations
  Clone ID: MRT4577_121494C.1
cggtcgcgtgggcggacgcgtgggaccacggttacttccatttttggttggttagaagcttttgaatgttgccttacctaagtttgggtttggtttggagaccaaacaggatggggtggacctgtctctgattttgaggatgggaccatcccaacttagcgtttggttgaggggatagagtcatcctagttttgtggttggaatgttggatggattgaaggggagggatggtactgcttcttaacaccgttaaacagcagccaactatggccccacttgcctttagttgacctcacaagtcatcctcaagttttttttttcatgcacaccttatcttcatcctggtgccgctcttggcctcacgacccctcctcagagaacccctgctcgccagccccctgccctcctccaccagtagatacatgtttggtataagacttcaacatgtgtacttaatttgcttgcaaatggccagattgactgaaaccttaaatagtataaacagcaaatcaaagttctatcatttctggtaatttttctgaaggtaagacctaactgtaggatgctattgaactattggacaaaaaagtctattcctgttttgtctttttgaggggaaataatgtaangttatgtttntgtcgcttaccaaatgtaaagctagatcagcctatactgctgttaatttatgcata

SEQ ID NO: 23562 - DNA, 184 bp, Zea mays
  unsure (1)..(184): unsure at all n locations
  Clone ID: MRT4577_121495C.1
ctgcgggcctcagtagataaaccagcactactcatccgggggcccacggaaagtttcgggggatccggcgngctcgagatctcaaccaaagcgtggctgcgttgcggtcacacgtaactgcacgcaaacatggggaggaggaagaccagggtagcccaagggaggagagacgttccctgggacc

SEQ ID NO: 23563 - DNA, 144 bp, Zea mays
  Clone ID: MRT4577_121496C.1
ctttcattcgccgccgtcgcctgctctctgctgccgtcggcatgagcggacacgatgcgaaatgctatcgccagatcgcgaacatgtcatacaccaagtccacgtactgccgaggtgtctctgatcacaatatcaggctctacg

SEQ ID NO: 23564 - DNA, 361 bp, Zea mays
  Clone ID: MRT4577_121497C.1
acgatcattacaaaaaaaaaaaaaaatataaaatttaaaaaaaaaaaaaaaaaaaaagaaaaaagaaaaaaaaaaaaaagaaaaaaaaaaaaaaaaaaaaaaaaaaaaaaaaaaaaaaaaaaaaaaaaaaaaaaaaaggggcgaccgttcaaaaggacccaaggtaacctaaacttgcatgcaacgccaaaggtctacaataaagccacctaaattaaattcattggccgatgattaaaaaaaacttaacaggaaaaaccttggaataaccaaattaaatccccttaggaaaaaatccactcttagctactgggcataataccaaaaagccccccactgatcgcccttctaaacagttgca

SEQ ID NO: 23565 - DNA, 661 bp, Zea mays
  unsure (1)..(661): unsure at all n locations
  Clone ID: MRT4577_121498C.1
ctccgccctccaccgccgcgctaatctcgccgcgcacgcccctgtcttcgtcccccctaatctcgccgccgcatccatgcccctgcctccgcccccgtacgagccgcccccacgacgccgaccccacgatcgtcgagcccgcacttccgactcccacaaacctagcgcgcgcctctaccattctcgccgctatcctcgcgcccccgcccccgtctgcgactcctccgccattgtcgcgcctccacccttgtacgagaccccctcccctcgcgaccgtcgagcccatgtctcccgccattctcatcgccgtcgtcgcgcccgcgccttcaaagtaagcccacaatcgccttccatcggggacatcacccacaccctcgtctgcctcttccctcgcaatgcctaccaatgccttcaccgggcgcacatgcctcctccccgcgatggccgccgaggcagccccctgccacatccacggcttcccttaccctctctggattttctccgctgcattactgatggctgcagccaagccatggccgcatcggcatcgctgcctcctccactcagggcaccaccaccgttcctcctctccgccgncaccatcaggaggcgccagaggggacctgcactgcggcgaggcatgcatggcggcgacgacggc

SEQ ID NO: 23566 - DNA, 2107 bp, Zea mays
  Clone ID: MRT4577_121499C.1
aatctgtcaagcattagggcccctaagttgggcaatgctcgtacagatgtgaagccttagggcccctaagttgggcaatgctcgtacagatgtgaagcctgaccattttgctcgtgaagctaaggagttcttgcgcatgaggttgattggcaagcaagtggctgttgaaatggaatattctcgaaggatcagcaccgtggatggacagagtgttgctccaacagcaaacattgctgatacaagagtattagattatggttcagtttttctgggttcaccatcacagactgatggagatgacatatcttctgctccgagctctgccagccagcctggagttaatgttgctgaacttttactctcacgaggctttgctaaaacatctaaacacagggattatgaggaaaggtcgcactattatgatgctctattagcagctgaatcacgggctgagaaagcaaagaaaggagtgcattctcaaaaagaatctcctgtgatgcatataacagatttaacaactgtatctgcaaagaaggccaaagatttccttcccttcttgcagaggaacagaaggcattctgccgttgttgaatatgtttttagtggccatcggttcaaactaacaattcctaaggagacttgcagtattgccttctcattatctggtgttcggtgtcctggtaaaggcgagccatactcagatgaagctattgctttgatgaggagaaggatactacagcgtgatgtggagatagaggttgaagcagttgacagaacaggaacattcataggttcgttgtgggagtccaagaccaacatgggctctgtacttctggaagctgggctggcgaagctgagttcttttggcttggataggatgtcagatgctcatgtcctaacaagagctgaacagtttgcgaagcaacaaaagattaagatatgggagaactatgtcgagggtgagaatgcttcaaatggatccgcacctgaatcgaaacaaaaggaaatcctcaaggttgtcgccacggaagttcttggtggtgggaagttttatgttcagacagtgggtgaccagagggtggcttcaattcaacagcagcttgcatctttgaaacttaaagatgcaccagtcattggtgcctttaatcctgtgaagggagagatagtcctctcacaatttagccttgacaactcctggaacagagctatgattgttaatggacctcgctctgtagaatctctaaacgacaagtttgaagtattctatatcgactatggcaaccaagaggtggttccctacagtcgtctacgacccgtggacccatctgtttcctcttctcctgctcttgctcagttatgcagccttgctttcataaaagtgcccagtcttgaggatgactttggtcaggaagcagcagagtatctaagtgaatgtttgctcagtagctcaaagcaatatcgggcaatgatcgaagaacgtgatgcttctgggggaaaatcaaagggacaaggaaccggaaatgttctcattgttactcttgttgatgcggagacagaaagtagcataaatgctaccatgcttgaggaaggccttgctcggcttgaaagaagcaagagatgggacactagggagaggaagacggctctccagaacctggaacagttccaggagaaggcaaagaaggaaaggctccggatctggcagtatggcgatgttgaatcggatgaggacgagcaggccccagctgcaaggaagcctggaggtcgtcggtagagctccccaaatgtgagactctgctgggagttatagatgcaacttagagggtaccttatttattcggttagaaaacagaacttagcgaggcgaaactttctcggtttgagcacttttgatattccgttttttacatcgtaagcttataaggttaaaggtacattgttttttctctgaacacaataaaggtcgtctatgcgctgcagttctttgtgtagtcagaatataatatttgttgatactaagaaatgcagtgaattaaagttaatattgcatttaataaaaaaaaaaaaaaaaaaattacaaacgtaaaaaactcgaaaaggggcgggg

SEQ ID NO: 23567 - DNA, 376 bp, Zea mays
  Clone ID: MRT4577_12149C.1
tgtggggtgtgtgtgtgcctgtgtgggggaactgctggggatggagagcgagatggcggacgcgcccgccgcggcgatccccgccgccgccgccgaaccgctcgcggcggtggcggaggaaggggaaggggaagcggagggggaggcgcccgccgaggcggcggtggggtccaccctcaccatggagcgcgtcgccgccgcgaagaagttcatcgagaaccactaccgttcgcagatgaagaccatccaggagcgcaaggagaggcgctttaaattggagagacagctagcttcttctcaagttcccaaggagcagcaaatcgatttaataaaagatcttgagaggaaggaaactgaatacatgcgacttaaaagg

SEQ ID NO: 23568 - DNA, 883 bp, Zea mays
  Clone ID: MRT4577_1214C.1
cattgggtacctcgaggccggccgggatcgtcatttcttatcttccggttccccaatctgacgtgcaccgtaccaaatctggcgcgcgccgccccggctgctggatgaacaaggagaggctcatgaagatggtcggtgtcgtccgcaccgggggaaaggtcaccatgctcaggaagaagagcgacatgcgcaagacggtcaccacgtactactagatcggtgagggcggaccaagagagtctgcagcgcactcgtccctgagtactggtcaacaccatacctgcaatcgacgaggtgaacatattcaagaaccatctcgtcatccagttcttgaaccccaaagtgcaagcttccatcgcggcaaacacatgggtggtcagtggatctcctcccacgaaaaagctacaggatgttctccctggtatcattaaccagcttggccctgacaacatggagcaactggagaggattgccgaggagatgcagaagcaggtggctgctgccggtgcggcagcacaggtcaaggaagacaacgatgacgatgttccagagcttgttcctggagagacttttgaagaagtagctcaggagacaaaagcctgatcataggctgcaaatagtgaaatgttactgcaccaatgctgtgaggtcatggttttcgtgtgatggcactcttcttcctcccctcctaggccagccccagccactctttgtgttcgctgttggaaacttttagtttctccatctcaagcttttacctaaggttgtgcatgtggagatgccatggaaatccattttgctgattatttggtttgtggtcggttcaaaaaaaaaaaaaaaaaaaaaaaaaaaaaaaacaaaaaaaaaaaaaaaaaaagcggcc

SEQ ID NO: 23569 - DNA, 464 bp, Zea mays
  unsure (1)..(464): unsure at all n locations
  Clone ID: MRT4577_121500C.1
cggtgcaaaaatgagctcgataaagatatcacatcaattatactgagtttcgcagtggcatcggttttggcgcaacattcttacaccattccgatgaaaagggactttaatggagtttatttatgggttaacactaatattacgaaccatacggccatattttttcttgatagtggggggggccgaacaattattaaaaaatctgcgcttaaaaacggtgtaacagttggccatgataaccaatgctgctgccataaatcagcatcattctcgtttacagctagctatggcccaacaatcgaaggaagaatagctatagtagatgatgacgtaattaagcatgataatgctgatggttatataggacttgatctcatgcttaaatgtgaaatggtaatgcccatccatactagcgaaatcaccgngcactgttggtgtggccctgccgcggtgcgggggcggat

SEQ ID NO: 23570 - DNA, 254 bp, Zea mays
  unsure (1)..(254): unsure at all n locations
  Clone ID: MRT4577_121501C.1
gtcagtctcccanactaatcccaaggctcacgatcccaaaggcctcctggcgacgcaccgcctactgcctcccactcctcctcgtggccgccgccctcgccctcgccgccgtccctgctcgcgcggcgctgggcggcgggcgcggcccgttgctgggcggatggggggggggggggtgagtgagcaactcgaacaacaggagctaggaggttggaagatggggcaggcgaagggtgagagagggacgaggacag

SEQ ID NO: 23571 - DNA, 1108 bp, Zea mays
  Clone ID: MRT4577_121502C.1
cgggctaataaatatgggaccaataataaacctctgttggttacaatagtttcctgtttcataaaaactcccttgtggcactgcacacccaactcgtctaacaacgggtgttttcctatgtggttgttgatgacttacaacattattcgtttttatctatagaatgcaagtgaatgtgaaatgaatagtatgaatagagaaagctaagtttcaatatttatttggtttcagtgtgccatgtaaattagttaatatattgtcacttgtattagaaatagattactcctgcacatttgcaggatgtactgacaaaaggcatgtttatgtctgaattttcttatcacaatatagttgtatactcttctcgaattgtcattgtcagctcctggtcattctagaaattttattgcgaagtcttcatgtcgtttgtgcagattgttaatggacctcgttctgttgaatctccggacgacaagtttgaagtattctatattgactatggcaaccaagaggtggttacctacagtcgtttacgacctgtagacccatctgtttcctcgtctcctgctcttgctcagctatgcagccttgctttcataaaagtgcccagtcttgaggatgactttggtcaggaagcagcagagtatctaagtgaatgtttgctcagtagctcaaagcaataccgggcaatgatcgaagaacatgatacttctggggggaaatcaaaaggacaaggaaccggaaatgttctcattgttactcttgttgatgcggagacagaaagtagcataaacgctaccatgcttgaggaagggcttgcccggctcgaaagaagcaagagatgggacactagggagaggaagacggctctccagaacctggaacagttccaggacaaggcaaagaaggaaaggctgcggatttggcagtacggagatgttggactctgccgggagttatagatgaggacttactgaggggtaccgtatttatattcggttagaagaagggaacttagcgaggcgaaatcacttttgatattccgtttttacaggcgaaactttctttgttttagcacttttgatatttcggttttacatcgcaagtt

SEQ ID NO: 23572 - DNA, 251 bp, Zea mays
  Clone ID: MRT4577_121503C.1
agagcggtgctttattttctctatgaaacccgcgatgcacgagcctcgcttatattagaaacaaaacccgcaaacaggggggcccgtaatggtcatatcccaccaattttgggccccttcctaacccacggttgaagcacctggaaacccacgcccggattataacaccctcgtttttaaatcccagagaatagaactccctaaacgtactttttatgaaaaagggggggcggctgcttaggtcaccacct

SEQ ID NO: 23573 - DNA, 913 bp, Zea mays
  unsure (1)..(913): unsure at all n locations
  Clone ID: MRT4577_121504C.1
cgaaaaaaaaaaaaaaaaaaaaaaaaaaaaaaaaaaaaaaaaaaaaaaaaaaaaaaaaaaaaaaaaaaaaaaaaaaaaaggttccctacagtcgtttacgacctgtagacccatctgtttccttgtctcctgctcttgctcagctatgcaggccttgctttcataaaagggcccagtcttgaggatgactttggtcgggaagcagcagagtatctaagggaatgtttgctcagtagctcaaagcaataccgggcaatgatcgaagaacatgatacttctggggggaaatcaaaaggacaaggaaccggaaatgttctcattgttactcttgttgatgcggagacagaaagtagcataaatgctaccatgcttgaggaagggcttgcccggcttgaaagaagcaagagatgggacactagggagaggaagacagctctccagaacctggaacagttccaggagaaggcaaagaaggaaaggctgcggatctggcagtacggagatgttgaatcggacgaggaggagcaggccccagctgcaaggaagcctggaggtcgtcggtagaggcataaaaggctgcagtctggcatgctatggaagttttggacaaccccaaatgtgggactctgccgtgagttatagatgaaaacttagactgaggggtaccttatttattcggttagaaaagagaacttagtgaggcgaaactttctcggtttgagcacttttgatattccgtttttacaccgtaagcttataaggttaaagatacattgttttttctctgaacttaataaggtcgtgtctatgcgctgcggttctttgtagtcagaatataatattgagaagtgcagtgaatgaaagtttaaggattgcatttaatttanaaaaaaaaactaaaaaatagggcggc

SEQ ID NO: 23574 - DNA, 449 bp, Zea mays
  Clone ID: MRT4577_121505C.1
ccggccgggccttcatggtctctctgctctcacagctctttctaatggagatcacctgggccggctctatgccgatgcggaagggacgacggcaccttgctatcttggatgatcagcagacggcgaacagcgagacagtgaattagcgactcgagagcagcaggccggcggcaccccttggccagagatagctgcagccgcgcggccctattcacagctcaattttttcgctccggttgaattaaagccatttgcactgctacagccgtaatccataaatacaaaatactgtagaaaaaataataaatttaagccggcagcgaacagacatttgtttgcaagatccattgtccgattgttttattgcactgtatgtttaatttcaattcttgttgagattttgcagataaaatatatttaactccaaaaaaaaaaaaaaaaaagcggcc

SEQ ID NO: 23575 - DNA, 357 bp, Zea mays
  Clone ID: MRT4577_121506C.1
cggacgcgtgggcggacgcgtgggcggacgcgtgggcggacgcgtgggtgagactctgctgggagttatagatgcaacttagagggtaccttatttattcggttagaaaacagaacttagcgaggcgaaactttctcggtttgagcacttttgatattccgttttttacttcgtaagcttataaggttaaaggtacattgttttttctctgaacacaataaaggtcgtctatgcgctgcagttctttgtgtagtcagaatataatatttgttgatactaagaaatgcagtgaattaaagttaatattgcatttaattattctcgtgcaatgatgatttctctcgtacgtatttactg

SEQ ID NO: 23576 - DNA, 2561 bp, Zea mays
  Clone ID: MRT4577_121507C.1
gtggtggcaggcacagacagctttagtaatataattggttctgtgtattaccctgatggagagactgcaaaggacttggcccttgagcttgtcgaaaatgggctggcaaagtatgttgagtggagtgccaatatgcttgatgttgaagtaaaaataaagctgaagaatgcagaacttcaggctaaaaaggatcaattgagaatctggacagggtttaagccaccagcgacaaactcgaagcccattcatgaccagaaatttaatggaaaagtggtagaggttgtaagtggggattgcattattgtggctgatgattctgctccatatggcagtccttcagctgaacgtcgggttaatctgtcaagcattagggcccctaagttgggcaatgctcgtacagatgtgaagcctgaccattttgctcgtgaagctaaggagttcttgcgcatgaggttgattggcaagcaagtggctgttgaaatggaatactctcgaaggatcagcaccgtggatggacagagtgttgctccaacagcaaacattgctgatacaagagtattagattatggttcagtttttctgggttcaccatcacagactgatggagatgacatatcttctgctccgagctctgccagccagcctggagttaatgttgctgaacttttactctcacgaggctttgctaaaacatctaaacacagggattatgaggaaaggtcgcactattatgatgctctattagcagctgaatcacgggctgagaaagcaaagaaaggcgtgcattctcaaaaagaatctcctgtgatgcatataacagatttaacaactgtatctgcaaagaaggccaaagattttcttcccttcttgcagcggaacagaaggcattcggccatcgttgaatatgtttttagtggccatcggttcaaactaacaattcctaaggagacttgtagtatcgccttctcattatctggtgtccgttgtcctggtaaaggcgagccatactcagacgaagctattgctttgatgaggagaaggatacttcaacgagatgtggagatagaggttgaagcagttgataggacaggaacgttcataggttctttgtgggagtccaagaccaacatgggctctgtgcttctggaagctggacttgccaagctgagttcatttggcttggataggacctcagatgcttatatcctaacaagagctgaacagtctgcgaagcaacagaagattaagatatgggagaactatgtcgagggtgaaaatgcttccaatggatccacacctgaatctaaacaaaagcaaattctcaaggttgttgtcacggaagttcttggtggtgggaagttttatgttcagacaatgggtgaccagagggtggcttcaattcaacagcagcttgcatctttgaaacttaaagatgcgccggtcattggtgcttttaatcctgtgaagggagagatagtcctcgcacaatttagcgttgacaactcctggaacagagctatgattgttaatggacctcgttctgttgaatctccgaacgacaagtttgaagtattctatattgactatggcaaccaagaggtggttacctacagtcgtttacgacctgtagacccatctgtttcctcgtctcctgctcttgctcagctatgcagccttgctttcataaaagtgcccagtcttgaggatgactttggtcaggaagcagcagagtatctaagtgaatgtttgctcagtagctcaaagcaataccgggcaatgatcgaagaacatgatacttctggggggaaatcaaaaggacaaggaaccggaaatgttctcattgttactcttgttgatgcggagacagaaagtagcataaacgctaccatgcttgaggaagggcttgcccggctcgaaagaagcaagagatgggacactagggagaggaagacggctctccagaacctggaacagttccaggacaaggcaaagaaggaaaggctgcggatttggcagtacggagatgttgaatcggacgaggacgagcaggccccgcctgcaaggaagcctggaggtcgtcggtagagactgggcagtgtaaggctgcagtctggcatgctatgaaagttttggacaaccacaaatgttggactctgccgggagttatagatgaggacttactgaggggtaccgtatttatattcggttagaagaagggaacttagcgaggcgaaatcacttttgatattccgtttttacaggcgaaactttctctgttttagcacttttgatattccgtttttacatcgcaagttataaggttaaagatgcattgtttctttttctctcaacttaataaggttgtgtctatgcgctgcggttctttgtagtcagaatataatattgagaagtgcagtgaattaagttaaggattgcatttaattaaaaaaaaaaaaaaaaagccccgatttctctagtaaggggtacaaacaaaaacaataaaaggggccgcctctaactcacttcccaacagaccaaccgaataacaagcaggcgggggc

SEQ ID NO: 23577 - DNA, 780 bp, Zea mays
  Clone ID: MRT4577_121508C.1
ggccgctttttttttttttttttcacgaataatggtttggcacaatcatcatatggcaaaataacaaagttgtaagcgccaccgagccagagcccagtgagaccttactgatcagtcttacacatgtaggagtttcagtcgctgcacacaaagcttattggttccgcattgcatactactggtacaacagcagcgaccgttgttggtatgtacagttctcttatgagggggaaaagaatgtcaacagcagactcaaggggcgggatttcagttaggaggctcatcttgtttgttcttttggtacactgtttctaggcactccttggcccggtgaaccttcgattggaggtaaaagctcccagatttgccgttcctttcaaacaagttatcgtatcgctgtacgatctcttcccacgtcgaattctctgagacacccagtatctgcctcgcttcctgttcggtcattgttttgcttgctctacgaatattgtttattgcctcatgggccacaccagttttatttgcattatcaagtgctttacgatatgcctgaagcatagctcttcctataatcgtagagcccatgacaatcaggtttgcaataagcttcccagccatggtagctccgacgaggatgtgatccaagccgccgcgcagccgccggagagagagaaacgacgatgggagtggaagggagggggtggtacgcgattggttcgtttcgtgctgggccggtttggttcccggccggcctcgaggaacccaatcgcccataggagt

SEQ ID NO: 23578 - DNA, 438 bp, Zea mays
  Clone ID: MRT4577_121509C.1
caaaaaaatttttttggaccccttcaaaaaatttccatccgggcaataaggggggggcctgaaaacccaatccagggggggggggggtcagcttttcccaaagggggggttccgggggggggaaacgggcccccagaaaaaaaattgggaatttttgggggggccatttccagggtggggggccattccgcccccccaaattttttttaaaagggggaagggggggccaaaaaggggtccttaaggtgggccttcaaggggcccggggaaactttaaaacccccaaaattgggttggtttttggaaaaacctaaattttctggggctaacgggggggggccccccccaggggtccttaaagggggccttttccctcaacttttaaaagggggaaaaaaaattttgggggtggggaccaaactccttgggggggggggc

SEQ ID NO: 23579 - DNA, 236 bp, Zea mays
  Clone ID: MRT4577_12150C.1
gggaaagaaccaccagggggaaccggcccggaacacccgggacgacccacgcgaactgatacaccaacggggacgcgggggaggcgccgccgacaaacagcgacggcgggcgccaaccacaaaaccgaggccgagagcccggacggcagagccacaaaccagacgcagagcagacgccaccagcgagacacggaaagcacccccggagaaccacggagacggcccagcgccgagca

SEQ ID NO: 23580 - DNA, 869 bp, Zea mays
  Clone ID: MRT4577_121510C.1
agcatcaagaataatggtttggcacaatcatcatatggcaaaataacaaagttgtaagcgccaccgagccagagcccagcgagaccttactgatcagtcttacacatgtaggagtttcagtcgctgcatacaaagcttattggttccacattgcatactactggtagtacaacagcagcgaccgttgttggtatgtacagttctcttatgagggggaaaagaatgtcaacagctgactaaggtcttgttcgtttctgtcggattgtacccgaaatcgttccagctaatcaaagtttatataaattagagaagcaatccggttaggaatcgttccgacccaccaatccggcacaaacgaacaaggcctaaaggggcgggatttcagttaggaggctcatcttgtttgttcttttggtacactgtttctaggcattccttggcccggtgaaccttcgattggaggtaaaagctcccagatttgccgttcctttcaaacaaggtatcgtatcgctgtacgatctcttcccacgtcgaattctctgagacacccagtatctgcctcgcttcctgttcggtcattgttttgcttactctacgaatattgtttattgcctcatgggccacaccagttttatttgcattatcaagtgctttacgatatgcctgaagcatagctcttcctataatcgtagagcccatgacaatcaggtttgcaataagcttcccagccatggtagctccgacgaggatgtgatccaagccgccgcgcagccgccggagagagagaaacgacgatgggagtggaagggagggggtggtacgcgattggttcgtttcgtgctggaccggtttcccggccggcctcgagg

SEQ ID NO: 23581 - DNA, 524 bp, Zea mays
  unsure (1)..(524): unsure at all n locations
  Clone ID: MRT4577_121511C.1
taacaaatggaagctcttgtggataagctgtgcaataggtttgctgccttaaatggtactatgcttatgtctttaataggataaatagtaccccatctgtttgctacgtcacatttgaccagcatgcatacaaaggaagtcatgttttgcataaagttggtttgattcctagatgggtgcttgtacttactgttaataaggtactttgggaaagagcctccctcagtgttgtggtagtgaatttattgtgaacaaaaaaggtggtaagagtaagaaatttgcaacagcataggagagaaacattactgcattctattataaaatcaaaaggagagaacattgcacatatcagaaataagatgtgatcaattagttcttttttaacactcttgtgcctgcgattgatgtctacattttagctatattgaaagttaacacttatttctttgtttcagtcatttaatngnttgttttctcgagacaattgtgctgtaagacatgcatcgtaacatttctcagacgtc

SEQ ID NO: 23582 - DNA, 351 bp, Zea mays
  Clone ID: MRT4577_121512C.1
cccactcaacctatgtatcttacactactaccaaactcataacaacccaatccacaacattacccctacggacctttctaaatctctcctggctctcaaatccatctacacctactccccaaccatcaccaccctccctacacatccacacacacaccttaatcaaacaacccactatccaatactacctactactcaccacccacctaccctccatcttaacattattatccacacacctacaacacccaacctccctactaacaaccatatactccacccatttcactactccaaccactacctccatcacacctactacaacatctcttaccaacactcatacacaca

SEQ ID NO: 23583 - DNA, 223 bp, Zea mays
  Clone ID: MRT4577_121513C.1
cccggggctccccacgcacccacaaccccgtctcttcctgaggctcaagcttagcttaagctccgtcgggtctggcagaggaaaagccgcgggcaatgcgagcgcggcacgtcacaccggaatgttctgacatatgctcagatgcaacacatcatggcttccaagccgacaaggcttactgctgacttgtagactttcatgtgggagtgatctacgtgactaa

SEQ ID NO: 23584 - DNA, 331 bp, Zea mays
  Clone ID: MRT4577_121514C.1
attgggtacctcgaggccggccgggagagggtccagactcgatgacactatcctctgcatttttattcctccatgagggcaagctgatgtaactactaacattgtcggactccagctactttgtctgtcttgcggccttctccagagtgttcattacctcgatctgctagcgcgcctcagtgacaacgccttggtcgccatgatgatgtggtccctgttggacgccgtgagagaggcgcgatctgctcaggaagtttgtctgcttcgggctcgaaacctcagtagtccttggctccgacgtcaatgcggacggaggcctcatgagcatgac

SEQ ID NO: 23585 - DNA, 365 bp, Zea mays
  unsure (1)..(365): unsure at all n locations
  Clone ID: MRT4577_121515C.1
aagcctccacagccacggcgccgaccgcggccccggacccgcggcggcgcgcgcgaggggccgacgccacggagaccccgcaccaccacggcgacgacgggccgccgaccgcgcgacagacaccgcacgncgcaggaggagcgnaaggggggggcgggccgccgccttttttcatggcgcagcctatgaactacttcggcgngccggcggcggggcactatctcgccccgccggcgctggggggcggcatgcctggggcggtctaccacattgccgggggcggaggaagcgaggcgcctggcggcgagcgtcacgcggccgcccgggtggtcggcgtgtcgccccacaggcgaggggttgcccgg

SEQ ID NO: 23586 - DNA, 692 bp, Zea mays
  Clone ID: MRT4577_121516C.1
aagcctttcttattattttagtatcggacatccttctaggctaccattcagagtcaggttggcatacatttgtagaagttattactcgagcattatgggcttgaagctgacgaagcggcggtcacattttttgtttgtctggttccagtggctttcgatgtgtacataaaatattgggtatacaaataccttccaagattatcacccagtgtgggaaacgttttggatgaaataaagcgacattagagaactttttttagtttccttattgggaaattgcttgagaatttgtcgccttccagatactcggaacaaggaggacgcactgttgctttatggacaaattgcacttgtctaatttttcctttgactttgccattattggacttgtgacttttttttatggggtttcatgcatgctatggttaattccttcgcaagcttattcaccatattttcatgattatgcggaggaagttgagtattccactttctcttccattgaataagtcccttcctagcctatcaccctcttctgtcttctttgacctctttactttgttttataatggaatcatcgcaaggtcctataagtgttagcacatgatgtaataaattgagcttatgtacatgtgcacttgtgagtgtgaggtactgaggttggaattaaaaaaaaaaaaaaaaaagcggcc

SEQ ID NO: 23587 - DNA, 717 bp, Zea mays
  Clone ID: MRT4577_121517C.1
ccacgagctcctcctccccccctcacggcctcctgcacgctcctcccccatcgtcgccaccagctcctcctcctacgccggcgcatcgcaccgtgcggcttcgcccacagcccttctccggtgagtagccaagagccccagacatcatgagcggaggcgtcgagccggagaccccacccagtagcggcggcagcgccaccggtagccccatggcccggaagccgccgcgtcaccagctcacggccatacgccactacgccagcagtgcgcgcatcgccgcggcctccacagacttgggcttggattcggggacactgagcttgatctcaccagcagacatccgtcccagcttcctgccggtcttccggtctgggagctgcgccaatatcgggccaaagtcctacatggaggacgagcatgtttgcatcgacagcctcatcgagcacctcggaatgcttactcctgctatccctgcaccgggcgctttctatggggtctttgatggtcatggtggtacagatgcagtctgtttcgttcggaagaacttactgaagttcataatcgaagatggtcacttccccaacagcatggagaaagcaatcagaagtgcatttgtaaaggctgatcacgcgattgcggattccctttctcttgaccgcaattcagggaccacagcattgaccggccttatttttggcagacattgcttgttgcaat

SEQ ID NO: 23588 - DNA, 294 bp, Zea mays
  Clone ID: MRT4577_121518C.1
catatatggtaaagatgtagactaaaaaaaaatactatacgggacaaccaaaggacccagaatggaaaacaacacaaagcactgagtttcctattgataccctccataaaaagttcagaccaacaatctatgcatgaacggcagattcaaaacgtcgctaacaaagcaaaaaaattcatcggactgagcaagcacctaaaagaggaacctactggatgcactgggagacgcactagaaaccattaccgaagccgatcaagcgaacaacacttcacatgaaaacctgaaacggac

SEQ ID NO: 23589 - DNA, 210 bp, Zea mays
  Clone ID: MRT4577_121519C.1
aattatctcagcattttgaaagtataggcttagcatagaggttattgtgtcttggtatatataggtcagataatagatttcagcaactgccagctgtttagttggtgagcttccagagagctctggagacatggtgaggacagacagtattggaaactcttagaactcccagatttcaggcttatcctgtacttgttaactttgaggtga

SEQ ID NO: 23590 - DNA, 309 bp, Zea mays
  Clone ID: MRT4577_12151C.1
ggggacccgaacaagaaaaaaaagaccccccccccgattggcaaaaggggagggttaattcagggccccgatggtatgaaagaaaaacgtgcgagaagccttgccttgccttttaaaagggacggcccggagcccccagataaaagggcttcccaaaacccctggggggccccaaggttttaaaggggtcaaaaccgctttttgagaggtgctattttaaaagagatgtcgggttggggggactttattttggacccaagcctttacggcggcaaactgaaaagaacactcgaagcttccccaccttgg

SEQ ID NO: 23591 - DNA, 1598 bp, Zea mays
  Clone ID: MRT4577_121520C.1
cattgggtacctcgaggccggccgggaaagaaaacccaacgcaaaagcaacaaacaactcccaaggtccaaagcccacccgtactcatccgagatccccaaccatggccgtcggcgacgtggagacggcggcgccgctgctgcccccgccggcgtctgccctggcggacgagccctccgcgggcccgcccccagacgaccggctcggcatcggctacctcatcttcttcaccctgggcgccggcttcctgctcccctggaacgcgttcatcaccgccgtcgactacttcgacttcctctacccgggggcccccgtcgaccgcgtgttctccatatcctacatggtctccgccttactgcccctgctcgtcatcgtgctcttcttccccaagtccagcgcccccatccgcatcaacacggggctcactctcttcacgctcacgctcgtgctcgtgcccgcaatggacctcatctacgtcaaggggagggccgggctgtacggagcgttcgatgtgactgtcgccgccacggctctgtgcggggtcgccgacgcgctcgtgcagggaggcgtcatcggcttcgcgggggagctgcccgaacggtacatgcaggccgtcgtcgccggaaccgccgcctcaggagtgcttgtctcggcactgagagtcttcaccaaggcactgtacccacaggacgcgaacgggctaaggcaaagcgcgatcctctacttcgtggccggcatagtcctcatggtcatctgcatcgtgtgctacaacgtggcggacaggctcccggtcgtgatatactacaagaacatgaagaagagggcgcagaaagcggaggtcggcggcggcatgacgggccccgcgtggaggtcgacgctgtggagcatcgtcgggaccgtgaagtggtacgggatcggagtggcgctcatctacgccgtcacgctctccatcttcccagggtacatcacggaggacgtgcactccgaggcgctcggggactggtaccccatcatcctcatcaccgcctacaacgtgttcgacctcgtcggcaaggccctgcccgctgtctacctcctccagaatggcagcgccgccatcgcggggtcctttgcgaggctcctgttctacccgctcttctacggctgcctgcacgggccgagctttttccgcaccgagatccccgtcaccgtgctgacgtgcctcctggggctcactaacgggtacctgacctccgtcctcatgatcctcgcgcccaaggctgttcccatccaccactcggagactgccgggatcgtcatcgtgctgttcctcgttgttggccttgtcattggttccattgtggcttggttctgggtcatctgataccggggtacgttctctgtcacgtcgatgtatcatagcaccatgctcgtgttcttttgtgttcgatttgccacgcaatgacaacttgttagtgtatactgtaacccaggtgaaaagatttccgaaatgtgtaatttgcaactcttggaattggatttgaaggtgacctaatgtcaatgtgaagaatctcgctccttatcaaaaaaaaaaaaagcggccctcgacctcctttgaa

SEQ ID NO: 23592 - DNA, 278 bp, Zea mays
  Clone ID: MRT4577_121521C.1
ttggtggatgtctacattgcactgttcaaggtactaatgagctctggtgataccaaaggagatacatatagcaaggacagcaagaaaaaggtaggaaaaatagagggaggaaataacaagatggactccagatccaagggaaacaatgaagtgggttcaacagcaggatcagatttggagctggactccagaatcctttctgcacttttaactggtgtaaatagggcattaccatatgttgcaagctcagaagttgacgatattgtggaagtgcagac

SEQ ID NO: 23593 - DNA, 237 bp, Zea mays
  Clone ID: MRT4577_121522C.1
atattcttttggcaatttgtattgcttttaaaaaaaatctacttctttcactaaaaacttcggtatccatgtgatatccgatgtattctacataactccaaaattgctaccgggcaatactcacccttacctattcttttaactgatatgtccaccttttcaggttattttggctattcattttaatgattgtatgtatgtgcctatgtatgataaaaaaaataatgtcgttttttt

SEQ ID NO: 23594 - DNA, 187 bp, Zea mays
  Clone ID: MRT4577_121523C.1
gccgttgccaggattccggcatcatgacttccctctcctccgctgtggcactgccgtcctcgcgccggtggcgccgcggcggaggcgctggccaagggcggcgtggagacggtgctaatcgagcggaagatggacaactgcaagccttgcggcggcgccatcccgctgtgcattgtggcgtattgtt

SEQ ID NO: 23595 - DNA, 357 bp, Zea mays
  Clone ID: MRT4577_121524C.1
ggaaacgaaaaacttccacgactcaccattcaggagcgaataccttgggatcaaagcccccacgggccaccctttactacatggagggagcccccagccagaagcgcacccatgggttaatgccaacgaacttggctcggggaaacatgcatccacaaaaccccgtttacaaacgggggagacgattggtaaaccccataaatgactagaaacgggcccacctggacctaacttaaaagcccaggagcattactttattactctccgccaggcaggcattcctcgcccggacgcgcacaggacccccaatttaataaatcgggtcgcaataaacgttggggcaaactttgaacggca

SEQ ID NO: 23596 - DNA, 195 bp, Zea mays
  Clone ID: MRT4577_121525C.1
cggacgcgtgggaaaatcatcaaaaaaagaaaaaaaaaaaacaaataaagaaaaaaaaaaaaaaacaaaaaaaaaaaaaaaaacaaaaaaaaaaatctccaacacaagggttgacctcaacgatgttccacgattaggggccacctcaatccaacttcataacccttctaatctttcacggaacttcatgtcctc

SEQ ID NO: 23597 - DNA, 570 bp, Zea mays
  Clone ID: MRT4577_121526C.1
aattcctttccatcgagtgatagaggtgcggttatcgatcatgtcttagcagccggtgccggaaccaccatatcgtgtcgtataggcactgcgtatggaggagacgccccatatgcgtgcgatctcctgcgtgtagctctcctactgcggtcgccatctcgcgacagactcactcgacttaacggaagcgctgatgtccacgtcctcactgggcgcaatcgccggcctgcgcgagcactctgacggtgatctccgacctgtcctggtgcactgagtcagactacatctggtccgtctccgactaccgaaacatcgatatcggggacatgcggaccgtcctcgaaggtggcgaacctaggacgcgccgtctgcggtcaagaccagatgagtccgcgtggtcaaggggcatcaccaacgttctctgttcactgctaacttcaacgacgagagcagctcagatatcgatgtccggaggatatgattgcaacgtgcgcatatgggacttcatgagtgggcggtgcacacacgccatctaagtgcactctgagcccgtgatctacatgaatttca

SEQ ID NO: 23598 - DNA, 482 bp, Zea mays
  Clone ID: MRT4577_121527C.1
gggaaacaagttttttttactttgcccaggttgaaaagggcccccccaaaaaaggaatacccttttttgcttgccctgccttgtttgtccccaaaaaaaggcaacttccccgcttttgcccaagcctacaagttcctaaaaaaattggcaatttaagggaatttttttggcaggtttaaaggaggggagtccccgagccccaaggggggcccccacccacaggacacttttaggggggggaaagcgcccacaggaaccctggaggggccgttcttgtcctttgggtccccaaggccaagctggccgtacttgttccatccccagaaaaataccccgcctttatttgttataaaagccctttggggggctccaaaaaaaacaaatttgggtttttttttttttagggggggagcatctaccaattttggaacagttttagcctgataaaaaccagggccaagttgcccaaattggtttcctcc

SEQ ID NO: 23599 - DNA, 880 bp, Zea mays
  unsure (1)..(880): unsure at all n locations
  Clone ID: MRT4577_121528C.1
ctcgaggccggccgggccgggcaagtctcgagatcgtgagtcgcaaaacccctaggtcccgtcgccaccttcgccacccgccgccagatatctccaccgcccgccgcagcaggtgagttccccgggacaagggaggccaatataacatacatgtgaggccaatacaacatccaatcctgtggatccatggcccgtggcgttgctgcgtggagatcagggcggtcaagtccagtaaatggcgcgacacgccgaccgtcccaacaaatggctactcagagcgcatggcacgagagcccgcccgccttagcgacgcatgcagcgtgctgcttcgatttccattaagtgtgtgttgcttcaattttcagttagtcaattctataaaaccggccctctctcccttaggctgccagatacttcgatttggtgatccctgtgagtagatatggtgagaagacgtcatgtcatggcgtcgaagtccagagccagggccaatgaagccaactgtaatcctagtagtagtagcgttggtgaaccagcacaaactgccgctaatgtgggtgtggctactagtgaactaggtgtggatgatggtgaactgggtgtgagttgtgtggctgctggtgaatcagcaacaataccatttgtcgtctatgggggtgaattggctgcagtcatatatacaaggttatattatccaccataggtgtgtgtgccacattataaatttggctgttcaagctggtataacagttgcaaataagtacttgaataatatttgtgttgctattcgtttcataacaagcgcacctcanatgatttctagatttgctgagtattgtaaagctncagctatgagaccaagaaaatttagtcttgatat

SEQ ID NO: 23600 - DNA, 271 bp, Zea mays
  Clone ID: MRT4577_121529C.1
cgccaagatactaaggaacccgaatggaactgccgttgccctcggtgaggaagaccatagggcagctagggggatactctttaagggaggattacctcacctactggatgcaccgcttgctgcacacccagtggtgctactagaggatccaccgagtccaccacgagttcacggctcctacaggctttgccatgtcgcacagccactgggccgagaacgtgggccttgttatcccggtcttgggcgagccagcgctcatgccatgccatgt

SEQ ID NO: 23601 - DNA, 281 bp, Zea mays
  Clone ID: MRT4577_12152C.1
acagggggggctggcatgtgattgaagaaataaaaccctgacctgaataaaacaggggaaaccttgtgcccgagcacatccttatgggcggggcgacaaccagtgcatacaacacttaattagcgagcccatcaatcaatctattgtgacgcaaccacagcgacacaacgcatatgggacacagcgggtacgtgacatgagctcccccctcgctccaaacaagcaatatatatctacacggtgtttctagcacacaacaataagcacgctgatgcggaaaa

SEQ ID NO: 23602 - DNA, 2417 bp, Zea mays
  Clone ID: MRT4577_121530C.1
cgaccgcgcgctgtggcaggcctacgtctcggccaacaagatcttcgcggacaaggtgctggaggtgatcaacccggacgacgacttcgtgtgggtgcacgactaccacctcatggtgctccccaccttcctgcgcaagcgcttcaaccgcatcaagctcggcttcttcctgcactcgccgttcccctcgtccgagatctacaagacgctccccgtgcgcgaggagcttctgcgcgccctgctcaactccgacctcatcggcttccacaccttcgactacgcgcgccacttcctctcctgctgcggccggatgctcgggctctcgtacgagtccaagcgggggcacatttgcctcgagtactacggccgtacggtgagcatcaagatcctgcctgtgggggtgcacatggagcagctcaagacggtgctcgggttgccggagaccgaggccaaggtgtccgagctgatggagatgtactctggaaaggggagagtggtcatgctgggcgtcgacgacatggacatcttcaaggggatcagcctcaagctgcttgccatggaggagctgctgcggcagcaccccgagtggcgggggaagctggtgctggtgcaggtcgccaacccggcgcgagggagggggaaggacgtcgccgaggtgcagaccgagacgtacgccatggtgcggcgcatcaacgaggcgtacggtgagccggggtacgagccggtggtcctgatcgatgagcctctgcagttctacgagcgcgtggcctactacgtcatagccgaggtgtgcctggtgaccgcggtcagggacggcatgaacctgattccctatgagtacatcgtctcccggcaggggaacgagaagctggacaggatgctgcggcaggggaagccagaggagaagaagagcatgctggtggtgtccgagttcatcggatgctcgccgtctctaagcggcgccatcagggtgaacccgtggaacatcgaggccgtggctgacgccatggagaccgcccttgtgctgcctgagaacgagaagaggctgcgccacgataagcacttccgctacgtgagcacccacgacgtcgggtactgggctaacagcttcctcctggaccttgagaggacctgcaagtatcattctcagaagaggtgctggggcattggcttcggcctgcggttcagagtggtctcgcttgacctgaccttcaggaagctttccttggagaacatccttatggcataccggagagccaagacacgggcaattctgctggactacgatggcacgctgatgccacaggcgattaacaagagcccgtccactgaatctgtgcggatcctcaacagcctgtgccgggacaaggacaatgtggtgtacctatgcagcgggtatgaccggcgcacccttcatgagtggttcccttgtgagaaccttggcatagccgcggagcatggctacttcctgaggtgtaagagggacgcggaatggaagacctgtgtcgctgccacagactgcagctggaagcagatcgcggagccggtgatgtgcctgtacagggagacgacggacggctcaaccatcgaggacagggagacggtgctcgtgtggaactacgaggacgcggaccccgacttcgggtcgtgccaggccaaggagctcgtcgaccaccttgagagcgtgctcgcgaacgagcctgtgtcggtgaagaccacgcctcactcagttgaagtgaaaccgcagggcgtgagcaagggcttggtggctcggcgcatgcttgtgtcgatgaaggagcggggccagtgcccggacttcgtcctgtgcatcggcgacgacaagtccgacgaggacatgttccagctgatcgccaccgctgcctgcggggactcgctgggcgtccaaggcggaggtgttcgcgtgcaccgtcggccgcaagcccagcaaggccaagtactacctcgacgacgcggcggaggtggtgaggctgatgcaggggctctcctacgtctccgaggagctggcgctggcgaaccagcgggatgaagacgaggactcctctttggacgacgtgtgggaataggaaggagcgttcccttcccgtgctgctcctgcggtaatgtctgtttgtgttgttggctcggctggagctttcgccgagtagtttaggtgtgtaaatgaggtatgctttccagcgtaatgtattgccagtggtctagtctcgagagctggcttgaatctagtgatgctctagtactttggtttgtggtgctatttacctgatccgtggaaggcagtactatgagctatacaagatgcagacctgaaatctcattcatctgaagaccatgacctttctcctaggcgtgtgtatacgtctttggattttggaactaaaaaaaaaaaaaaaaaaaaa

SEQ ID NO: 23603 - DNA, 148 bp, Zea mays
  Clone ID: MRT4577_121531C.1
ccacgcgtccgcccttttttttgggagaaggtgcccggcatggaattgaaaagaggacacccttgtctctctccccctcacaagaggtcagccatggtataggcgacttagatgggcgcgctcatgcagcttcagaactgccagcttt

SEQ ID NO: 23604 - DNA, 319 bp, Zea mays
  Clone ID: MRT4577_121532C.1
cggacgcgtgggctaattgtgactggttgcaacaatatgaaggtgcaggtagtgtggtccatgaggtggcgtgcagttggtagacgcagatggttctgtttaggatggtcacatgatagcagtttagccaccatccctctattcattttcatgctagtgcgtctggtagtcagctttgggttcctatagtaattgaggtttgagagagacatgaggattaggcatgcgcaagggcgacagacgctcatgactcatgagtttgatgtgcccatgtgcaattgacgggctgaggaagatcttagttgatcagttggtgaat

SEQ ID NO: 23605 - DNA, 240 bp, Zea mays
  Clone ID: MRT4577_121533C.1
tatcaaagagctataactatgacggcgcgtcgcacgctatacctaagctcctatacatcagaccgcccgccctttttttttttttttttttttttttggttgggttttttttttggtgggtttttaaaaaaatggatccatccattctattccacaaaccaaataaaaaattgaggcgttagaagaagataaatcactttatttctcaaacaaacacactattattccgataagtagaac

SEQ ID NO: 23606 - DNA, 162 bp, Zea mays
  Clone ID: MRT4577_121534C.1
ccggccgggtatgaaacactgttcagccggccgagatagcctcggtggcccagctaggccgagacagatcatatactcccaagctccacattgctgcagatcccaaacgaaggatctgccatctacgcactatattacctagaagacacaacgcggtttcac

SEQ ID NO: 23607 - DNA, 162 bp, Zea mays
  Clone ID: MRT4577_121535C.1
aacagcacaaagctctacggcaacttagctagcgcaagctctgtcactgcatccgcgtctcgcagcttcgatgcagcatgctgcaacccatcatggcgttagaagagatctaataggacacacctgtgagagcctctgatggatacacttgcagactccttc

SEQ ID NO: 23608 - DNA, 420 bp, Zea mays
  Clone ID: MRT4577_121536C.1
gccgctccgagccggccgggccgggacattccccaatctcccatccccgccgccgcctcttctcggttccttctccttcctccgagtcatgggaaaggagaatactcacgtcaacatcatggtcattgggcatgtcgactctgccaagtcaagcactactggacatctgatctacaagcttggaggtattgacaagcgtgtgatccagaggtttgagaaggaaggcgctgagatgaacaagaggtctttcatgtacgcctgggtgcttgactatctgacagccgagcgtgagattagtatcaccattgatattgccctgcggaacctcaagaccaccaagtactactgcaccgtcattgacgcccatggtcatcgtgaattcatctagaatatgattattggtacctcccaggttgattg

SEQ ID NO: 23609 - DNA, 417 bp, Zea mays
  Clone ID: MRT4577_121537C.1
attcggctcgaggcgagctcgcctgctagcttttctgagcgggtgcggcagcatcatggacccggcagcggaacgcattcgcctgaagacaacggtagctgcaaaaataataaccgcatgcacccctgcggtgctccacttgtacgagcgctcggtactaaccggaggcagtatcgaaacctacgaacacagtcaccttctgtgattctttgaggccacccctggctgtgagagacaccttctgtacgtcggcatcggtgacacagtaacccctcgccaccagcgtggttcggacggtgattgctccagcagacttcacatgtgggggccattcctggacgtcatcgcctcccatgttgccgcggttgccttgggacatgcaatacgagtcgggggagagactagcgtctcagcaag

SEQ ID NO: 23610 - DNA, 511 bp, Zea mays
  unsure (1)..(511): unsure at all n locations
  Clone ID: MRT4577_121538C.1
cagtccgcgtgacgcccgtggtgcggacgccccgtggtgggggattaccatttggattgaatcccttaagggaagacactatcacaagagagaaatataaggcgtaatagtatagcgccctcctttgcctttgtgtttagaagcaataacaagaattctctgttgtcacncnngaggaaaagaagagatacgttctggataacattgtacaatcgtcatacttgaaattgactatattcagttgccgcctattccaacattatatgggagtacaatttatgctttctcgctttacgaaatatgatatttttttggacaatttctatataatagcaaagccttattcctatttntggtacttttggatttcaaggacttttagnccccggtttagtgataggaaccagagaagcctttctagnttatgaaatcgggtattagaacccatggtngggggccttggttaccaattccgaataccgctattacattgtttagcgctagttttttg

SEQ ID NO: 23611 - DNA, 324 bp, Zea mays
  Clone ID: MRT4577_121539C.1
gggggaccccccccattttttactataaaaaggaaaagccccttttataaaacaatttgaaaaggccccttttttacaaaaaaaaccttcccccatgagctggggggccaattgcaacaagacccccaaaaattaactccacccgaagcacccagtttccgatctttgtctgacagaggaacctatcccgaccgggcatattggcccaaaaaaaaaacctttataaacttttgctggcaggtttccggtctttggccttcgctggcccaaaagagcacaccttggccccacttccctgttcgaagctttggaaaaaaccttcaa

SEQ ID NO: 23612 - DNA, 461 bp, Zea mays
  Clone ID: MRT4577_12153C.1
atctagaatcttctccgcctcacgatatgatctgttgctccgtgcatgtcatcatgcacgtatcgctggctggtgcatctcccagatcttatggagcaagtatttctcatcctttttctgaggttcgtcatggtatgacactctggaggttcatctcgcgtctgaatcatctccccctgctctgaatgcaccttgtatccccacgtgtttatatgcacatgtagaggcctgctctgggcatggactaccgaacctgggggtgctattgtgcctgaccatcatgagtagatgaccatctctgatctttgctatctatatattaagagaaggttgctatcattatataccactatggattatggaccacattatactcatgaacgtgcacctccgttcacataaagtgaaagaactccgcccctatgatccactagctccacgtgctgtgccccttactgatg

SEQ ID NO: 23613 - DNA, 322 bp, Zea mays
  Clone ID: MRT4577_121540C.1
ttggttaacagcttcccaaaggctaagggtcgaaatgataaacacagtgtaatccaccctggatatacaccttcaactttttccatggaaatttcgtttttcaaaccctgtccttcccccaaataaaaatttttgaaataactgccacataaactactttatggaaatgttttatttacatgaccaaaagagtggttttgaaacaaggctccctttatatccattaattacttgtaaaaaggctttccagctttagttgaaaatcttaacaggcttctaaaaagaatgggggttcttgtggtgctctaagaggacctttttg

SEQ ID NO: 23614 - DNA, 113 bp, Zea mays
  Clone ID: MRT4577_121541C.1
tctctcaccctactcgtctgacgtcaggcagcagttcgaaaccaaggatcgatccaggagcttccggaaggctaggcgcgcgcgcagcgactaggagctggtgccgtcgccgg

SEQ ID NO: 23615 - DNA, 740 bp, Zea mays
  unsure (1)..(740): unsure at all n locations
  Clone ID: MRT4577_121542C.1
gggtccctcgaggccggccggggcaatcatggcggtggcgtccgagcaggccgcgccgccggccaggtaccccaaggtggctgcccctaccaccggcccgatccccgccgccgagctgctcggagtcatcgaggccgccgcaaaagctggggccgatgttataatggaagctgttaataagccacgcaatatccactataaaggtgttgcagacctggtgacagagtaagaatgcttcttgctgttattgtcgtgctgcgccagttcttagtttaattgctatataaggtagcaggtataagatattagcgcctcgtttcatgcagtaaagtgaaacagcgtagtgtttcaatctattgctctatattttgttcagcacagacaagttgagtgaatcagtcattttggaagttgtcaccaagaacttcaaagaccacctcatacttggggaggaaggcggccttgttggagattccctatcagagtacctctggtgcattgaccctttagatggaacaacgaactttgcacatggttaccccagcttttctgtgtccattagtgttctcttccgtggaaagcctgctgcttctactggtggtggaaatttgtggcggggcctatgtggctggagcacccgtaccaatttctgcatctgcgtggcggagggagcttaattgtaatggggcaanaagatttcatgggtcagtcagacagaacaaggtgggaacaaaatcact

SEQ ID NO: 23616 - DNA, 333 bp, Zea mays
  Clone ID: MRT4577_121543C.1
attcggctcgaggtgagatcgattgcgaacttttttaaacagggtgcatggcatgatcaatccaacacacgaatgcattcactcgaagatatcgttatatgcaaacatgatgaacccatgcttcccctcggacaccccgttgtaggggctttagttcccaccgtgcgtcattgttaatacctaaaaaggtactcggcttgagttattctctgagatcatctcggattgcaagagaacactctattcggcgaccacgatgattgtcaaaaacatagtaatgaacggctttgagacgatgttaacatatgcataggtgacttagggaggccaaac

SEQ ID NO: 23617 - DNA, 1697 bp, Zea mays
  Clone ID: MRT4577_121544C.1
ggagcgcgcacgcacacacgagacagaagccgggaatcgaagcatcaagccctttctctgagcgccgatggcacggtatcttctcgcccccacttccacctcctcctgccctcctccccaaggatggcgtcaagaactcgccgacgtcacggcccctccgcctccgtgcgctcggctccaggaccagcaaggcgcggcacatcatggcggtggcgtccgagcaggccgcgccgccggccaggtaccccaaggtggccgcccctaccaccggcccgatccccgccgccgagctgctcggagtcatcgaggccgccgcaaaagctggggccgatgttataatggaagctgttaataagccacgcaatatccactataaaggtgttgcagacctggtgacagacacagacaagttgagtgaatcagtcattttggaagttgtcaccaagaacttcaaagaccacctcatacttggggaggaaggcggccttgttggagattccctatcagagtacctctggtgcattgaccctttagatggaacaacgaactttgcacatggttaccccagcttttctgtgtccattagtgttctcttccgtggaaagcctgctgcttctactgtggtggaattttgtggcgggcctatgtgctggagcacccgtacaatttctgcatctgctggcggaggagcttattgtaatgggcaaaagattcatgtcagtcagacagacaaggtggaacaatcacttctcgtcacaggttttggatatgaacacgatgatgcctggacgaccaatatgaatctgttcaaggaatttactgacattagcaggggagtgcgaaggctagggtctgctgctgctgacatgtcccacattggacttggtattacagaagcttactgggaataccgacttaagccatgggatatggctgctggcgtcctgatagtagaggaagctggtggggtggtaactcgcatggacggtggagagtttacggtcttcgatcgctctgttcttgtttccaacggacttgttcatggacagcttttggaccggatcggccctcctactgaagaccttaagaagaaagggatcgacttctcgttgtggttcaagcctgacaagtacccgactgacttttgagctgcaccaagggcaccaccaccagccattggccaccataataaagcagccatcatttttttttggggtgggggggatcctttaagaagaaacaataatgtttttagttcaatagcactgtacttgttatggcaatacgatgtacagttctttgactcgagtttcactggatattagctttcgatgtggcgtgctttgataaaagatctctaataacggggcgtgtatcagcgatagaagaacggctcggggtgacaatcaccatcatcctacaacttgtctttctcaagtttgactgcaagatgttgcttctaattgattctccatctaggatctaggacatcaacactattagctaccatgtctcgattatatgtttcttgtcacgagcaattgcgagaggtaaagatacttacagcaagagaaatgagtgcttctcaaatgtaacatacaaagaatattgtgtcaaagaagttcacttcttagtctttgtatttgtgatatacacattgtgtataaaaaaaaaaaaaaaaaaaaaatgtgttttac

SEQ ID NO: 23618 - DNA, 240 bp, Zea mays
  Clone ID: MRT4577_121545C.1
gttctttttttttttttttttttaatcaattcagtgtgcggcgtgaagaatttctagctgtagataaacttgctttttgggcgcaaaataatcccccgaaaactaacatgtcacacattaacctgaactttaaaatggatttggcaggaccaatgctcaaataaaaatgttactgtccaaggttcagtggatcacttgtgtttgcaaacagattcacaagaaatgtacgaaatggacttg

SEQ ID NO: 23619 - DNA, 402 bp, Zea mays
  Clone ID: MRT4577_121546C.1
tgatgatcgcctgcgccgtcctcgtcgccgggtcggctgtcaccgtggcgctcgccgcggaggctccggctccgggccccaccagcggctcctccgccgtcgcgcccgccggcggcgccgccctcggggccggcgtcgcctccttcttcgcctactacattcagtgagccggccgcggccgggctcccggaggccgaggcagagacgaagcggcagagagagtgacatggctgtgcgcattccgatgcgtgggcatgttggggattcgacacaccttttgtgctgtctgtatttgggccctctttctcctcgatgtagacgagaggaggcatgccgctgatgttcttgcccgtgagagagggattgacacttgtatcatctgtcgccagttgtttgaatcca

SEQ ID NO: 23620 - DNA, 182 bp, Zea mays
  Clone ID: MRT4577_121547C.1
ctcggtcttacatctataactccacatctacatctaccaattacacgtacgctctcatgcgacggcattgttcaagcgaagtggcacctaaactcaacttactgtcacccatgtacaccacccaatgactgacaaaacactacacttacttaactaaatagcattgcaagccatcccacttt

SEQ ID NO: 23621 - DNA, 115 bp, Zea mays
  Clone ID: MRT4577_121548C.1
gatgcatcgtcgtcgaagacgcttagtgatctttcggatacacgcagcagcacgcaagcggtgacgtgctggaatgcgtagacgaatggtgagttggcatactgagcacttgcgc

SEQ ID NO: 23622 - DNA, 382 bp, Zea mays
  Clone ID: MRT4577_121549C.1
cacacgcttcggggtaaacacggtcaccctccaataacagcacttcctgatgggaaacatgtctctggcggcgaacgacgattttcaccacattctgcgtgtgctgtacaccgacgtgattgggaagcagatgatacctttcgcaatggcctagcgtcgatggtgttggaaggagcatctcgccgacattgctagccagaaggctgttgctgacttgaacgacaaggctagtgagtggactgatgctgatggggatagtgagctgactgtggtggccagccctaagcagctcacagatccccgactggcttttggacgaatagatggatcacttggctggtgcatactctgtacttggggctactgctcttgatctcagctc

SEQ ID NO: 23623 - DNA, 261 bp, Zea mays
  Clone ID: MRT4577_12154C.1
ggttggacacattctagggaaaaaaaaaggcggaaccattaaaagggggctcgaaacagccggcgccaaaacaaataagtcccacaggtgaagggggccaacaccccaataggtcccaagggcgggaaaaaaggggggggtaaaatctccatggcagaagaaaaacaatgaaaaggcaacacagccttatggtggagggagcaccatgtgggggaaaaaacaaaaaacggatatgaaaaagaaacgctgggtaaagccaaa

SEQ ID NO: 23624 - DNA, 492 bp, Zea mays
  Clone ID: MRT4577_121550C.1
gcgcaagctgttcaagaaactctggttgattttgaggtggcagttgaaaagaataattcaaagactaccgtacagaatggaaatcttcatccttttacaatcgaagtgattaattatgtaaaaggcctatttgattaccaatcaacactgaaaatactatttcagcaatctgaaagtgacagtgagactgaatctgaacttgcaactgtaatcatgaaggttatgcaggcctttcagaataacttgaatgggaaagctaagcagtacaaggatcctgcattgtctcacatatttcttatgaacaatcttcactatatggttacgtctgttagcaaatcagaatccaaagatatactcggtggtgactggattcagagacaccgtaagattgtgcagcaaaacgcttatcagtacatgagggtatcatgggcaaagattttccagacactctttattcaatgtttatagtggcattatttcttcattaccatt

SEQ ID NO: 23625 - DNA, 422 bp, Zea mays
  Clone ID: MRT4577_121551C.1
catgaagtgagattttatggcagaaagcttcattatttggagcaaagaaaatataagggccaaagagcatttaccaaacatattgcgacaagctctaatttgcaaaacacctggatttggaatgtcttcatttgctcatgtttcacttattctagctcctgatagaagtaaactgtctagacgacatggagctacttctgtggggcaggttacttaccgattgtttcctatcttaaaactctaccaacatatcttgttttattcaaggcataagaatgaaccatgatgtattttttccctgcacaatataaagaaatgggctatcagcctcaggcaatggagatttatttagcactactgggctagggtgatggtactgaaaatgagttcttcactattgatgacctagttttgttcttaat

SEQ ID NO: 23626 - DNA, 578 bp, Zea mays
  Clone ID: MRT4577_121552C.1
ctcagactgcagtacacaactgggtggtgaactgctgcttgcgcttcttgttgtctctgctgatgtcctccctgtagtgcttggagacggtaacgtgaaacattaacctgaaagtcatccatgaggccatcatcaacccagccaacacccattccacagcttgacggacagcctaacgtaaaaactactccataaactataccatggacctacttaagcacatactaggagcgaaaccagcaccacacaatgcactaagcaaagctcatgtaaaaacacattcactatcactggaacttgcaaatgaatctgactctagatctggatggacacttggcaacacacttgagaacatactctatcaatgtcactggggttcttgtgctgcttatggcgctcaggaccgccttcacaaccaccttagcattaaccttataatgagcattaaactcctactgaaatacctactgtcattctgcggctatatgtgcgatgatagctgtgatatagactattctatatacgcatggcactactgtgttcaaactggtgattgtacagcatactgtgatccatac

SEQ ID NO: 23627 - DNA, 1919 bp, Zea mays
  Clone ID: MRT4577_121553C.1
cccttccctcccctcccctccctctccgaaagctggaggggaaggagatccattgcttccgatggctgcctgccgtctctgacctccgacctctgcctccagcctccagccatctcccgccctacctgaaagcaactcctgatcggattcaggctaggtcctcacagcacagccctcctctgagactcaggtacttagtctctctctctgcaccccgctgcttgctcctctgttccctgcccccgggctggcttcctccccttcctggtctgcttctcctcaccgttgacgaatcacgaggcctgcctgcctgcctgctttttctgtgctccgttcgaatggacgggcagaggagtcgatgagcggccgtgggctttgattttcccctggggtctgctcttcttggtcagcaaggagacctgaacacgaattgatctctgcgccgctgcaaccccggcccgtcgaagccatggggtccggggactggttcaagacgatcatcagcaagaaaaaatcgaagcggggaaagtcaaagcacgcaaagctctctggccaagtaacaaatggaggcaaccagacaaatcagaagttagacggcccttcttcaagtagtgaggaccacgaagacaatgcagcactagaggaatgggctgctactcgcattcagaatgcgtttcggaaatacaaggcaaggaagaccctgcgttgtctcaagggagtcaaaagattgcgcgttgtgggtcaggcgaatccggttaagaagcagactgctgccacgctgagttacatacagtcttggaacaagttgcagtcggagataagaaaccgacgtgctttcatggtcaccgaaggacgcaacaggaagaagaagcaggagaaccaaatgaaacttgaggcaaaactgcataatttgcagattgaatggaatggaggctcggatactatggatgaaattcttgctaggatacaacaacgggaagaagcagcagtaaagcgtgagcgagccatggcgtacgcgttcaaccatcagtggagagcaaggtctgccacaagtctaggaaacttcagctatgaagtcggtaagggtggctggggctggagctggatggaccgctggatcgcagcacgaccatgggagccgcgatccatggtccaccctgagaacccgaagaaagcacaggcaaagaaggagaacaccacaaacccatcagctctcaagctgcaaggctccattaccctaagcaacaatatcaatgaccggaaaaccctgaaaaagaagccattgccttcagcttctcctgctgatcagaagaagccatcaccgtcgccttcttccgatcagaagaaaccagtaccgaaggagcagagagcaaaggcagctggcactcctccaaaaccaaaggccaaagatatgaaggggagtcaagagaaaaagccacaaccacaacagaaagtgcctcctccggttagcgcatgaagcttcctgctgcgaaaatggttactgatcatgtaagatacatcttgtgaagttatctcatgttcaacactcatgcttgtatgtttttgttttttgttttatggtgttatgggacgaggggtgcccaatctagaatgtgcttggtttgagcgattgcgcacgcacaacatatctgatgagaattgtttttggttaggattaggatctctgttattcattgttgtgatgctgtaataagacttgccttgcctggctatctgcttgaatggaaagtcttgttggaacaacatataagttcgttttctgtccataactttaggatcaaatgacaaatcgtcatatgtaaactgtttattacatccagattaggattaaattcaaatttgatgccaaaaaaaaaaaaaaaaaaaaaaaaaaaaaaaaaaaaaaaaaaacccaaaac

SEQ ID NO: 23628 - DNA, 254 bp, Zea mays
  unsure (1)..(254): unsure at all n locations
  Clone ID: MRT4577_121554C.1
ctnacacataaggataacggcgacagnaatggttcagaccgtggcgacactncagagngagggtacacagcaggagccgcagccgcagccgcagcgcatccggtggtaacgcagcctgcagctaatgcgcgtaccgaagccgcagaggtgaccgtacccgatgcacatggctgaccgtagcacgagctcanagtgcaatggtagctacgatggtggtgatgatgatactggccgtagtcgttcagcacaggaag

SEQ ID NO: 23629 - DNA, 474 bp, Zea mays
  Clone ID: MRT4577_121555C.1
aaaggggccggcttttacgacgccgcaacaaatcgggaatttaactattttctggacagcttatatttaccccctttagtttacacgttatatgtacaaaggggcaaatgctgtcatatttacagacccggatgctgatgacacaaatgatgatcctgatgaccaccacggcgaccaaggatttttgaacaccccccatgccatgctttacctacatgccaaacctgcactggtaggacccaacaaaggcttttccaccttttgaaaaaaacccccccatgtcctggattgcttcgggggaacgggggggaacttactgcacaacgggggtttttggaaacaatggccaaaacaggacgggggcccaaacaacgcatgaacccaaagctgtaaaacgacctggggcgaaacaggttggcgaaaaggaaccacgtaggggacttttttttttgcgggtccggggggtcggcctgt

SEQ ID NO: 23630 - DNA, 637 bp, Zea mays
  unsure (1)..(637): unsure at all n locations
  Clone ID: MRT4577_121556C.1
naattcggcacgaggcgccgcgacgcgatggttctgactctgctgctgcttctgcttctccccgcggcttcccgcgccagggacaccatcacgccgggccagccgctgcgggngaaacgacacgctcgtatcgtccggcgccggcagcttcgtgctcggcttcttctccccgccgggctccaacagcacctacgtcgggatctggtacgccaaggtgcccgtccgcaccgtcgtctgggtggccaaccgcgccgcccccgtgcgcggcgcggcgagcgagagcgccggcgccacgctctccgtgtccagcgagtgcgcgctcgccgtggcggacgccaacgccacggtggtggttggcggtcgttntgtcgtcgtcttccccgncggccgtgccgccggcgcggnnatccaggaacgnnacggcaacnctgggtggggtgtcggaacccaagcgcgggcgggntgggtgttggccaaggggggttcgaaccaacccccaccgnacnagcgctgctcccggggnatgcggctncggngttgggactnntcgcggcggggggccgaacatgnaacgctgacgggcgttgggcgaagcccctccggacccgtcgccgacccccgtgggtgggcggccatg

SEQ ID NO: 23631 - DNA, 289 bp, Zea mays
  Clone ID: MRT4577_121557C.1
cggacgcgtgggcgacgcgggctctcccgtctcctctgatggacgggaaccaagccgggccgccccctacccccgcgccgccgcccttctcctcccggccccgcgcgtcgccgtccccggcgacgcaccgccggcgccgccggcactccaaaaaacataagccccggcccgcgccggcgccgacgccgcagggcgcggacttctccgcgctcccgccggatctcgtccaccgggcccctgcgggcgcgtgcgcctccgaccgtccggcggccagccgagcgtgccgcgc

SEQ ID NO: 23632 - DNA, 292 bp, Zea mays
  unsure (1)..(292): unsure at all n locations
  Clone ID: MRT4577_121558C.1
gacctgtagggtcatagatccaagtgaaatgaaggttcctaaaacaagcagtgtgggataggttattgcacttggatcacatggcaagcgactcttaaccctgctgacttaggtcgttccacagcaagaactacttttttttgctaaatgggggacctaccacacctactacagcggctaactgaaaatggnaacattgcgaactgcacggattacgaatcagagcaactttccgaggctgttggctatggcgctgggaagtacgctgatctaataaataacagggtaacta

SEQ ID NO: 23633 - DNA, 225 bp, Zea mays
  Clone ID: MRT4577_121559C.1
gacccgtgggcgctgaagccattgaagaggttttcgtgctcccttttcttgtgtcgctggcacactgacacgaggagctgctcctcctttttggcgtcttcaggagatgaattcatcatttgctgttttcgacctcacgcgggacttgtcctcgcacaactcacataccgatgctgtggctccacaacggcggatagaccaatatctgggcccctcatgccgtct

SEQ ID NO: 23634 - DNA, 205 bp, Zea mays
  Clone ID: MRT4577_12155C.1
acggagatcaccctgagcgatggcacccgcgtgccctacggcctgctggtctggtccacgggcgtcggcccgtcggagtgtcgtcaggtccctgcaccttcccaagtccccagcctggagggtcggcgtggacgagtggttccgcgtgcccacggggccggacgtgttcgcgctgggcaactgcccgggtttcctgaagggaacc

SEQ ID NO: 23635 - DNA, 433 bp, Zea mays
  Clone ID: MRT4577_121560C.1
ggacgggaaatggaccatccttggggctatgacaaaattaaaaccccagggggggaagcttttacaaaaaaaaatcattccaacacgggggttatttcccctcagccacagccacaaaaaaacaaacccccggggtataagcaggggggaaacacaccccccccccactggggcggggaagaaaaagttccatccaggcagtttttggccccgaaggcgttgggaaccagaaggggcaaaaaaaaccggaattgggccctttttaagggggaaagctggcccaaaacgcctttaaattgggcctttattggccccctcttcagttaaagcgcggggggcaccaccccggactccggggtccagggttaaggaaaaagaacaatcttcgggggcccctaaaatttctcgagccccgctgtttttgcggcctttg

SEQ ID NO: 23636 - DNA, 887 bp, Zea mays
  Clone ID: MRT4577_121561C.1
agctgcggcgcatttcctcttcgctcgggggaatgcgcagctggtcggaggaggaagccgtgagcgtaaacttggcgagagaggagatggggaagggcggcgagctgtgggacgactcggcgctggtggacgccttcgaccacgccgtcgccacctacaaggcaatgcatggcaagaacaaccaaggtgctccatccgagaaacaagagtcagaagatgtagctgctgctgccgccgcgtacgctgccgctgctgttgcagaagaacctgtctctactgaagtggcagatgagcaaacagagaaaaatgacagctgcactaacttacccattggtccagtggagacaccacagcagccctgtgaagaaagaaagaccgataagcaagctcctcttcgagaaactgatctgggcaaagagacaaatatctctgaatctaagacatgcttctcagatgtcaccaataccgagggaaaggatagctcaaaccagcagacagaggactataatgaattactcaggaagtactatgaacttgaggtgcaaagccagaaagttcttgagcaattacatcagacaaatttttggaattatcaaacccctgaacaatcttcagcataccaacagcagcaagttcctgcttacattgtcacagcaccagatccaaactcttcaaccactcaaacctcatgctgctccttgaatgctcccatggtttcaatctcctgctgttcaactgggcaacaaagtggcgattcctctggtatgctacctaatggaggctgcagcgtatcgttcacttgtgatcattgccctggagcaagcacacatatcctactggtgcagccttcacgcagctaccactaaggtatctagtggcgatgatca

SEQ ID NO: 23637 - DNA, 391 bp, Zea mays
  unsure (1)..(391): unsure at all n locations
  Clone ID: MRT4577_121562C.1
cgggtcgacgctgaccgcgatggacgagctgctgcagtcgggctgcacaacgtcaaccgttaccatacaccaccgaacgaaccggcccaagacacaacgggccgccagcggttcggaagcccttcaaccgagccgcngcgcaatgagcgtcggccagcgcgacggcgggctgccgcccgattcggtggtcgagcgcgaacccgacatcctgcgcgacgcgcagcgcctgatcgagacctatcacgacgaaggccgctacgcgatgctgcgcgtggtcgtcgcgccgtgctcgccgttttcggtgagccgcgaactgatgcgcgacgcggccgtgctcgcgcgcgagtacggcgtgtcgctgcatacgcacctggcggaaaacgtcaacgac

SEQ ID NO: 23638 - DNA, 252 bp, Zea mays
  Clone ID: MRT4577_121563C.1
aaaaaaaaaggaacgagcacaagatatggaatgatcccaaaaattgaatagattactgggggggacgccccaaacaaggtgttaattccgaagactccatgtttggctggacgtctgttcacctaacatacgtacacaaagtgtacggaaagatactagatccaacaatatatcagtatgggatgacgcagatggtgctctgattaaccatgttggccctattggactccgactgcttatcagggacaactg

SEQ ID NO: 23639 - DNA, 790 bp, Zea mays
  Clone ID: MRT4577_121564C.1
ccgtcaaacacacaccgtacggatgcggcacatggcctgccctctggctgacagaccccaacaactggcccaccaacggcgaaatcgacatcatggaagccgtcaaccaagcggccagcggcaacataatggccctgcacaccaccgcggactgcaccatggccgacatccgccgcaacatgaccggcgccgcggggcagggcgactgccacaacgcgaccaacttcaacacgggttgcaacgtgtccggggcccccgccacgtacgggcccgagttcaacgccgcgggcggcgggatcgtggcgatggagtggcgggacgaggggatcagggtctgggtgttctcaagaggcggagataaggggggcgatccgttcccggcgcagggggtgccggacccgagcacctggggttcgccgctggcggatttccctgcgacgagttgtgacgtggggagtcactttcggaatcagagcatcattgtgaatattgacttgtgtggttacttgactaacgcggtttgggagtcatctgggtgtccttcgaactgcacggattttgtggcgaacaacccttcggctttcacgaatgcttactgggaatttggggcctttcaggtttacaaggcgcggtgaaagagggcatggccggcgagaagacctgtcggctggtgggatggattttgatatacaagttgtgatgccctcgaaactcaacactccagcaacaaactccttttgtagatcgctagtatacagattacttctgatgaccatccatctgtaccccg

SEQ ID NO: 23640 - DNA, 228 bp, Zea mays
  Clone ID: MRT4577_121565C.1
acactctcatgtgttccacttgtttaaattaaccaattcttgagctatagaaatatgggtcaacaaacacggagtaaaatacaggcgggcacaaaaaaatgcccgaaaccggacgctcagaagaagccggggacgattccgaggctcgaagagaacaggaaaaaccaggggaaaaaaaggccgaccaaaccctaggccaggacattgacgacgtttaagcccaagggg

SEQ ID NO: 23641 - DNA, 277 bp, Zea mays
  Clone ID: MRT4577_121566C.1
cgtctccaggtccacagtctccccagcctagggctccgtttactacgtccaggtcttcttcttctttctttcctgtaatcccgtgacaccgacggctaatacgatcaataacatccctacccgtggcgaatttcgtgaatttgccccttctacccctatcacccggattcccttctttgatcttatgcaacactatgttcactactgtggtaactttattgatcagagtgcgcatttgcaggctatgcacgaaatgtacaccaagataaccaagaaa

SEQ ID NO: 23642 - DNA, 403 bp, Zea mays
  Clone ID: MRT4577_121567C.1
cgcaagcttcgaaccttcgacccacgcggcgcggctccagcaccaacccccggcggcgatgcagatggcagcggcagtggccccaaccgacgccccggcctcggcggctgctccggcgccgcacccgccccacgcgcacgcggcgcacggaccgtcacacccgcaccaccacatgccgcaaccgcggtgggtggtcatcccgtaccctccaccacaccacccaaacatgtatgccgcggcctacggagcctacccgtactatggaaaccagcagctagtgagctgatgtggcgatgctctctgctcagtttcctccctcggatcggagggaggaaaccaagtttttggtcctgtaagatagtagctacaatgagatattataggcggccatacaaatgggcga

SEQ ID NO: 23643 - DNA, 451 bp, Zea mays
  Clone ID: MRT4577_121568C.1
aattggccgagaagttacacaacaccaagattagcttaaccatcatgaacagcaaatataaacatgtgtatatgtctgaacatgacagtaaatagcctcataaaccttcaatccaaattttgtacatctgagagaattacatgatataaccctctaacacttgctgcctaccaatgagagatgggcatttaccgagtggaacataacccattgggacataaaaaaagaaaaggttagactctttgctcccagtaagaaaacatcagtagctccaattacaacacttttagcagggtatgttacgcagtgagggattgggaggattctaatgtcaactagtgtggaacagtagcgcatatgaaccatacaacgaagccatgaatatcaatgacaccgtgaaaagtaagttttttgtcccaacttggaatcaaattcttaacctctaaatcat

SEQ ID NO: 23644 - DNA, 272 bp, Zea mays
  Clone ID: MRT4577_121569C.1
cggctcgagagctcagctccaacatggcacaaatctctagccctacagagactgagcggtgcactcagtccctgattgctgtcttccagaagtatgctggaaaggatggtgataactacactctctccaagacagagttccaagcttcatgaatacagatactagctgccttcacaaagaatcagaaggaccctggtgtccttgaccgcatgatgaagaaactggacaccaacagtgatggtcagttagatttctcagaatttcttaatctg

SEQ ID NO: 23645 - DNA, 592 bp, Zea mays
  Clone ID: MRT4577_12156C.1
ccggccgggaaatcggactacgcccacggatacacctcctcttccacgaagtgaggaaaccctaacgaccgaccatggagatgatcccgcgcaccgcgcgaatgggcctcctttccaccccgaggacgtactccgctgccgctgctgcgggcgcctccccgacgacctccagcgccatacggcggctgcccccctcaccggcgatgtcgaacacggccgatgtcgtgacctctaaagtgcacgacctgaggaactgatggcagcaaggcctcgatctggcccatgaccttcgggctcgactgttgcgcggtggagatgatgcactgcggcgcggcccgctactacgtctaccgactaggcgctgtcttgcgcccggcatcacgccagatcgaaagaatgatcgacgacggcacgtgcaccagcacagatggctccggccctccgtgaggcatatgatgaatgcctgattctaggtgggcaatttacacatagccgcctgagctcacacggtgagtgaatactagccattactgcctactctgtcgccactcggatgagaacgtctagccccagagcatatcaacatgcctga

SEQ ID NO: 23646 - DNA, 659 bp, Zea mays
  unsure (1)..(659): unsure at all n locations
  Clone ID: MRT4577_121570C.1
cttgnccgggaaaaaaaaccggtccggcccgcatatatataaccactccgacaccctcgctgcacgtcatccgcgacaccgaacccagtggaatcgaccctactgctaccggcagaatgattatccccaaggaagaccgtcgcacaatttacgaaaaccttttcaaggatggcgttatggtagcaaagaaagactacgatgcccccaagcatgtcgaattagacgtcaagaacctctacgtcatcaaggcttgccaatccttgaactccagaggtttgatcaaaacccagttctcctggaagtttcactactacacccttacggatgagggaatcgaatacctgcgtgaatggctcaacctcccctccgaaattgtcccggctaccttcaaaaaggtccaacgagccgttcccgccggacgaccccaacaggcctctggtgtctaccgtcccccgcgaggcgaaggaggtggtgatcgggaaggctaccgcaagaaggagtctggtgccgatggtagattccgaccccgattcgctggaatcggccgaggcgcccccagcggtgatgcccctgctgccggtggctggtaattccatgcctagtctggcaatccaaacatctttgtcccgcctttcaaaaaaaaaaaaaaaaaagcgggc

SEQ ID NO: 23647 - DNA, 394 bp, Zea mays
  Clone ID: MRT4577_121571C.1
tcccggcccgaattccggggccggccgcccctttcttaattcttttttattttgaaggttaccaggcttaagttatttgttgcaaaatttatgacccttgatcaaaatgtataatgttaaaaaaaaaatgggtctgaccctgaatgccttcaacccctttgtggaacccacttgaggcctgttttttttgaacatttctttttttatccaagaaaaaaaggagacgagagctttttttttttaataggatatattctgtccccagagagcaccgccaattttttggggtgctggttcacatttaacaaccttgcaaaatttttggggattttgaaatggattgcaaatctcccccccacaagtaacccccttattgtaccccactctttttttc

SEQ ID NO: 23648 - DNA, 264 bp, Zea mays
  Clone ID: MRT4577_121572C.1
caggtgttaatttggggcctctgggcctgagcttattgggtcccacgaaagaaacatgagaatccggagctccctcctcctcgtagtcctcctggctttggagactcagctgcctgttgtcttgtgtagaaagaatggagacaaattggggggctgcccaccagacgacgggccctgcagccaggtgattcctgatcagtgcgcgaatgacaaacagtgtccctcttcctggaagtgctgctcccgagcctgcttcctccagtg

SEQ ID NO: 23649 - DNA, 435 bp, Zea mays
  Clone ID: MRT4577_121573C.1
ccggccgggccatgaaccctattcgcgcgcgcggctgccaagctccttgctccggcgcgcatctacaacgtccgcgttctgtctctgccacccgaccaggccaagggcgctgcatgtggtcggccgagaccgggcgtgtgcgcctgcggaacgacggcgacaagtatggcgggctggcggccgtcggcaccgtcatgccgcagatcagagttactagcctacgcctttgacatggagaagggctacatcaacggccaacaggagtacattactggcatcgagagggaacctgaacgcgctgctcacagaggcgcccatggcaaggatgcggaggaagctgattggagacgatcggagaaactgctcatggccaaagatgctgaatgcactgaatagggccaatgcactaattgactttgacagggtcaagggcat

SEQ ID NO: 23650 - DNA, 252 bp, Zea mays
  Clone ID: MRT4577_121574C.1
cacaaacgcacactgaattcaaaaacatcgaaagatacaggcatggccgagcaaaccttcatcatgatcaagccagatggcgttcaaagaggccttattggcgagattattagcagatttgagaggaagggtttttacttgaaagggttgaaactcgttactgtggaccgtccttttgctgagaagcactatgctgatttgtctgcaaagcctttctttagtggtttggcggattacattgtctctggccct

SEQ ID NO: 23651 - DNA, 693 bp, Zea mays
  Clone ID: MRT4577_121575C.1
aacttctttgtagagccaggtagctagtatcactcagctagcaatggtggctatgggtatgggttccacaaagcgtggcgttgtgtggtgcgccggcctgctcgtcaccgggcttctcctcgtggcggcggaggcagatttctgctccgaggactgccgtggcaagaccgatttcttgggccgcgcccgtcggtgcagatctcagcttgaggttgcacggccgacgaactgcgtcgccctctgccatggcaagccgaacttcatggcctgctgcaatcgccatcggtatgcccgacgagtgactccgcatctgcagcgtcgggccggcagggaatccacaacgcatgaagaagaagcaagaggaggagcagttggtgtcctgaaggcgccggccccggcgccgtgtgaggtggtctgccgtgaccgggtgggctgggtggagtacgagcgctgcctcgatcgctgccgatggggagcgtttgtccgacgagcgcttcttcatcttaagcttgccggcaggcaatcggcgacacatgaagaagcaagaggaggaggaaggggggaagctcacatcctgacggcgatggcggcgcggctctcggatccatgccaggacatgggccataaccacaagcactatgactggtgcgttcggtcgttgccggtatgggcccgcatcttatgcttgccggt

SEQ ID NO: 23652 - DNA, 125 bp, Zea mays
  Clone ID: MRT4577_121576C.1
agctctaccaagttcttcagaggggccttttcaatgactgaacctcccattaattgccaaacgttaagtattctactttctaagacttaaattgcccctctaagtttaaaaatatttttccccct

SEQ ID NO: 23653 - DNA, 445 bp, Zea mays
  unsure (1)..(445): unsure at all n locations
  Clone ID: MRT4577_121577C.1
agccttccgcagccaccaagaaaggacgattcctttgccaccattaaaccaccatgggggaccaaaatttttcccttcttaaggctcctggctctttttactggggtggttaccgcaacaattttccctcattgctcacaagctccaatagcttcctttcttcccccataccttccataaattatagctcaagtagggaaaaacccagcttttaaaccatataggcttaaccaggcaatcgaagcaagcaccataccttaatcgcccttgtggtttaaacaatcaccagccctatctttggggcagtcattggtccaaaccatcagggcacaacagctgcagcaactngggctacctgggatcacccaagtagctctggcaaacctttctccttactttgagcaacaacaatttcttccattcaaccaactgtctacactgaacc

SEQ ID NO: 23654 - DNA, 624 bp, Zea mays
  Clone ID: MRT4577_121578C.1
catttctgagcttcgaggaatcgacgatcaagcatggcgaccaagtgatcgaactcttcgagttctacaagatcgaagaccctgagcatctgtttggtgaaggcaagtgtcctctgaccttatatgtcacatttactttataattcatcaacccgcataccatgatcaacctaaggattgactagctttgtatttaccttgtcgttgattaccttttgggttattattgtttagctttatgctattgctcaactctaatcaatgaacatgatgagatttatcaatgatacgcggtttcccttctttattatgatgttatacttgtgtcattcaagggggctcgagcggtttctcgagtgcctctccgtaaggacctgttcgttgcatgaccgcccgagaaaacagtgcaaccatgagggtggaatgggatgcccttagctgaataattagaggaaccgaggtgtagttcgcttagccgtcgtgccgttaatgtggctcggtgtatgcggctcgctctgccaagtttggttcgccccttggggaggagtgcagtgcatttaggaaacctaacgggcggctacagccttggggaatctttgtaaaggctacatagtgaaaccctgc

SEQ ID NO: 23655 - DNA, 970 bp, Zea mays
  Clone ID: MRT4577_121579C.1
gggtacctcgaggccggccgggaccaagttgggcttttattggacggagattgtttggcccagtgactctacccacctccagtttccacttagaaaagaataatttctcccgaaaaagccggccggggaagagcagaacgacgaggagattgcttggtgggaggagttggtgaggagaggtcgcgaacatggagaaccttgctctgctttggggcatcatcggcccgggcgtgtccggcgccatcttcggggccggatggtggttctgggtggacgcggtcgtttgcagcgcggtccaggtctccttcctccactaccttccagggatcttcgcttcgctggcggcgctcatgttcaattgcgtgaacaaggatgagatcggatacgactattactcaccctacggggacgattcagagtggagagtgaagctctggctttttgtggcatatgtcgtttcttttgtctgtttagctggatccgtgggtttattggtgcaagatgcactgacgaacaagggcccttctgtctggactggtgttgctggcgttctgcaatgtgttcttgtgttgataagcggcctggtgtattggacatgccactcagaagattaagggcgtaatgtcatgagcagacttgcaaggttggtcacagttgtgtgaaggaaattatttctggcaacatatgattttgtgtgatggaaatgacggacactgttcactgctgaatgggatgactagatgtttcatctgtgcatatctgacttttggaaaatgatgtttcttaacaaaaaaaaaaaaaaaagccccccggtgcatgttttaaccccagcttcttgtgagttgccaatctgtgatcataaaaaaaagcggtcgtgatcatgcaaatcttttggctaaagctgaaaccggctgcagcaacaagctagtgctactatttacaccatgcctcctagtcaattacagttgac

SEQ ID NO: 23656 - DNA, 692 bp, Zea mays
  Clone ID: MRT4577_12157C.1
cattgggtacctcgaggccggccggggccgccgtccgggctagctagggcgcctgggcgtccgcgcccaaattaatccgtcgtcgattcgtctccctgcgtgatggagcagtgatggcggccgtttctttctcccccattcctcctctcaccattgatgccgagaagaaacagccacgccattgatggcgcttgatggagccgtcggctacctctccctctctctagcgccctctcctctccctctcctcctctataaagggcaatcgagcctcctcccttcctccccctgccccaagctctccctcacctctcacagccacgtccacgccgaccactggagcgtcgcttcgtcgccgtccgcggaagctcgccggagccctcctcggtcgcgtcctccccgtgccgagcccctgcctcaacgaagcagcacccatgccgccattccccgtccgagcctcgccccgcgaagcccctgtcgatcgtgtcatctgttcgtcgcgaggttgaagataacccagaataatttattaattttcgaaatcacttgttgattcagtttatgaattttataattattgtgttgtaatatgggaatgtcgtgcttcagaattcatgtgtatgtgaattattgatttttgggtatatatgcgataaattagtacaccgaaaaaaaaaaaaaaaaaagcggcc

SEQ ID NO: 23657 - DNA, 448 bp, Zea mays
  Clone ID: MRT4577_121580C.1
ggaaacacaacccctaaccttgttttaacaaaaattatggcgcccggggaacaaaaaatccagggggggggcccgggaccaaaacccgattgatttaaaccacctccttccagcaaaagggggcttcaggcttttaaacacccccagagccggaaccttggttctttttcggaaaggaaaacaacctagttttttttggggagggcgaaaagggggaaaaaaaccccggggatttcccccagaaggggggggggggggcaaacccaaaactcggggccccccccctccttgaggaacccccccccggggggcgggatgagggcaaccagaatgcccccccatttggaagccccctccaacagggggccgaggcttttttttccccccttttttttttttctttcccttggcttggctgggagggaccggatccccctcgccccaaatt

SEQ ID NO: 23658 - DNA, 562 bp, Zea mays
  unsure (1)..(562): unsure at all n locations
  Clone ID: MRT4577_121581C.1
catcaactgttattgaagccagnattaatgcacttgtggggagtaatatgcttggaaggttgcttcatgttcagcatcctactgcaaagcaagctgtgattactgcaatcgaccttttaggtcgagctgttattagtgctgctgaaatgggaatctcattcccactgaaacgaagagatcagttactggagtacgttttaactctaatgggtagggatcaaagtaatgatctcactgatttcaacactgagcttttgcacacacagagccttgctttaagtgcctgtactactcttgtctcgctagaaccaagattgccaatggaaacaagaaaccgtgtcatgaaggcaacattaggtttttttgctttgccaacagagccctcaagcattgttgagagtctcgtaacaaacctaattattctgttaggtgccatcctgcttacaagtggtgaagatggtcgaagtcgagcagagcagttgctgcatattcttaggcagcttgatccatatgtatcatcatctctggaacaccaaagaagaagaggatgtgttgctgtaca

SEQ ID NO: 23659 - DNA, 337 bp, Zea mays
  Clone ID: MRT4577_121582C.1
cagcattcataaacacaccaagcttttcgcactagcaacaacctaacaacaatggcttccatgatattatcctttcttgcgcttcttgcccttttagtgagcgcaacaaatgctttcattattccacagtgcttacttgctcctagtgccattatttcacattttcttccacctgttactttattgggcctttgtacatctcagccttgcaagcctacaggcttcaactagcgcttgctgctagttttttacatcatctaattgcccaattgcatcattctatccttggctcatttaaacctactatccatcgtatctcaacatctatatcattttt

SEQ ID NO: 23660 - DNA, 448 bp, Zea mays
  Clone ID: MRT4577_121583C.1
ggggaaagcaataacttaaccaacccccggggttttaaagctttttgcttcacccatccctatttacgggaagggttcaaaaccttttgaatacttaaccacccttgcgaaaaaaaaaacctccaaaagccccaaaaataggggggagtttattgttttgggaacccctaccttaggaaagggaccttttgggagctgcaacgggggggggaaacccctgaaccagaatgggggccaggtttttgccaaaagcccaaaacctaaagaatggtgtaattcctccccggaaaacccctgaaaaatttgaggggaacggacggttttttgggggggaacctggggggcctaaaaatgtacaggcccgggaggaaaaccaccacccggaacggtgggacttacaacacgatggcggcaacgaagcaaaaaacaaccaacggggggggggccc

SEQ ID NO: 23661 - DNA, 452 bp, Zea mays
  unsure (1)..(452): unsure at all n locations
  Clone ID: MRT4577_121584C.1
gacagcgcctgtagccctgcagggcatgcgcgacgcacnagnnngcgaaggcattannacgcctctnngcccgttacccgataaaactttggtgtgaccaccgnngcgatccggcgccgtgagggtcaactcatgagttcagtcaggcacgcgcgtganttgctgctgngtctgacctcttgatgaggttcgtgtctcgtacatactggctgtannatcatgtgctccttcggggctcaattgtgttcttctgttggagtgagtccatgtacgaaaggatgaatcttgattgccctgccttccgcttcgctgggttgaacaacttgaacctgtgatgttcagcttgactggggacgtaaagaagaacctggcgctctcttgtgtgcatatctttattgaggatgattgttgacactgtgtgtctaagcttttgcacttttcctatttgtttt

SEQ ID NO: 23662 - DNA, 505 bp, Zea mays
  Clone ID: MRT4577_121585C.1
gcaagaacaaaattatcattattcgatagtcgtttgttgtgtcactgataggagaatcatcattcacattgtatcgtattgtacaagcattgacattatgttcggccacaaaatatacattatagaagtatgatatatccttaattaagcaaacatgggccaatcggaataggatgcatcggtttgatcgaaaggtatgaagccgttttacgccagtcaatgcaaataattctcgcatccttagcgaactttggatcaaagctgtctaaagtcttccacacatctccattgtgtaccatcacttttttgttctcccactcagcttctttgtgccactgcatgagcatggtcattctttttgagaaaaatgttgtttcagtcgagctgtaataggcatgtaacgaagttatttatgtgcaaccatcattgtaacaactgtcatcatttataaccttaatgttcctcattttgccacattttaagcatttggtttgtttctgggggt

SEQ ID NO: 23663 - DNA, 840 bp, Zea mays
  Clone ID: MRT4577_121586C.1
ggattattttttttctggattaggattccagaaccagggcggggtttggtacgatgtttgtccgacgacccggggagacgaccggagacagctccgagaagagtacaaccccatacacctacgatggggaatcttctacgcggacatactgggcatcgctggtgactcggataactataaccgtgaactcggtccgcaactgggcgccatgaatctgggcaaggctttcgtgactaatgctgtgtgcgtgctgtcgcgctacccagcagacgtggagcgtgtcgatcttagccccaggcaggcactggcaggcctgatgttcatgctctccgagtcggcaaagttcaatcatctctatcacctctttgaaagtcgctgggttgaaggtgtgaaaccccaagatgaaggtgacctacgtttggactacatgtggaactggtttaccatatcagacactctgcttgcgtggaaggaggagcgaaaccacaaaaggagagccgactgtgtcacgaagctcaaaggtctgggaaccaccggcttacaagatgcgctaagtaaccttcacttcgtcatcgggaatgacattcactctattctaggaagaaaatattgatccatcaccaaaagaaaatcgagctagttcctcccttcagtacgtttcgttcatgcgtgtgatcttttccatgcatgtgttggaattccatgccttgtagtaatcatttacttttatcttttgggcttgagaatattaatttttgtaatgagtgctaccgtttgttttactctatggtatgagcgtagttatctaaaaaaaatgcaactgtgatgtgatatacaaaa

SEQ ID NO: 23664 - DNA, 310 bp, Zea mays
  Clone ID: MRT4577_121587C.1
gcacgaggcccggtcggggctagcttcacacacgccgactgacgcgcctaaaaccgacacccaggctgggaggcgccctgcccgcgttcgcagtcagagccgcgcgcctgcgcaatgaggctgggtcgccccatgcagtgcagcgagcgcaggagttctcactggagtggcagatttgttcattaattatgaacttggtaagtttgttgttcgtaccttgtaaaatcaggcttctctgattacatgaaggagcgctgcttgtgcgtgctgcaatcggacaaggacttcatcatgatgattctggcatagc

SEQ ID NO: 23665 - DNA, 421 bp, Zea mays
  Clone ID: MRT4577_121588C.1
tgccagcaggtcgactctagatagacatatctgagctccaagaccctgcaaatgtcacatagaatatatccaaacataggaacaacccaaactaaagatcaaggtgaacttagctcttttgggctgcttccagttctggctttgacactgctcctccttctagtgaccttgttcagttctttgagcttgatcttgagccttatgacttataccacataattataaatgttatctcattggttgtaagtcatgtccttttgtagtgatccttgatgtgccataactcttcttaactcgatcaaccttgactttgcaagtcttcttcttcacccttggctttaggttcctggtctccttgaccttctcccgtgcactcggtacctcgaaactcttctttgctccatccttggcttgatcgatt

SEQ ID NO: 23666 - DNA, 420 bp, Zea mays
  unsure (1)..(420): unsure at all n locations
  Clone ID: MRT4577_121589C.1
ggcttgngacctttgggctgatttatgtgcttgtggatgtgcggggctgtagtttttagcactaggcgacgagtttattattaaaggacggcggtgaaggtaacggtctagattgcggtggtagttttagagggagggagaatagtaggagtcgtagttgtagttgtagcttactcggcagcaattgtagtttcgtggttaacggatgcagttggagcttcggaggcgagtggagtttgagcttcggaggcgagtggagtttgagcttcagaggcgagtggagtttgagcttcagggtcgattgcagtttaagttttaacggtaacggcaataacgacgtcgtcgtcgacgctgacgtcgacgtcgtcgtttgtagcggtccttttatcggaagtaagctatttcgagtgtcggtgggtt

SEQ ID NO: 23667 - DNA, 255 bp, Zea mays
  Clone ID: MRT4577_12158C.1
tgcaggtgtaccgcgacgccgtggccacgggcgacgccgcgttcgcggaggcggtgtggcccgccgtgtacgttgccatggcgtacatggaccagttcgaccgcgacggcgacgggatggtggagaacgagggggtgctcgaccagacgtacgacatgtggtcggtctccggtgtcagctcctacacggtcggtgtctgggtggcggcgctgcaggcggcggcgggcatggcgcgcgtcgtcggggaccgccccg

SEQ ID NO: 23668 - DNA, 122 bp, Zea mays
  Clone ID: MRT4577_121590C.1
cgttacactatagatgagccttgacttccacgcacgcgtacgctaggatttggtttcgagtcaggccgggtgccgtcaactttttcaagtggagccgtggaaaagttcatggcaattcattg

SEQ ID NO: 23669 - DNA, 185 bp, Zea mays
  Clone ID: MRT4577_121591C.1
gttggttttatatagtggtttcgcttttttttccaaaggacgatgacacacgagagaggttcacagatcaaggtgtcggcgccgacaggcgcggacaggaatgtagtgcactcggggactctgggcacaaaaatgtgggtgaaaattgggaaaaagatctggacgaagcctacttcaaagacatg

SEQ ID NO: 23670 - DNA, 428 bp, Zea mays
  unsure (1)..(428): unsure at all n locations
  Clone ID: MRT4577_121592C.1
gcggcttcagtacacagtctatctccgcttaccgagagtatcagactggctccctctaatttttnnttttatgggacagccgcattcactccactctcatgactccggtatagcagtgttacatttcccttctgccatgaactaagagaacactaacatcaacattggggtcattggacatttcaactctggcatgtcgaccatccactggccacctgatctacaagcttggaattatttacattcttttgattgagaggcacaagaaataggccgctcagattaacactcgtcattgaatattgcctgcgttcttgtcataccaaaggctccacgtgtgagaggaatcacaattgatattggtttgcggaagttcctaacaccaaatactacttgcgtcgcattgtttccagtatacacctgacttc

SEQ ID NO: 23671 - DNA, 755 bp, Zea mays
  unsure (1)..(755): unsure at all n locations
  Clone ID: MRT4577_121593C.1
gaaaaagaaaaactctgctctcaggcagaggcataggcagccgctggctcgagcagctctagagggacgaggaccgcccctttcctctctgtgcggctgtgtgcgcgcagcaaactagtaagatcctttttcctgtgcccccgataatggctggcacaaaaggggggatggagtcctctgtgccaatgataaagggtggcagaaaggctagtgcttttcgcgtcaggatagcagggaggaggaaaatttgtggaagaaaccagatggcgactttgccaagatgcccccgttttctcaatagtataatcagccacttgaatttcaaggatacaccagcagtattaggaccgaaaggtgaaatttcattgtaaatatgacaaaaccgatcgtattcgaacaacacaaagccggtcatattcaaacaacacaggtttatgttatgcattaggccgttcgttgtcccaaatccatgagggttgagggggaataagtccactgctagtcaaaacccatctcaatccacttcaataccccttaatccacatggtttagatataaaacgaacaagaccttactgacttccagtgttcagcccagtgaaggtaaaatatgtcagttacatgtgtgccttacagtttagacaccattctaaactntagggactaaattttagtcactagaaaccctatttgaaagacctattttagtcaccatgtttggtattagagactaaaagtgattaaactttagtcact

SEQ ID NO: 23672 - DNA, 354 bp, Zea mays
  unsure (1)..(354): unsure at all n locations
  Clone ID: MRT4577_121594C.1
agtcgtcacctagaaacaaaagaacaatcgctgcctgctggtcgtcgttcgcctcnttctctccgtgtgctcccccacccccgacctcgcttcctcctccgagcttccttccccgaggcgtaagcgtcagcagagggagtataaatcgatcccctccggacattctgccaacgactctccgctcctccaccagaccaatgaggggtgctgcgtcctctgtctgcacgcgggtggaggcgtagtctcccgcgaggctatatccgccgttcccggcacttgtacttcccccccgaaagctagactacttaccttgtagcgtccgccgcggcgcgcaagcggagagtgactggcctg

SEQ ID NO: 23673 - DNA, 134 bp, Zea mays
  Clone ID: MRT4577_121595C.1
tcggcggcattgatcttggtttaaaatcaatcaatcttggtttcttcgggccggaagattttaaacccatgggccagaataaaatcgggatcaaatgggttcggaggattcggaaggttgggggccaggtgggc

SEQ ID NO: 23674 - DNA, 3253 bp, Zea mays
  Clone ID: MRT4577_121596C.1
gcaatttctcgcctttctgtctcgacatttcttgcaacctcgcccgcgtggccgcgtccccgtctctatctgttcctctctcccaactccagtctaatgttctcataggaggagggcgagagaagcgagcgagcgagcgaggaagctggagcaaaacaagccggtggaccaagtattcggtgacgaagctgaggcgaaggagaggaggaagggaagggccacgatcgaagagtgagcgcgtctcgtttgatctgggaattcatttcgtacagtgctaacgactttgatacagaggcataaacaatctagcctaagagaagaacactggaaccatggtttcaaaatcatactcaaatctgctagacctgacctctggagatggatttgactttcgacaaccttttaagtctcttcctcgtgtcgtaacttctcctggtattatatctgacactgattgggatacaataagtgatggtgattcagttggttcagcatcttctactgagaggaaaataatcgttgccaacttccttccgttgaattgtacaagagatgaaactggggtgctttccttctcattggatcatgatgcgcttctcatgcaacttaaagatagtttttcaaatgagactgatgttgtgtatgtgggcagtttgaaggttcaggtagatcctggtgagcaggaccaagttgcacagaagcttcttagagaatatcgatgcatacctacttttctcccatctgacctacagcagcagttctatcatggcttctgtaaacaacaattatggccactttttcattatatgcttccaatttgccttgacaagggtgagctatttgatcgcagcctgtttcaagcctatgtccgagccagcaaactttttgcagataaagttatggaagcaatcaatgcagatgatgattacgtttgggttcatgattatcatctcatgctgctccctacattcttgaggaagaggttacaccgaataaagattggtttcttccttcacagcccttttccctcttcagaaatctacaggactctgcctgtaagggatgaaatcctgaagtcactgcttaatgctgatctgattggtttccaaacatttgactatgcccgccacttcctatcttgctgtagcagattgctaggcctgcattatgagtcaaaacgtggttacattggaatagagtattttggccgaacagtgagtttgaagatcctttctgtgggtgtccatgttggtcggcttgaatctgtcttaaagttgcctgctacagttagtaaggttgaagaaattgaacaaaggtataagggcaagatactcatgttaggtgtagatgacatggacatcttcaaagggataagtctgaaattgcttgcactggagcttcttctggacagaaacccaaagcttagagagaaggttgtccttgtacaaatcatcaatcccgcaagaagcacggggaaggacgtgcaggaagctattacagaagctgtctctgtggctgaaaggattaatacaaattatggttcttcaagttacaagcctgttgtcctaattgatcaccacataccattttatgaaaagattgcattctatgctgcgtctgattgctgtattgtaaatgctgtgagggatggcatgaacttagtaccatatgagtatactgtttgccgacagggaaatgaggagattgataaactcagaggtcttggcaaagacacccatcacacaagcacacttattgtttcggagtttgtgggttgctccccatctcttagtggtgctttcagggtaaatccttggagtgtcgatgatgtggcggatgccttgtgccgtgcaactgatttgactgaatccgagaaacggctgcggcatgaaaagcattatcgctatgtcagtactcatgatgttgcttactgggcacgcagctttgctcaagatctggaaagagcatgcagagatcattacagccgaaggtgttgggcgattggatttggcctgaatttcagagttattgctctttctcctggcttcagaaagctttcttcggagcactttgtttcttcttataacagggcttctagaagagcaatatttctcgactacgacggcacacttgtgccccagtcgtcaatcaacaaagctccaagtgaagaagtcatctccgttcttaacaccttgtgtaatgatccaaagaacgttgtgtttatcgtaagtggacgaggacgtgattccctcgatgagtggttttctccatgcgagaagctccgtctagccgcagaacatggctattttatcaggtggagcaaggaagctgcatgggagtcgagctattcaagtccgcggcaagaatggaagcacattgccgaacctgtcatgcaggtatacacagagacaacagatggatcttcaatcgagtcaaaggaaagcgccctagtatggcactatttggacgcggaccatgatttcggttccttccaagcaaaggagctacaaggtcatcttgagagggtgctatcgaatgagcctgttgttgtgaagtgtggccattatattgtagaggtgaaaccacagggagttagcaaggggcttgctgtcaacaagctgattcacacactggtcaagaacgggaaggcaccggatttcctgatgtgcgtcggcaacgacagatctgatgaggacatgtttgaaagcatcaacggtatgacctccaacgctgtcttatcacccacaatgccggagctgtttgcctgttcagtcggtcagaagcccagcaaagcaaaatattatgtggacgacaccagcgaagtaatcagattgctcaagaatgtaacccgcatcccctcgcagcggcaggatgtcagtgccagccatgggcgtgtgaccttcagaggcgtgctcgattacgtggactaggcaccaccacttagttactcgaaaaattattagctgggaagcatgtaaattcccccgtcttctgcctctcaatggttcattctaggagggtgtgttaatccagaattgtagtgtagcctacatgaatcgtcaccattacacaaacagcgtaaatgtgttcgccgtttcagggttcaggtgatgtgtgtaggcaattttggtagggaaggggggagctgctgctggaggttcgcggtgtgaaagggaggcctcttgttcaaacagtaattggttgtctgaatctgttctcctgctgctatattgatgatcgtgttagttctcta

SEQ ID NO: 23675 - DNA, 207 bp, Zea mays
  Clone ID: MRT4577_121597C.1
gtcacttccagcgatggacattgctactacaggggaggtgctaaggaaccaggtggggtataccattcgaaaaacgatgaactcggctatgctaacgaacgcatggtccaagagctgcatgtcaaccagacatacacataacctacttctctgaagtcaacagaattaggaggtacgttctgcaattactctatggccgatgttctt

SEQ ID NO: 23676 - DNA, 3294 bp, Zea mays
  Clone ID: MRT4577_121598C.1
ctcgcctttctgtctcgactttcttgcaacctcgctcgcgtccccgtgtctatcagcccctctctcccaaccccgggtctgtagtgttctcataggaggaaagcgagagaagcaagcaagcgagaagctggagcagcgaacaccaagaattcggtgccgaagcggaggcgaaggggaggaggacgaagggaagggcagtgaccgaagagcgagcgcgccacgtttgatctgggtatattatgagtgttccaagactaatgcatcatcttcccaaactagcccttacaggaatttattttgtacaggcctcaacgagctagcctgagacaagaacactggaaccatggtttcaaaatcatattcaaatctgctagacatgaccccaggagatgggtttgactttcgacgaccttttaagtctcttcctcgtgttgtaacttctcctagcattatatctgaccatgattgggattccataagtgatggtgattcagttggttcagcattttctatcgagaggaaaataattgtcgccaacttccttccgctgaattgtacaagagatgaaaccggggaactgtccttctcattggatcatgattcactactcatgcaacttaaagatgggttttcaaatgagactgatgctgtgtatgtaggcagtttgaaggttcatgtagatcccagggagcaggaccaagttgcacagaagcttctcagagaatatcgatgcatacctacttttctcccatctgatctgcagcagcagttctatcatggcttctgtaaacaacagttatggccactttttcattatatgcttccaatttgccttgacaagggtgagttgtttgatcgcaccctgtttcaagcctatgtccgagccaacaaactttttgcagataaagttatggaagcaatcaatacagatgatgattatgtttgggttcatgattatcatctcatgctgctccctacattcttgaggaagaggttacaccgaataaagattggtttcttccttcacagcccttttccctcttcagaaatatacaggactctgcctgtaagggatgaaatcctgaagtcactgcttaatgctgatctgattggtttccaaacatttgactatgcccgccacttcctatcttgctgtagcagattgctaggcctgcattatgagtcaaaacgtggttacattggaatagagtattttggccgaacagtgagtttgaagatcctttctgtgggtgtccatgttggtcggcttgaatctgtcttaaagttgcctgctacagttagtaaggttgaagaaattgaacaaaggtataagggcaagatactcatgttaggtgtagatgacatggacatcttcaaaggaataagtctgaaattgcttgcactggagcttcttctggacagaaacccaaagcttagagagaaggttgtccttgtacagatcatcaatcccgcaagaagcacggggaaggatgtgcaggaagctatcacagaagctgtctctgtggctgaaagggttaacacaaagtatggttcttcaagttacaagcctgtcgtcctaattgataatcgcataccgttttatgaaaaggttgcattctatgccgcgtctgactgttgtattgtaaacgctgtgagggatggcatgaacttagtaccatatgagtatactgtttgccgacagggaaacgaggagatcgacagagtcagaggccttgacaaagacacccatcacacaagcacacttattgtttcggagtttgtgggttgctccccatctctgagtggtgctttcagggtaaatccttggagcgtcgatgatgtggcggatgccttgtgccgcgcaactgatctatctgaatctgagaaacggttgcggcacgaaaagcattatcgctatgtcagtactcatgatgttgcttactgggcgcacagctttgctcaagatctggaaagagcatgcagagaccattacagccgaaggtgttgggctattgggtttggcctgaatttcagagtcattgctctttctcctggcttcagaaagctttcttcggagcactttgtttcttcttataacagggcttctagaagggcaatatttctcgactacgacggcacacttgtgccccagtcgtcaatcaacaaggctccaagtgaagaagtcatctccattcttaacaccttgtgtaatgatccaaagaacgttgtgtttatcgtaagtggacgaggacgtgattccctcgacgagtggttttctccatgcgagaagctccgtctagccgcagaacatggctattttatcaggtggagcaaggaagctgcatgggagtcgagctattcgagtccgcggcaagaatggaagcacatcgctgaacctgtcatgcaggtatacaccgagacaacagacggatcttcagtcgagtcgaaggagagcgctctagtgtggcactatttggatgcagaccatgatttcggttccttccaagcgaaggagctaaaggatcatcttgagagggtgctatcaaatgagcccgttgttgtgaagtgtggccattatatcgtagaagtaaagccgcagggagttagcaagggtcgtgctgtcgacaagctgattcaagcactggccaacaacaacgggaaggcacaggatttcctgatgtgcgtcggcaacgacagatctgacgaggacatgttcgaatgcatcaacggtatggcctccaacgatgtctcatcgaccacagtaccggaggtgtttgcctgttcggtcggccagaagcccagcaaagcaaaatactatgtggacgacaccagcgaagtgatcagattgctcagggatgcaacccgcttctcatcgtcgcagcggagggaggacgtcaacgccagccgcgggcgtgtgaccttcagagacgcactcgattacgtggactaggcaccagcagcaattcttagttactcgaaatgattagctgcggagcttgtaaattccgctgtcttctgtctcccaatggttttcgttctagagaattgtagtgtagccgacatcgacatggatcgtcgtcaccgatacacgaacagcggaaatatgagttgaagttcgccgtttcgaggctcagaattggtacatttatagaattgtagtgtaggcaattttttggtagggaatagtaattggtacatttatagaattgtcaattgtttttcttctaccgctgataatactatagcttcgctgcatgtgttagctttaaaaaaaaaaaaacaaagggcggcaaa

SEQ ID NO: 23677 - DNA, 411 bp, Zea mays
  unsure (1)..(411): unsure at all n locations
  Clone ID: MRT4577_121599C.1
ggtaacagnacacaggnncaccccctncctnctcctnnctcctctcctntnctnccctnctcatncacgcgaaggagactgcgagacgtaggaacggggttcgccacanaaaaagagacgtaccggctanntgaagacgaggcgcggtgccctggctactcctgccacgcggncggcggccacggcgnccgggcgaggggnccggaggcgcaacgccggaagaggcgcaggacgacggccgaggggtggggggcggcggctgccggcgctccaggtgtccgcctggggggcagagacatgttcgaggagctgcctgacgatctcgtcgagtccatactacgggacgacggcgggtcgcgccgggtcgccgggcgatccacgcccctgagtgctgccccccagccagggggg

SEQ ID NO: 23678 - DNA, 276 bp, Zea mays
  Clone ID: MRT4577_12159C.1
tttgtttggtttatgggttatgcaagttcttccacaatgccatatcagcggtatccgaatgcccaagaactgtatgccatacgtcaccacgctcacacagtgtgtctaacacacggaccaaacacacataaccatctggttcttacacagccaattgcggtcccctatctgagacacttggagcctactccccatgttgtgccatctactggttcgggtattgagctgaggacatcttcaaccgatcgagtagagctacattgatgacttctcctt

SEQ ID NO: 23679 - DNA, 467 bp, Zea mays
  Clone ID: MRT4577_1215C.1
ggcttggaacctttgggctgatttatgtgcttgtttatgtgcttgtttatgtgcttgcgtacaagggatcacaaggcgttacgacaactgaggaatccgctattaggatccgtaaatataataatcaaaccgaataatagtttaagttgcaaagtgcccctagcctaggacaagtctcggctaacccacgtcgttggtaatatcgcattaacattaccctccaaggtaaccgataccctattatcagtctcagcactagaaaacgaactaggaaacggttcggtcgggctaagcataaacgacgtcccggaggtagccagggagtcgcctagcggcgacgggtaggtaaagaaaggatggaaagggtaaaatgaagctttctccttcttgggcgcgtactataggtcgacgataagttttataccgacgaattcggtttaagtctcagtccactataaaatgcgtca

SEQ ID NO: 23680 - DNA, 596 bp, Zea mays
  unsure (1)..(596): unsure at all n locations
  Clone ID: MRT4577_121600C.1
cccgggtcgnacccacgccgtccgnaaaaaaaaaaaaaaaaaaaaagaaaagaagaaaaaaaaaaaaaaaaaaaaaaaaaaaaaaaagaatgaaaaaaaaaaaaaaaaaaaaataaaaaaaaaataaaaaaaaaaaaaatggaaaaaaaaaaaaaaaaaaaaaaaaatgaaaaaaaccggggggggcccctttttagaagcccctagttttcacatgggggggttgggccagcttttgttttttttttaggggcccccaaaatatcatccttgggccccgttttttcaacctgtttggatgggtgaaaaccctgcctgtacccaattattaagcttggggggaatggccctttttcccagggggaccaatacaatagggggccccctagcgcccctttcttaaaatttgttcccttcctttgtggaatgggacccccccttttccggtcaatttatactggggggtcttggttttttccccccgatttagcgctttacttttgccgggcccttaaccccttttttttggggttggtcccctttttttttccatcgtcctgagggtttccccttagacctttaaagggggggccccc

SEQ ID NO: 23681 - DNA, 555 bp, Zea mays
  Clone ID: MRT4577_121601C.1
cgtccggcaagaagtatattagattctatcgtgctgtcatagctggggactcgtatccacacacagcgactatgctaagcagtaccagtcaggtagaccttgacaacattgatttgaaggagtttccaacagttgaaagcctggaattcattgactgcatattggtagagggcgacctgctttacatccctactaaatggtggcactacgtcagatctcttcccaccagcttctcggttagcttttggtggcactacaaggttgttgactactggctcgaccgtggaaaatctgggtttgatgtttataagtgtagactgttgcgcattgagggccaagaacccatgggtactgtgaattatcgagtagctgacagcagccttagatgtgtcaagctagtagtttctttgcaacacttaccgagcactggcagtagctttggtgattgtgctgtctcgctgagaagatggcttaagttaccaagtgcaacattacttgaagcgttaacatcactggactcagaggttcattcggtactgcttagtggatctgctt

SEQ ID NO: 23682 - DNA, 386 bp, Zea mays
  unsure (1)..(386): unsure at all n locations
  Clone ID: MRT4577_121602C.1
ccggccgggatcgtctgtgtcccccttcctccctgcgtctccctctcaccctctatcgcccaaaagctccaacctgtcgccagagacttggcgcagacccgtcgactaacacgtcgtcgtcctcacgccgtgggggatgactggacacgatgctccccacccgcacccaacaccacgccagcctcgccctcgatccaggctgccgcaggtgtcctcgacgccacccttccggctcgccggtggttgattcctcttctccttcctctggtcgcaggggatggcgncgnagctcgggtacgccacccttccgcatgcgccatccacgccaggaacaacacgggcggcgggggccacgatgccagcagcaacacacagccagggccacg

SEQ ID NO: 23683 - DNA, 203 bp, Zea mays
  Clone ID: MRT4577_121603C.1
gattgaagggttacctaaaggaaagggcctactagcgccggctgaaaggagctctggtggcaaccttgctaggactacactactgcggtttgaaagagcgtggagcgacatactgctgtgtaataagatgtaaatcagtaactgctgcatcttgttatgcaacgctgtctgccccttttcatgcatgccactcctggaggtca

SEQ ID NO: 23684 - DNA, 216 bp, Zea mays
  Clone ID: MRT4577_121604C.1
cacacgcgtgcgcacggtttggcaatggcgcactacagattgcactatacaagaggctatgtccatggcgtgaagagaacaggaatattgaaacagtatcaaaaatgggagtgacgagtgttttagtagagaacggggtgaaccttgacatgtttaagctgggtctcagtaactttgcaactaactaggctgccttcagcataaaagatgattaat

SEQ ID NO: 23685 - DNA, 349 bp, Zea mays
  Clone ID: MRT4577_121605C.1
ttttttttttatatattttatataaaattttatttgtttttatataacttttttactttgattgcgtaagctacatattgcgccacacatagtttctacaaacttagttaatcactaaactagttaaggtctaattagacttaaaaaactcgtgttaacgtttagtacttatatatgtattaacaaaaaaagcttactttccaaaacaaaacaaacacgggaacgaaattattatacacgttcattttatcaatagggggcaaagtaaacaaggaagttcataaagctaaaaaaacattttggggtcaaaaagggagtttttaaaaaaaaaagtgagaaaattgttttt

SEQ ID NO: 23686 - DNA, 288 bp, Zea mays
  Clone ID: MRT4577_121606C.1
aacacacacatgaccagatctctctcaaatccacgcgtcggcacctccgtttcaggatgcagatctttgtgaaaaccctgactggcaagactatcaccctcgacgtggagtcgtctgacaccattgtccacgttaaggccaagatccaggacgatgtgggcgtactcccaggtcatcagcgcatgatctttgctggagagcagcttgaggactggcgaacgcttgctggctacaacgtccgcgaggagatcaacatccatcttgtgctccgtgtcggcggacgtctgc

SEQ ID NO: 23687 - DNA, 259 bp, Zea mays
  Clone ID: MRT4577_121607C.1
gcacccttatgtggatggagtgccaggagcctgtttcgggaacagtcgggctttagattacaaacccgctagacactggggttgtcgaatgatacaaaccgtctactattgtacctacaggccatgagagggctacagcctatattgatttgtatcatccttccggtttacctagtgcacgcaccctgtcatccttcgggatagtccacaaagccggttgaaggacctccctctgccaagggttgtattgtgtgaccag

SEQ ID NO: 23688 - DNA, 287 bp, Zea mays
  Clone ID: MRT4577_121608C.1
aaaaacaaccccccggctttcaaattttggcagtccatcgccaaaggcaggcggggaaaccccaaaaaccaaaaatggctaaaaaacccgggaaccagtttaaccaaacctttaacccggaaaattccgaggcaacccaaaaacgagggccgggcgacctacaacccaactgggaaggggccgttaatccggatcccaaggggaaacctacaaaacccggggtccctgggccgggacccccctaggggcaaatcccagaccacggggggccgttcctaggggacccg

SEQ ID NO: 23689 - DNA, 350 bp, Zea mays
  Clone ID: MRT4577_121609C.1
aggacgcgtggggtggtggcgccggcgcatggatgcatgcgtacgcgctgctccagctgcggacgtccgatgccgcggggcagcccgcctcgcattcgccggcaatggtggtgtcgtctggcggctccaatcccaagtgcgtggccggcgccagtaacgaccacgcgtgccgcgtcggtccagtgcacgatccagtgaaccatgaggaggagggctctagcgtcaatatctacgcgcccaccgccgcgcccgactacgtctgacacgacgacggcagcgactacaaagatgccgacgtgcccaacaacgatcatctcgtcatcgtcagtcattgaaagctgtcgcgcgcg

SEQ ID NO: 23690 - DNA, 296 bp, Zea mays
  Clone ID: MRT4577_12160C.1
cgaggacgaagatggccaccctggtggtgaacgcgtgcagtgcgcttcgcagtaaacggaaaaagcaaagcctatatatccaagtaaatgtagcttgggactcaaaacaaaagcagcgaccgaatagtggacgcgggatggtgccttagagctattggatcactacgacgtcctttttttctggaggcagggcaagcgagtgaggcggatggagcggtgttgtttgaattaatttagggaattgggcactgcttcgttccattctctgccgctgcatttgaggagttctcttttca

SEQ ID NO: 23691 - DNA, 320 bp, Zea mays
  Clone ID: MRT4577_121610C.1
ccagcaaaaattttaaaattttaaaattttaaaatttttgaaaaatgttcgggtttaaaaaaaaaagtacttttaatttaggggtttaacacacccatgggcaaaatttccaaaattgggggggaaaaaaattaaaccgggtcaaaaagttaaacctttggggcgagcaaaaacggggcctgaacctggacttggaaaaaaaacacaagaacaggggggggggccttttttacaacaagagggcttatttttcttgccctaaaagccctccgggggtttggggcccctgcctttttaagggaatcggccccgaaaaattt

SEQ ID NO: 23692 - DNA, 480 bp, Zea mays
  unsure (1)..(480): unsure at all n locations
  Clone ID: MRT4577_121611C.1
tttttatattatatttttttttntttttttttttttggtagggtttattttaatttttttttttttcccgccccccaaaaaaaaaaaatttgttttttaccctttggttgtataaaaacgtatacaaacacaccctcttattttcacttaaaaaacacacacaacccaaggaaaccccaaccgtttaactaccgaaaattaaactgcattcccccacctaacgcaagttaaacaatcattcaccaaaaattaagccttcccccggggggggatttatatttttttctggaaaaccccccccccttataccccccccccccccggtactttttttgggtggaaaaaagttcccccacctttggcaaaaaaaacaacttttttttttttttttttccgcccccccccttgacctcggcttccatcctctttcccaaaaataaaaaaccttagggccccctctcagccggggtggaagccgat

SEQ ID NO: 23693 - DNA, 176 bp, Zea mays
  Clone ID: MRT4577_121612C.1
aaacatattggcagaagctgcaacaatacaatttgagtacactttttggtaaggaatggctataaaggctacaaagagttattaccatagaacatttgaaggcggaggttggtttgactacattgcatgccgaatgctataaaggcacactggataaaaaggttatcacacattat

SEQ ID NO: 23694 - DNA, 776 bp, Zea mays
  Clone ID: MRT4577_121613C.1
cggacgagtgggtctgccttggctacttcatattccgtaatcagctttttaatgtatatgcgccaaagtatgatactggagggaaattttggcccgttgtgcacaacacaacgatattctctctggttgttctgcatataattgctattggagtatttgggataaagaagcttccccttgcgtccagtttgctacttcccctaccaccgctgacccttctgttcaacgaattctgccggaacagatttctgcctatctttgaagcatactctaccgagtctttgctaaagaaagatagagaagaacagagcaaaccagatatggcggagttcttcagtaatcttgtaacagcttactgtgacccagctctgaaacctttccaacgcacttctaactccgacgaacgcaccgagccgctcttggcctctctgtctagctccagataagctgtggatggcagctgactccgctgtgtgaatttcgatttgattttggtgtttagatacggctagtagcataggtataattttatgctacattgtaagagtagaacttttgacagacatatagtttcttattgttgttgtctgttgtgcaattttttgcccttctggtgtggggggagttcgttgtacatatgtgaatgtacatgatattttgtgcacttctcagagatgaattgctcgttttatgatgtgttggcaacgaaaaaaaaaaaaaaaaaaaaaaaaaaaaaaaaaaaaaaaaaaaagacgaaaaaatataaagaaaccaaa

SEQ ID NO: 23695 - DNA, 1103 bp, Zea mays
  Clone ID: MRT4577_121614C.1
ttttttttttttttttttttttttttttttttttttttttttttttttttttggaaatatcaggtcgaaagaaactcttgagagtagagattattattacacgacctcaactgcacaatatcattgccagatcgagatgaaacgaaattcctaatcaactgaattcaggtgacgggaagggaaacatccgcactgagtagagatgtgcaattacagcaccagcgcaaatgcaaggatgagacgcccgcccacaacacaaaaaatctttgcaaattacaagtatgaagttcgatcagcatgttcatttgctgtggactgccccgaatatgcatagccccagccggtgttttacagggtaaacaccacactggtgatgtccgggaatttctccttgatggccgccttgataccgctgccgatggattccggcccgtcgtacctcaccaggcagtcctcgccatcgacggccaacacatccacgctcccgccgtagttcgcgatcgctggccgcagtatgtccaggtgccggttcaccgcctcggccgttgtctccgccgccggctggtccccgtcgaacacctgacggatttccttgaaagcgtcgccgaacttctccttcagcacacgctcgatgcccatattcatcgtcgtcgtcgagctggggcagctgccgcaagctccttcgagcttgagggagatgacaccgtcctcgacggcaacgacggtgacgttgcccccgtcagagatgaggtacggccggacgtcgtccaggacgcggtcgacgttttccggggtcagctcgtacgtcgccgccgagtagaggccgcctcccggcgccggcggtgtggacgcggaggccgcgaccaggcatgcccgcgaaccggaggtccagatcttggagggtccggattggaggcaccgagggcgtgggaggggactcgatttggtgattcggatgcggattcgcggcggagggaacaagccgacggcggcggcggcaagggacgcttccatgggttgtgtggtttgcgtatgagcgtgcgcgtttgtgcttttgccggcgtcaagttgtgcggccgccggtggcgcacagaaatcccgga

SEQ ID NO: 23696 - DNA, 392 bp, Zea mays
  unsure (1)..(392): unsure at all n locations
  Clone ID: MRT4577_121615C.1
tttaatanttttttttttttttttttttttttttgttgtttttaaaattttttgggggttttttttccaaacccaaaaccacgggtcctcgaccgaccctttaaattaatttttgggaaagggaagtgataaatccaaaaaaaccccagggggggacccccaaaaagggatccctcgggacagtttaacattgaaacgggggggggttccaactgaataattgccaaaataacctcaccaacaaagggcctacaactcaaaccaatcaaaaaagcatttgggcctttttaaaccacaaaaggggcctaattttaattgaaaatcccgggcctttaaaaccctgcatttttaacagggaaaaaccagcacgggggcccctaattccttttgag

SEQ ID NO: 23697 - DNA, 372 bp, Zea mays
  Clone ID: MRT4577_121616C.1
ggcggggatggataactagccaccaggggggatattaggcacaggtaacagggcctgttgccttttgcaaagtaacataagaggtgagtgcttaaaccgtatccaacaaggatcattaacgacgattctttgtatgcaaggtcacctccagcatgaaaatcaacttacataatgctttacacaggcactagagctataggggtcattgcagcaccatcttggctatcaacttattccacgtgcactagcagatcatgagcctggtactgatcgaaagtattaaccacctgtcgaggttgagggggcataacaggctacaccaccgtcaggtatcaccatcattttctattgatcgggaacggaatatcctcc

SEQ ID NO: 23698 - DNA, 294 bp, Zea mays
  Clone ID: MRT4577_121617C.1
cccacgcgtccgcggacgcgtgggcggacgcgtgggaaaatttgcaccattcgggagtcgtagtattgcctgtatccatggacgccagctgagccggtagcatggggaagaagggtgcggtcgagctcatggcaagctgccccaggaagaagtctttgacgcggtccgttaaggccgagctgaaatttcgcttctgcttgatcgggcgctacctgaattatggccggttcgctcagtgcgtgggcactggcacacccgtctacttcgccgtcgttctggagtacctatgcgtct

SEQ ID NO: 23699 - DNA, 320 bp, Zea mays
  unsure (1)..(320): unsure at all n locations
  Clone ID: MRT4577_121618C.1
ccaacaatcaacatataaagtttaatacanttgcaacaatatancaacaatggcggcgcgagatattgtccatccgtatgcgtcctttctctttcttcatttgtttctaactctaccatttttcctcaatactcacaaactcctatagctgcccttcttcccccataccttccatcaattacctcttcattattttaaaacccaaccctttcaaccctacatgctccaacaatcaatctcaacaagcaacttacctttatcaccccttttctttcaacaatctccatccctatctttggtgcaatcattcgtacaaacca

SEQ ID NO: 23700 - DNA, 202 bp, Zea mays
  Clone ID: MRT4577_121619C.1
gtggacagaccaggggggagaatggaatgatggaaaagagaatacacactctgctgcattgttaaccattcgcatatgattctaaccatctccagcttgtataaccaccaggtacataggaaattggccagtctttcaaacagatataggcccacagcttttatccaacattggccatgggcgggtggaaacttctaaggag

SEQ ID NO: 23701 - DNA, 184 bp, Zea mays
  Clone ID: MRT4577_12161C.1
accgagaccaactacggtcccaatacaaacatgtcctactgtcaatccagcatccttaacagaagcagcatgcttttatcgtattcatgatgaggaactcgtgttaaattaaagaaatggataaggatacaattaaccaataaattattacttgcaacttctaagctctatcgggtagaaccgc

SEQ ID NO: 23702 - DNA, 325 bp, Zea mays
  Clone ID: MRT4577_121620C.1
gaaaagaacgggccggccgacccatacgtaccaagcaacataaaaacaccaattttttaccaccaatagcacaccaacaacggcggggacttaatatcttcggatgctccgcaatctttcctaccgcaaccctaaacccacaatgctcacaaactgctatcaatctcctattgctcccatacttctcaccaaccttgcatcaaagatactcaaaaccctcattaaaccccacttctggaaccctctagccttcaacacatcattgtccatagcaacatatctttatcacctttcctccaacaatcgccagatttatcctacttgc

SEQ ID NO: 23703 - DNA, 603 bp, Zea mays
  Clone ID: MRT4577_121621C.1
ccgaattcgcggccgcgtcgacatttgatataatcttgtggaagggagtggatgatctttacattcccataggtttgtcgttggtactagagttcaagctgggtggagtgaagatggagaatgtgtataaagcaacagttggagctatagcacaaaatggatactatgtagcctatgatggctgggaaaacagggaagagtgacacgaccttgacagtcaagatgctctttcaggagatggtcccagttactttacatggttctgttggacacaatgaagccatccagatatgctattaaaattcctgctagtcattatggctttaaactgtaccatgtctgttctattttcagctaggcagagcatgttctatttacagcaggccagcagacaccaggcagtaaggtgatgtatgagtcatttgtatctgccgcattttacctgtgtacatgagatactaaccctgccctgctcttgttacactttaatgtatgctttgtcacttgaatgagatttggttttatgaaagccacttctgcttgagtgcattttgagaaggataaggctttggctcgcagattccagccagtattggtgaatga

SEQ ID NO: 23704 - DNA, 284 bp, Zea mays
  Clone ID: MRT4577_121622C.1
cacgcgtccgcccacgcgtacgaccactcttccccctttttgtggttctggtgcccccatcgggggcccataatacagaggtgttggcacacgcccccacgggcttttttatcacccattggggttgaaactccgtgctagagagctctttatacggcgctcccatggtggcgtggcctttctacgccgagcagaggcaaaacgccgtcctgctgttcgacaacgtctggactcccttcctggtgctcaagtcggccaagctgagggagattatggactacacc

SEQ ID NO: 23705 - DNA, 423 bp, Zea mays
  Clone ID: MRT4577_121623C.1
cgatacatcagcaccccgctattaattaccctttgccctcttccctcctctctccccgtagctctctctcctcgccccgctccgtcctcccctcctagggttcgacgccctcgccagcccgcggcgaagccaccgcccacctcgccggcggcgtccgcggccagatggctggcggctttcgggcgctacatcttgccagggccttcttggttttcttgccggaagtgcagagcgctgccaggcacctaccccctagagccctccgcgatctaccccgccctttctccccccctcctcccggcgcgccccccgcgcccgccccatggcgccccccccccgcccgcggcccgccccgtccccgccggccccggcccccccccccccccgcccgcgcggcgcccgccccccacgctcgccccccct

SEQ ID NO: 23706 - DNA, 282 bp, Zea mays
  Clone ID: MRT4577_121624C.1
attcaatcgaggtttcattctcaagcagatgtatattactttgtttatccgaacaatgatcctgcggagcagctttagtataagacacccacagcccccgctctcatagcaagacagataatgaagagaagattcgggcggcactccatgaagactaccctaacaagcgctgctaccctcacaaggagcacacttatcaccaacatggccatccaacctttgaaagcaacttaccactctgttcacagaacatcaactgtagacacttgtatataaatatgt

SEQ ID NO: 23707 - DNA, 383 bp, Zea mays
  Clone ID: MRT4577_121625C.1
agcacgcctcccgttacgaaatcagctactattctgaccaactcagaacctcttctctatcgactgatccaatagcacgggcccttggtgcgctaatgccataactatgctcctctactccctcgagcataggcaccagatgatagctatgattcttacttatatgcattcaaccataatccgtcacactataactctgctccactagcttttcaacccatcgcgattaccacttgtatgaatcaacagttcatctcatactatgctgaattactaatctacagctcactcattaattcagtcaaactatcctttctcacgaccgtctaaactcattttacttctcatatcgtccggttaacaatcctacacttaactaattc

SEQ ID NO: 23708 - DNA, 2304 bp, Zea mays
  Clone ID: MRT4577_121626C.1
cccttgggcttttagatttggcagccttaggtacatggctttgattccccttggaaaggcgaggcttcctgccttccaggggcgaggtggcctccccgccagccttttttggcgggttaatcacctcgctctcccctgagttgtcctcattgcccttcctatgctcttcctccccctggcaccctaagataggcattgcgggggtcccactggccccatccttgacggcaaccgccgcatccgtttcacagatgatgtcatcaaccacattgtccattttgaccaagccgtcactgatccaccccccgagggaaacgaggtaccccgtacacgcgagattttgcccgtggacagtgctagggaatggcggtacggaagagcccgacgacagggacaaaggaggcggcggccccccggcttccccggagaaggccgactgtggcttttttttttttttttttttttttttttttttttttttttttttttttttggaaaccaaacaccggaactcaggcaaaacgacatgtagaacatgtactatactagtaggattacagataacaagaacaaactgtaaaacagagtaccatatagctacagcaaactcattgcctggccggcaggagaaccgttaacgtgcggaaaacctcaaacagtagtcaagatttagcttatcatatgtaattagggataaacgacagtgatccgaagcttagtcgacctcctccatcttgctttcgccggcgtcatcctccagcggaggcatctcagcttcggcctcagcagactcgtcctcatcgatgctcagaccgagctttagcatgcgatggatccgggtgccaaaggtgttggggtcatccaggctgaagccggaggtcaggagagctgtctcgaacagcaacatcacaagatccttgactgacttgtcattcttgtcagcctcggcgcgcttacggagctcatccatgattgggttctccgggttgatttccatagtctttttgctcgacatgtaccccgacatgctagagtccctcagggcctgcgccttcatgatcctctccatgttggctgtccagccatactcaccagtgacaaggcagcacggtgagtccacaacacggtcagacaccacaaccttctcaaccttgtcgcccagaacctccttgatgatcttgcacagaccctcaaacttctccttcagctcctccttcctcttcttctcatcctcggtctcatcaagcttcagaccctccttggtggccgagacaagcttcttgccctcaaactccttgagctgaccaacagcatactcatcaatggcatcaaccatgtacaggacctcgtagcccctcttcttcagcttctccaggaaaggggagttctccactgccttcttgctctcaccagtgatatagtagatgtcgttctgtccctccttcatcctcgtcacataatccttgaggctggtcagctcatcaccgctcttcgtggagtggtatctcagaagctcagcaatcctgcccctgttctgcgagtcctcatggatgccaagcttgaggttcttggagaaagcctcataaaacttgttgtagtcctccttgttttcagcaatctcaaagaagagctcaacacacttcttcacaaggttcttccggatcaccttcaggatcttgttctgctgaagagtctcacgggagatattgaggggaaggtcctcagagtcaacaatacccttaacaaaactcagccactcagggatcagttcctcacagttgtccatgataaacaccctgcgcacatagagcttgatgttgttttgcttcttccttgtgtcgaagagatcaaatggggccctcttaggaacaaagagaacagccttgaactccagctgaccctccacagagaagtgcttcacagccagatgctcctcccagtcatttgtcaagcttttgtagaaggcagcatattcttcctttgtgatctcttctggcttcctcatccagatgggcttctgcttgttgatcaatgaccactcgtgagaaacctccttgatcttctttttctttttttctttctcttccttctcctcgtcaacatcctcaacctttccctcctcagcgtctttcttctcttcctcatcttcatcatcagaaatctccttctccgttgtcttttcagtccacagggagatggggtagctgatgaactcagagtgcttcttgaccaaatccttgaggcgacgctcctcaaggtattctaactgatcttctttttctttttttctttctcttccttctc

SEQ ID NO: 23709 - DNA, 1227 bp, Zea mays
  Clone ID: MRT4577_121627C.1
cagccggtaccgcggccagtaccgccagggcctccgccacggccacggcgtctaccgcttctacagcggcgactgctacgcgggcgagtgggccggcggccagagccacggcatcggcgcgcagacctgctccgacgggagctcctacgtcggggagttcaagtgcggcgtcaagcacggcatcgggagctaccatttcagaaacggtgatcggtatgcgggcgagtactttggggacaagatccacgggtttggcgtctaccgcttcgccaatggccactgctacgaaggctcctggcacgaaggcaagaagcagggatttgggatgtacacgttccggaacggcgacaggcgatcgggggactgggattctgggactctcaagacccccttgccccccgctgatccttccgtccagcgtgctgtacaggccgctcagcgtgctgcggagaacgcatttcgcctgcctagagttgatgagcaggtccacaaggcggtcatagccgccaacagggcggccacggccgctcgagtagcggcgatcaaagcagttcagaacaggatggatgggaagttttgcgatacctgtgtgtgaatcgctgcgtgcgagaccatgttctttttgtttctccttctaatctaactgtacattagggtagtgaaggacaataactaatcagagtgaggtcagacgaccggggcagcacaaccgcgtgctccgagtcagggttcatcaacgaacgggagcggacctggcaaaaaaaaaacatttgcgagaaacggctctgatcctgccatatcgccatggccatcggaggttcccttcctccttccttgcaacaagctgtaactgtacatagatccaagtgttgtatcaatggaagagcgagttttttcttcttctttccagtgcccttctcagttttcatttactcctcaattatctctcagtaggggggatgtgtgcagggcactggggccactgcttacagtcacaggagtctgttagctttgcatctgcgtctccattgctccaacctaaatcttgaccgcttccatcccatgtgcagtgattctccgtttgcaaaatgtacttggaggtgcacatggggggaggactgtaaatctccccgcttgtcctgcgtgcaatgcaacccaagtgtctctggtctggtgtagtagggcacacatggcatgaataatttcctgtggcctgttgtgttgtcg

SEQ ID NO: 23710 - DNA, 259 bp, Zea mays
  Clone ID: MRT4577_121628C.1
aaaaaaaaaaaaaaaaaaaaaaaatttttttaaaaaacaacgggcgcaccaaaaagggggggcaaatctaaaatacacaaacattcaaaaggggcggcccttttatagataacaaatttatggatcccttttttccgaccccttacaacgttccgcgtggccccaaccttaattttcctggctggatttttcaacaaaaattactggccaacccttgtcgccccctaaccatttagaacgcccgccaatccccttttaa

SEQ ID NO: 23711 - DNA, 570 bp, Zea mays
  Clone ID: MRT4577_121629C.1
ctcgaggccggcctcgcaactggttctgttcgcgtagctcctcgcggaatagctctgttggggaacaccgtgtgctacgtcctctgcatcaagaacttccctgaccaccggcgattcccgaacaggctggccactagctacgtctgattcatcgacgagctctacaccaccatggtggacaccatccccatgtcagcgaggacaaggtactccaccacaaaggagtacctcctcatcaatgacggcaatgcgatgaccctagagctcgagaaggggccggcgctacagctgtaggaacccaaggatgctcggggaaggaggaccgtgccgccgctcatatgcatgttggtgatcagcctgaacactgaatactgcaccgtcttacccaaataacatgccaaacgcgtcatcctctcggatacagcacggatgaccttgctctgctagatgctcctgctggctctgttcatcagaatgagcgtcagagtaaggtgggacacgccccaaatgcgcaagaatatgtgagaagaccagagtcttgatcacgactcctacggacccgagtacgag

SEQ ID NO: 23712 - DNA, 314 bp, Zea mays
  Clone ID: MRT4577_12162C.1
gggggaaaaaaaaggggcccaaccgccctgggtttggacagtttccccaatggtgtttaaaaacctgcccttgccacctaatggggaccggggttttatttgcgcccaaccccccggttgcattttaaaccgagtacctgtcgaaaaaccaaaagattttggcgtggccccaaacttaaaaagggggggcattttttttttaaaacccccccttttgggggttttcaccccccacttggggcgcgcggggggcccccctcccaagggtcccggcccctttgtgccccgtgggtaaaaacccccctggggaaccc

SEQ ID NO: 23713 - DNA, 358 bp, Zea mays
  Clone ID: MRT4577_121630C.1
gcggcaagcgaagacgcgcaggatgggccgctgccggtgcttgagctaccgcagccggggagagctgctgagctacctggtgctcagggcgtgcggcgacacggccgccacggagaacgtcaagatcaacgtggagcgcactgcgcctgagtccgtgctgtccgaactcgacgtgcagcagctcaccgagatcccgtgcgagaatagcaagttccagaggacctactacagctacgagacgtgctacctgctgaacgtgaaggactatgtgtacgaccgacgcgcacgccaaggagcacgccgagcacggcgcgggataccttgtcggcttccccatcggcatgagcctctcctggga

SEQ ID NO: 23714 - DNA, 239 bp, Zea mays
  unsure (1)..(239): unsure at all n locations
  Clone ID: MRT4577_121631C.1
tcgcgatctaaatgatattctaatgggcgccgccagagaccagcttagtcgcgtgctcgagtctgctcttcttatgtccctaattcattcactggccgtgtttcaacnnnnnctcttgggggggggggggtttttttttttcttctctcnccttcccctcnttctttcctttcctttttttcctttcttttttctttttttcttttttcttcttctcttcttttttttttctttttttt

SEQ ID NO: 23715 - DNA, 316 bp, Zea mays
  unsure (1)..(316): unsure at all n locations
  Clone ID: MRT4577_121632C.1
aaatttttntttttttcccccccccaagggcaaaagggggttttttaagctatgagttcctttaaaaccttccaaaccaaaaaccaaagtccaatttttctcactgatgactatactagtccagtgaaaatggcacttgcacatgtccaaacaagttcagtgcaaacccaacaacaaaaggccaaaaaaaaaaaaaaaaaaaaaatcatgcaagacaaactctctttgtctctctcacctacaagtatcttatctatagctccatccactcggtctcatatttaaaaatttatccccacacaccaagaaagattca

SEQ ID NO: 23716 - DNA, 657 bp, Zea mays
  Clone ID: MRT4577_121633C.1
tttttttttttttttttttttttttttttttttttttttttttttttttttttttttttttttttttttttttttttttttttttttaagacccccgggaagcaaaaagaacaagggaacttttttggggggggggggggggttaaaaaaaagcttggaaccccgggggggattggaaaaaaaaaaaaagccccccccccccccccaaaaaaaaaaaggcttggaaatgggggtggaaaaaaaaaagttccacccctttttaaaaaccccacggccaattaaattttttttaacccaaaaaggcccgggcccaatctaaaaaaattttgcttttctaaagaaacaaccggggggggccccttttagggccccttttcccccaaaaaccgggattgccggaagggcaactggggttggttttccaccaaaaaaaaaaataaccccggcaaaaccctgggaaaaaatttggccattttgggggcccctaacaacggggtaaacaaaggttcttgcccaccggaaaaaaggggcaataaaacccctttcccccggtgggaacggaaattccccaagggggcgggcagatggcccccttgggggaacattgggggagccccccccaggggccgccccgaaaaggcccaaaggccccccagg

SEQ ID NO: 23717 - DNA, 475 bp, Zea mays
  Clone ID: MRT4577_121634C.1
ccttatgtcatctttgccttaaattttaccagggcatccatggtcctagagacaaatcagcctgcccgtacacaacagcacacgagggtaaagaaactaacgatctctcaagttgtcactagtgagcataactccatgcccatgggccatggctcggtctatataacaaaagggtctgcaggggccttacctgacacagtgaaaggtacagatagaaacatgtgtcgctcccaacagattgggttatccagaccccgagcgaaaggttttatagagccattttggcccacaacatccacgctattgacgggactatccgacctgctcctatagggaagacaatgtcaaccaggttctgcacctataacttacatgcccagggatgcacttttcccaaatgcctaagtgcagcaaagagccgcagccctgaaagagggcatagaagacgcatgaactgacgcgcaaaaacaggatc

SEQ ID NO: 23718 - DNA, 328 bp, Zea mays
  Clone ID: MRT4577_121635C.1
agcagtggtaacaacgcagagggctttttttttttttttttttttttttttttgggccgacgttggtcgtagtttgttgtgcgaaaacggtatccattgacgtcatacctagaatatttcttaaccctataagcaaagtcgttggctacttgtctcaactcggcactcatggggggggtgtatggccctgcaagtatttgcaatttaaaagacgctaaattgagttcatagacggatctctttgacaaactaagcacgtaccttatgtttgaaccaggaaatgaccccgcgtgctctgcgttgttaccactggttaagggcgaatttt

SEQ ID NO: 23719 - DNA, 381 bp, Zea mays
  unsure (1)..(381): unsure at all n locations
  Clone ID: MRT4577_121636C.1
ganaaaaacctgaaaggaccatttttttctgaggattaacttacaacaaatccttacaggattaacaccatccatcgatccacattccattctcgttgatccattgctctattcgaccctaggttaaacacacaactatcaactgacccagatccacactttaatcaaaaacacacatgagcatcaacaaactacaacaataaaataacctcctcggactatcctcaaccagacataaaacacaaggatcactttagcctacccaaccgttagcactaacttaactcttattaacaaataacttacatcaacctcaccataaaccctcattcaagcacactataaccaatgagttccacatcttcacaaacacaaaccata

SEQ ID NO: 23720 - DNA, 249 bp, Zea mays
  Clone ID: MRT4577_121637C.1
aacttgcaccgatcgctcgtcagttctttctgatcatcggtcgcctctctagctagctagctacctacctgatcggccatggctgacgagaagaagcaccaccacctgttccaccgccacaaggacggcagcgaggacgaagcgagccccggccgcgaggtggactacgacaagaaggagaagcaccacaagcacctggggcagctcggcgggctcggcgccatcgccgccggtgcatacgccattcac

SEQ ID NO: 23721 - DNA, 384 bp, Zea mays
  Clone ID: MRT4577_121638C.1
agggctcgacacaatcgtaggttccaatacagtctgagatgttcttacaggatgaaaaaaaaaggatgctacaatgttgaaatggttacatattacacaagagatctccggaaccccaggtgatcagcagattgccataatcattggattcgctatcattttgattctgaacagttgataaaatcagcatgttattgtgacagaggcaatacaatttcttgctcatctcgttgatcttgtgatggcaacctaggagttcccaagggtaccttcggttcaggttctagtatcaagggggttgaggatatgatttcctcctttgttgctgttgcaaccttggagcaatgtctatgaaacagcaaatgggccactatacgatcaatt

SEQ ID NO: 23722 - DNA, 496 bp, Zea mays
  Clone ID: MRT4577_121639C.1
gacgggagggtcacggcggcccaaggagacggccgccgccgagacgtggggcgccgccgtcgcgtattgaaatggaggaggatcactcggtgatactaatatctgaaggtgctattaaaagcatcaaacttagcctctctaccggagaagagatatgctttactccataaacgagtgcccagtgacccatcctagccagcttggaaatccattccttgggttgccacttgaagctgggaagtgtgaatcctgtggtgcctctgaaaatgacaaatgcgaaggccattttgggtacattgaactacctgtacccatataccatccatgtcatgtcactgaactgaggcaactattgagcttgatatgtctgaagtgccttcgaatcaagaaagggaaggtgaaacaaagtaatggaaaaggaaacgcggcaccaactttgtgctcttattgcagggatattccagccctgtctttgaaggaaatcaagacaacagat

SEQ ID NO: 23723 - DNA, 597 bp, Zea mays
  Clone ID: MRT4577_12163C.1
atctcttgccctgctctcacaatttatgtcaagcgtgcgcccgcaacatcctggtgcagaccccggagtctgaatccccccagagccgcagggcctcgggctccggggtctccgactatgactatctggacctggacaagatgagcctgtacagcgaggcggacagcggctatggctcctacgggggtttcgccagtgcccccactactccgtgccagaagtcccccaatggcgtccgcgtgttccccccggctatgccgccaccggccacccacctgtcaccggccttggccccggtgccccgcaactcctgtatcacctgcccccagtgccaccgcagcctcatactggatgaccgggggctccgcggcttccccaagaaccgcgtcctggaaggggtaattgaccgctaccagcagagcaaagccgcagccctcaagtgccagctctgcgagaaggcgcccaaggaggccactgtcatgtgcgaacagtgcgatgtcttctactgtgatccgtgccgcctgcgctgccaccctccccgagggcccctagccaaacaccgtctggtgcccccggcccagggccgcgtgagccggc

SEQ ID NO: 23724 - DNA, 114 bp, Zea mays
  Clone ID: MRT4577_121640C.1
cactttatgatataacaaggcttaagaacggcgggacatcacgcgaaaccatcttaaagattctaaatgcttatcaagatagtagtgacaagatatttcatattagaaatcgac

SEQ ID NO: 23725 - DNA, 2011 bp, Zea mays
  Clone ID: MRT4577_121641C.1
attcggctcgagggaggagctgcggcggctcctggagctgctccctagggagctgagtgggcgggtggagacccacccagagctcccggcgctcgtggaggtggtcatggacctcggccggcccccgctcgcgcgcttcccgtccggagacttcctcctctcccaacgccccatctccttcgacgacctccgtcacgctacctcccaggttggggactttggagcggataatcgtgctggaatcagccgcacgctgcaccggatcagcgccattaggaatcggaagggcgtcattgtcggcctcacatgccgtgttgggcgtgcagtgcccgggagcgctaatttgcttcaggatttggttaaggacggtggctcattgctgctcatcggcccacctggggtggggaagactactgtcataagagaaattgcccgtatgttagctgatgactataagaagcgcgtgatgattgtcgacacatctaatgagattggtggggatggtgatattcctcacccaggaataggcaatgcacgtaggttgcaagtgcctaaccaagacatgcagcataaggtactgatagaagctgtggaaaaccatatgcctcaggcgattgttattgatgaaattggaactaaactagaggccatggctgcaagcaccattgcacagaggggcatacagcttgtggcaactgcccatggggtaacgatagagaatctgatcatgaacccatcactagagatgcttgtgggaggaatacagagtgtcacacttggtgatgaagaagctaaccggagaggagttcaaaaaactgttctggagcgcaagggcccatcaacatttacttgtgctgcagagattgtctccaaaaaagaattacgtgtccatcgtagtttggaagccacggtagatgctttactcgcaggtaagctgcctaattttgaaattcgaaagttggattcaaagggatctatgcaggaagtttctgtgcaaaaggaacaatcacatcttggtatttatgatgcaactgaatttggcagtgactctctaaggaatgccagaagaagcttagactctgcatttagtcttgactctgctgaagggcacatagtgaggtcagatggagctgattcaagctttaatctttatgcatatgggatctccgagtcgactgccttgcaagccattcatcagctggagttggacggcagtgttactttaacttataatatcagtgaagctgatgcagtgatcgcgttacattcaaagctcaagaagaactctcagattcaggctgtgctgaaatctcaagatataccggttttcctcgtaaagacaaactccctgcctcaaatcaccagggcactccgtgctcttgtcgacgatcacatggacgaagtgatagactacaatgataaagaagaagcaaggtcatcagaagaaaccgatgctctggaggaggcaaggctggcaatcgagcaagtagtgattccgaaaggcgagagcgtgcagctactgccgaggccatcaagcatcatctcgtcccaagtgggtctcgtcgaaagcttcagcctcaagtgggaggtcgtaggccaggagcctaaggcatgcgtgaggatccttccgcactttgcgccaaaacaagtcgaagctgtcgcgcgagaaaccccagcggagcccgccgactcggactgggagagccacgatgactcggatcatacccagagtggcatcaccaggctacctttcctaccggattagcgcggcgtctggcgtatcctttcagttcttcgtggccctgccgcctgctgtgtatgtattccatttatttatcttggtaataacttgcaccagaaagcacttgcgtggttgcgtctatctacctacgtaatataagtggatagtgctccgatccggcctctacgcgcgcgtacagatatatatacagtatctaatctgttgtcgacccgtacagtcatatcattcatgcatctcttaccatttttt

SEQ ID NO: 23726 - DNA, 1277 bp, Zea mays
  Clone ID: MRT4577_121642C.1
tgatattcctcacccaggaataggcaatgcacgtaggttgcaagtgcctaaccaagacatgcagcataaggtactgatagaagctgtggaaaaccatatgcctcaggcgattgttattgatgaaattggaactaaactagaggccatggctgcaagcaccattgcacagaggggcatacagcttgtggcaactgcccatggggtaacgatagagaatctgatcatgaacccatcactagagatgcttgtgggaggaatacagagtgtcacacttggtgatgaagaagctaaccggagaggagttcaaaaaactgttctggagcgcaagggcccatcaacatttacatgtgctgcagagatcgtctccaaaaaagaattacgtgtccatcgtagtttggaagccacggtagatgctttactcgcagtgactctctaaggaatgccagaagaagcttagactctgcatttagtcttgactctgctgaagggcatatagtgaggtcagatggagctgattcaagctttaatctttatgcatatgggaacttagtttgtacgtaacttattggataggatgttctagatctccgagtcgactgccttgcaagccattcatcagctggagttggacgacagtgttacttcaacttataatatcagtgaagctgatgcagtgatcgcgttacattcaaagctcaagaagaactatcagattcaggctgtgctgaaatctcaagatataccggttttcctcgtaaagacaaactccctgcctcaaatcaccagggcactccgtgctcttgtcgacgatcacatggacgaagtgatagactacaatgataaagaagaagcaaggtcatcagaagaaaccgatgctctggaggaggcaaggctggcaatcgagcaagtagtgattccgaaaggcgagagcgtgcagctactgccaaggccatcaagcatcatctcgtcccaagtgggtctcgtcgaaagcttcagcctcaagtgggaggtcgtaggccaggagcctaaggcatgcgtgaggatccttccgcactttgcgccaaaacaagtcgaagctgtcgcgcgagaaaccccagcggagcccgccgactcggactgggagagccacgatgactcggatcatacccagagtggcatcaccaggctacctttcctaccggattagcgcggcgtctggcgtatcctttcagttcttcgtggccctgccgcctgctgtgtatgtattccatttatttatcttggtaataacttgcacc

SEQ ID NO: 23727 - DNA, 614 bp, Zea mays
  Clone ID: MRT4577_121643C.1
aatacccttagccccaattcatcgtcatggcctccgcctctgtttccctctcctccctcgcttcctccgccgccgccgccgccgcgatctcctcctcccccggctgtcctccttccaaaccctttcacgatccaaaacctcttcacctttccgtcagactattcccccgtttcgccaaacctcagccgctctcctgctctgggccgcacgcccctcacgccgccaccggcgacggatcgggtgccgggaaccgtggggacgactcgggaggaaacggaggaaaagatggaggtggaaacgatggcgacggcggcgacgacgactacgaggaggccgagttcgggccgctgctcggcttcagcgaggtggcgcgcctcgcggccgcccgcggcgtcaagctcccggccgacatgattgaagcggccagggacgccggcatccgggaagtgattttgctccgatacttcgatttgcaggccgcaccgtggccactcgccgcgatgatccgggccttctcagtgctccgcaacagaatgctcgccgatccgtcgtttctcttcaaagttggcatcgaggttgtgatcgactcctgctgtgcaacacttgcggaggtg

SEQ ID NO: 23728 - DNA, 1291 bp, Zea mays
  Clone ID: MRT4577_121644C.1
cctcgaggccggcccccgctcgcgcgcttcccgtccggagacttcgtcctctcccaacgccccatctccttcgacgacctccgtcacgctacctcccaggttggggactttggagcggataatcgtgctggaatcagccgcacgctgcaccggatcagcgccattaggaatcggaagggcgtcattgtcggcctcacatgccgtgttgggcgtgcagtgcccgggagcgctaatttgcttcaggatttggttaaggacggtggctcattgctgctcatcggcccacctggggtggggaagactactgtcataagagaaattgcccgtatgttagctgatgactataagaagcgcgtgatgattgtcgacacatctaatgagattggtggggatggtgatattcctcacccaggaataggcaatgcacgtaggttgcaagtgcctaaccaagacatgcagcataaggtcttttacggttttacctgtacatggaataagctgtttggtcctatatgtggagtatgaataaaactgttgggctatacattggcattcttcttagctgtgctttcacttgagtactgatagaagctgtggaaaaccatatgcctcaggcgattgttattgatgaaattggaactaaactagaggccatggctgcaagcaccattgcacagaggggcatacagcttgtggcactttgcccatcgcgtaacgatagagaatctgatcatgaacccatcactagagatgcttgtgggaggaatacagagtgtcacacttggtgatgaagaagctaaccggagaggagttcaaaaactgttctggagcgcaagggcccatcaacatttacttgtgctgcagagattgtctccaaaaaagaattacgtgtccatcgtagtttggaagccacggtagatgctttactcgcaggtaagctgcctaattttgaaattcgaaagttggattcaaagggatctatgcaggaagtttctgtgcaaaaggaacaatcacatcttggtatttatgatgcaactgaatttggcagtgactctctaaggaatgccagaagaagcttagactctgcatttagtcttgactctgctgaagggcacatagtgaggtcagatggagctgattcaagctttaatctttatgcatatggggtacggatgtcttcaatagctcattcttttgatgccctagttttctgagcagtgcgccccttttacatcagtatgtagtttctctgcacaatggtttcatatagagtgtggcaaagtgatatcca

SEQ ID NO: 23729 - DNA, 276 bp, Zea mays
  Clone ID: MRT4577_121645C.1
cggggctaaaatgttaaaggctgtcgtataaacataatggaaagggaagccttggctaggaccctatcatatggttcatttacaaaccctgggaaaacttacgggggcctaactaaaaaaacccccctaacatttttgaactttccctgcgccaactattggtgcttacaggtttagtccaagttttgggataaaccccccaattttagacaattccaaagttcaactctggaagaagttttttttatgttatacccctccctagtccagggaatc

SEQ ID NO: 23730 - DNA, 934 bp, Zea mays
  Clone ID: MRT4577_121646C.1
ccaataagcgacattaattaaaacctacgccgttttttttattttatatttgaagaaattattaaattagttatagcttttggccttggacatcacccgatatgcattgccatctaatattaactttcatattgtaaccgaaaatttaacaatcctgataagggaccctctatgctatcatttagggctttcactgccaaaattcccctaggctacagattagattgaaaccatgacaagacatgatcagtatgtactaccaagtatcgaaatgggcatcaaagggtaaagaagtgcagacaactaaaagaattctagtggtgttttttctccaagcttgcaactgcctgtttctggcgcttctcccacgccggaatcttccccgggaacacccatcgcaggagccgctcccatccgtagcaaccacaaaacattagaatagcccacaacatcaatttgccacgcattccctctggcaaaggttcaagtttcatgtagtcattcaaacccctgaacatatctgatgtgatcactgtgaagaaagcaaccgctccatacaatgcatacttgaagggcttgttctcggatatgctctgattaaatgggtggcccatgtagtttacagcaaaggttgccacctggatcatcatgttcaccatgtacgaaaccgtattcacaaggtttggatggaagtctgagtcaggctcaatgcattcctctggcatatgctttgatgcttcattgacagccgtgataaggaagaatatgtgcatggcgaactggccaagaatcgagagcagaacgtatgcacagaatatgttaggctgaggccgctctgcagacagcgtttatgttagggtgcggccgctctgcagacagcgtttggagtggccgggcatgggagatgaagaggaagaaggctgcagtaaagacc

SEQ ID NO: 23731 - DNA, 573 bp, Zea mays
  Clone ID: MRT4577_121647C.1
atctctagcaagcatatctctctgccgatctatctagcgagagagagagaggaaagctagctacctcagcatgaactgcggcccgccgaacgatgcaagatgtgtgtgggcgctgctgcttctccagctgccgctacactcctactacggtcacggccctcctcctgacaggaggatgacctccaccgtggctgcctctgcacatcatcgcgatgcagcttggccatcccctgacagggatcctctgcgccgaaacctgtgacttcctaccagtgctatacgagcagccatgcggtgcctgtgcgtcggccaaatctgcatgatgcgatatctgcactagcgctatttgtaatttgtcgttgagacaaacaccatgacgatagcggtggagtcgctattgctgcggtgctgatctaataagaatgcctttagaccgtacctgggggatgcgtagcctacaaacttacttgaatacgcccctacagccctcaagctccagcgttctgttcacatcatcgaggaattgatgctctgatgatggaatcttcgtgatagatggatactgagattaat

SEQ ID NO: 23732 - DNA, 179 bp, Zea mays
  Clone ID: MRT4577_121648C.1
gggccgacccacgcgaacgacaagaacaatcgcagcaaggcttccataaggtcaagcgaggcagaaaagggcggctgtgagggaggattcttgggatggcacgaggaatggggcgacaggctgagggagcaaaccgtgggaagcaagggtgcgcacgtggataacacacaggggggggg

SEQ ID NO: 23733 - DNA, 334 bp, Zea mays
  Clone ID: MRT4577_121649C.1
tctaattttttccaccatcatgtggatctatacactaagccacccggacgccgccgccgccggcgccgggagcggaaaataccttttaccgggtggcccggcagggcagaacggacattattctcaaggtacgggtccctgttcacgccgccgtgtcagccgtaaatgaaggtgttcacgcggaggatagggttttgcaggtgactcaagtctcccgcgagctgaggttacaatggggagacaagggaaagggtaagctggtccacgcggttttcccccgatccaacatacaaatgcggtggctgggaggagcaaatgatagacataccatcat

SEQ ID NO: 23734 - DNA, 533 bp, Zea mays
  Clone ID: MRT4577_12164C.1
acttcagagaaagaaccagaaccagagccggttaaaaaagtcgtgcctagagtcgagcaaatagatttgctggggatggatgagccgatccctgacacgtccgagctagatcaaaacaatgctttggccttggcaattgttgaaccagataatgcgcctaaagctgctgctagttccgaaaacgtcgccactagctgggagctggctctggtcacagcacccagtgcaagtgaaaatgttgctacttcaagaaacttggccggtggactggacctgctcaccctcgacagcctctacgatgacgcgcaccggcacacgcagcagaacgcgagctacaacccctgggagcagccgaccccggcttcatcggctccgatggctccgatgatgcagcagcagtatcagcagcagccgatgcacaacccgttgtacgcctcggcgcagcagcagcaggccttcatgctccagcagcagcaggccttcgtgctccagcagcagcaccagtaccagcagcagcaccagccgatgatgat

SEQ ID NO: 23735 - DNA, 165 bp, Zea mays
  Clone ID: MRT4577_121650C.1
gccaaatctactcgttaaccccatccgggccagggctaataggaatgcattttttgctcgccaacgcgttttagagcatagagttgcggtggcaagatcagcgcgacaccttggaactgactccctgggggtcgggggtggagaagcagatgtctgcagctgacc

SEQ ID NO: 23736 - DNA, 681 bp, Zea mays
  unsure (1)..(681): unsure at all n locations
  Clone ID: MRT4577_121651C.1
ggccgcgtctggtgcatcgagggcaacgccgtcatggagtggatgggcacccnccgcggctggcgcgaggtcggcccgtacccgccgggcctcaaggccggcaccgcgcgcgccgtttgcgtcggcggcggggagaaggttgtggtcaccggcgcgctcgacggcgagggcggccgccacgcgctttgggtgttcgacgtcaagaccaagagctggaccgtggtccgcccgccgccggagttcgccggattcgttttttccgtcgcgtccgtccggatttgaggatctccatttttttcgacccgcccgcggctgcttgtagtactagtacgtacgtgccctgttttcgtcgttgctggatccgatgaagactcaccccctccaagatctacgtttgcaatggatggatctgcgcatccgctgacttactagtccgccttgccaacaatgagagatacatggaggagcgggagccatgggcggttgtaaaatctgaaaaaaaagtggtgagagtgtgaatttggatctggtggtgagagtgaatttggacgagtgtggtgtttttgtcccgaggtgaaggacacagactgttgtttgttgctcttgtccaaaaaaaaaaaaaaaaaaaaaaaaaaaaaaaaaaactcgtaaaaaaggggcgagggtggggcccggttcccc

SEQ ID NO: 23737 - DNA, 963 bp, Zea mays
  Clone ID: MRT4577_121652C.1
ggaatctgcgcagaacattatcccgtgacaatctagacctatcatctccttccagtcgagagaactttatcatcaaacattttaaaggaaatggcgatgccttccgtggccttcggttgaaaaagaagctgcgagattttaacaagtatgccaaggtaagacctttgaagtgtggatggattgtctattacaacgaccccacgtcgtcccccataggcagagccaaggcgacgaggttggtacctcccccctcccgctccccagcctcaccgtcgccagagcgtcctgccgagaggctcacatgggcatgaggatggcggcaacggggagctgctctgctcttccctctcgcacacatgcaccccctccacggccctcatcctatctcgactgtggcttcgccagcacattgaggttcgacggatctaggccccatcggcttagatcttgccctccctcgccggatctacaccatggaggtggtggtccttctggggaggagagctgaaacctgcttgggcgttaggaggctacatggatagagagatgatgtaggtaatttagccttttcgccccaattatgctccagtatttgctgatgtaccaccaaatgtttttgaggagcatgcctcaccatcacctgagcagatattgcaacgcgggctggtgaaataggggaactaggcaattgtttagattctggtaaaatggaatgagctaccagcagaaatggcttcctgggaagactaccatgttctcaaggctaaatttcctacatcaccgatctggagaccaggcggttcttcagcggggtattgtcactacggtgactacggatagtcagatggctaaagagtaacggatttgatgcttgaaggttcaatgtctggcttgctgtgttgggccgtgtggccttgaatctggtgtgtgtgctagcccattgtagaggcatatatagggcaa

SEQ ID NO: 23738 - DNA, 370 bp, Zea mays
  Clone ID: MRT4577_121653C.1
gctggaccgaggtccgcccgccgccggagttggccggattcgtcttctccgtcgcgtccgtccggatctgaggatctccattttcttcgacccgcccgcggctgcttgtagtactagtacgtacgtgcactgttttcgtcgttgctggatccgaggaagactcgccccatccaagatctacgtttgcaatggatggatctgcgcatccgctgacttactagtgcgccttgccttcgattcgtccaaggatggtaatcgacgccaacaatgagagatacatggaggagcgggagccatgggcggttgtaaaatctgaaaaaaaagtggggagagtgtgaatttggatctggtggtgagtgaatttggacga

SEQ ID NO: 23739 - DNA, 721 bp, Zea mays
  Clone ID: MRT4577_121654C.1
gcacgagggtgcggcgacaaggtcgtgagctccggcgctctcgccgccgcggccggccgctacgcgctctgggtgttcgacgtcaagaccaagagctggaccgtggtccgcccgccgccggagtttgccggattcgtcttctccgtcgcgtccgtccggatctgaggatctccattttctactagtacgtacgtgcaccgttttcgtcgttgctggatccgatgaagactcatcccctccaagatctacgtttgcaatggatggatctgcgcatccgctgacttactagtccgccttgccttcgattcgtccaaggatggtgacgatggtgatcgacgccaacaatgagagatatacatggaggagcgggagccatgggcggttgtaaaatctgaaaaaaaagtggtgagagtgtgaatttggatctggtggtgagtgaatttggatgagtgtggtgtttttgtcccgaggtgaaggacacagactgttgtttgttgctcttgccctacagccatgcttttgctatcgctagcctactagtaataaaaaccactgtacatacaagaaaaaaaaaaaaaagtgatcctaagcttgaggaattgcgccggatctcatgtcaatggcagcgttgaacagctgccgtgcgccccatctcgaaaaaaaaaaaaaaaaaaaaaaaaaaaaaaaaaagggcggcccggacgcgtgggcggacgcgtgg

SEQ ID NO: 23740 - DNA, 282 bp, Zea mays
  Clone ID: MRT4577_121655C.1
atctgaaccattttacttctacggcttcaactgactcggaccattctgtttggattgagtctctcgaggattctgttgctgatgccagaagcaataaggaacgtgctgcccatgccgtcgtcctgatgctgttgctcggatttgaccgcagacgcctccaagtccaaggtgacactgtacagtacggctgtagtgtcaagggtgctgttctcagctcctttgataatgatctgttaccttctatagaattggttacaaaaatgatagaggatgttgagcttc

SEQ ID NO: 23741 - DNA, 495 bp, Zea mays
  Clone ID: MRT4577_121656C.1
ccggccgggcaagcgtccgagctggaccgtggtccgcccgccgctggagtttgccggattcgtcttctccgtcgcgtccgtccggatctgaggatctccattttctactagtacgtacgtgcaccgttttcgtcgttgctggatccgatgaagactcatcccctccaagatctacgtttgcaatggatggatctgcgcatccgctgacttactagtccgccttgccaacaatgagagatacatggaggagcgggagccatgggcggttgtaaaatctgaaaaaaaagtggtgagtgtgaatttggatctggtggtgagtgtgaatttggatgagtgtggtgtttttgtcccgaggtgaaggacacagactgttgtttgttgctcttgtcctacagccatgcttttgctatcgctagccaactgcttactagtaataaaaaccactgtacatacatacatacaaaaaaaaaaaaaaaaaacccgcggcctgcgtgt

SEQ ID NO: 23742 - DNA, 387 bp, Zea mays
  Clone ID: MRT4577_121657C.1
atgaagcaggccgtaccaagcttttgggagacacaacttcaggcctttcctgggaaacaaaaccgaaccaaatttgtcgttcgcgcgcaatgcaacagatgttgaaccaaaaaagggcgttctgaaccaaccaccggcacccattgaggtctacgattttattgaacccgttcactatttaccccccccaaagggagactgaaattgccccacagtacgcgcggggatcattttgctattgctcctgaaagaggcaatgatctttattttaccaggccgattgatgttcttattttcaaaggccgcgatggcaaaacccaagataggtcccacccttaaaggccacccgtcccaacaggcctggtcctagttggataacaggggggc

SEQ ID NO: 23743 - DNA, 635 bp, Zea mays
  Clone ID: MRT4577_121658C.1
cgtcagtgcgttattgtatctcctgacgccggcggagctaaacgtgttacctcgattgcagatcgcttaaacgttgattttgcgttgattcacaaagagcgtaaaaaggccaatgaagttgcttcaatggttttagtaggtgatgttaaagacagaactgccattttagtagatgatatggctgacacttgtggaacaattgtacatgcagtcacaaaattaaaagaatcaggagcttcaaaagtgtatgctattttaacacatggaatcttttccggaccagctattcctcgtgttaattcggcttgttttgaagctcttgttgttacaaacaccattccacaagaaagcaacatgcttcaatgtccaaaaatacagtgtattgacgttagtatgattttggccgaagcaatccggcgaacgcacaatggcgaatctgtttcgtacttattttctcatgtgcccatgtaaatttaattttttatttataatcgccgtcaacaaatttattaattgatttttgattacatatctattaatcaacatttttattaattaaatcattaaacaaaaataaattgttacaatttgtaccttttttatttaaataaaaaaatattaaggcttttactgtt

SEQ ID NO: 23744 - DNA, 263 bp, Zea mays
  Clone ID: MRT4577_121659C.1
attctaaccacatttgatatgtttttttaaaagggaattgccgttcgtaataaaaccacctttatacttttaccatcacattatttttaaatccttactctactttaaatttgcatgcaggcccctgtataaaataaaggtggcggcataggtatagggcacacctatacgggtcatttgtgcacggccataaaaagctgcagatcttctcaccatatggtttccaagacctgtgccctccaatgcagtgcgcgattattatt

SEQ ID NO: 23745 - DNA, 847 bp, Zea mays
  Clone ID: MRT4577_12165C.1
taagcagcccggatggcaaggagaagaagggtttgctgggcaagatcatggacaagatagccggctccgcggacgcgtggggtgaggaagcagaccacaaggcggacgccgccggcgagcacaggaccagctcctctaattaaggtcgcagtcgcagcgtgtcctggccgtgggcggcgattagaagctagctagcgttggcatgtgtgttgggttctggtttgcttttaccaaaagtttgtttcaaggtggatcgcctggtcaaggtccgtgtgctctattaaggtggatcgcgtgactctggcagtgagtgttgctgcttgtgtaggacgtggtacgtacgggctttattttggtcccaagtcaaaagtcacggtcggtctggatgttgtgtacttgggtttgttgaattatgagcagctgcgtgttgtaattcggctgggctacctggatgcgttaataattgctttggtttctgcccagcgcgcgagcgtgttagcgtgtatatatatatgcagcttatcatttggatgtggccggtccttgggcgatcagaaggtagctagcgttggcatgtgggttcggttctggtttgcttttaccaaaagtttgtttcaaggtggatcgcctggtcaaggtccgtgtgctctattaaggtggatcgcgtgactctggcagtgagtgttgctgcttgtgtaggacgtggtacgtacgggctttattttggttccaagtcaaaagtcacggtcggtctggatgttgtgtacttgggtttgttgaattatgagcagttgcgtgttgtaattcggcggggctacctgtaagcgttcatacctgctttggtttc

SEQ ID NO: 23746 - DNA, 404 bp, Zea mays
  Clone ID: MRT4577_121660C.1
atctaaaaacgccccttaactttgccctaccttaaaaagggctccccccacctcatctgaattaccgttttggggaacttgcttttgcccttctgctaaagattgcccaaaaattgaaacctttagccaatttaaacccccgaacctaccctacccttatgattcgaaaacctaattttgctggaaaacccaatggggaaaccgccgtttatttacaggggcctcaaactgcccccggacctttatggggggtttaaatgcaggtggtggaaaaaaacacgggggcaaattaccgggtttggggggccccacttgaccttggggctgggttgcccaatattttcccaaaaccccgggggtgtttaaatttacccaaccttttgccactgggccggttttttggg

SEQ ID NO: 23747 - DNA, 400 bp, Zea mays
  Clone ID: MRT4577_121661C.1
gttgagcggggaaaaaaggcgacgggccggattcgctttaacaagtacattacatacacgatttctcctttggtctacaaagtttggcatggtatacatacacctttgcaagatgcatggcgggggtcgggcacctagcagttagacccttaaatcactggagctgagggtaccaaaccccttgggtcttgacatccttgggcaccttggccccaaagtcggtggaagacggttgtacacttttcaagacgccggtgacctcggcggttttcgggttgatcttggggaccctaaacgggataatcccggcggaggaagaggcttttttgaaggtgttcttggggagccaccccttgaaacctttgccccctgcggagagtgccacggggttgatacaccc

SEQ ID NO: 23748 - DNA, 572 bp, Zea mays
  Clone ID: MRT4577_121662C.1
atacaaccgtgatgagattgctggaagattttgattgatggcttattacaaaaaggaaacactgctgactgctcccgtctgctatcattcatggaggaacagaattgccgtcctggttctgcaatatattctaggcttacaggcgaaataacagttacaagtgaagctcaggaaattgctacatgaatacggacaaaccaaccaaccttagtgttggtgttgatggttccatgaatcagtacaagatgggcaaattgaaagctaaaaagactttggctgtttgacattagcagtgcccctgtaattgtgaggaaggatgtggcaacacaaataatccctgatataagcaggtcctcttctcccagcatgagatcattttcctgtttcactgtcggtgcaacaaatcaaatagctggagggttgttgctctaatcttgagattagggatgcacaggtggatgatcgggtgattctgactaggtggtccaaggcttgaggctctgcaaaaaggcaacatatattctagaatggaagaaaaaaactatggaatctaaatcttctgcctgggaagt

SEQ ID NO: 23749 - DNA, 410 bp, Zea mays
  Clone ID: MRT4577_121663C.1
ccccgccttctcaaattctacagtttccagccacccgagaagcatcaggacctcgtccgctgtgtcttccaattactctctgcaaggcctgagagcgtgagcaattttgtcaagtgtttgttgaaacattggacatgtgcttcaagaatgtatgcgagcttgacatcgtatttaacttcaacaagctgcacacgattttggatgagatgatatcggggggacaggtgatcgaaacaagttcagaacagataatgaaatctggggaagagattgaaaggcttgagaaacaatcgagcacaaccagctttatacccaagtcgattacagaacggtttacaccgtgagctttcactcgttttcagaacaatgtgacatttaaggggtgaacagaactgagacatactattcag

SEQ ID NO: 23750 - DNA, 304 bp, Zea mays
  unsure (1)..(304): unsure at all n locations
  Clone ID: MRT4577_121664C.1
cagaaaaaactcttagttcataaaatagtatttttcttctcttgttcatgcttcactctggtccatgttgtgatgaagttccagttcttgttgattgatacatctaatattacctctaaaaacagttgattttttcaccattaggaaaaacaatctttgttttcccgacactcctttccagtttatctgataatcgagtctttcatgatctgtaacatggttcttaaataataacattaataagatacgcagctctcgtgtgtgttcgcgaaaanagacattaataagatatggttgaagctga

SEQ ID NO: 23751 - DNA, 1495 bp, Zea mays
  Clone ID: MRT4577_121665C.1
cccccgcctccgccctcgcgtcggaccacgccgcaccataggcacccccgaactcggcacgaccggcactccactagccccacgcgatctgcctgtcccacgaggcgaatcagtagcttcgctccggcctccgggggctccgcggctccgctagtccgctccggcgccacggcccggctcggaggggcgtttcggggagggcgaagcggacgccagcgtttccgtttggttggcgtggaggcgaagctgctgctggagcgctacccgggtttcctccgttcactagcgctcgcgatctgatgatcgttggctagttgctctgccagagtcccagccagcgctcctccgccatgatccaggcggtgatggtgatcagcacccaggccaagccccgccttctcaagttctacagtttccagccacccgagaagcatcaggacctcgtccgctgtgtcttccaattactctctgcaaggcccgagagcgcgagcaattttgtcaaggtggactccatctttggcccgggaacaaaaatggtctacaagcatttggccacactatactttgtttttgtctttgatagctctgagaacgagcttgccatgctcgacctcgtacaagtgtttgttgaaacattggacagatgcttcaagaatgtatgcgagcttgacatcgtatttaacttcaacaagctgcacaccattttggatgagatgatatcggggggacaggtgatcgaaacaagttcagaacagataatgaaatctgtggaagagattgaaaggctggagaaacaatcgagcacaaccagcttcatacccaagtcgattacagagcgttttacccgttgagcttccactcgtttccagaacaatgtgacatttaaggtgtgaacagaactgagatatactattcagtctcattttagttctccgataagaccttgtatgcccccgccccccggctgtattctgtaagcctgtaacctggatatgaatgcggcatctgcagtccaataatactgcctgcgttatatgctaaaaaaaaaaaaaaaaaaaaataaagtaaagacaagccacaataacaaattagcaatattcttatcctgagaattagtgtatccatggtgtcaaaaaaaagaaaaaaaaaaaaaaaagtaccatatgtccatatgatcctactttttttatccttttatactagaatagtgtgcctatcgaggatgcatggtttctatcctgctgaaaattccatttatgattcttcaggtgcatgttttatgcagcagaaaaggtgggacacagaagctgcatcaccatttttgacagcagttgggttatctgtatcaaattacgcctttttatgcacatgtcatatgcagtgctgtgcatatctgaaagtttgagtataacaaatgcctgaatccaagaatccctgttatgcagaatagctataccattatctatccatctaattaattatcgtgggtgtaata

SEQ ID NO: 23752 - DNA, 121 bp, Zea mays
  unsure (1)..(121): unsure at all n locations
  Clone ID: MRT4577_121666C.1
ntccgaggtcctatcctactacccttcgcccttttcgacgcgtgtcctactgtgcgtcctagcagggcagacgagatctgagaagctccaagggcagcatgctgccggttcgcgtagctac

SEQ ID NO: 23753 - DNA, 411 bp, Zea mays
  unsure (1)..(411): unsure at all n locations
  Clone ID: MRT4577_121667C.1
ccggnaaaaaataatggccacaaagaccatttttttctcaagttcctgggtttgttcccgaccacattcaccctggggagtttttttcctggggtgggtgatgcccaagcccaaagaccttttttttctaaagttactcgggggggctaaccttttccgatggttgaaaattttgcgcccgccatttttggtggggaaaggttccaacatccagcccttttggaacccgatcgggggcggatcaagggccttttggggggggcaaattctgggactggattgggggggtaattgttttttggttgggaaccggttccccttgggacccttagagggaaccgaacccggggcccccctttttgggggcaatttggcccccttggggaccccggggggggatggaaatggggg

SEQ ID NO: 23754 - DNA, 417 bp, Zea mays
  Clone ID: MRT4577_121668C.1
ccgtcgcttaaccgtctccatgagagcgactctcatatttgcatgttaagctgatcaggggtcacctttgatttgcctaaaaaatgacatggcttactccgttcgcgtgatcaatctgtgatgcttccactttgagaactttcgactgaggacatgcatcacgaactttgcatcttgctaatatgttctatttcaccaatgtctacgcctcatcctacaggctctgtatataagtcctttgtccaaagctcggtgctcatagctagatgtggacatcatactatcattgtccatgggactttcaacaacactgtgcttatttcattgcacacagtgatatctgcatttgctgacagctggaacccttacatcatcgtggcacgtaaaattctattggaatcatgcctattatagttc

SEQ ID NO: 23755 - DNA, 403 bp, Zea mays
  Clone ID: MRT4577_121669C.1
aaaatgaatttgggttaatctggggccatttgggttggccttcccctggccaattaccccagcttgggttccaaaaggaaacctggacccttcttttttttaaggcccggtggaactttttttttaacaaaccttttccggtgggacccaattgcagaaataaatcccttggtttgggtatgcttcccaaacccggttgttcctgtgaacccctttttctttgggactttttctgtggatgaactccctcccatgccttttttattaaaatcgcgctcaccacgtagtgccgcaatggtgcacacaaaatgaaagacgttttttgtgcagcctggtgcacacaaaaccccacacgtcttttgtgcagcctttattttccaaaaatctgtcgtttttgggtgtt

SEQ ID NO: 23756 - DNA, 484 bp, Zea mays
  unsure (1)..(484): unsure at all n locations
  Clone ID: MRT4577_12166C.1
tggcttggaacctttgggctgatttatgtgcttgagagtgcctttttgtggtcttcttatggtaagagtctgtgcgtgcatggtcttactcgggagcttattgctaggaatgctaagcctgcgctggataagatggcgaagttggcgcataccactatttttattgaggttgtgtatacttaggttattgcggtgcgtgggtgtaagtatgggtcgtgggcttgtgcgtggagtggtgggtatgatcatgagggttcgctgcattggcttgttaagttggagatgcctgttgcggcggattcgcttacgacgtggtaggcgtgtactgatggtaaggttgttatggtgcgggcggatcttggtgtgtagtctggtgagtctcatcatgttgcggtgaagacgatttttagttctgggcctttggtgggtgcgcgtgttatgactggtgctgggggttatcctagtgggggtggtcctngtacgt

SEQ ID NO: 23757 - DNA, 267 bp, Zea mays
  Clone ID: MRT4577_121670C.1
caaacgcgcaggcgcagcagctgcgttcacgtgtccctccagccccgtagcgtagcgccatccagctccgagctgttgctacaagaagccgccacaacaaccgctccgaacggttcaccgtccgggcggcgctcccatagtcccatggaagaagcgacctaacttttctcggattctaactcgaatcttcaggctgctggtggtgcgaggttctttgagagcaagaccttgaaagggatgcactggagccgtggcctatcccagccc

SEQ ID NO: 23758 - DNA, 299 bp, Zea mays
  Clone ID: MRT4577_121671C.1
ccaccctgcacctggtgctcggtcttagacgtgggatgcagatacccgtgaagaccctgactggtatgaccatcactctcgaagtggagccgagtgacaccattgagaatgtcaaggcaaagatccaagacaaggaaggcatccctcctgaccagcagaggttgatctttgctgggaaacagctggaagatggacgcaccctgtctgactacaacatccagaaagagtccaccctgcacctggtgctccgtcttagaggtgggatgcagatcttcgtgaagacctgactggtaagacca

SEQ ID NO: 23759 - DNA, 396 bp, Zea mays
  Clone ID: MRT4577_121672C.1
tcactcgttaaatgtgtacatggcgaaactccccgagcgggcctacaggcacgaggaaatggtttattttatggagaacgtaacgaagactgacgactcgcacgagctcactgtggaggaacactaccttctgagtgctgcatacaagaacgtcattgccgtccgcagtgcgttatagcacatgatctccttcatcgagcagcacgatcagggtcaaggcgctgaggacactcgtcacactcttaagggccaatacctggatcgactgaaactgagctcaccaagatctgtgatggcgagatgaagcttgtctaatgtgagcttgtgccgtcttacatcgttcccgagatcaaggccttatatctcaagatgaaaggtgactactacagatacact

SEQ ID NO: 23760 - DNA, 837 bp, Zea mays
  unsure (1)..(837): unsure at all n locations
  Clone ID: MRT4577_121673C.1
aagtcagatcgcagtgctgaaacttggaatgatatgccacatcattcaattgtttctacacaagtaaatcaacaacctgaagtgcgtgatgaatatgttcttccaatgaaaagggaccatttgtatcttgaacgggaaccgctggtagaacataacattcatcgctcaggtgtgtcattatatgggcgagatcctgccttgtcagcattacgaccttctggaatgcacggtgctggccctctacttacacagataacacaaaccatgcaaatcccacttacctatgcagaagatatcataggagtcaaaggagcaaacattgcatacatacgggctaacagtggtgctgttgtcacaattcaagagagtttgggaagccctgatgatataactgttgaaataaaggggacatcgtcccaggtacaatctgctcaacagcttatccaggactccctggctacgcacagagaacctgtgaggagcagttacccaggaggattagatccgttatataggtccagctacccgtatggcagctcggcctacccgtcatcatcgctgccatcttattctaacatggacgggagtggatattcatcgtcaggtcttggtggttacggttccacttaccgctactaagatggttgctgtttgccatcaagcttgcggccaccctgtctccactcctgngtcatcgttgtgtatgtcagcaatagttgctctgctggcttctgttcctcagggtggtactattatagtcgtatcgaaatcgggtgtgatttagtgtctactttgattgtagatggtcttatttcgaggaagtctggtctagtctta

SEQ ID NO: 23761 - DNA, 391 bp, Zea mays
  Clone ID: MRT4577_121674C.1
aagctcggaattcggctcgagggcaagccgaggacctttggtttgctcaggggccattgtgcctaaccgtggggtctgtgcacatgacgtgggctgcactgcggcttgctattaactactggaatattgccaaaaaatcaaagaacgggattatcttacccaacctggggctaccatgcggtttttgcttatcacacacaaactgtgttagacattgaaactatgggcccatcatacatagatcgctcctatggtgcaaccagatcaaaagacaattggtaaagactcactaaactatatccgatgccctcaggagatagttaaagatggacccaacaatcttgtggatgttcgtgatgtcgctggtgccctcctgctgggtaactaaaat

SEQ ID NO: 23762 - DNA, 628 bp, Zea mays
  unsure (1)..(628): unsure at all n locations
  Clone ID: MRT4577_121675C.1
ggcggtataattttttttttttttttttgaaaagagtagaaaaaggtcctggatatcaaaccacccagtctagacaaaacaatgaagcacccataaccaaatacccaagaccagagtgataccagctaggctaattggaaaagcacttgcgcatggccacgtaccggtggcacttgccaacggaaaagctttgctgcatgcacaccatagcngcatttggccggtaggagtagaaggagacctcaaactgaagacactgggacgagcaaagactctcttgcttctgcgcgctagtttgctgcttttacttcttcttctactacctctgttgcgtaacgttttgcatggtgaagggatacgtggccatggatactctcattagggcatatatggctaccacctctgctgagaccaggatggagcaaacaagtatagcacagctccctgatgacactgcatccatactattctggctttatcaagaacaggcacgactaaacctgctggcgggcccaaccttgatggctgggtgacaacgaacacggtaaggtgtgggggggatacttgcatatcaccctcgtgcactagacgaccatgatgccgctatggcgaatcttgtcactgagcc

SEQ ID NO: 23763 - DNA, 142 bp, Zea mays
  Clone ID: MRT4577_121676C.1
tctaaaacacctgccttaggtgtgactgggtgatacaatccctcgtaccccactgtaccacttggtgtgtgaggggccgggcctttatctgttttatttcagtctccctcaaaggtgtcctgagtgaagacttggtgaagct

SEQ ID NO: 23764 - DNA, 244 bp, Zea mays
  Clone ID: MRT4577_121677C.1
gatgaataagtaattgtaaccttacaataacgaagatggcgaagttcaaataaaattacaaacataagatctggttgatcatatgtactagcattcatctacatcagaaaatgtccacaagctcataacttcattaccaatgaccaccaccaatgccaccgccaccaccgaacccgccgccgccgccgaagccagcaccacctcctgcaccaccaccaaaccctcctcctacaccacctccact

SEQ ID NO: 23765 - DNA, 517 bp, Zea mays
  Clone ID: MRT4577_121678C.1
cccacgcgtccgcccacgcgtccgcccacgcgtccgcccacgcgtccgaagagatccagcaccattgcatcgggcagctaggattttgatcaacttacagtcagagaacggagaatttccacagcaagagatcattggagtcttcaaccaaaattgtatgatcggttactcccaatacagaaacatcttccctatatgggctctaggagagtatcgtaccaaggtccatgttccaaggaagaaatagccaatatgcttatgatatattcaacgtgtggtgctaaaaatgccatgcatgtactacacatcttctgcactctcgttatctagctagtaccttaatttttttataatcgttgatctatcctttttgcattttctacaataaactcaacggttagtcaagaatagtatgttgtaaatcgttgatccaactcttttttcctctacaaaaagatacacaaaaactagtaccatgtacctgtaatattgcaataagatatgatttaatgtgctc

SEQ ID NO: 23766 - DNA, 186 bp, Zea mays
  Clone ID: MRT4577_121679C.1
cccgttgacaggccacactgtgccggacgcgtcaagattcttgaggcccaccccccacgaaaggcctttggcgaaagatgttgatattgataaaacccgctagaacgaccctctcctttcactcgggtgctgacctccaaaacctcatgaatgagcgctgccctcctctgctcgctcgcccgtcga

SEQ ID NO: 23767 - DNA, 275 bp, Zea mays
  unsure (1)..(275): unsure at all n locations
  Clone ID: MRT4577_12167C.1
gggaactggaccgcacaatcaagtactacacggaangcnnngggaagaaacngcngaggaaaagggangnnccngangaggagnacaccaangccnnccnnggcnnngggccagagaacaccaacnnnngcagnnngaanngacaaacaancannggcgnngacaagnangacannnggaacgggcnnnngggcaaaancgcaanngcaaangangangngnacaagnnnagcngagaaaancaaaaaccaagggnggnaagaacacccgcgaac

SEQ ID NO: 23768 - DNA, 203 bp, Zea mays
  Clone ID: MRT4577_121680C.1
cccacgcgtccgtccacgcgtccgccgattcgctcgtcgacccaattcggtccactaaggacggtttctggattgacacggaattcacttggggctccatgtacatgcagaatgatataccggcttactacatgcttgttactgcctgacatgtattctacacgtgtacctctatgcccatctgtgctaagtacttgctctac

SEQ ID NO: 23769 - DNA, 305 bp, Zea mays
  unsure (1)..(305): unsure at all n locations
  Clone ID: MRT4577_121681C.1
gagaaccttgggcaggcgncnncggggcgcccagcggcgcgacncaaagcnnnccccagggcccccccnncncccanncncaccaccgccgccgcnccccccgnncaacaacaccangagggagngcancncganccacancggccaggcgggnanccaggncggaaacgcgngccgggagggggggggccncgagcatggcattcaggcnganggccagangcccggngacaagaccanngggggaggngangangcccccaacaccccgcccagggagaccggcgcngggaagcacgagcccc

SEQ ID NO: 23770 - DNA, 219 bp, Zea mays
  Clone ID: MRT4577_121682C.1
tcggcggacaagcccccagaccggttgcctccattactgagctgtgcgtgcgtggtggcggtctgccttgtggctgcgccggtcatggtgatggtagagatggactgtggcgtaggaggaggaggaggtggaggactgtatgacgctcttaagatcatttctcatattctataagcatttatcttgagtcaacaattatgaactgtgatggtttttaag

SEQ ID NO: 23771 - DNA, 371 bp, Zea mays
  Clone ID: MRT4577_121683C.1
ccctcgatttgccggccgggaaaaaaaaaaaaaaaaaaaaaaaaaaaaaaaaaatttcatcaggtaaaagctaccggaataatccaaatcagtttaactggagtatggacctgcacttgccttttccacttacacttaggggctcaaccgccgagttttctccatctacactggcattgcaagtgctttatatctggcttcggtgctttgcatcatctcaccttggattacaatgattatgagtgaaagaaaaaaacacaactccaggcattgatgattcttagtagtcgttcacaattgagtaggaaataagttgagtattacagtcaatttgccttctctgtgccatatagcattgagatactctatgt

SEQ ID NO: 23772 - DNA, 323 bp, Zea mays
  unsure (1)..(323): unsure at all n locations
  Clone ID: MRT4577_121684C.1
ttnnatnnntttttttttttttttgcgagaaaccacactgtactgcttttattttacagtctgaccccattttcagaaataccaccggtgtcaaaacagttgttaaatattacaagttttaaaaccacctttttttcaacgaccaccgtgggcttgacaccatttggtgggaaattttccttcaaatttaccaaaagcctctccgctttttttttttttttgggaattggggacctttttggaaatttttttttccaatcccccaatatttttctcttttggggttctccccccctttcttttttcttttttttttttttttg

SEQ ID NO: 23773 - DNA, 900 bp, Zea mays
  unsure (1)..(900): unsure at all n locations
  Clone ID: MRT4577_121685C.1
acgaatcttatcgtagtccactcgaagtcgcctcccatttcgcgggtcaccggctcgccgctgcgtcaagcgagcgcttccccccagatctcgacttctcgagcctgtcctccgccccccacaggctctgctggatccagaaccttctagaacccctgcactgcgcggctgccaaagaatcagtggccatgggatctgctatcctcaacagcattgcccccgaggagcctaaagtggtcgtgccagagtacggtgagacggctgatatccaggacaaggaagttagtatggaacagctctgctccataagcacctatgatcagtggacgccactctctgtttctggccagcttcccaaaccacgctataagcatggagctgtggtgattcagcagaagatgtatgtctttggtggaaaccacaatggccgttaccttggcgacattcaggttttggacttcaaaactttgtcatggtcaaagctggaagctaaatcacaagcagaaccatcagaatcagctggagcagttccgttttctgcatgtgctggccattcagtgattcaatggggaaataagatcctatgtcttgcaggacataccagagaacctgcagaaagtctcagtgttaaggagtttgatccacaaacctgcacttggtctaccttgcgtacttatggaaggtcacctagttcacgtggtggtcagtcagtgacccttgttggagacactctagtggtctttggcggtgaaggtcatgggagatctcttctgaatgatctgcacattcttgatcttgagaccatgacttgngatgaatttgagaccacaggcactcccccttccccaaggtcagagcatgctgctgcttgctttgcagagcggtatcttctgatatttg

SEQ ID NO: 23774 - DNA, 2235 bp, Zea mays
  Clone ID: MRT4577_121686C.1
ggcctgctcgaggccggccggaccgagatctagtacactcgaagtcgcctcccatttctgcggtcgccggctcgccgctgcgtcaagcgagcgcttcccccccagatctcgacttctcgagcctgtcctccgccccccacaggctctgctggatccagaaccttctagaacccctgcactgcgcggtgcgcgccatcctcctccttccttccatccagatctcgacacccctcgccggcccagacctccggtcctgtcgtggccccggggttcgggcggctgccaaagaatcagtggccatgggatctgctatcctcaacagcattgcccccgaggagcctaaagtggtcgtgccagagtacggtgagacggctgatatccaggacaaggaagttagtatggaacagctctgctccataagcacctatgatcagtggacgccactctctgtttctggccagcttcccaaaccacgctataagcatggagctgtggtgattcagcagaagatgtatgtctttggtggaaaccacaatggccgttaccttggcgacattcaggttttggacttcaaaactttgtcatggtcaaagctggaagctaaatcacaagcagaaccatcagaatcagctggagcagttccgttttctgcatgtgctggccattcagtgattcaatggggaaataagatcctatgtcttgcaggacataccagagaacctgcagaaagtctcagtgttaaggagtttgatccacaaacctgcacttggtctaccttgcgtacttatggaaggtcacctagttcacgtggtggtcagtcagtgacccttgttggagacactctagtggtctttggcggtgaaggtcatgggagatctcttctgaatgatctgcacattcttgatcttgagaccatgacttgggatgaatttgagaccacaggcactcccccttccccaaggtcagagcatgctgctgcttgctttgcagagcggtatcttctgatatttggcgggggttctcattctacatgtttcagtgacctacacctccttgacactcagacaatggaatggtcaagaccaaagcaacaaggtgttactccagaatcaagagcaggacatgcaggtgtaactattggagaatattggtttattactggtggtggaaatagtaggaaaggtgtctcagatactcttgtactcaacctgtctacgtatgaatggtcagttctcactaatcttgaggcccgtgcaccccctgtaagtgagggctcaagtttagtaatgcacacaattaatggagaaaattttctggtgtcatttggaggatatagtggccgttatagtaatcaggcttatgctctcaaggcaagtctcaaaccaagtgtcccatctcaacaaataaatgaatcagatacaaatggcttttctcccttatctgtggcagaaaattctagcaggaaagtcatatttgaaattgaggaacttaaagatgaaaagcctggcaatagggcagataacagcaaaaccttgggacaagtagttatggttgaacaaaacgaaatagaaaacagacttaatcaagagcacttgcagagtctccgcctgaagcaggaactaactggtcttgagaacagaaatgcagaacttactgaggaactccacttagttcaagatcaactttctatcgaacaaaccagggcttccaaatttgagaatgaaatttcagatattcaacaacgactacagaagatggataccctagaaaaggagattgaatcacttcgctatgaactggacagcactgtatccgaagaagaatcttcaagtggcaacgagttgcaccgcagtcggggcttttggaggtggaatgggtgaactcctcgagactcaaggagtgagtattgaagagaatactcttccaaatagttgtcattattttaatttttatgtctttcacaaaaatatatgaattcgtggatggtactagttcggaagcatatagaggatctaagcaaactgcagcaacatcaactgtgaaaagcatcttacagaaagtaaaacgagtatcatgtggcccagaatttcctatgttagaatagtttcttatctgataatgacaccgacaatgatcaccataacgaattattttttttcatacatatgtggtgggatattaactttttgtcatgtcatcatacttatgtgccggaaatttatatcatctcatgtg

SEQ ID NO: 23775 - DNA, 861 bp, Zea mays
  Clone ID: MRT4577_121687C.1
ggccgccccttttttttttttttttttgcaataacagagtgtatagagataaatgtcacaatataatcagagtacttattacatagcggaagtcttacaaaataataatataaaacgaacaaatgtccatccttggcgccataaagtcaactgggaaacgacacctagatcaagtggaactcctcattgtgtggctcctcttgaaccacatgttcttctcctgtggggggcttcaatgagctcctgctcagcagtctccacctactgaagcactcgatcatgtgtggcttgctcgtcaaggctagcagcgaggacagtcttggccacgcggacccgcggtccacggcagggtagttcctggtggcgaggaattcccacaacgttgaacacgaatccccggaagagctgcttcaaccttcctcctccaagcccggagaatccccaggacacaactccaaggagcgataggtggtgagtcgagtttccctcgtccccgcggtggcactcacttttctctcccttccctgtgcgctagctcggcgttggaaatctctcgacgcgagcaagggacgcgcacgatggtcgatccaagcggagggcttggtgcttattcgcccaccaggaccccaatgaggtgagagcggaattccctggtggtctgttatgcaggcgctaatccataatagattgaggcgagtgtgggaggatgaacttctaggccccggtgtggtttgtggcgaggccgcatggttcggcactttatcccccggaattaggtgtcaacagcccgcccgaatttcatggctcccccggtgaacctcgcccggattcccgcggtggatccagctttgtcccggccgg

SEQ ID NO: 23776 - DNA, 778 bp, Zea mays
  unsure (1)..(778): unsure at all n locations
  Clone ID: MRT4577_121688C.1
attgggtannccctcgagggtccggccgggaaaaaaaaaaaaaaaaaaaaaaaaaaaaaaaaaaaaaaaaaaaaaaaaaaaaaaaaaaaaaaaaaaaaaaaaaaaaaaaaaaaaaaaaaaaaaaaaaaagggttggtggggtgcccccctttagaccaaacccttaatccttccttaaaacccgaaccgggccccccattttcttgggggttggaggaaggggagaaaaggggggggccttccaaattcttattaaaccacagggttcccccccgaagggcctctggaaggacccttgagggccgtttattttccccccccccccggggaaaccccgaagggcccttctggaccctccgaaccaaatttttttcgggcaggccaattttggccaccttgccggttggaatttcaaattgttctcccggccaacggggggggacttaaggtcctttggggggggggaaatgccaaaaccctttgggggcccccaatttgcccctaagggtggggggcctaaggaaattggggacccttgccgggggggtaaaattattcttgggacttgctgggggggggaacaaacttgccttttaaggttttaattaagggttaagggggttttttaaaaccctgttttggattcccggggggaacccggattcccttccgggcaaaaaaaaaatattgggggacaaccctttggaacaagatttatgcttaaaccggattaaaggaggaggcgtggacctccaaaaaaaaaaaaaaaaaaggggcc

SEQ ID NO: 23777 - DNA, 1546 bp, Zea mays
  Clone ID: MRT4577_121689C.1
gggtacctcgaggccggccgggccgggatttcgcgcgtcccgtgctcgcgtcgagagatttccaacgccgagctagcgcacagggaagggagagaaaagtgagtgccgccgcagggatgagggaaactcgactcgccacctatcgctccttggagttgtgtcctagggattctctgggcttggaggagggaggttgaagccgctccaccggggattcgtgttcaacattgtgggaattcctcgccgccaggaactaccctgtcgtggaccgcgggtcctcgtggccaagactgtccttgttgctagccttgacgagcaagccacagaggatcaagggcttcaacaggtggagactgctgagcaggagctcattgaaggcaagttgtgcccttgatcacttcctttttactcagtcatgttcttattaatcataatgatctgcataggttaatttgatgggatccaataggttaccctagttttggctatctttataccttgttttaccactgaattgtttgggtagtatatgctattgctttatgtggttatgcgtatagagatatatattactcatgttcacacttttgttataagtttattatttactattcatgataagatcattgtgttaattggaacatggagcgactacccggaaaaacagtgctaccacaagggtggtatgggacgcccttggctgactaattaggaaagctagtggaggactaccttacccgaaaggggcaagggcggtagaggagctgcagtatagagaggttctcgggtcgtcatgctgcgatggcttttcggacgagggattcctatattgcccttctcagaaaccgtagcgggttttcttgaagctagtgaaactatgtaaaggcctcgtagtgctaccctgcctcgtttcctcggtagagatgtatgagatcaatgaccccttggcatatgggtaacacgacttttgggtaaagatgcgcaacctctgtagagtgtaaaattggtatatcagccgtgctcacggtcatgagtggctcggaccctcacatgagtaatttatggaactaaacttaatttgtcatatggattgcattgtggatgttgttattaatttgatctcttatttaattgggttggtatctacttatacctagtaactgttaatataattttggcaaactttaaaagcaatgctcagctttaaccatactctttggtaagccttacacttcacatgagctcccactttttgtaagttcatgcatattattccccacaacttattgagcgatgaacgtatgtgagctcacccttgctatactcacatcccccaggtcaaggacagttaccacaggatgaggcgcatgatggatgttgtgatgagttcgtgagtggtctaggccatcgtctcctagtcaactatggttgctggatcgttgtcttcgtatgatgtaattatttaactattttgtacaaaactccattatatattaatgatgtgacattcgtttctgtaccaaaaaaaaaaaaaaaaaaaaaaaaa

SEQ ID NO: 23778 - DNA, 939 bp, Zea mays
  Clone ID: MRT4577_12168C.1
cattgggtacctcgaggccggccggggacccacccatccaaccacttccacgaatggccctcgctctgtgaactcgtcgggttccatggcggcgccgtcgcctaaacccccgacaccacgcgggcgctgccaccacccgcccaacgccacccgccgcctccacgtggccacccgctgcttccccgacccaccaccaccacctgcctccatgccgccgatcccgagtccgaaccctgtgctgtcccttctctccgcggtgcccgactgggccgacgccatccaggagcgccgcgtccgcgaccgccgcccgctctacgaccacgccacctggcggcaccaccgcagctcccgccgccacctgcgccacctcctcacctcgctgtcctcccgcgccatcctctccctggcgcccccggtgtccgccttcaccgccttcgccgccgccatcgccacctacaacacgctcctaccggcctacgcgctcaccgcatcctcgctcccctacgagctcactgcgcccgcgctcgcgctcctcctcgtcttccgcaccgaggcttcctacgcgcgcttcgacgagggacgcaaggcgtggatgcgcgtgctcgccagcgcagccgacctcgccgggatgctcatgcgtcatcctcctcctaacaatctgcatacgggtggcgctcccaatccgggaccgggaggacgacaggctgacgacgagccgctcaggcgcgcgctcgtcaactacgtcctcgccttccccgtcgcgctcaagtgccacataatttgcgactctgacgtaaaaggggaccttgagggcttgcttggcgaagatgacctgagcgttgttctagcatcgaaacatcggccacgctgtattatcgagttcatcgcacagagtctccaaatgctagatctcgacgagcagaagaggagcatcatggt

SEQ ID NO: 23779 - DNA, 561 bp, Zea mays
  unsure (1)..(561): unsure at all n locations
  Clone ID: MRT4577_121690C.1
cctaacttacggggggggggggggggagtactacatccactatagtgcaacctaaaactcattcactggacaacatataacacttctttactggagaaacacctggcgcggccggagctacaacatcatagcagcacacacctctttctccagctagccctattttgagggggggggagagctgcacnccctcaccaacaagcactgcatgcttacttgacataggcactcaccctttagcggcgcatataaaccggctagtgattcagatacacacacctttaccgctgctactcagccagaacaatatctcagcctcctttctatatctaaccttgctttctagaacaaactaggcacattcccccaacaaactctaaaaatatggatccctttacgcgagctatttatcgctaaaaaaaacctaaaaccccaaacaactctaaaagagccaatcttacacacactggcacaccaccctataacactgctatatcgccctctaacattcaaagtacacgctcttaatatacaactcttgtactaaaaaaaaacaacact

SEQ ID NO: 23780 - DNA, 490 bp, Zea mays
  Clone ID: MRT4577_121691C.1
ccacgcgtccgcagaaatctcgtgtggcgaggccggccgggagcacctcatccccctgcatatactaacactgcaaaactgaaaagggtgatagcaaactacaatgaggattgtgtacatggcagctgttatgtttttggttcttgcaaccatgtcttctacctccccatcattctgccaagctgggggctgcatcggctgcccacgggctccaccaccgccgtccgatgagacatgctacgaggacctcaagtgttcggcttcgaggtgccacctgggttgcatacacaggggctacaagggtacgggttcgtactgccgtgggagggactgctgctgcaaacattgatgcaccgtagtgcatctatgcatttcatgaccatacaataaacctagatgtgtatcctttgcctccgacgactataaatgaaatgaaatactactaaggttcagcacaaaaaaaaaaaattaaaaaaaaaaaaaaaaaaaa

SEQ ID NO: 23781 - DNA, 445 bp, Zea mays
  unsure (1)..(445): unsure at all n locations
  Clone ID: MRT4577_121692C.1
caaattagtactacccccaatcagacggtttggtaatgctgctgatgttggtactccgatccaaatgtttgtagccacaaccgctagccgtggtgcagctctgctacaaccagctcactgggagcatccccacccagctgggcaacctcagcaggctcaccgtgctggccctgcagtccaaccgcctcaacggcgccatccccgccagcctcggcgacctgccgctgcttgcgcgcctggatctcagcttcaaccgcctcttcggctccatccccgtcaggctcgcgcagctgcccagccttgtcgcgctcgacgtcaggaacaactcactcactggcagcgtgcccgccgaactggccgccaagttgcaggccggcttccagtacgggaataacagcgacctgtgcggcgcggggctgcccgcgcttcgtncgtgcaccccggc

SEQ ID NO: 23782 - DNA, 1837 bp, Zea mays
  Clone ID: MRT4577_121693C.1
gctgcccgccggccacgccgccgccgccgccggcggccccgtggccccccccccgggccgctgccgcccccccctcctccggccccggcgcgagccgcgcggtccggccgagctggccgccatggccatccgcgagagctcccagatgccggaactgctccggctccctctgccgccgccggcgacgacggggagcccgtactctgtgtgcttgagcgtgccggcgtcgccgtcggggctgcacctcggcgtgtgcgcgtccgtccgcagcgtggcgccggctccacagccacagccggcagaggaccagcagctgctgcagaaccaggcgcggtaccactcgcagccgacgctgacgatccggaccgaggagccgccgccgctgcagcgggtgcgcaccgtgtcgcgcagcgacagcgcgcgcgaccgccgcttcgaccacttcaagaccttctccggccgcctggagcggcagctgtccaacctccgcggggtggtgcccgtggacatcgagcccgccggcgccgactctacctcgaacaagatcatctccgaggaggagaccgacgacgacgacgaggtccccagcgcggaccgctacttcgccgccctggaggggcccgagctggagacgctgagaccgacagaggtgtcggcgctgcccgaggacgagacgtggccgttcctgctgcggttcccgatcaacgcgttcgggatgtgcctgggcgtgagcagccaggccatgctgtggaagacgctgcagtcggagccgtccacggcgttcctccacgtgagccccgccgtgaaccacgtgctctggtgggtctccgcctcgcttatggcgctcgtctccttcatctacctcttcaaggtcgtgttctacttcgaggcggtccggcgcgagttccaccacccgatccgcgtcaacttcttcttcgcgccgtggatcgcctgcctcttccttgtcaagggcctgccgcaccctgtgtggaccatccaccacgccgtctggtacattctcatggtgcccatcttcctcctcgacctcaagatctacggccagtggatgtccggcggcgcccgccggctgtccaaggtggccaccccgaccaaccacctcgccgtcgtgggcaacttcgtgggcgcgctgctgggcgccaagatggggcttcgcgaggtgcccatcttcttcttcgccgtcggggtggtgcactacctggtgctgttcgtgactctgtaccagaggctccccagcaacgcgcagctccccagggagctccacccggtgttcttcctcttcatcgccgcgcccagtgtcgcgtccgtcggctgggcaaggctgtgcggcgacttcaactacgccgccaagatcttatacttcacctccctcttcctctacatgtcactggtggtgcgtctcaacctgttccgaggcgtccgtttctcgctggcatggtgggcgtacacgtttccgatgacgagcgtggccattgcgacggccgtgtacgcgtcggcggtgaccaacgtgatcacccgggcgctggccgtggggctgtccgttgtggcgacagtcaccgtcgccggcgtgctggtgaccaccatgtaccgcgcgttcgtgtgcaaggacctgttccccaacgacgtgtccatcgccgtcacgcagcggcctaaggccaagttcggcaagatcctcgcgcacatccgcgcctccggcgacggcgtcaaggacctcgtcctcgccgtctccaggcacggtggctcccccggatcagacaccaacggcaccagcgatccgtcgtcgcccgtggcgcatggccgcggcgaagcagagccgtag

SEQ ID NO: 23783 - DNA, 372 bp, Zea mays
  Clone ID: MRT4577_121694C.1
attcacaccaaccttgaccttcacataacccagcgagagatctaccaacacccaagcgcctggcgcgccctcatgtagatggcacacacaatatcataatgcccagctgataagttgggcttccacatacctacatacatatatcgatcctatgtgaaaacccagctcttcagccctataggctccaacaagcaatcgcagcaagcaacatacctttatcacccttgttgtttcaacaaatcgccagccctatctttggtgcagtcattggtacaaaccatcatggcacagcagctgcagcaactcgtgctacctgtgatcaaaccaattaggtgtggcgaacctttgtccctactctcaacaacaacaatt

SEQ ID NO: 23784 - DNA, 334 bp, Zea mays
  Clone ID: MRT4577_121695C.1
aacccacaacgctcacacacaacatagaccaatcaatcgactaatttgatcattaacttgaccaatgaacaaaaaggctccacggtaggcttttctcacagaagaacaaaaatggatggactactacaaaatcccataaccgcattaaacatcgcagcattataaactctacagataccgatgcagctattgataactatgtacacacccaactgcatgcttcatgaatactgctagaaacgcacaatctatcaccgaccgaaagcgaaacaaccatttcagataaattaccattggaagtgaaaacatatgtcagccccgtgtaacccaaaac

SEQ ID NO: 23785 - DNA, 554 bp, Zea mays
  Clone ID: MRT4577_121696C.1
catacacatcacagacactcataggagctcgtatcgtgcacgagatggctgacgccaccatgtatataacatacagcacgctaatgcagctagcacgtgattgacatcggagtgacgtcattatgggatgatgcacgtatccaccatgctcatagaccgagcccaagcctaagacgagggacttcttcagccactgccacattaccataccgcatgatctacctgaaccccaatgccgggtcgccggcagctacttgaccggcgactaccgcgtccagtacctgtggcacatcgccgggtctgccgcggactcctagaccttcagcaagcaaccgcgagtctggaggtgaacacactggcgttggccatgctcccggcgatcttctgcaagaacccggagctgctcgtgatccactgcctctagttcatgcaggcggcgctcttcaacgtggtctcccagatgttcagccacggcgggctgaactacctcgaggacccgagcctgaaggacgcgtacaacatcctgaccatgtgcgcgctgcactacctgctca

SEQ ID NO: 23786 - DNA, 241 bp, Zea mays
  Clone ID: MRT4577_121697C.1
taaatgcacatacatatctactgatcacactttcttcgcaaacgccccactcattgcatatggtctataccaagtagccacacagctacaaaactattaattaactcatactactgctataaatactattgaataacgaagaataaacctacctatacgtaatatcacaatactctacacttaccttaaattgtaccaatctctgtaaatcattactatcaactgaagcactttaataact

SEQ ID NO: 23787 - DNA, 778 bp, Zea mays
  unsure (1)..(778): unsure at all n locations
  Clone ID: MRT4577_121698C.1
cgggatttgtactgagtgtgaaaggaagcatatagatatttgcattcacattttgaccatttaccctgttggacttgttttacaagtgctttgttgaccttggtggatttttctcagtttgtgaacgagatgaaaataatgaccttggggccccgtcaaccatggtctacaatccccttgtaaattgtataatagctaaagcctacatgaaagtatttataccctttacatttgcgtctggagaatttactctcttctgttttccattaatccattgttcacttattccatgagttttctgagatattgaatggaaggtaaacaatttttgtggagccttgatggctgtggattacagtttactgtatggtttgtgattaacaaattcctgctgttactcttgtctgcagatattctgtatgactcatggtcaccagcgatgaccgtgagctctgtctgtatcagtatcctgtctatgctgtctagttcgccagcaaaggtgacacttagtcatcatactacttgatctattgaaacctcggtgccctcactccatagccagactctaactagctagaatgtattgtttgcagcaacgcccggcggacaatgaccgctatgttaggaactgccgcaacgggaggtcgccaaaggagactagatgggtggttccatgacgacacggtgtaatgatctncgtggcattgcctgtcagccttctgtactgtgaactgtgatatatctcttcaagggggagatgagatgatttaggcctatt

SEQ ID NO: 23788 - DNA, 474 bp, Zea mays
  Clone ID: MRT4577_12169C.1
ggccgcttttttttttttttttttattttttgtttttttttttttttgttttttttttttttttttttttttttttttttttttgtttttttttttttttttttttttttttttttacggaacaaagatgtttttgttttcacaacactgggggattaaggaaagcgggcacccccaccggcccccccagggggggggggaacacatttccacccaaaggcgccccgtgaaggaacaacgggagcagctggggcggggttaacaaacaaacaaagttttcccagggggggggccccccggcagaaaccgtaggggctgggaataagctggggaggccccccccccccgccgggtggggggaatatatggcccggcaaaagccccaggaaacgggcccgattgggggtggtgttgcgggaaggacgggggacaccaccccgaacctccctggacccagggaggaaaccccccccg

SEQ ID NO: 23789 - DNA, 1806 bp, Zea mays
  Clone ID: MRT4577_1216C.1
ccggggtcgaaaattgaaaaccctttaatcgtccccaaaggcccaaacctatcgcccgtacgagactgcgccgccgttgccgtctcctcctccgacccatcactctctgctcgcgcactctcacctgcccgcgccgtattcgaccgccgccaagatgaacaaggagaggctcatgaagatggccggcgccgtccgcaccggcggcaagggcaccatgcgcaggaagaagaaggctgtacacaagacggtcaccacggacgacaagaggctgcagggcactctcaagagagtaggggtcaacaccgtggtcttcgatgctgctcggttttggcttggggttggaaacctatcctcgttgtccatgggattgggtggtcttcagttggacattgattgatgaagataggacgaacacttacataagcgaggcatttgatacacatgaaattattttgatggaggaggatggaagcctcactcaaatataagttagaaccttgcgccgttgccgtctcctcctccgtcccatcactctctgctcgcgcactctcacctgcccgcgccgtcttcgaccgccaccaagatgaacaaggagaggctcatgaagatggccggcgccgtccgcaccggcggcaagggcaccatgcgcaggaagaagaaggctgtacacaagacggtcaccacggacgacaagaggctgcagggcactctcaagagagtaggggtcaacaccatccctgcaatcgaggaggtgaacatattcaaggacgatctcgtcatccagttcttgaaccccaaagtgcaagcttccatcgcggcaaacacatgggtggtcagtggatctccacagacgaaaaagctacaggatgttctccctgggatcattaaccagcttggtatgttacaatctgtaccttaacgtttaggatattatccaaaaaatggttatcttgtactacctccgtccgtttcgaatatttgtcttccgttaattcacttttaactaaaacatggcaaataaaaaagaacagagggagtaacatatttgatgctttgtttgattaggcaagttctgctcatttaatttgtttgttattatctatagtcctggtcttttctaattttattagaaatgtgttgctgcattccaccatttcttgttttgtcatttgtggtgttctctcgacagttaccacttctagacgcacgacaatggatgtatacttctaggcatattttatctgttgccttgaagtttggcagtttctgttctgcctccctgttgctgtatgtgtttcaatcaatcaaatacaaaaagcaacaagcgtgaagcaaacagaagcttgttgccacaatacaaatgatatgaaagagggattaacaccttttctattcttccaggccctgacaacatggagcacctgaagaggattgccgaggagatgcagaagcaggtggctgctgccggtgcggcagcacaggtcaaggaagacaacgatgacgatgttccagagcttgttcctggagagacttttgaagaagtagctcaggagacaaaagcctgatcataggctctaaatagtgaaatgttactgcaccaatgctgtgaggtcatggttttcgtgtgatggcactcttcttcctcccctcctaggccagccccagccactctttgtgttcgctgttggaaacttttagtttctccatctcaagcttttacctaaggttgtgcatgttgagatgccatggaaatccattttgctgattaaaaaaaaaaaaaaagggcggacgctcgcgatctagaac

SEQ ID NO: 23790 - DNA, 293 bp, Zea mays
  Clone ID: MRT4577_121700C.1
gacccacgaatcagcaggcctgcggtggacacctaggcagccagcgacgaggaagggcgtaccaagcgacaatctgccttggggacttgcgaatgagcctagatcaggagattcccacgtcagtcaagctttcgaatcgcttgcagactccctgattatgtacgacaccattctgctcaattgatagctcttagtaccgcgaggtcacgacatcactctcgacgtccttgttatccggctaccgaaacgggatcagcctaaatcgtgaacactgggttgtgggagagcgatac

SEQ ID NO: 23791 - DNA, 320 bp, Zea mays
  Clone ID: MRT4577_121702C.1
acgggatgtttaaaatttaaaaggggggaacacatgcaaagcaagcaaagacagaagaaaacaaaacatcttttataatcactttctaacaacagacgacgaccatgagcttattcatgtatggacaattacttttgctgacttatgtatatttatttaccctggagacaccatacaaccccaccgagtttacggtcacattccccacccccctgacctgatagcaccattattctcaatgataaccataaagaagacagacaccaagggataatgtggacggctccctctgcctctccagggcagacccggcccatcag

SEQ ID NO: 23792 - DNA, 835 bp, Zea mays
  Clone ID: MRT4577_121703C.1
attgggtccctcgaggccggccgggatcccccatccccctgcatagtgcatacccttctcgccatccattatattatacacacacccgtacgtcccgccgccggcgccgctgttgctgctgccacagcaacatgggcggcgatttggcgaagccggtggcggcgatggtggttgtgcaggtgatgtccgccggcgtgaacatattctacaagctggcggtgttggacggcatggacatgagggtgctggtggcctaccgctacctcttcgcctccgccttcctggcgcccctcgcctacttcatcgagaggaagagacggaccaagttgacgtggagagtgttggtgatatctttcctgtgtggcctaaccgggggctctctggcgcagaacctgtacatctcgggcatgaagctgacctcggccaccttcgcctccgccaccaccaacctcatcccgggggtcaccttcgtgctggcgctcatcttccgctacgagcgcctggccgtccgcgcctcctccggccaggccaaggtggccggcaccctgctgggcgtcgccggcgccatgctgctcaccttctacaagggcgccgacatcaccccttggcacacccacgtcaacctcgtcgcctcctcctccgcgcaccacgcagcggacgaagccgccgacgccaaccgcgtcatgggctcgctgctctgcatcgccagctgcgtcttctacgcgctctggctcatcctgcaggccaacctcagcagggactacccgttccactactccagcacggcgctcatgtgcgtcatgagcacgctccagtccgtcgcccttggcgctct

SEQ ID NO: 23793 - DNA, 781 bp, Zea mays
  unsure (1)..(781): unsure at all n locations
  Clone ID: MRT4577_121704C.1
ggggcggntagcaccacgccgttgacccttggcgctttgaattcggctccaggcgccagtccgtcagccacccaccgcgcgtgatcagattggaggcagcgagagcgagtccacgaccacgagcgaaccgagttgtccgcgcccggcgcctcgtcatctcccacctcctctgcggctctgcctcaggtcgggtcccggagcgtttctcgcctacttcgccttgccccctccccacgtcgcggaacgatcggtgcgacggtgccccggccgaacccattctgcctggcacctgcggggtatgatcctgggcggcctgtgccccgcccccgcatcaccttgcctggcgtcgcgctcgaccgcgcggcctcctcagccctgaacaccgcccgcccgcctgccgggtgtgagaggataggatcataggaggagtaaggagcggggcggcggcggcgacggcatgagggccgaggcgacgggctccgcggcgaagctgctggcgccgcggatggtggtgtccgcctccagccgcgtccaggagctggagaggttctcgcattacgtcgctaggcagatcggctttgacgatgtgaaggaatgccctcacctgtgcacgctagcttacgattatctcaggaagaacaggggtacgaagagacatttnttgcggtctttcagaaagccatggatcccgagcccctgatggtggaagttaatcgaggagctggacaatgcatagttggctacttctctttcattggaaaatgccacttactaataccca

SEQ ID NO: 23794 - DNA, 187 bp, Zea mays
  Clone ID: MRT4577_121706C.1
gggactttttattttaagctggcgaccgagaacacggggagcacgggtgggggattactcaagagcaccagcgggccccccgaccccacccccggctggactcacatgaagttcaaagtgactgcgcgtgtgctcgcccagtgccggagcagccgcgccggtgtcggggatgctggccaaagacccc

SEQ ID NO: 23795 - DNA, 331 bp, Zea mays
  Clone ID: MRT4577_121707C.1
aattgggttagacaccatattattttgtctttatttgagtacagaacgaagtaaggtctgtgacttataaatgtgctaataaccgtctatctaaatttatgcacttgaaatataccaactcgcatataatatataaattatctgaacgatgccacgccaaatgtgtacttccataggacgaaaagcaagttcctatcatcacaaactccaatcaaatttagcgatatgtcatgagagcactacaggtcaacattacagccttaaaggtaatgaccctcgtttactatttattataaatcaacttgattttactagttaaattttttgcact

SEQ ID NO: 23796 - DNA, 260 bp, Zea mays
  Clone ID: MRT4577_121708C.1
tcgttctttggcagggacgaagctccaaaatgatgtgagatggctggaccagctcggaaaaaaacggcgttcgtgctcggaatagagactagagcgatgtcaggtgggggcctataatgtgctaaggcaggaacatacgtgtgatccgcagaggcaaagagagctagaggtgctgacggaaaagttcgcgtacagctgtagaagcgcgtataaaggaaaactaagtgactcggatatctttttagtggcagcaattacgg

SEQ ID NO: 23797 - DNA, 250 bp, Zea mays
  Clone ID: MRT4577_121709C.1
atgaatgggtaactcagagacggacggggaagagattacgcagagagggagatcagattcagttcagctcgatcgctcgctcgtctctgccgccccgcccgtcgcggtcgcgcgagaggggtggacatcacccatgtgcggtgttcgcgttcacagtatcgctcgccggcgcctcctaggaggaggcgttgtcgccggctgcttgggtgtgggtcgcgttgtatctccccgtgcgcgtgtattgggcgtg

SEQ ID NO: 23798 - DNA, 177 bp, Zea mays
  Clone ID: MRT4577_12170C.1
gtagatgcattcttatgtgtgcactcttttgtggtcgcaaacgctactcttcattgcattttctttgctgtagcctgagaaaagcaagcatattccttttacaggcactttttttttttatcttccactatttcaatctttgattttcttctaaccatatcgtcctgattaggaggc

SEQ ID NO: 23799 - DNA, 180 bp, Zea mays
  Clone ID: MRT4577_121710C.1
cgtacggggagtgctatagggaagatggggatgatttaaaggattgtagaccaggacctcaccgtatgaatctgtttactgaagatgtggtctttgactcagtgtctcgtgacgggtgatgctagttaaagtttacaagactgcgtataaacccgatcacaacttcaatcggaaaacggg

SEQ ID NO: 23800 - DNA, 314 bp, Zea mays
  Clone ID: MRT4577_121711C.1
cccataccatcatagatagcacaatatcgtatcaattatgccagccaaactataccgcctcattaagctacgtgctctgtcttcgagcgctgctatggtcagcatggtcgcgcagcgctctcaacctccaatagctaagcttcatcgcgcatacctttcaccagggatgccttcagtgtgtgaaaatcaactacttctaccgtcatggatccagaaggcactccaggaaggcatgttacctcattgacctttagacttgaaaaaatcattagtctaattgaagcagcttccttagaggcttttatttgcacaaa

SEQ ID NO: 23801 - DNA, 540 bp, Zea mays
  unsure (1)..(540): unsure at all n locations
  Clone ID: MRT4577_121712C.1
tcgcacgcgcgtccgtctgggaagggagccttcgagtgcggctccgctcgcggacgcgtacggcgcgggctgggcgtgagtccaataggcactgggctccgttggtggcgccgaaccgcctctaacttgtgggtacgtgggccgggccgtgcgaggccagaggcntgccggttggctagactttggnnattctgnnactgtagaggcgttacaaagtcatannatccggcaccacagagtagcttttcgcgcccacttggcatttttcaactcaagtcgccgatgacccatatgtgtgtgagatcaatcggtatccttctcgtactttaggttgaagttacctaaatcgcggtcgctggtcaattcagtangnnggtaaaacctaactnnctgtctcaacgacgagtctttaatcctcagcttcaactgttccctaaattggtgggtgaaaccaanntccaacacttttggtgannattctgcttttcacaatgatacgtgaagaagccccgtacatcgaagggaaatcaaaaaagcaac

SEQ ID NO: 23802 - DNA, 144 bp, Zea mays
  unsure (1)..(144): unsure at all n locations
  Clone ID: MRT4577_121713C.1
gggccgggtccgcaaaacccggttggtcctacccgcccgtttagtattccccaaacggnggccacgggggaaggggggccatatttacacataagggggcgggaaacaagacaccgtcatactaggacaatcctaatgacagca

SEQ ID NO: 23803 - DNA, 193 bp, Zea mays
  Clone ID: MRT4577_121714C.1
cccccccccccccattacgttttaaaatgaaggtttccgttcggttccaccccccggggaagagaactttgaaagacatttctttgggaaagccatacaacagatctctggcatgttggaggacctacgccctttatcaaggaagcccttatccctaacaaggagggcaccaatttgtgaagaggcaacaagc

SEQ ID NO: 23804 - DNA, 473 bp, Zea mays
  unsure (1)..(473): unsure at all n locations
  Clone ID: MRT4577_121715C.1
aaaaaaaaaaaggaaaaaaaaaaaaaaaaaaaatttattttttatnaaaaaaaaaaaaaaaaaaaaaggggagggaaaattttaaaaaaaaagggcgggccccccccagggaccaaccnaaccaaccccgccaaagccaacgaaaaacgccacaaaaggggcccccaaaacaaaggccccggcccgcccctaaccaccgcgggccggggaaaacccgggcggcacccaaccaaaacgcccgggaaaacaacccccctttcccagttggccttatttcgaaaaggccccttcccgatgcccttcccaaccattttcccccccaaaaggccaaggggcccccccccttaacggcccattaaacccccggggtttgtgtggttccccccatatgggacccttacccttgccagggccctttagccccctccttttctttttttcccttccttttttcccccggtgcccggcttttc

SEQ ID NO: 23805 - DNA, 550 bp, Zea mays
  Clone ID: MRT4577_121716C.1
gctcttcatgtacaatatcaatgccacagagcaggcaagtgctctccacccggcctctcaacttatcatgcattagtttagttgcataagctggttttggttagcctgtgggtcagcgattgctgtaatgcatgcaacgcaattctgtaattgtttgctaacatgtaatatatgcctaaagttaagctcggacaacagcctaatgtttcactgcttcacgctcagctggacaggctggaaatggcatttgagaaggtgagacagatgctgtctggcaggctccacgacttcataagaaagcagatcgtggagagggcggacccttaggaaaattggcaaatgccaggtccagttctcctgcagcgcaccacttatcgacattaactgaagaaaataagacacgtgtatcccccgctcttactctaacctctcctacgctttaagttaaacttgtataaatttgaccatgttttgtttataaaaaatatattgatatctacagatctaaatgaattctctgtcgcaatatactgggcaatcgtattgcacg

SEQ ID NO: 23806 - DNA, 425 bp, Zea mays
  Clone ID: MRT4577_121717C.1
gatgaaaagggaacacagtgtcccttaatgggatgtttagcttaaacctgctgtgaccgtactggagctacacactaatttttcccaaagagtgtttcccccgtaaagcaaattatgtcccgggggggcgatgaactggggccaactatgctacaacaccgaactgccttcatttcatctcctatgaagtgacgagctacccgggcacttgctaacaggaaggcccttacatagcatgacggacataactgaggtgtctcgcggtgtgcctcgtcttaccaatgtaaacattacggctgactggggttgtacaggattaaatgggtaaaaaatggagcacttgaacgcacctttcaccttaggaaccatattatcgatatcgtccccactggctcatgtagactggataagcaaacaattccttt

SEQ ID NO: 23807 - DNA, 348 bp, Zea mays
  Clone ID: MRT4577_121718C.1
gccacgcgttcgcccacgcgtacggccttccctacggccactgcatacataccacacttccatttgcccgctcgtcttccatcaattgccaaggcaaataatattaccgcaatggggggtcccgggatccacttctccaaactggaccgggctgaaagggcccaaaccctggcgcaaatcctcaatgggtgggaagagtggggattcttccagcttgggaaccacgggattccgctggagctcgctcaacgcgtcaagaaggtgtgctccgaccggtaccgccttagggaggcccgggtcaatgcggtggaacccgggcccacactggagggacctccccaacctgaa

SEQ ID NO: 23808 - DNA, 156 bp, Zea mays
  Clone ID: MRT4577_121719C.1
cccccaccaaaaaccaagctaacccgctccattaccccagctaacactttataaccccctgggtttatttacataacccaacgaggtttttagtgtaaaccagggttccccgacattaaaatctttcccccccttcagtttgcccacacctcccca

SEQ ID NO: 23809 - DNA, 933 bp, Zea mays
  Clone ID: MRT4577_12171C.1
cctcaatcagggggtctctggtgatgaggctagatgtaacaaccaaataaaaagggctcctagtgatgcgactggtggcagtccggcttcacctcaggcatcagagagaagcccagatactattatgtttgcccctaggtgtacgacttcaggagcagtgtgttctggtgatgcaggggtgacggggggtgctccccctccttctcctcccaactagctctgctccagctttctccgttcccctctgcctccgtctgcgcctggttacggttgcagtcgccggcttgtccccttgtgggagatggtgttctgccgccctgttggcgacatcacttgggagcggttctgtgaaccccgtcttaattttttttggccccttccgcttgtctacgagccttggaaattcagcggcgtttggcctgtttacccgatagctctggcgaggttctgggcgagcaagcttgaccagccttctgcacttcctgcactaaagcacccggtatgatcctgcaatggattttgtgactttcttgcaagtaatgcagttcctgcctcatgcttggtgccacccatagcaatacaccaatggcttcgcatcctcccgcaatttccttccccgccctagccaatgagcaaggggctgtgtggtcatggcccggatgcgccggcctttataacgggcgcgtcgaagtgtctagaaggatcgtatccgcgagtctactaccaagtcgccaacaagtggagataggaaaagcccccggactggccttttggcggagggagggagcggtttagcgggcgattagagggagggttcgggctgcgccgagctgattagcggattgttaattgcggcgggagggagggtttgtggctgcgcacgcggccacgtcgacgccggagattttaaacggaacagcctcgtgccgaatt

SEQ ID NO: 23810 - DNA, 764 bp, Zea mays
  Clone ID: MRT4577_121720C.1
ggccgctttttttttttttttttcacacaaatccaatataatacagcatatatatggcgaatcttagggacaaaataaacaaacatatatatggagaattgatctccataatatcttgtatccaacaatcaaaactaatgactgcatgtactacaactccgatcacatgctaatcgtctgaactttgatggttcacaacaaaactgacacttgcatttaaataccttagcttgaccttgcttatccatatatattgtagcatacagttctttacgtgagttccaaaccattatatattggacgactatatgcgtatcctctgacttcctacaggtgcttgttgtgcaggcggcttcatctcgagcctggagttcgaaccctcaaaacccttgctgtccatggagtctcccgacacggcgccctcgtacagcccggtgactggatccatgacatcaatgcctgcaccctccatccttgtcgacgaccccatctgaagctgatcgttgccgctctttgcctgctgctcttcgctggcccacatcatcgagctcttgccactggagctgcaatggttattaaggtcctttttgttgtctgctgagccaatgaagcagctctcgcccaacgtcaggaagccatccattggcctctccatctgatgcaggagctggtccatgtggctgcttcctccatagaagcactgcaggtcctggacggacgagaagctcgtggagctggtgccgatgtcaaggaccccttggctg

SEQ ID NO: 23811 - DNA, 258 bp, Zea mays
  Clone ID: MRT4577_121721C.1
gagagtgaagggggggggagaaactaaactcctttatcctttcccaattggtaggtcccctttcgcaggtttaacacgggcgtaaattttgtgcatgattggacaaaaccgctgtctagctacgggggtagttttggcgcgcataccgggaaaggaaattttttttttctttggccctgggtaagcccgggggggtcaacttcaggctatttaccggctatccaagaacatgcttttttttaacaacaggggggccgg

SEQ ID NO: 23812 - DNA, 456 bp, Zea mays
  Clone ID: MRT4577_121722C.1
aaacgaccggccccggaaatttaatttttttttgggcccccaacagaaaacccagctttaaaggggccccaatggagcagggcccagaacccaaacccacgttaaaagaggggggcccaaaagcaaattaacccattttaacccacccccgccgtaaaaaagcagggggagggacaaaacccggcccgggccggttatgaaaaagaaggaaccccacgtccacgggaaaccctttttaacggttcgggcccgcacggaaaacccggacccggggaaaaaccgaaggggggcccatgattgggagcaggcagttaaaaaaaacaacaaggttacccccaggtctgagaaaaggcccgggaacaaaaagggaccacgggggcccgggggccggccaaaattttccaagggggaaaggggttaaaaaaagcaacacctttgtcccacccccaaaacgat

SEQ ID NO: 23813 - DNA, 163 bp, Zea mays
  Clone ID: MRT4577_121723C.1
aagcaggcccgaggaccccgagaggaagggcacacaggcagggccgagagagggaaacagcagacgggccaaagaaggaacaagaagcccctagaaaagaacgtcggaatccaaccgcaaagggcaattttttttttaccaggggtggaggcccacacaccaa

SEQ ID NO: 23814 - DNA, 242 bp, Zea mays
  Clone ID: MRT4577_121724C.1
agcacattgccaaaaaaatcctccattttcttctagagcaagctgagcgctatagacagggcaccagccacgacgatgttgttgcgcctgaagggcggcataagtctgcgcttggtcttagcaaagcgccacacgtaaggtgcttcgtgacaacattcagggcatcaccaagcacgcgatccgtatgctgactcaggaggggcggcgctaagcgcattcaaatgcttatctacaaaaagacc

SEQ ID NO: 23815 - DNA, 1492 bp, Zea mays
  Clone ID: MRT4577_121725C.1
gtgccttcaaccgtgcctcgtgatggtgctggatatccggaaagagcaaatagagccaagaaggcagtcaaaatcagtgctcgcagcctcgcaaagctcgataagaatgaggtaatgaaagctgctgcaaaagctcgggcatcatcctcggttctgcgaccaatagatgcccgccatggtcatgaagctgatgtcatctccagcggcagtgccagtgtcaggagcagcatgagtgttgactacagtggcacaaaggaatcaaacagcgagatgaaactttctccgcttcataactcatacccccaaagccttgcaagccaggatgaatacgataccggcacaccaaccgcaagcagtttaagcagtctggtcaacatccacaagcttgcatcccactctcagttcagtgctgcgcctcgccctgcacctccggaaagacctgtgccggcgatggtgcggccacctgttcccaccacacaaataaccaacccagggataccgcggccagctgttcccacaacacaaacaaccaacccgatgttccaatcagccacatcttatgttcgagagaaccgaagggcctctgtcgtctgggatcaagaggctggtcggtacgtgtcagttcctgcacagacaagaatgggaagtggagtcgatctgccagcaagaaacccacggttcttgacgaacccaagtggcgagccaagcagccatgtgaggagcgtggtgcctggcaatgcctcgtcctcagcaatgccatcagggcagccttcagagaggttgacatattctgggcagtcaatattcttcggtggccccatgctgagcacccctggcgtgggcgccaataggaatgaggcagacgcaagagcacgccccgagggaagcagagatcctaatgccctgtgtgagaaagcgaggactggctctggctcctcgccaatatttgctcctggggcgttccagaggaacccaccctttgacaaatgacttgctcctgctcatgaagtttatctgaagtgccgttacgctggaataacctcagcctgaagagttgacagatagtttaggttgctcttttgggcttgccagaaggacggacaaaggcagccgtaggaatgaggctgctgccggctgtggcgataacgaaaaaaccacaaatatcgctcggagccagtgctgactttttccagtgttgggagagcgatggagtgactggtgtacactgtcatcttgttaggaattcatcagatacttgatgcgcgacagatagaaagagctctaatttctggcgatgtcaaacgctgatctgcagctgactttgtaggcgtcgattgccgtcactgtatgtgcgccatgggatactattcgacatgtgtaaaatgttcgttggggtgcactttcggacagtactcgtgcgtagtacttgctcgctagtagtaacaggtcttgagtttatccttgtagcagcatccttgtatgttgtgaaccc

SEQ ID NO: 23816 - DNA, 889 bp, Zea mays
  Clone ID: MRT4577_121726C.1
ctcatccatcgctggatttttccacggccgctgccttctagcttctcccgcccacgctcacgtctctcactccctccccttctccctgctacgcgcgtcggcctcctgcgcgctgagctccctggtgctcgcccctctccagccgagctcctccccgtctccttcctcttcctccagctgccttcccatggtgtgccccgagctcctccccaccatggcgctcgtcggccgtgcagctcggccccgcccgtccgcgctcttccttgccccagcccctgctcatcgtccgcgcacgcgccctgctccttgcgcgcccggccccagctccctctgcccggccgccgtcgagttccctgcgcgtgctccatctccctccgcgcggccccggctcggccttctccgcagcgcccgaccggagctccctggctcgcccctgcgctcgccactacccctgagccggtcatccccgccgtgagtccctcccggctcggcagcaacgccagcgaacttggtccctgcgtcctccctgctgtcgcgtccatggcgcccatctcggatttttgcttggttgcccgctgtttcccagtgtcgtggtctcgcccagccgcgtcctgtcaaggttgttcctgcacgcacgccctagtacccctgctcgctgtcgggccaaccgtcagcagctccccgacctctgtcgtgctcggcagcaagtacttcatgtcggagcagcggctgcgacgccctcctttgcgtcgtgctcgcagatcgggcctcgcgttgtcgatctgcgcagttcagttcggcatcggttctgcctcgatcgatctcctatttgccatgggcgcgagctcttcacacggccaccccccgtgtcgttgtccgtcgctcgctt

SEQ ID NO: 23817 - DNA, 267 bp, Zea mays
  Clone ID: MRT4577_121727C.1
ggcggaatgaaccggggaaggtttggtcaaaccaccacgctcacaccattttggaacacaaaaaacagaaccacctggtgtgacctatatatggcacctactatccatttttattttaggcggagcccatgacacatacattggcgggttggcggatccaaaactacccaaagctccgctttgtttccgctgcaccccatgatgcattcattggcttgttggcgattacaagtaatagccgtttgtggcccatccacttaatttgga

SEQ ID NO: 23818 - DNA, 1033 bp, Zea mays
  Clone ID: MRT4577_121728C.1
ggcccctgttcccttacacaaataaccaacccagggataccgctggccagcttgttcccacaacacaaacaaccaacccgatgttccaatcagccacatcttatgttcgagagaaccgaagggcctctgtcgtctgggatcaagaggctggtcggtacgtgtcagttcctgcacagacaagaacgggaactggagccgacctgccagcaagaaacccacggttcttggcgaacccaagtggcgagccaagcagccatgtgaggggtgttgcacccggcaacacatcgtcctcagcaatgccgtcagggcagccttcggagaggctgacctactctgggcagtcgatattcttcggtggccccatgctgaacacccctagcctgggcgcccagaggaacgaggcaggcgcaagagcgcgtccggagggaagcagagatcctaatgcccagcagcgtgacatccggggtgagaaagcgaggacaggctccttgccagtatttgctcctgggacggtccagaggaacccgccctttgacaaatgacctgctcctgctcatgaagtttatctgaagtgcgatgatgccgttacgctggaacacccccagcctgaagagttggcagatagttagggctgctctactggggttgccagacgggcggacaaggcagccgttggattgaaggctgctgccctgctggcactaggcaggtgctaacgagaaccacaaatattgctcgcagtcagtgctgacatttttcagtgttgcgggggcgatggagtgactgacgcacactgtgtttgtgttaggagttcatcagatacttgatgcgcgacagataggaagagctaatttctggcgatgtcaaacgctgatttgcagctgactttgtagcgtcgattgtggtcactgtgtggtgtgtgtgtgccatgggatactagtagacatgtgtaaaatggttagtcgaggtgcactttcggacactgctcgtgcgtacttgcttgcttgctagtaacaggtcttgagtttattct

SEQ ID NO: 23819 - DNA, 649 bp, Zea mays
  Clone ID: MRT4577_121729C.1
agctagcaccttaacttatgcttgtcaagataatcgtgttcttcaaatttgtgatgttactggaaacaagaagaaggtggttatccttggaactggatgggctggtgcaagtttcttgagaaatattgacacatctttgtatgatgtccatgtggtatcacctcgcaattacttcaccttcactcctttgttgccaagtgtgacatgtggcacagtcgaagcacgtagtatcgtggagccaattcgcaatatcgtgagaaagcatttgaagttcgcttcgcaagttgcacaagctcatggttatgggccacgccattctgctctcttgtcgaatgtttcacagcaagttttggaaagtcacctacagaccagcgatttcctcgccatctgcttgccattcatggaagacaagcctgtatcatgtctcaatgtcaaagctctgttcagaacttccgcaggaatgccacgcagccctcaatcgtcgatcgctcttcgttgtgaactatctggttgcggacgaaccatgtacgccataacaagagtagcaattgggctttctgatcaatatcccaggctgagcatcgtttccttagcctttcaaccagcagctggaacctttccgccttcatccgtccctcaggtgtggtga

SEQ ID NO: 23820 - DNA, 370 bp, Zea mays
  Clone ID: MRT4577_12172C.1
gggcccctggagaagacccggccctgggcactggcttgttcttgttcatgtgggacttcctcaaggtcatattcaacatcctcaagaagaagatctacatctacttccccgtatccatactttgtgaccttgatccatctagtagagggtgacggatactgcctcatcagctggaggggaggtctacccaagctagcgcctatcaacgggacgctactgaagctggtcttttcagacgccctgtgccatgggattggacacatcattagcaacgtggccttcgctgctggtgcagcctcatttgcccacactatgaaaactttggagcccttcttcagggcagatgctactcagcatatgcttggacagc

SEQ ID NO: 23821 - DNA, 1496 bp, Zea mays
  Clone ID: MRT4577_121730C.1
gtgtgcaaatttttgttttttcatatcagatttaacattgtcaactgtaacaacacaagaatacgactgagcttcgtttgtagaacagaggtaaaatcacaacaaaattaaaaagggataaaaacgaaattgcaagagcttcggcacacccttgcgaggctgctcggggcgacctttcggtttgtcaggaattcaggatcatgtcttcgacgttgtgatgcaacgaaaaaaaaccttcgtgcccctggtgaccgattcaaatcctgaccttgtggacttgggcatgtacaagaacgagcaaattgcttcgtatcagtccatactcccgcacaaaccatctctgcttatccatttattttgcactcaagacaaacacgtataacagagtataaacccatcacaggatggcacatgtaatgggtgttcgagttttcgtgatcttccccaagctacaagacccaatttactaataccacagatgaggtctctaaagtccaggaattgattcgaggttgtatttctccgatgtcgtcagtccgttatccacccctggttgggttcttgattgctccagagcattcagcgtctgaaggtacgagtaggaggcattccgattgggaggcggggggcttggattgctgatcttgcttgccaggaagcgcctgatgagccctctgaggaatggagccattgtgtctggctcgtactccagaaaatacatgattcctcccatgcacatgcagaaaagagccacctcagcatttttaatatttgggagcaggtggcggttgatcaatatataccatagggaatctccagcacgtggaagcacatagagggctagctcagcccttctagctttcttttccaaaagaattgaaagacccgacatcaaaccagcaaaccaatacacaagtttgtggtctttgttcgcaacttttcggtgcaaacatatagcagcctggaatacagtgacgaaggcagacaaaaaggtggtggagcgaactgcacccacaagagcacgccaacaagttgtcgttggcgattccaagaacttttgaagacgtaggacaacaaagggcacaaatgtcaatgagaaatatagagggaatgtcttcttgaatgttgatgaaacaacattaacattttgagccaagcatgatgctctgtcagggtggatcacagaacatgggataatggatggatttgttgttaaatttatcaaatccggattcctcttgtttgataaatgggctgagagggcagttagatccacaggaccacctctgcagcattctttgacaaccttgtagacaggttctgctactggtcctgtcttaaggataaattcttggtacgacttaggtaagctttcaggcctcataacaaaagcatacataacctgggcacatgctaatgaaaaaagcaatgcatctccatgtctccaatgacttccccaaaaagaaattgttcttaggacccggcccggccggcct

SEQ ID NO: 23822 - DNA, 920 bp, Zea mays
  Clone ID: MRT4577_121731C.1
cctcgaggccggccggggatgcatcgaaggcaccagccaacgctgtttcttcatcccaacgtcttcctcgcagcgccgccgctccatcttccgctctctcacttattactcgcgttcggcacgcgggcgacggcggcggcgctcaggctctcagcgacggcgcacaggctctggctctcagcgacggcgtcaacggcttcccctcccgcctctcgccagtcgcctcgctccctcgcctccggtcctccgcacaccgtccgttgatcctgcctcttctggttagatagatggaggtgccaatgaactctacgcaatctggtcctcacttccctgtgcagcatcggtccctctcattagacatcaagggaaataaaacagatattgttatcagtaaatatgaagatacctttctggtgattgtggcacaaatcggctgcatgggaaccatactagctgccaagaaagacgaaagtgttttctcggacccaacctacaatgtgtctgttctttttgggaagagaaatgagccactcctacaagcttgcgcacgtcaacttattgagcacataagtggcagtggctcagctcggtcattggttatttctctgggtctgaaagatcattctcagggaacactgaaggatatcattgtagctgtgatcgagaatcgcctttggtgatgattgaataactgagctgggcatgggattgacatattcagcccatcgataaagatattgcttagcattgcgcaagaggagccatcgtttatacatgcactaaattctggtagttttgtagttggaccttctatctacttggattaacaaaaggtggttttaagctggtgtcaaaatttgagtgtcaactttcacgctaaacaaaaggcactgtacactggtaaagcacttctgaggcga

SEQ ID NO: 23823 - DNA, 1124 bp, Zea mays
  Clone ID: MRT4577_121732C.1
ggggtcgcagccgccgacacccagtcgcccaccgacccgcccccaaccttggagctgctgtgccccggccgtccgtctcttgccagagctccgccaccgcccgccgatcagagctccgcctccgagacgacgcgccgagctctttcccggcagctgctcgcccgcgccgatcttttcttcggcagccgcgcgcccgcgccgagcccctccccgtccccggcagccgctcgccagcgccgagctcctccccgcggatccgcctctgctcagtctgagctccggccagccgcgagctccgtcgaggcgtcgacgccgaggcccagctccgcccgtgagtgcctgtgccggattcagcaaacagaaatttgctctgctggttagatagatggaggtgccaatgaacactacgcaatctggtcctcacttccctgtgcagcatcggtccctctcgttagacgtcaggggaaataaaacagaaaattacccccatgcatatgaagatacctttctggtgattgtgacacaaatcggctgcatgggaaccatactagctgccaagaaagatgaaagttttttctccgacccaacctacaatgtgtatgttctttttgggaagagagatgagccactcctactagcttgcgcacgtcaacttattgggcacataagtggcagtggctcagcccggtcattggtgatttctctgggtctgaaagatcattctcagtggcagtggctcagcccggtcattggtgatttctctgggtctgaaagatcattctcagggaacgctgaaggatattactgtagctgtgatcgagaatcgcctttggtgatgattgaatagctgagctgggcatgggaacgctgaaagatactgtttagcattgcgcaaaaggaggcatcgtttataccatgcactaaattctggtagttttgtagttggaccttctatctacttggattaacaaaatgtggttttaagctgttgtcgaaaaaaaaaaaaaaaaaaaaaaaaaaaaaaaaaaataaaaacaaaaataaaaagggtccatatattagctattacaaaactatacaatattgtttggggcggccgttttaatggatccatagtttactga

SEQ ID NO: 23824 - DNA, 919 bp, Zea mays
  Clone ID: MRT4577_121733C.1
ggcttcccctcccgcctctcgccagtcgcctcgctccctcgcctccggtcctccgcacaccgtccgttgatcctgcgtgcgtgcctctctctctcctcccgcctccggtggatcgtcaatggcgctcggacggcaatgggagccagcagccgctgctccaccaaggcggtcggctgctttgggagcgcttatgcccgaaatcgaagcgttacccggcctcttagcgcttcagcgcgctgaagcgtgcgcttagtgccgccatttggaaccctggttacaaccatgctcttctggttagatagatggaggtgccaatgaactctacgcaatctggtcctcacttccctgtgcagcatcagtccctctcattagacatcaagggaaataaaacagatattgttatcagtaaatatgaagatacctttctgctgattgtggcacaaatcggctgcatgggaaccatactagctgccaagaaagacgaaagtgttttctcggacccaacctacaatgtgtctgttctttttgggaagagaaatgagccactcctacaagcttgcgcacgtcaacttattgagcacataagtggcagtggctcagctcggtcattggttatttctctgggtctgaaagatcattctcagggaacactgaaggatatcattgtagctgtgatcgagaatcgcctttggtgatgattgaataactgagctgggcatgggattgacatattcagcccatcgataaagatattgcttagcattgcgcaagaggagccatcgtttataccatgcactaaattctggtagttttgtagttagaccttctatctacttggattaacaaaaggtgggctttaagctgctgtcaaaatttgagtgtcagctctcacgctaaacaaaaggcactgtatgctggt

SEQ ID NO: 23825 - DNA, 312 bp, Zea mays
  Clone ID: MRT4577_121734C.1
aaaaccgccaatcctcatggatacatacggttgccaaaactttacccaccagacaaaaaatggagggatggccttacaggacatgtttctacactgcggcggggattacacttctcatttcatgtactggccttaccgaattgcgagttgacctggctccattacggtgactgaaaaatgctaaagtctattacaacagtctgggaactatgacccacacttccgtgagtgcacgccatgagctaaggacttacttccacctgcaagcacaactttgctgctgccacagctgctgactagccaaccaaagtt

SEQ ID NO: 23826 - DNA, 357 bp, Zea mays
  Clone ID: MRT4577_121735C.1
acccacgcgtccgtgctctccagacactagaccagccagtgactcagcaggctatgcctccttgatacctttggagttcgagggctcaaggcgcatagaagataccacacgcctaactgggccgaaccatctcctgagccactgacggcgggttctgctccatcgcccgcgcccgctgcgcgtcctgttttaagctactatactcttggggcggtcaggtgcgaccaggacaacgagacgattacgatatatgtttccgttgagggagttgatcatgagacggtggagactactttcaagccaacgtcattggctataaagcaccatgatgtggaaggctacacttaccggcgtgct

SEQ ID NO: 23827 - DNA, 566 bp, Zea mays
  Clone ID: MRT4577_121736C.1
gttaaacatgttctattatattattattacgaggggaaagaagaaaaaaaatcatatttttgtcccacaccagcagcatgcccagcagggtcccactcgtccgactccgatgcatccattcctacccgtggggacaagccacgagcgagacgcgaccccacatcccacagacccacacggtctttgcttcccggaaccggaacccccacgtcgccgcctcgtctgaccggtcaaaccgcacgagctttgacgtatacagcagccatacacacacctctgcgtcaaactcctcccttccgagaagcatcccgtttccaagacgttcacgttcagttcatcctctgagcccgctgacattttggtcccacatgacttcgtccccaccagtaagtgaagccattgcttaataagcgcccccacactagccgcggctggcaattcaccgcgcgactaccggccgtttaaacggcaccccaaccaccgagcaaccactcccggtagccactcctctaccggtgacgcacgcaccccatctctgatctgatctgatctcttcccctggatct

SEQ ID NO: 23828 - DNA, 362 bp, Zea mays
  Clone ID: MRT4577_121737C.1
tgctgccgttcacgacgatgagccggtcaccaagagtaacgccgaacacaccgttggaggagttatttagaatctcactagggccgtttaacggacgtcctaaatcttcggcgtaataagccatacgggacgtaccggaaaggataagcccggcgaggaaacgaagaaaaatgtctaagtcgtaggagccatcgtctaccatcatgaggacgagatcgtcttcatcggtatacgcgtcgcacgcgccgccggcggcgaaaggctaccgaccgtaaactcgctagtggtaaatcgccataaactcgagtactcaaagagattagagaatcgggtatcagccgaaaaggtaaaacatactcata

SEQ ID NO: 23829 - DNA, 578 bp, Zea mays
  unsure (1)..(578): unsure at all n locations
  Clone ID: MRT4577_121738C.1
atccggagccgcccagtgcaattcggcacgaggccgattcccaacccctccgtccgcccaaggggcgccgcaccatctccagcctccaggcctcgatccctaccggaccccgtggccctgctgtgttatctggctggagatccggccggagtggcattcctgctctcggtcaataagtattctggaatgtttttccgagctcaaatagagaacttctggagctggatatcagtattctgttagggatatgctccaaccaagggaagctgatgtgcctgcactctttcttgtcttcattgtacttcccgtggtagcttattttcttcttgggagatggcatgactctgcaagtaagaaggcaagggcaagtgtgcttgcacagcgagctgcagaagaagcctatagagaggaaacgatggcgtgcccagacattattccgccaggcccttccttgagaactatgccctatttcaaacctgcgccttcgttaagacaggaataccatgagtgtgcaacttgccatgcccctngcaagactcgttgctccagatgcaagtctgttagatactgctctggga

SEQ ID NO: 23830 - DNA, 142 bp, Zea mays
  Clone ID: MRT4577_121739C.1
gtaacgaggaggttactggcggaatttaataaggaggcattcggatatttcatgtttctgctcagcacacgtgctgaaggacttgggctgaacttgcatacggcggtgcactgtaattatgttcgattgtgactggaaccct

SEQ ID NO: 23831 - DNA, 389 bp, Zea mays
  Clone ID: MRT4577_12173C.1
aagaggcaggggccacaacaaatttatggggtggttgatataatttgggttccgccacctaaacacaaaaatggtcaagggcgtatgtttaaaacccagggtaactgctggatccccaggttcaaaccttttaagaaaaaatacttatcaccccttcacaatggtgtatctgttgccccccaggttggaaaagcaacagaagatgccccactgggtgggatcctgggctccccagagaaaatgtgtgcctttcccccacattgggaacccaatgttgttttacaccgtgtacactaatgcttgtaagactgtatacccgctttttgaggaatatatgccagggatgggggtcctcgctgggggtggggggggcatattattattttttg

SEQ ID NO: 23832 - DNA, 346 bp, Zea mays
  Clone ID: MRT4577_121740C.1
gcgcccacgcgtccggtttaccccaacgtcaacagcgtcagcgccggcctgttcctgaactagaggttcaaggggccgaccaacaacctcgccgacggcggctaccacatgtacaaggacatgctggagtggattgggcggtcggcgaagaacgtgccccggcagccgacgcaatcgctgcgggtgtccatctccaagaagctacgggcgtacgtggaggacaagtacagccgcgccggcgtggagaagggcaagtacgtagtcgtccactgcatcgcatacgattccgtcgacagcatgccgtacagaggcgacgactactggcttcttcactctagcactgggc

SEQ ID NO: 23833 - DNA, 429 bp, Zea mays
  Clone ID: MRT4577_121741C.1
gaacgaacagcagccacccttctccattaaataaaagggagggaatctctataaagaagccgccgaaacaatttggcaggaccgagtcggataatatatatccgggggcatccaacaacttgcatgggggggggcttggccaccctttgcgcatctaaatataattttggcaagaacaggtgaagcctgacccccaatcgaacccttaataagtttttggtttagaccaccttgtttgattggccgcccccttttcatatcaaccggacgacggccccggggccggtgccggagccggggcatcggattccgtatcagccaacttcatgtccgggaaaacaacccggcctttgaactcggggctgttgccttcaatggagcccactacccttccaaggacgtgtatgtctttcttgagcacggaggcct

SEQ ID NO: 23834 - DNA, 310 bp, Zea mays
  Clone ID: MRT4577_121742C.1
aagacgacttgtttcattgattcttgaagagatcgagcttcttttgcaccacaaggtggaggatgtcttgcaactgcggatcaagctgcagctgctgctcaagctgcaagcgcggcaagaagtaccctgacctggaggagacgagcaccgacgggcaggccaccgtcgagctcagcttgtcccccgagaagaaaggcacgcccgagttcctcgatgcctccaaagagttcatgcagggctgccactcctggcgcttgtgtagcagctgcaagtgcgacccccagaactgctgatcacatggaacgacgac

SEQ ID NO: 23835 - DNA, 557 bp, Zea mays
  Clone ID: MRT4577_121743C.1
gcggtgaggcagtacaacagatccaagcttccccggctccggtggactccggacctgcatatggcatttgtccacgccgtggagaggctgggcgggcaagagagagcaacgccaaagctggtgcttcagacgatgaacgtgagggggatcaccattgctcatgtaaaaagtcacttgcagatgtacaggagcaagaagctggaccaagagtccgctggacacgagagagcagcaacctcctccgttttctcgcccatggacttccacatgatgaggacaggggaccatcatcgctaccatgacatgttcctccatcgacctgcagctggctcggccatctcttcgcggctgctccacggtggggagttcttcgggtcacgaaacgccgccgtctcgccggaggccagaaggctctacgagctcctcctacgccggcagcctaccatgcaaacgttcgacttcaagggctacagtagtggtagtggcctcagggatcaagagtggagattcagccagcatgcagcggcgacagcaagggctgtgtccatcaatgacca

SEQ ID NO: 23836 - DNA, 396 bp, Zea mays
  Clone ID: MRT4577_121744C.1
taacacgacagggtggacaggctgagattttatttaaggaccaagaccacccagagcataggtcttttacattcagacattgttggcatgtgttgagaaaccaacccaaatggcttgacaaactgtgtcaattggcggaggtaaaagcaagtaacaaaaaacagaagaccaccaaaaattcaagccctggaattgttgatcttaccactcaggatggccatgataaagaccctcaagagattgtcaactcatcaatggatgcaccaaagagaccacctggtaagaagaaagcaaaagaagcattgcgtcgaggtggcaatgatgctggcacagaagcattggaacttctttgggcaaagaaaagagaggatgaggtagccaaggaactcaagagag

SEQ ID NO: 23837 - DNA, 432 bp, Zea mays
  Clone ID: MRT4577_121745C.1
atcaaccgcagccaccgtggcttccgaagggccatccagaccaaaggcatcaagttcgaaggggtccacaagggggggctctttaagaccgaccgggtcctgggcacagcccagctgaaactggatgccctggagacggcatgtgaggtccgagaggtccttgaggtcctggatggtcgcaggcccacaggggggcggctggaggtgatggttcggattcgcgagccactgacggcccagcagctggagaccacgactgagaggtggctggtcatcgaccccgtgccagcatctgtgcccacacaggttgttgggcccaaagggaaggctcctcccatacctgctcctacgagggagccagggaacagatcagcacggcccctgcatagtctcagtgtgctggccttcgaccaagagcgtctggagcggaag

SEQ ID NO: 23838 - DNA, 372 bp, Zea mays
  Clone ID: MRT4577_121746C.1
ggggggggggggaaaaacatttccccttttaggtggtttctaccaatgctttgtttataaatcaaaaactaaagaaaaaaaactccttaacgcttttggaaaacgcctccctttaagtttttttggcctattcccaccatatttttttccccctttttttaaacgaggaggttttttttttttttttggccgttttttttttccccctttttttttttttttgcacccctttttatgtccccggttattttaatttgcggggtaaaaaattggggtcccgcaaacaatttttttggggggggtctatggccctttaattttgcgcccgttcctttggggggtcccttttttttcttttggggtgtttttaaa

SEQ ID NO: 23839 - DNA, 1218 bp, Zea mays
  Clone ID: MRT4577_121747C.1
atggcgcgtcaaccagcaagggaagcaaaggcagtggaggacttcagaggactaacagttgcatacaaagctggaaaatttcagtgtggaaagggccctcagctaatttattttcatcaagtgatcaacatcacagggcaaattagatggaggggagcccgcacctcccgcgaagcggcatcacctgatgctgctgcgggaacgcgacttgttgagctggaactcggcaactgcgagtctctccatggcggtgtctctgcagctggagggcaggctctgcaggtagcggaggtccgaccggatccatgggggatcgccgggacggcgacgagtccgactggatccatgggggattgcatcgcgaggcgcgatttgccggcgaggatggtgtcgctgatggaaggggactgcagggagcggggcttcgtgaaggagagtggggcacacgcgaggatggagggggcgccgcgatgcgatattgccgagggggagcgccgcgatgtgggattgcgccgccgcgccggggggagggcgagggcgggcgcttgccgaggagaggagaccgcggcgaggaggggaggcgaggggagatcgcggcagggaggggatctcgccggcctgcgcgggcagggagcggggcttcgtgaaggagagcggggcacacgcgaggatggaggggcgccgcgatgcgagattgccgagggggagcgccgtgatgcaggattgcgtcaccgcgccggggggagggcgaggctttccgtgcttccacccccgaccttgatgaggctctcccattgcgagagccactgcgccggtcccttccgcctcatcccctgcctcccccaatccaaagatgcgagccgcgacgctgccgccgcctctccgccggctccgcgcccagccgctgtcgccgaggaggagccgcctccggttcagaaggtagaggcgccggtagccgccggaagggacgacgacgctgagaagcgcgaggatgtggagaaggcgccggcgctgggtaagagttgcctgaagaaaaccagctgcggcgatgacgagtgcgccgacaaaggcaatgtaaagtggctggatttgatcgggaaagatctggcagagattaaggagtacgagccaagcgaaggcggagacttgcttgacgacggagacggcatctcgacatggtgttgcgctatccaaatgagtcagaaggaccccgctcat

SEQ ID NO: 23840 - DNA, 169 bp, Zea mays
  Clone ID: MRT4577_121748C.1
gaatcagtctagcaagcccggttttttttattattcgtttaatcagagtaaaagcacgggcttgatgggcggaggttttacactttccgattatgggggctaaaaacataaaccagaaatttccccagaggacccctctttccctatggggggaaaggattatatagag

SEQ ID NO: 23841 - DNA, 534 bp, Zea mays
  Clone ID: MRT4577_12174C.1
tgccgaattatggcaaaggcttgaaaaaatgacattgactactgatcaaaaactgatagttgggacatttctagcatcaaaggatcaaaagggcatgcgtggttttttatccgcttcagctgaaacaacatttcagtcatgggtattcaagtttttgagtgattcaacactactgtgaagtgattaggctcaaccaggtactcttttgtggatggaagggtggtgttgttggctggctgttttggtgtgaattccttaggtggttgcctgttattttgctcagtggccaggtgatgtttatggcggtggtgatgcctgattcttttgcacgtcttttaagctgatcaataaggcttaaggagatggatggtgctgctcatagctgaatgtttagccccattatatatacatatttgtgtgtgtattgtaatagcaactacctcagactgtttcgaatctattttagacctattaatcagctgtaatgaacatgttgtggagctattatgaactgattattagcttatcatgcgc

SEQ ID NO: 23842 - DNA, 618 bp, Zea mays
  unsure (1)..(618): unsure at all n locations
  Clone ID: MRT4577_121750C.1
gtccacactgccttaagattgtggaatagctttacaatctttagttcacacaaaaaagatacctgtggagacagctttcacggtttacatgcatgctcactattatgattacgcaatcccaaaatctagcccttggataatcaccacccgaacactacctaccccctttgcagtatctgcctgatctcatggttctgttttgctgatttctgaatgtatagtatgcgctaaatttaacccacttactcaaatgtcactgccttaagatttctgatgtcaaagtggagttcgagtccaagtcgatgacacaagatcaaaccaacccagattcgccgaggtgtagattggatcttataaagcttgaacggaggacattagagccaccgaaagatccgggacaaatccaaaattcatgattttattggcgatgaatatcagtgtgcgaaagatgactgcttctgctggtgcaaaactcatggttgccatcaactttctggtgatcatcgcgacttcccctatctggggtgctgctcagcgacgataggtgttgnccagaactccaaatagagcacatcaataatggtatccccgccgagctcgtccagtaaagcctgcttc

SEQ ID NO: 23843 - DNA, 321 bp, Zea mays
  Clone ID: MRT4577_121751C.1
gatggcaatgcacccccacccggtgctcttatcactattagcgcagaaaggcctccaatacataagaactcggacgcaaatatacgatgataatcgatagatcgacagttcgagagtggatctttgcgcttcgtggagccactcgtatatttttacaaaagatgttgaagagttgccacacattgcgaaaaagaggaaaatggagagatctcacactgaacgtgaaaaggataagggaaaagagaaagaacgcaatgaggagcatgaaccgcgtcctggtggcgaaccagcagagggaacaccatgacatacaaaaagaac

SEQ ID NO: 23844 - DNA, 191 bp, Zea mays
  Clone ID: MRT4577_121752C.1
gatcgagacaggccaggctgagagacaggacgacaccgcagggtgcaagcgacaccgcctccagcatggaggtcagcgtcacacccagacgcacggagacaaaaacacgggcggcgggcacgcagcacgcaccacccgagaaagggcgacagaccagggaacgcacgtccgccgagcagaagaggcaaacc

SEQ ID NO: 23845 - DNA, 725 bp, Zea mays
  Clone ID: MRT4577_121753C.1
actaacaaacaaatatattgaagtctagaatattggtgctgttgcgttacagggctttggttctggctccaccactccttgtgcacatggtaaaacaacaaaagtggtgactgatgaggtactcctgttattggtatatccgtatatgattatatatataacattaatatactatgccttacggggctatcagtattagggtaacagccccatctcatccatgcactacagcactagtaccaggcatctacctctgtcgactcgactatacaagtatacaacagtgttttcgcggatcccatgtagtcctacgggcgcacgcataaaacaatataaccgtaagtgaagcagcgttcctatcgagaatcacgcaaggacagagcatgcattgcggtaacagagacgcgacgcatcgcaagggggatcgcaattacgagtcgttgtcccgcggcaagtggagcttggcctcctcctgcttcggtacagtcgcggcggcagcgtttccttcctccttaacccggtgttgctccgacgtcggggcgggggtggcggcggcggtagcagcagcagctgctgcttctagcggcgggacaggggcggcaccggcggtgcgcagccacggggaggaagccatcggttgcgcagtgatacggaggccggtctgccgcgaggccggcgctgggaaatttttgctggtgaattgataggacataggtgccgaattt

SEQ ID NO: 23846 - DNA, 523 bp, Zea mays
  Clone ID: MRT4577_121754C.1
aaaaaggggggataaggttctaaaatgatagttatggggcttacagtagttacgtacccaatcgacaggttcactacctttttatatagcacatcattagggcaattcaagagctagggatcgcttaaacatataaagaactaaaaaggttccagcagttgagttatatggacacaaaaacattcggggcccaaaagtgacgatgctcgtcataaacatgcaaaacaattccctttggaggggattcaagagagtttgtaaaatcattggtgatggggggcccaactttatgtggttgttgggaaaaaatggtcttagtattcttgggcccaactttatcttgaactgtgtcggtttcagttacctggagagttaacccgggtctatatataaaaaatgcgttacccatgaagtggtaatgctaaaaaacagggatatgtatactatgtgtaaaaaagagggcgaagtaaaatggaaatactctggggggggttttttgatatgccgggggggctaataatct

SEQ ID NO: 23847 - DNA, 652 bp, Zea mays
  Clone ID: MRT4577_121755C.1
gccggccggtccgggacctctctctctctgacgcctctggtagttctccctcagccggcactccgcctcccattccatccccactctgtcccttccatacctgccgctcgcgccgcctctgctgccatccccaaaactcgcactgctctgcggctggtccggtaatcgatgtctgtttcgacacaaaatactcttgctaccgaagactgggatgacgccgtgttgagactttctgccttcattggagacaacgaagctgagcctcccacatccccttccccttttccgagtggctcatctgaaatgctcttgaaaagcctcccgaccttcaccccatcaacaccggctttgatggcaaagagttcattactccactatgttagaagatgtccctgctcatagatgatatttcggtgtggcccttctgaggcttttcaggttccggggacaagtcaatgagagaacctgcgcacgcaagaggaggataacactttgctaccgaagatagctcctctatgtgtcacttcttcaggcgagagatcccttgaggttaccctagctacactatcaataatgctgttagcacccaccctctctatttcatccactcggaacgttggcgcaccaagaatactgtctggattgctaacct

SEQ ID NO: 23848 - DNA, 162 bp, Zea mays
  Clone ID: MRT4577_121756C.1
ttgttcggtctcatctccatcgtcaaccacatgaggacccttctacagatcgagcagaagggcctctcccaggtgcacatagatgctgtactagaccatgcatcacctcacccacggccatcttgaccggcattcatacgcccatgcacatttgtgcttctt

SEQ ID NO: 23849 - DNA, 702 bp, Zea mays
  Clone ID: MRT4577_121757C.1
ctgtctgaaccctagtaggacaccaggcgagcggcggcggcggcggcgtggttagccatgtcttctcttctcagcccaccaaagccagaaatcgagttcaaagaggcggaggggaaggaggaaagaagatggaaagcgagtccgctatggggacggagggggaatccggcaaggagcaggatttgctgttggatccggggaggaaactcgggaagatggaaatcgagttagggaagtggacggagcaggcttccggcaaggagcaggagacggtgcgggatctgaagaagaggcacaggaaactcagtaagaatcgtaggtacctcttgcaagatatcgtctcagggaagtttaaggaattgtattccgattccggccgcaacagggtaatggggattttcagggaagccgaggagctggacaaggagttgatgattattaaggagaaggagaaggagaagcaggagacggtggtggattccggcgaggaggagatgggcagggattcggcgcggcaccagtccctgatggaggggcaactcaggaaggagcaggagagactcaggaaggttcggtaccaactcaagaagaagatgaggagcgagtccgacaaggacccggcgatgcagaggatgctcttgagtcagcagcagatactctggaccaaggagcaagcactcttgacggtgatgaggcagtccg

SEQ ID NO: 23850 - DNA, 341 bp, Zea mays
  unsure (1)..(341): unsure at all n locations
  Clone ID: MRT4577_121758C.1
ggtaacttatataaatatatgcctgccttaaattaaggttcttacaaaatattccctccgttcttttttatttatcgcgggctgggggggaaataaactantggaccacaaatattcaaaaacttatgcantacttaccaaaaaaacaacctgcttaaacctaatgattatttacagcaggggccaaatgggnactactttggccggatgctgatcaaattaggcagcattgttgctcaaaacttcctgagggggtttgccgncacccggtttttttttaaaaacagggaacgcaggttgggcaggncattcaggngtttgaggccaacattggacacccg

SEQ ID NO: 23851 - DNA, 857 bp, Zea mays
  Clone ID: MRT4577_121759C.1
tctcggccatgaacaagctgaaaaatatggctctcagggagaatccagccgctcaaaaccggccgctctgtcctgattgcctggtgcttgtttgcattgccgccattctgggcagagaacgagcagggcatattcgaagaggttttgcacgggaggctcgacttcgacgcggagccatggcccagcgtctccgaaggcgccaaggatcttgtgaggagaatgctcatcagggacccgaggaagagactgaccgctcatgaagttctacgttggtggtttggctcctgacaagccgctggactcggctgttctttctcgcatgaagcagttctcggccatgaacaagctgaaaaatatggctctcaggtgtgaaaagtagcgctcagaagtcacttctgcacctttctgagcatcttgaagtttcgtcgccggcggcaacaacctgtctgtagcgattcgacgttcatgagcgccatgatacggtggactctgacattctcacgaaaggtgacaataatcccggggatgaccgagtcctgtatgcacatgggcagctttggctgcagcgacagcacatcattggacgggctgttggctatctgccttatgctgggtggcttacaatcgtcatgacggagaaaccagtcctcaagtatctgctaattggtgcactggggctgctggtggtagcatctaaggagtgacgttaaaggtaggatggatgaacagtgagaagagtatgcggagaggagaaaagctgtagagaaacacaattgttatgttgaagaaagctgtattgcatacatgatacaatgttgaagtacaagtatatataatatctcatcctgtgttaaact

SEQ ID NO: 23852 - DNA, 1292 bp, Zea mays
  unsure (1)..(1292): unsure at all n locations
  Clone ID: MRT4577_12175C.1
cggtcggcagccgggtcgagnacgcgtccggccggatgacctcgcacaggcagaggcaggaaacaagccaacgcccaacggcagcccgagaaaacctttccaagccagcaggcaacagcgcaccaatcccgacgcgaatcgcccagaacgcgaggcggaatttcccatcctcttggacccccctctgctcttcctccttcccccgctcctcgtccacacgctccgctccgattccgcccgcgtccgcggacccagatccggcgcccgcgcccatggcgacgcgcaggcgaatgctcctcaaggtcatcatcctcggcgacagcggggtcggcaagacctcgctgatgaaccagtacgtcaacaacaggttcagcaaccagtacaaggccaccatcggcgcggatttcctcaccaaggaggtccagatcgacgaccgcctcttcacactgcagatatgggatacggcaggacaggagcggtttcaaagtcttggtgtggcattttataggggagctgactgctgtgttcttgtatatgatgtcaacgtatccaagtcatttgaaaagctcaacaactggcgtgaggaattcctaattcaagccagcccatcagacccagagaatttcccatttgttgtgcttggtaacaagatcgatgttgatggtggtaacagccggactgtttctgagaagaaggctaaagcatggtgtgcttcaaagggaaacatcccctactttgagacgtcggctaaagagggcttcaatgtagaggctgcatttgagtgtatagcgaggaatgctgtaaaaaatgagccagaagaagatatgtatcttcctgatacgattgatgttgggggcgctggaaggcaacagcgttcgtcaggttgtgaatgctagaagatatggagcactgcgaattgctcggttggttggtctgattctctagggcttgttgtttgggtggcctgtgtcatcatttcatatatgtatttagtttgcaaaactgctatttgtggacactggatagtttggaagtctgcatgcgggtgcttattgtcgactcccgtgtagatgcagagaactcatttgtaactgccgtttcggtgttgtatcgtatctgcgctagatgctagtgttgtaacgcttttgattgttgatggattgcatatatgtactgtatttgtacatgaacagaacgtagtgcccattttcatagtgttcaaaaaccaaaaaaaaaaaaaaaaaaatatgctcgagactagttctctctcgtgccgaattcctgcagcccgg

SEQ ID NO: 23853 - DNA, 328 bp, Zea mays
  Clone ID: MRT4577_121760C.1
cagagtcgcgaacaaagtactaatttatttcaaggtagcctaaaacatcaaacagggaactttttaaaagatcagtaactcactaagaaatctaaaagagggcaccaccaatgatgggtagttggttataacactgctgggtttgtcaaagcaagttggttaaatggcaacaattgttgcagttgtaagagggtgccagcgtttggcgcagcgtgctgatagatcggcaacaactgtggttgaatcaagaaggcagttgggctcacaccagctagctggctaatgataatagttattgcttgctgtaaataagctggagagatcaatg

SEQ ID NO: 23854 - DNA, 1114 bp, Zea mays
  Clone ID: MRT4577_121761C.1
gatgctgttctcggccatgaacaagctgaaaaagatggctctcagggagaatccagccgctcaaaaccggccgctctgtcctgattgcctggtgcttgtttgcattgccgccattctgggcagagaacgagcagggcatattcgaagaggttttgcacgggaggctcgacttcgacgcggagccatggcccagcgtctccgaaggcgccaaggatcttgtgaggagaatgctcatcagggacccgaggaagagactgaccgctcatgaagttctacgttggtggtttggctcctgacaagccgctggactcggctgttctttctcgcatgaagcagttctcggccatgaacaagctgaaaaatatggctctcaggtgtgaaaagtagcgctcagaagtcacttctgcacctttctgagcatcttgaagtttcgtcgccggcggcaacaacctgtcatcggctgatcactacgtcgataaaggattgtagggagtgagtcggttgtggtggaagcatgggcgggtcgaaagggtgatgtctgtttctgcacatgaataaggaccctgtccgcacaggagacatagttgttttcaatgtcgagggccgtgatattccaattgtccatcgtgtgatcaaggttcatgagcgccatgatacggtggactctgacattctcacgaaaggtgacaataatcccggggatgaccgagtcctgtacgcacatgggcagctttggctgcagcgacagcacatcattggacgggctgttggctatctgccttatgctgggtggcttacaatcgtcatgacggagaaaccagtcctcaagtatctgctaattggtgcactggggctgctggtggtagcatccaaggagtgacgttaaaggtaggatcgatgaacagtgagaagagtatgcggagaggagaaaagctgtagagaaacacaattgttatgttgaagaaagctgtattgcatacatgatacaatgttggagtacaagtatatataatatctcatcctgtgttaaactatactgcatgtatgacatgattgattgtcttgcaaccagaatatgatcaggatccacgacctagatttattggtgttgtgg

SEQ ID NO: 23855 - DNA, 275 bp, Zea mays
  Clone ID: MRT4577_121762C.1
acagtggatatggttctgaagattgcaaattgggaagatcctactgttcacactgtcctcttttgattctgacggggggagactgggaaaaaccggaagagcggacaaaccccccggcccccccgcccctggggtgtgggtgaacagataaaacgggggaaaatctgggtccccccaaccctgcggcataaggtggctcgggggggtcttaaaagcagggaaccccaggggagatggtagtgcccctacttgaaatctggcctgtgggggcggag

SEQ ID NO: 23856 - DNA, 296 bp, Zea mays
  Clone ID: MRT4577_121763C.1
gaataaaaaaaaaaaaaaaaaaaaaaaaaaaaaaaaaaaaaaaaaaaaaaaaaaaaaaaagaaaaaaaaaagaaataaggtaaaaagggggcccttttttaaattacctaccttactttctctaccatccaaaatcataattctcttatattgccacataaatttaatccactggccatttttttataaccctcttacttgaaaaaccatatttttccccaaattaatctttcttaaacaaatccaactttaaccaactatggtaataacaaattttccccaacctaacccccttc

SEQ ID NO: 23857 - DNA, 306 bp, Zea mays
  unsure (1)..(306): unsure at all n locations
  Clone ID: MRT4577_121764C.1
cttggactcctctagagcggccgtcctttttttttnataatttccgaaacgttgtcttacttaattggggggtatttttataatatgtgaacgaccacgggatgaggaataagtatacagggaggggtgccaaatggataccggagtgcgcatccacagatgggtccaccccgaacatggcgccatagcaaaaaaaccagatgccggaagataccccggggcatcgcaagatacaaagttgcgcgcccacggggggggacaaagaacttcacgacctaaaccagactgcagacaaaacaagcgttt

SEQ ID NO: 23858 - DNA, 272 bp, Zea mays
  Clone ID: MRT4577_121765C.1
gaaagaattgtctaataaggtgaataagaacaccactgactacaacaattacaataagatctacaaaactatcggccaacctgtggaaaacgagctaaaagagcaactaaaagagaatgtgctattgaatcacctccagaagatcttgaatagtaatagcactgggaatggtgagactagtgactacagtgtcaactgccagaagattaagctgaaacaaagacttggcgtatgaatgtcaaaagcaatatcgatcgattgaatggtcaatg

SEQ ID NO: 23859 - DNA, 206 bp, Zea mays
  Clone ID: MRT4577_121766C.1
cttctggctaaaggagcagccgtctcttgttggaaggtcacatcatgtgtctcttaagacgcggtacaaagatcagtaccacgagccgtctaccaaaaggaggaagctcccattcaaaaagtgcatctgcacaccaacaatgcttgatctatttacttcgcatcatgactccctgcattttagctaccgacaaccctattggccta

SEQ ID NO: 23860 - DNA, 976 bp, Zea mays
  Clone ID: MRT4577_121767C.1
cgcggcaggatgtggccgtaactgaaaaggccctcgccgagctccagcccgccgccgaacggggacgagtccagacggaggaacggcgagatggaacctgacgaggagcacgaggaagtggttgtggtcgacgaggacgaggccgagtcgggcaggaacgaggcgcccggccgcgaccaccccgggccccgcgaccgcttgctgcgcttcgccttcaccggtatcatcgcctccgttgacagcgcgcatatggtcggcgtccgctgcgggccggcctgcggcggcgccgacgccaccgcccggtatgcaccgtcgtgcgcgaacggacgccgctgctgcgccagagggggccgcgctgccgacgacgcgaccacagcagcggccggcttcggctgcgcctggggctgcagctcggagagcgagtcgtccatgatacgggagacccactccagctcctcgacgtcgtgcgacggcaggtcaaccatctccggcggcggcggcagcagcggagggaggtcgtacttcacgaccgacgacggctgcgagtccgctttcgacctctcctcggccgcggcggctgccggcggcgcgtcgtcatcctcgcgttcggcgacgtccttgtcaggctcggcgaactcctccaggtcaagcaggtcctcgaccgagaacccgtctttctccacgaacgccccggcggcgtccgcggcggtctcctccggcaggacgctgttgttacacttcagcgcgtccatcctggcatcgtccagagggctgctacggtggtgcgcgtacgacggcatggcagaggcgcctcgcaggaaggctggggtgcaggaacatccacccggagccggggctgtggtggcggcgtggaggaaaggcgaggaggaggcggcggagacggagggagggatgagcgttgtttggtggagcattggatggctgccggactccgtgggctgctgcctgaaaccaa

SEQ ID NO: 23861 - DNA, 1125 bp, Zea mays
  Clone ID: MRT4577_121768C.1
catgccgggacgtccgcgaactcccctgcttctctggatttcctttcgctgcccctccgccgggccagccagccacccaaactcctcgtgcgcctcgtggattcgtgggtcgcgactcgcgaccagacgacaaacgtcgagaggggccgatcgtgatcgagcagcgatgtcgacgtcgcggaggcggacactgctcaaggtcatcgtccttggcgacagcggggtcgggaagacgtcgctgatgaaccaatatgtccacaaaaagttcagtcagcagtacaaagctacaatcggtgcagatttcgtcacaaaggaggttctgatcgaagacaggctagtcacgttgcagatatgggacaccgcggggcaggagagattccagagtcttggggttgcattctacagaggggccgattgctgtgtgctcgtctatgatgttaactctaacaggtcatttgatacactcaatacatggcatgatgaattcctcaaccaagctagcccatcagatcctaaaacttttcccttcatcttactcggtaacaagattgatgtagatggtggaaaaagcagagtggtttctgataagaaagcaatggagtggtgtgcttctaaaggcaatatcccttattttgaaacttctgcaaaagaggactacaatgttgacaatgctttcctgactgttgccaagcttgctctagagcatgagcgcgatcaggacatttacttccagagtgttgcggatcctgtccctgagactgagcagagaagcggatgtgcatgctagtagttagtcatcatccttgtcccttccagatcttgcttattgattgcggcatactttttctgcgatgccgagcaggcattctttccatttttcgcaatgtacactaatgttccaaccgtccaacactgttcttctatccagctgtatgatagttactgagcatggttttttttttttgtacgcggtctactgatttggtggccagccaattcttggtttgggcaataagaataccctggtttagactttaaaggatgtggccggtgaaatgccaaactcgtagcctcaattgctgcattcgtgcgtgcggctgtaacttgttggcgtccaatgcgctt

SEQ ID NO: 23862 - DNA, 199 bp, Zea mays
  Clone ID: MRT4577_121769C.1
cagcgttcgaaagaaagttggctagatatagttacttctctgtcttgggaagctgcatctcttttgaagccagataccaccagcaaaggcggtcagatggaccctggtggctatgttaaggtgaaatgcttagcttgtggtcacccaagtgaaagtttcgttgtaaaaggagttgtttgtaagaagaatgttgctcacc

SEQ ID NO: 23863 - DNA, 379 bp, Zea mays
  Clone ID: MRT4577_12176C.1
aataattcttctccaccaaaatttataggaggggcttattatacataatccggtgaagcatatgatcctacagattgctagtgaagcattccgtcaaacacccaccgcatgaaagtaattagcctgcagctaggagatggagtgcatacggaagaactcgtttcatttaagaacagaaaagcacatatgccatccaactctaccttatcaccaggacgcatacacacaatctccactgcggaaatttcacggtgaccagaacagcgtttttccccagcatacataaatgatatacatctaccttttcttccctgtaggagcaactggaatacataaaacttgcccttaacgacgacggcaattgggattaccgggagag

SEQ ID NO: 23864 - DNA, 862 bp, Zea mays
  unsure (1)..(862): unsure at all n locations
  Clone ID: MRT4577_121770C.1
cccacgcgtccgtaatgctaccagcccacaaaaccaaccttccttccctccgttccagggcgcggcgtctgtataggtatagccaaccgtccaacccattgctactccacaccgatgcgatgctcccatcgccgccggcgacctcgccggcgcggctgcacaagctggtgacctcgcagcaggacccgctcctcgcgctggagctcgtcaacgtcacctccccgactaccacgccgcaccctgccacgctccactctctcctgctccgcctcgcccgccgccgcgaccacctaccccacgcgctcgcgctcctccgccgcctcccgtccccgccgtccccgcgcctccttctcccgcttctcctcgcggcgctccgtctccgccggccgcctcagctctttctctccaccttcaactccctcttcgtctcggggccaagccccctgccgctccacccccatctcctcctccgcctcctcggcgttctatcctccaccccatcccacttcccgtccgcgcttcacctccttcgcctcgtctcttcgcggctacctctccccgctccgctcgtcctcgcctcccacaacctgctaatcgacgccgcggcacgatccggccacgtcgccgtgtcactctcgctctaccaccgcctccgctcactccatgtatcccccgacgccgacacctaccgcattcttacccaatcactctgccgcaaggcccaggtccgcaccgcggctacactgctcgacgaaatgctgcacaggggcatccctgccgatccgctggcgtacaccaccgtgctgaacgctctctgccgcaagaagcagctccgagaagcataccgnctgctctgtctcat

SEQ ID NO: 23865 - DNA, 452 bp, Zea mays
  unsure (1)..(452): unsure at all n locations
  Clone ID: MRT4577_121771C.1
gccgtgcgcgcccgctacggcgcgacgctgcggctcgaggtgttcgacgcgtacgcgccgttcgccgacctgctgagccaccccgcgcaatacgatttcgacgatgcgaagcggtcgtgcctcgacatcccgaagccgtcgtcgctcacctacctcaccgcgcagacgccgcgcgcggactgccgcgacccggcgcgcttcgtgttctgggacacgctgcacccgacgacgcgcacgcacgcgtgggtcgccgagcggatcacgccgttcgtgcgcgcgcgattgctggattgacggaggggcgcatgcggccccggtgagtcgtcatcgatgaccggcggacagcgggcgggcgacgccgcccgcgccggcgccgcttacagcaacgggcacgccgtcacctgcgtgcctcgggccacgcacagacgntcgtagtcgcgcaagtacgcgcg

SEQ ID NO: 23866 - DNA, 311 bp, Zea mays
  Clone ID: MRT4577_121772C.1
gctacgacttcctgcggaggaacagccggggtcccaactacgccgtctccatcccgcacgcctccacgctggaggtgggtatgatgtactatatctgatctgatgactgaacccctgaaactgagggggagaaatataggagcaggagaggaaatggaacaaaaagttttcagctgtatatgcatatatggtatccgtgtctggcaaacttattttgaggcttgctaaatatgtaccttttgtctctgaagttgttaaataaagcaaattaacttccaaaaaaaaaaaagaaaaaaaaaaaatacgaaagg

SEQ ID NO: 23867 - DNA, 500 bp, Zea mays
  Clone ID: MRT4577_121773C.1
aaaaatcaaaaatctggggggggcctaaaacgaccccaacgggcaagggggcatacgggggggctgaaacagggttaaaactgggctgggtccaagccccaaaacggggttaataatgatcggggggggggccggaaaaaataaacaaggggggccccaaaacagcctaaaaaattttggtgaactggccgctcagggggtccttggggggggggtaaagcccctaaagggggtactgccttaggggggacaccttgtaccacgagttcaaaaccgacttgggcttgtccgggccaaaaaaagccagctggatgcccaccctgaaatcaacgggcccttgggttttggagctttgggtcctgagggggcatgtttgtttgccgagggaaacaaattttaacttggcggagaaagggccacaaccggccttttttcaaggaaagttttggaggctgcctttgttgaactcaagacccagggggaagctggacactgggact

SEQ ID NO: 23868 - DNA, 619 bp, Zea mays
  Clone ID: MRT4577_121774C.1
cctcgagccggccgggagacccttgatcgctgcgccgccgactccgacatcatcccttcatcctcgctagcaatcgataatgccgcgccgctgagatgtcgctaatcacgatctcctatctgcccgacgagctcctgtcggattgattctcctacaaggagatcgagaacggagcgctgagaaatgccgagggatagagggacgtcacccaaaggcctggttgatgtgccacattaggtcgccatatcctatccacgcgatggcacgcttgagagacgcaaagctgctcgcatagacacatgtgcgaaggtggttgatattgttgacacattccgactacaggagcaacctcctattgacaaaaaatcatctgtgacttacatcagaaaatacatcacgaatctcactggtgtcgtctgtagccagagaaagcgcatgaactcacaaaggctgtcgaggcagcaaccaagtttctccttattgagctgaaggacctccaattttttgttggcgagtccatgaaggatgatgcgtctgtggaattcatctattacgaggatggtgccactaattccacattcctctatttctctcatggtcatagcgagatcatctgcta

SEQ ID NO: 23869 - DNA, 308 bp, Zea mays
  Clone ID: MRT4577_121775C.1
tttcctcccacgcgtccggcgtgtgtcactgtcccacctcccgtcgtcgctccaccgccgtccccttgagcgctcgccccaacctggggacgctcgccccagccgatccgatccgtctcaactccattaaaaaaaatctctcctttccccctccctatccaggaaaaggagaagcacctcggtcgatcttccctccatttactcatccgggcgtcccgattcgatcgaaggcggcggagagagatgaggaagtgtgagcgagagaacccgtgcgggatctgcgggcactaccacaagtacgaggaggg

SEQ ID NO: 23870 - DNA, 295 bp, Zea mays
  Clone ID: MRT4577_121776C.1
gggaataaacgcaaaggggcctttgggccttgcccctaaatttttttttttatggcaggggttttaaaaagcccgcttttggccaaaaggaagaaatcccacccccacttttaaaaaaaagaccggggggatttttaacgaaaggcagaaaccacaaccgggaaaccgggtattggggctgggaaggcccttttaaggacccaaacgggtttaggccgttattggaaacttttcccattcccaaaaagcccgggggaattaaaaccactggggggggtgggttccaacggcccct

SEQ ID NO: 23871 - DNA, 521 bp, Zea mays
  Clone ID: MRT4577_121777C.1
cggacgcgtggggtgacgacctctcctcctcgctgtctctctgtatctgcaactgcaagcaaggaaattaattgaaagaagatcggcgccatggcggtaacgacgacggggatgcagatgatgcatgtgcagcaggcggcggcgttgctgctgtgcttggttgcgttggctgcatgcaacggttggaccatcgtctgccagctctcctgtgccagcgcatgctacggagaagtcgggatcacaaccttaggtacgtcggctgttttagcgaaagcagaagcgcctgcattagcaccacaagcagcacatgagcgaggcgccgtcgccggcgtgtccgcgctcagagggttcaagctatcattaccgacgacccgtggccgtggttgaattaattaaggcccccatgcatcatgcatgcatgcctaagcttccttccatttccttgcttctacaatgcatgcttgcccatattaattaattatcattcaatcagcttgttcatacgagccccataaaaaata

SEQ ID NO: 23872 - DNA, 330 bp, Zea mays
  Clone ID: MRT4577_121778C.1
taccactaacgcctcagatcagaaatgaatatggaatttcaaaacagacatcacataagaggggagaggtgttatatacaatggtccaccatcaatgaaaatacttattaagcctgtcgtgttgtacttccactaccagagacagagagagacttctaacctatataatctataacctggcgaatgtgataccaagataataaaaaaaaattggcagtgtattgaactattaccaggaaactagaactagcattgcgatgtgctgaacaatatcgctatgtatgcaattgaaaaatagaaagccgtcgaggatctatctcgctaaagaaa

SEQ ID NO: 23873 - DNA, 796 bp, Zea mays
  Clone ID: MRT4577_121779C.1
tacagacaccactctatagggcgattgggaccctcgaggccggccgggatgcgtcgtcgtggtgcgtgcctagcatgcatgcatgtgacgacctctcctcctcgctgtctctctgtatctgcaactgcaagcaaggaaattaattaaaagaagatcggcgccatggcggcaacgacgacggggatgcagatgatgcaggtgcagcaggcggcggcgttgctgctgtgcttggttgtgttggcggcgtctacgcgggtcgcgctgggcaactgccgcgacgactgcatggctgcatgcaacggctggaccatcgtctgccagctctcctgtgccagcgcatgctacggagaagtcgggatcacaaccttaggtacgtcggctgtattagcgaaagcagaagcgcctgcatcagcaccacaagcagcacaagagcgaggcgccgccgccggcgtgtccgcgctcagagggttcaagctatcatcaccgacgacccgtggccgtggatgaattaattaaggccccatgcatcatgcatgcatgcctaagctacctcccatttctttgcttctacaatgcatgcatgcagatattaattaatcatcatcaatcagcatgtacaaacgagccctacgtactactgtagtacatacgtacgtacgtacgtactagcaatgcatccaaaaaaaaaaaaaaaaaagcggcgtacgcgatcagtcagtcgtgggtacgaggccatgaggtacgtactccctccggtttcctattagttgggggctaggacaacgacacggtctcc

SEQ ID NO: 23874 - DNA, 1734 bp, Zea mays
  Clone ID: MRT4577_12177C.1
atgtttatgaaatttgttggccatagatggacaaatagatctgttggttttgaattcttgcggtctggagagacagttagtaggtactttaacgttgttttagatgctttatgtgtcctatcacgtgacctcattaccatgagaaccacagagacacatccaaagatatctaatagctcgagaaggtttcatccatactttgagaaatgtattggagcactagatggcacacatataccagcatgggttcctatttatatgcaagataggttcaggggtagaaaacactacccaacacagaatgtattagctgcggtggactttgatcttaggtttacgtatgtgttggctggatgggaaggatcagctcatgattcctttgtgctccaagacgcattgtcacgcccttcgggcttaaaaattcttgaaggtcattactttctagctgatgctggttatgcagcaagacctggtatactacccccgtaccgtggtgttcggtaccatcttaaggagtttcagggtactagacgaccagaaaatccaaaggaattgttcaacctacgtcactcatctcttagaacaacaattgaacgggcatttggcacacttaaaaatagatttaagatactaacaaggtaacacttttgacacaacaaggtctatggtaatcatatcagaatcagagaaggaaaaactaaaggatagagcaaggaggctcctttcaaagcccatcaaattcttcaatgaaatgtaggagctattccttgacagtagtgctgatggatctcttgccatggatgctactacttgcctaaatgaaagtcaacctgtcgatgataatgataatgatgatgacatatgcaatgatgtctccaactatggtcaacctgaggatgacctaggtgatgactctgacactttaccatctcctaaaattccatctcaagttatcgatcagagctcatctagctctggaatcaagcgtccaagaggagatgccataccagtcaaaagagatgtgagaccacggagccgcatggcaaagataggagatgaaatcaacactactttgatggatctccggaacgaacttaaacaaccaccacctccacctattataccttctttgaactctgatgccgaattatggcaaaggcttgaaaaaatgacattgactactgatcaaaaactgatagttgggacatttctagcatcaaaggatcaaaagggcatgcgtggtttcttatccgcttcagctgaaacaacatttcagtcatgggtattcaagtttttgagtgattcaacactactgtgaagtgattaggtgattcacatatcattagttttattgtttcaacttgtacttagctgatatgttttgcacttgttttaggctcaaccaggtactcttttgtggatggaagggtggtgttgttggctggctgttttggtgtgaattccttaggtggttgcctgttattttgctcagtggccaggtgatgtttatggcggtggtgatgcctgattcttttgcacgtcttctaagctgatcaataaggcttaaggagatggatggtgctgctcatagctgaatgtttagcaccattatatatacatatttgtgtgtgtattgtaatagcaactacctcagactgtttcgaatctattttagacctattaatcagctgtaatgaacatgttgtggagctattatgaactgattattagctt

SEQ ID NO: 23875 - DNA, 371 bp, Zea mays
  Clone ID: MRT4577_121780C.1
ccatgcgtccggatgttctatatacctatttcattttcttgatgtacttacgtcatagccgggtgctagaccctagggcggatctccttccatccacatagtaccgacctgcgatccattcttgaggataaaaatacctagctcagggcaaaggcaagacatttatagacttgcacaaactgttcggactaggagatcctgataacaaataacttcaccggctgtagaccactgatataactctagagatactaaacttacacatgcgggcggcacctactactataatgtccccactaccactacgtccttaaagaggaatgcaaacacttgcgtcaaaacataaaagttggattcattccaaggctgac

SEQ ID NO: 23876 - DNA, 244 bp, Zea mays
  Clone ID: MRT4577_121781C.1
gccgctactactacgaagccctcaggccttcaacacaccatacgatcatgcgacatggtagctcgctacctggggcaccaggagggcgcggtctgcaattcacttgggttccattgagctcactagacggggaccgctgaatttctacgccgatttcctgctcataaagtgcgactatttgagagtgacgatggattctgtgtactagagagcaaggccattgtctactatgtgagcactgagg

SEQ ID NO: 23877 - DNA, 368 bp, Zea mays
  Clone ID: MRT4577_121782C.1
ttcctcgcagcgccggcgctgaggctccccctctcagcgacagcgggagccgcagtggctccccctcccgtctctggccagtcaagatggaccctctgcttcggtactgacaggactgcatgcatagctgcctgcctggcgtgccagacactagggtcgtcatcttggctgcacagatcatgcattacttcaagcaggggaaaggctgatcacaatttcttctaatctgttgtcttgcgataactacagcaactgtgctagaaccttttgcattcgtattcttgggattacataaaaaacattaaattgtttcggaaaatttcattatgctatggatccataatgctttagggatgcacataataaac

SEQ ID NO: 23878 - DNA, 749 bp, Zea mays
  unsure (1)..(749): unsure at all n locations
  Clone ID: MRT4577_121783C.1
gccggccgggtctggaatgattctgatcttttaattgcaagtttggtgcttgacaccgcgttcctgttcctaccatctaccaacacctgcaccgcagaaccaaacctagctgcgcttcctccagatctcggcgctctggccccatggccaccctcgttactagctccagtctctccgctcaccgcccttgcgccctctagctccggatcgcccgcgcacacgaggccatggagcccgcagccgaggacgttgcagccgccgcgccggactcgtgggaatcggccgacatcgacgggcccataagccggcttatcctctccgcgcgccgcgtgtcctcctcgccggacctcgctgacaacccggacccgccccagccgccgcctgcgctgcagccgcagggcccgccttcggttccctcggctgcgcgcgaggatttgatggctcaggtcgatcagttcctacgagaggctctagagaagccgagggagaggctttctgtgctaagaatggagcaagaaattttgaagttcattggtgaccctaggtttacagagtatgaattcaatggtcttccaacttcatatttgcgtctcgctgcacatcgcctggcgcagcattacttcctgcagtccattgcctaccagacaacagtttgcctgatggaactggttcgcatatcatccttcgtaagacatcatctgagtgcaaactggctgatgtctgcctgnccagatatccagttaacctac

SEQ ID NO: 23879 - DNA, 438 bp, Zea mays
  Clone ID: MRT4577_121784C.1
ctgttttccggcaactggcctgtgagatacacgacgacggcatacaccaggaggctaggagatgctaaatcctgagtctgcacaggcaacgcgtgaacacaggggatacaaccgccacagggcgtgccggggatcatcctcatcgtcttcgcgccgcaccaagcaagaagcctcgggtgatgagggcctcggtacataacttccaaggtaagaagaaggtacagaagacgaactgaatggttcaagagttcaccttgcaatgtgggacggtggtcagtgtgaagcaaaaagattcactggtcgctaactttcaagatttggactgttgaaggagtcgagagcgaccaatggttttggtggagatggaataagccctgtccgaacacattgtgcatcacaggaagaccatgctagggggcagagaagagcattggatgg

SEQ ID NO: 23880 - DNA, 277 bp, Zea mays
  Clone ID: MRT4577_121785C.1
ctacaatgtctacatcgtgccaaattttatgatggcaaatatcacattgcttctaacccttatccacacttatctaacaaagtacttctcattcaaagctgtttattacaactatattttcatctaaagtaatatttacaatttccctctcccttatatttaggctctaaactcccctttaatagctctattacataaacacaaaacaagcaacttcttcatttatttccaatattacaatgaacctgatccatggacacatcaatgattaaacctt

SEQ ID NO: 23881 - DNA, 308 bp, Zea mays
  Clone ID: MRT4577_121786C.1
ggttgtggggtggtgttttttttttttttttttttttttttcaaaagggggaaaaaaggttgtttataacgttattaaaagggaacaccggcgtgtgcctttttcaccaagggtaaaaatttaatccatttagcccaggtgcctccgggggggggggggcgggattcctccaacctttacccacttttttacctttgaaaaacaccgccaaaaccaacatgggtggaggggttatcttccttcagctgccaattggttcatttgggcgggggaacacgagtaaactagacaaggggatagagtttcaa

SEQ ID NO: 23882 - DNA, 920 bp, Zea mays
  unsure (1)..(920): unsure at all n locations
  Clone ID: MRT4577_121787C.1
gagactgcatcggctgcctgaggggctggcatcggctgcctgaggggccacggtgggtgtgggcgagatccgcttccgtcgtccctcccgcttggacccaggcgtcgtccctcccgctcaaagccacgccgcaccctcntacgccgccaaaccctccacagccccatcgccgcccgctcctagatccgggctcctcgctctcgacgcccatcatgccaccgtctgccgcgggtcaggaagacgcccggcaggtggattgcccacttgagctgcgacgcgaggcaggccccaatggttttcgtcatcgtggcggtggtcgtggaggggggaggcgagtacgctggcagaactgcggtaggtgcggctgcgagatgctgggatggggcgggctgcaagatacggggatgggggagggcgagggcggaggcggaggcgtggatcccgcggcgccatggatggggcgcggctgcgagatacggggatggggcgtggctgcgagatgctgggatggggcgggctgcgagatgcggggatgggcgaaggggagggagaactgccgccgcggttcccgcagatggacccgaagccgctgccacggtggtggaagcacgagctcgcggcggggcaggcccagcttttggctggcgccaagggcggagaggctgcggcatccgcgcggcggtgggctgcggaaggggaccaagaggaagggctctcgctcgagttccacgggcgagagggccaggaaacggcgacacgtgcttcaatttaggtcctttctgacgaaaaaggtatggctttgcttcatgggtgcatgtgctttagcttggtggactggtagggttttagacttgtagggtgagccacaagcacgttgtactgaacaatcaacaatgtgcaagaaatctggtcctgtaggc

SEQ ID NO: 23883 - DNA, 327 bp, Zea mays
  Clone ID: MRT4577_121788C.1
tatagcgcgcgcccccttttttttttttttttttttttttttttttttttttttttttttaattttcccagggttttgaaacacccctaatttcaaggctggacccaaccaaagttttcccatacccccagtaacagagcccaaagaaaaacacgcactccaaactggaaaccccacttgattccgctacacccaccaatgggcggctgacctaacccttaaaccaaggcccccgggggaacccccctattgttctaaaaaaatggcctaaaccgggctcaccaaccctggggaacagaaaggaatcaacttgggctggcaaacagg

SEQ ID NO: 23884 - DNA, 725 bp, Zea mays
  Clone ID: MRT4577_121789C.1
attgggtacctcgaggccggccgagatccttgtctcccatggctatctctcttagtctcatcgccctctctgctcgagtcactcgtctccgtatcccccttcacccgccgacgtcatgactctgacatcccatcaaaatgcttgtgccactgacagttccccaggctgttacatagagaaagccgccgcagacacaacggcatcctccgccgccacttcctgttctacacgtgggggacacactgtatgtgacatactcgaaacacgcattgctcattgtatctacgattggaacaaacagagtcatgacacgcactgctgaaggatctggattaaattcccaaagcatccactagtgaaactctttctacataatctctctggtgctgcccatgctggtccagaaactaacggtgaagaatgccttttccatatcaaggcttgccaactagttgaatgaaccactcactcgctacaagatatcatgaagcgacatctcttgacctatagcatgcataaacatactgcctgcgtagcatagtgtatcagatcaacctgcctccgtaacaaaacgtgtactatcatgtcactagagaggatctcattaatagagacaccgactcactgtgaccatcgccacacttatcacaccatacatccggacatcaagttatgttggtatcgtatgcagatggaacagacttttgtctcttgatcataactat

SEQ ID NO: 23885 - DNA, 351 bp, Zea mays
  unsure (1)..(351): unsure at all n locations
  Clone ID: MRT4577_12178C.1
tcgagccggccgggatatcgctacggatnacgcanatagatctttggattatatcgaaacagctgtagctagcgcgctcgtcgtctaaactggcttccggcatggcttccaagcagatcggagtcttgacctgcttcattgccatcaccgctctcgccttccgtccctgcgcatccgccgtgcccatggacggtggaagtctctgaagcgtaccagggacgtagctacgccgactgcgcggaaagggtcacgaggaagaggaacatgaacgacgtcacggaaacgggggcacaaagatgaagaatactgaagccgaaggagagaacaatgaggcagacaaccctttttttt

SEQ ID NO: 23886 - DNA, 307 bp, Zea mays
  Clone ID: MRT4577_121790C.1
ggtaccgtccgggattattcccgggtcgacgagctcactagtcggcggccgccctttttttttttttttttttttttttttttttttttttttttttttttttttttttatttaataaaatttttgggggttttaatttagggaaaaaaaaagcaaacggggaaataacatctcaaatcctgttccgggaaaagcaaaactcctaaaaaagattggggacaaacagctaaaacaagctgggctttaatacgaacaggatcaaggaacggggtggtaaaaaaacgaaccgggcgcctgctaaggaaaa

SEQ ID NO: 23887 - DNA, 458 bp, Zea mays
  Clone ID: MRT4577_121791C.1
ccagcagctgccaggagtagtggtttctcttgcatccgcttcagggctcgcttcttgatctgtggcgccaaggcggcgagagcggcttgcccggccggggagagagtgactgagtgagagctgcgaggacgacactcggaggtcggtcgaggagaggccaacgatcgaggaagatgtgcatggacggcgccgtgccggtgaagagggtctggctcggcatcgccgcgcgcctcggcctccgccgaaagaccggcctgaggaagctgaggaaggaggtgcgcacgtgcgagtaccgcgacgtgcacgtcatgtgggagatgctgcgggcgacggacgggccggcggtgccgctggcggagaaggaggccgcggcggcggcggccgtcgcggccgccgcaggcgccaggaagaggaggaacgcgtggaggcggttcgtctactactgctgcgcgttctga

SEQ ID NO: 23888 - DNA, 1276 bp, Zea mays
  Clone ID: MRT4577_121792C.1
ttcgcctgccacagccttgtcaatggcgtcggcgttagtgccggcctctttttccctggctcacccagcagcccgccgccccgtgaattcaaccggccccgcggcgatgttaaacgccgagcgggtctcgccaccgtatgcccgccggagcggtcgctgggctccgattgcctgagggctggcgctgacccgaggctggcgatccacgttgctttgcgctgccgctctgcgtcgtcgaccgggcgtgggacgcgcgccgcggcgacgatgaccaagaagagcgtgggcgatctcaccgcagcggacctcgaggggaaacgcgtgctcgtgcgcgccgacctcaacgttcccctcgacgacagccagaacatcaccgatgacacccgcgtccgcgccgccatcccaaccattaagcacctcattagcaacggcgccagggtcatcctcaccagccatctgcaggagcttgattaccttgtaggagctgtttcaaaccccaaacgaccatttgctgctgttattggtggctccaaagtgtcatctaagatcggagttattgaatcactattggagaaatgtgacatccttcttctgagtggtggtatgatcttcacgttttacaaggcacaagggcactcaataggttcttccttggttgaagatgacaagcttgagcttgcgacctctctccttagaaaagcaaaggagaagggtgtctcccttatgttgccattcgatctggtcgtcgctgataagtttgctcctgatgctagcagtcagctctccaggttgttcctgcatctgcaattcctgatgcatggatgggtctggacataggtccagattcgatttcggcgttcagttctgccctggaaactactcagacagtcatctggaatggacccatgggagtttttgaatttgacaagtttgcagttggaaccaaggcaattgcaaagaagttagccgagcttagtggcaagggcgtcactacaatagttggtgggggagactccattgcagctgttgagaaggtgggtgtcgccgactctctgagccacatttcaactgggggtggtgcaagtttggagttgctggaagggaaggagctcccaggagtagctgcactggacgaagcttagatgtcttcactaaagaaatattcaattttctttacagcaaattttaaaagatttcgtcttttataccttcagcatctccagtgtcctctaaattcggttctctatatttataatgataacagaattcttattcc

SEQ ID NO: 23889 - DNA, 3091 bp, Zea mays
  Clone ID: MRT4577_121793C.1
ggcggcgtgtgtattattcaaaatatccccgtcctcccgttccgtccccaaaaccctagggcgccgccgcctctggagcaagctcagggcaaagaccaagatgaaatcgatcctggtttacaccacctgaacatcccacctcatacttgtcgacggtttacctgatggcagcaggttccggcggtggaggttttccaaccgatgccaactacccatggctgacgtcgcggctgcaccaggctattgccaccgagcacattcgccaacctggcgccccagccgagctctcgccgacggcaggtgtctgcaccctcgaggtgctccgccctccccgcgagctcacttaggatctccccacggaattgttccgttctgaccctgggctcgaatcagagtccgaagccttgatgcacgccatcgttgagcgtgtcgtggcgctggtggagagcgactcgacaagttcgttttttttggtaacatctgtatggctcgatccgttttgtggactagtgacaacattgtcttcagtcatttgtgacatggcaatggaaattttgtgatgttcctgttttgttttgagcaattgtacgccattgcctgctgtctcctgttcttccatgtctgatttatttgtaagattggctaagttttcgaacttaaagaaagagggatcatcctttgctggaagggttgttgaaccagtgctgcggcttttaaatcaaaatggtctagtagctgacgaagcaattgatttgctgaggacagttattaaattgtacccatcctctgtaaaccggcactacaataaagttgaatctgctattgcagcaaagattatgagcaatgtaaaaccatctgagaaatttgcgagaaccttagcattgttaccttctgtccgagtgtccgaggacagttggtcactgatgattcgttttgttcacatgctttgcttgctttggatgtccttgtccaccctcgagccctttctctggaaagaacagttcctgcaagctctgggttcaactacactgcacagaaaacaacagtttttggtgctggaacacaccagatctcaccatttggggaccagcctcaagcaatggaggtcgaatacatgaacgatgacttcagctcttacgctttgctgcagcgtgatgctgactagttattatccagttcaggttttgtcaaaatcagaacgtttctgtatatctccaaaagctcataacttactagtgtaagccatgatgcgaagagtgctgttagttgatggatcattgcataacaagctgttcccttctacaacttcattgcatcaagagcttatttgttttgatcttccatcgttacattcaactttcttggatttgctgaatgcaactattaaaggcatgcgaagccaactcttacctcatggtgctagtatcatacggcttataacagagtacttcaaaatagcaaagctgcctactttgaggacaaaaacttatagcattttgcagctgttgctgacctccatgggtgttgggacgtctctgcacctgcttgaggcaacagtccgcaatgcagttgctgatctgaatgatgatggtgaaattaacatgactatgatcaacacaaattcatcgcaattgaccaatgaatcatcatcaaaagtttattcgaagaagaggaagcaagaaccacagatgcaaaactcaaccatctcaggttcagagaaagtagcaatcagcccaaggaaaagaaaaggttcttccataccaattacatcaaagggagtggcccctgaaagtacaggagatgttacactatcaactccacattctgtcaaaatagctgcgcttgaaacattggaagttcttctgaatgtgggaggttcattgcggatggatcgctggaggtcagaagtggacattctcttaattaacgtggctagaagtgcttgcggcatgggagggagttatgagcaaaagccatccacatttggggagccaaacatatcggacttccaacttgcttcgcttaagggcctgctggcatcttttctttcttctcatgcccgtcctccttatttagccaacggaattgaactcttcagaaaagggaagctagagataggcactaaggttgcagagttttgttcacatgctttgcttgctttggatgtccttgtccaccctcgagccctttctctggaaagaacagttcctgcaagctctgggttcaactacactgcacagaaaaaaacagtttttggtgctggtacacaccagatctcaccatttggggaccagcctcaagcaatggaggtcgaagacatgaacgatgactggctaatatccaacaacaatgaaccaccagaggttccagtgaacggtagtgatgctgtggtaagtaaaggtgtgctggtggaggatggaaagcagctcaatcccatagcagaagatccaaaagtcgacccacccagaatcacagacgcagcacaagatgcaccagcatccaccaagactgatgtcaaggtggtcgatgcagctgcagccacagctgccaagccaaacacagcggagaatccttcgagttccaatgctgtcccctctccagtgcgcacaacagattctgattcacgtaagcatgcgtcatttcccgagcaggatagtcctcatgagaacaaaagcgcagccgtccatccaggtgaagcttctgcgactccaggtgttggttcaagccaccaccgccatgaagcacctgaggcccgttcagccagcttcacggaattgtttggttctgagtctggcatcgaatcagagtccgaagacttgatgccagatatcgtcgacggggaccctgactctgactaggtttgccgtcgtcatttgtgacatggcaatggaaattttgtgatgttcctgttttgttttgagcaaattgtacgacattgccggctgacagatgatgcagtatttgattgatagatatagatggagctaaattttgtgaaattcctgttttgttttaccaccaaaaatttgctcaatctgattggatttagaggcacgccggtgaatagaataaagtgcaaacaaagtatttc

SEQ ID NO: 23890 - DNA, 1856 bp, Zea mays
  Clone ID: MRT4577_121794C.1
gtcaaaaaggtcaatgttccaattcatgctttgatggctttgatgcgaagagtgctgttagttgatggatcattgcataacaagctgttcccttctacaacttcattgcatcaagagcttatttgttttgatcttccatcgttacattcaactttcttggatttgctgaatgcaactattaaaggcatgcgaagccaactcttacctcatggtgctagtatcatacggcttataacagagtacttcaaaatagcaaagctgcctactttgaggacaaaaacttatagcattttgcagctgttgctgacctccatgggtgttgggacgtctctgcacctgcttgaggcaacagtcagcaatgcagttgctgatctgaatgatgatggtgaaattaacatgactatgatcaacacaaattcatcgcaattgaccaatgaatcatcatcaaaagtttattcgaagaagaggaagcaagaaccacagatgcaaaactcaaccatctcaggttcagagaaagtagcaatcagcccaaggaaaagaaaaggttcttccataccaattgcatcaaagggagtggcccctgaaagtacaggagatgttacactatcaactccacattctgtcaaaatagctgcgcttgaaacattggaagttcttttgaatgtgggaggttcattgcggatggatcgctggaggtcagaagtggacatgctcttaattaacgtggctagaagtgcttgcggcatgggagggagttatgagcaaaagccatccacatttggggagccaaacatatcggacttccaacttgcttcgcttaagggcctgctggcatcttttctttcttctcatgcccgtcctccttatttagccaacggaattgaactcttcagaaaagggaagctagagataggcactaaggttgcagagttttgttcacatgctttgcttgctttggatgtccttgtccaccctcgagccctttctctggaaagaacagttcctgcaagctctgggttcaactacactgcacagaaaaaaacagtttttggtgctggtacacaccagatctcaccatttggggaccagcctcaagcaatggaggtcgaagacatgtacgatgactggctaatatccaacaacaatgaaccaccagaggttccagtgaacggtagtgatgctgtggtaagtaaagatgtgctggtggaggatggaaagcagctcaatcccatagcagaagatccaaaagtcgacccacccagaatcacagacgcagcacaagatgcaccagcatccaccaagactgatgtcaaggtggtcgatgcagctgcagccacagctgccaagccaaacacagcggagaatccttcgagttccaatgctgtcccctctccagtgcgcacaacagattctgattcacgtaagcatgcgtcatttcccgagcaggatagtcctcatgagaacaaaagcgcagccgtccatccaggtgaagcttctgcgactccaggtgttggttcaagccaaccaccaccatcaagcacctgaggcccgttcagccagcttcacggaattgtttggttctgagtctggcatcgaatcagagtccgaagacttgatgccagatatcgtcgacggggaccctgattctgactaggtttggttacagttcgttttttttggtaacatctgtatggctcgatccgttttgtggactagtgacaacattgtcgtcgtcatttgtgacatggcaatggaaattttgtgatgttcctgttttgttttgagcaattgtacgacattgccggctgacagatggtgcagtatttgattgatagatgatggagctaaattttgtg

SEQ ID NO: 23891 - DNA, 142 bp, Zea mays
  Clone ID: MRT4577_121795C.1
cactaacgctacttctacttcggaaccgccgacgctaccggcgcctcatattatcaggtaccgcacgaggtcgcggcctccctatcggtggtccatcgtgcgatggcgtgcgcacctaccgcgctgtgctacggtccagcgt

SEQ ID NO: 23892 - DNA, 693 bp, Zea mays
  Clone ID: MRT4577_121796C.1
cattgggtacctcgaggccggccgggattctaccacaccctcaagttacattcaagttacttgtacagcccttgaacatcaccaaacaaccacttcttcttaccgagaaacccatcagcaaccaccaccatgcctttcaccgctagcgacatctgcaagatcctccttgccatcatcctcccacccgtcggtgtcttcctcgagcgcggctgcggcgccgacttcctcatcaacatcctgttgaccatcctgggttacattccgggtatcattcatgccctctacattatattcaaattctagccgggccgcggacgaatgtttacgatgccgcgttaacggttatgactttgctgtcaaatcatcacgatacccatctttttctcttttgtttagcactaccaccactaccaccaaagtcttatccgcctccgctcagcttgtaaatatctttcgatgcatccatgctgggtcctcctaatcggcatggaattagtcggatgacgcggaccgagatggcagcaccggttgggctttgagcatatgataatgacctgctttgtaccacggcgtcctttatttcctgggttactttttggtttgcttttggtgcatcctggagcattccgaggagcgtatcataataggaatttaatggggcactttactaaaaaaaaaaaaaaaaaagcggcc

SEQ ID NO: 23893 - DNA, 248 bp, Zea mays
  Clone ID: MRT4577_121797C.1
gggtcgaccacccgtccgggcatgtggatcttctccgttcattatgatggtatttatttttacctccacaccttgttcgagatggagggggggggaatccaggctccaaaagggatcaaagggcgcatcatctgtgagacgataaaaaacaaatcccttggtacctcgattgtttattgacggtattcagcacagaccctttgaaggtcgacaaaataataatactatcgtggacgatgacatctacc

SEQ ID NO: 23894 - DNA, 265 bp, Zea mays
  unsure (1)..(265): unsure at all n locations
  Clone ID: MRT4577_121798C.1
gagcggccgggagtggcccagtgggggtgcgagaagagcagttcctgtggacctactccgccanagagacgtgctacctgctgcaggggaaggtgaaggtgtaccccgaaggccacggggaggagttcgtggagatcgtcgcggnagaccttgtcgtcttccccaaggctatgacttgcacctgggatgttccacgaggacgttcacaaccactacaactctacagtattcgccgccggcctactactgcctacgtcatactcca

SEQ ID NO: 23895 - DNA, 304 bp, Zea mays
  Clone ID: MRT4577_121799C.1
ggggaaaaaaaacgatttgctccattcctcggaattggggcctcgaatcctaaacatgggggatccctgaatttaaaaaaacctccggtttttgtgcctgggggttaatttttcgggttccagttttttgatggggcatgggccgtttttcccggggttccctgaacctgggccaaaagatcctccagttcggttaaaatgtttgggaaagcacgcccgccaaatgggtttttttcccaacatttttgtataaaggccaaaacctttggatgcgttttttttggaaggcccgggcccaatccct

SEQ ID NO: 23896 - DNA, 267 bp, Zea mays
  Clone ID: MRT4577_12179C.1
attcggctcgagctactgcactgctgtcgcttttttgcacgagtgcagggacaacaaccagaggtgaattatcctgagctggggtgcccaagccaactactgcaaggaccacaccagaagccttgacgcccggcgcctcctctgaaatgccggaggttaggactacagactaactgtgccaaaccatacggtactgcctgcagcccaccaacccaatgttacgagaaccagaagtgtttcaaggacatgcgcacaaccatccgggtg

SEQ ID NO: 23897 - DNA, 417 bp, Zea mays
  Clone ID: MRT4577_1217C.1
aacacacatccaacccggcccagctgccagcagagcagagcaggacacagcttttattcgcagactctagcgatcgcctcctcctgccgatcagtcgcagaggcaatgcctctgatatcgcaccggcgagttggcatagcatgccaacgaccgtgccagtgagagcgtcaagacagggatcgcgcgcgccctcggatctgtgaggaggagacacccggacttccctctcctccgccgcgacggctacaccgtacgacgccctgtggtcgtcgctcaatcttcgccatgatcgacgacgtgatcttccgctcgagactcccgcacgccgccaacttccgcttcctgctctccctcaacctgcgctccatcgtggacctgtgcccggagtcgtacccgaaggagaacgcgcgtgccctg

SEQ ID NO: 23898 - DNA, 761 bp, Zea mays
  Clone ID: MRT4577_121800C.1
acatcgagctcggccgggggcgccttccctagccacgtgcataggactgtgccctccctgctccgtcttcccgtcgcgcgctcctcaagttcctagcgccctgccaaactcccctgcgcgtgccctatcttcctccatcgcgcccagctcgcccagctcggattgcgcccaactcccagcactggggtcaccctctctgctcgctcgcaccctgcctaagccctcccatggcggcgcgccctccagctctgttgccgtgcgcgcccgactccagctctgccacccgcgtcgctactccagcacgcgcctccctgtgctcagcctccatcgtcggccacagctccccaagcctgaactccctggccgactcctctcctacgtcgtttcccaagccgcgccccagcgccgtcccatctcctgctcctccgcggcgctgagctccaccagtcactggttctgaacgccgacaccgaccaccatctcccatggcgcctagctcggactgcccctactccttgttcctccagctcgctcctgtcgggttggttgttggtcgcgttggccgtcgacctcgcttaaacctgcgtcgatgggccagtcttgctgcactcgccggcaccggagcacacgcactgcttttattcccatggccgctcgcaaggatgttgtccccctgctctatgccgctagcttctgcgtcattgcctagttcgccatcgcatctgtgctcctcgatcttgccccttggcttcgatttctga

SEQ ID NO: 23899 - DNA, 320 bp, Zea mays
  Clone ID: MRT4577_121801C.1
cggacgcgtgggggggtcacccagaccaagactgaggatatgaatgtgactaggaaggaaacgatgaaggggggagagaggaagggggacgggagtaggacggagatgattaatgcttcggaagagcgtgtgtaaacggacgataagaccgggactgaaaatgatagaggatgcgtgcggctctacattcctcttctgcacagaatgagtcctgattctcatttgtccaatggtttcagtcttttgctttatcaggtttactatgctgtattttgcatacactatctttactgatatcttcttattctcagcacctccaa

SEQ ID NO: 23900 - DNA, 347 bp, Zea mays
  Clone ID: MRT4577_121802C.1
tctgtatgcattttgcccatagacttggcttgctgcactggggaagacgacaatggtgaccgacaaagaggaaaaaaaaaaaaaaaaaaaaaaaaaaaaaaaaaaaaaaaaaaaaaaaaaaaaaaaaaaaaaaaaaaaaaaaaaaaaaaaaaaaaaaaaaaaaaaagggggggcccttttaaaaaaatcaaagttaactaacccttaattccaaataaaaacttttttaaaagggcaacaaaaataaaattaattgcccttttttaaaaaactccgaaattgaaaaaaccttgggttaacaaaattaaatccttttaaaaaaatccccttttcccaacttggttaat

SEQ ID NO: 23901 - DNA, 291 bp, Zea mays
  Clone ID: MRT4577_121803C.1
tttcgggcacgtgtcgctgactcgtctgatgatcgagaccagtgagcagcatggcgggtgatttaacgaggggtactgcatgaggcctacatggtgtctgtggtgccatggtagggaccacgagcccctgccatatccgagtgtgctggggccagaacggatatggcagctgtctggctgacgggtgcatgtccaggctgctaggcctatgatgacaagcagttactgacatcgttaggacccagacagacaccgattctaaatcttagcgggacactgagatccaagctg

SEQ ID NO: 23902 - DNA, 707 bp, Zea mays
  Clone ID: MRT4577_121804C.1
ctggatcttaatgatactgtgcttggctgttactataggcttcagaaacacgaaacagatggcaaatgcacaaggtaatagtacaaagattcgctttttctcaaaataagtaagtcaagagatatgaacatttgtccgcttaatgatactgtgcttggctgttactatagaggttagctccactaaacagatggcaaatgcttcagggttggcggttataacagttatgattgtcacaacttgctttatgtcactcgtcattgtcctttgttggaacaagaatgttgtatttgctcttgccttccttcttttcttcggtgcaatcgaagctgtctacttctcagcttccctgatgaagttccatgaaggagcttgggtgcctataattgtttccttcattttcttgactgtgatgtgcgtttggcactatggaacagcaaagaagtacgaattcgatgtggaaaacaaggtctcaataagttggcttctgaatttaggctcttcgttgggtattgttcgggtcagaggcattggcctgatacatacagagcttgtgtctgggattcctgccattttctcccactttgtcaccaacctccctgcatttcatcaggttctggtcttcctatgcatcacatccgtttctgtaccacatgtccaacctgaggagcgactttttggtcggacgcattggcctgaaacaatac

SEQ ID NO: 23903 - DNA, 404 bp, Zea mays
  Clone ID: MRT4577_121805C.1
ctggatcttaatgatactgtgcttggctgttactataggcttcagaaacacgaaacagatggcaaatgcacaaggtaatagtacaaagattcgctttttctcaaaataagtaagtcaagagatatgaacatttgcagttggttatgtaacttcaacttcacatgggttggaggttaactccactaaatttttttttttggtttcagggttggcggttataacagttatgattgtcacaacttgctttatgtcactcgtcattgtcctttgttggaacaagaatgttgtatttgctcttgccttccttcttttcttcggtgcaatcgaagctgtctacttctcagcttccctcatgaagttccatgaaggagcttgggtgcctataattgtttccttcattttct

SEQ ID NO: 23904 - DNA, 912 bp, Zea mays
  unsure (1)..(912): unsure at all n locations
  Clone ID: MRT4577_121806C.1
cattgggacctcgagccggcgggcgggctcgcacgaaacttccccgacccatcgaccacaccagccccatcccctccgtcgctcccaactgccgccacctctccgcgaaccgacgccgacaccgacggtcaccaggacagagggacggctgctaccgcgggagtatgggggtggactactacaaggtgctgcaggtggggcgcggcgcctctgacgacgagctcaagaaggcttaccggaagctggccatgaagtggcacccggacaagaaccccagcaacaagaaggaagcggaggccaagttcaaacagatctcagaggcatatgaggttcgcgcgaccgcttcgtggccccattgggcctctgatctgcgctggtgctcatagatgctcgctgacaaatgaatgtgcatcggttgatgcgcttactaggaaggattgttgatgcgcttactaggaaggatcgtttgcatttcctcttattattgattgtgtagctgattgtagtgctgtgctcgccattgtgtgaacattgctcttctgtgcaaaaagatctaatcccacccacccaccttttggtcagaattttagccgatgtaagcttcgtgtgtggcgttacttgtggtagtttaaggtttggtcacgcaacaaatcacgtaagtccgactctggcttttgtcagtcatttttaggagtctatatgtttgtgctatttgtcctgaattttggcactacattcttctctatttttccacttcctgagcgcatgggcaattattttgattttctcctgctaacctgtacacttatcagtgatcactatggcaccnatgagctaattgtggcatctttttagcagtaaaccctttctgcttgagtacattaattcaaccatgcttttttcctgatctgc

SEQ ID NO: 23905 - DNA, 519 bp, Zea mays
  Clone ID: MRT4577_121807C.1
ttgggtgaccctcgcgggccggccgggacgcccgtcagactctaaatgacccctcttctccagccggccggagatggtctcgttgcgatgcacaaccgcgcaccactccctcctcggctcgccgacctgactcgagcgcccgcggcggagggcgtgccccgtcgtgcgcgccgacgtcggcgaggagtccggagcgcaggccaaggtctcactcatccgaattgtgacgcgtggaagtcctgttgctcttgcacaagcgcactaaactagagaaaaactgagagccatacactctgagttagcttaggagaggggtattgagatcctcaggataaagaccacaggagacatgatcttggacaaacgctttgcacacattggaggcaagggtttattcaccaaggatatacatgatgcgctcttgcatggaacgattgatatcgctgctcactctatgaaagatgtcccaacatatctacctagaggcacaagagcgctctgtaacctacctcgagaaga

SEQ ID NO: 23906 - DNA, 1205 bp, Zea mays
  Clone ID: MRT4577_121808C.1
acatcaaacatcacacttgctgactagtatccttcatttagatttacatcaaaattctagatctcaacacacgatgcgacaactttataattatacaaacaaccttatcactatctgcgggtagacatttcacagtatctaatatgacacctaatataactatactcatcacgaatgaaattgaggaagaatatgtttcccagtacattgccataagaagcacacaaacacatccggagacagctaccacagtgcacctatgctaatcacaaaaaatcatcgaccacataactatttagcccaccattcatagacgtacattttcacacacatattcacgccatcgaccacacgtaattagagaaaactacaatcacataaagcgaacaacctggtgaaatcagtttggatcgcgcatgcatgtctaccacggttctggctcttcgtcgaggagcaatgcacgaagcgcaacatcgacggagggcaagggtgttgcaacgtcgcgggttggggctgcacaactcgaggtggagctcactgcggtattccatcgagcacttggcgagcgtcgcgaacacgggtttggcaccggtatgctgctataccgttcgggctagtgctgaccggagaggcaaggggagccatggggggggaacacggcgtggagaacggttggagcagaacaaagggcgcacagggagatggagtttgtgcgagctcaccatggggtcggcggtggttgaagacgaagctgagggagttcggccggcgagctggacgcgcgcgacctgggcgagcacgtcaagggaaggagatggggaaaaaggcaggggcgtcggcactgggaacaggaagcaggggcgcggcaaggctgagggcgagctcggcgagcaccaagggggaggtggaggcggcaccctccatggctgagggtgagctcactatgaaggtcgagcagagccagggcgctgggaggagcagaggtgagggcaccatgggagggatggggaagacgacatggcagccagcactagaggaagatggggaggggatggggaagatgaccttaggagcgcttgctcaggtgctggagtggaggtcggtaatggggagcaggcggcgccgtgagggaggcgagccgcagggaggagctcggctggtgctccacgaaatcaacagagaggaggggggttagggataaggct

SEQ ID NO: 23907 - DNA, 835 bp, Zea mays
  Clone ID: MRT4577_121809C.1
gtagtcgatttgatttccatgttcggcactctgctgtgcaaccatatatgtaatatttggatgtttgtttaagcatgagagtatgtgcttacattttcacacacatattcacgccatcgaccacacgtaattagagcaaactacaatcacataaagcgaacaaccaggtaaaattagttcggattgcgcatgcatgtctaccacggttctggctcttcgtcgaggagcaatgggcgaagcgcgacatcgacggagggcaagggtgttgcgacgtcgcgggttggggctgcacaggtcgaggtggagctcactgcggtatttcatcgagcacttggcgagcgtcgcggacacgggtttggcaccggtatgctgctgtaccgttcgggctagtgctgaccggagaggcaaggggagccatgggggaacacggcgtggagaacgattggaacagaacagagggcgcactgggaacagaaagcaggggcgcggcagggctgagggcgagctcggcgagcaccaagggggaggtggaggcggcatccgccatggctgagggcgagctcactgtgaaggttgaacagagccagggcgctgggaggagcagaggtgagggcgccatgggagggatggggaagacgacctggcggccggcactagaggaagatggggaagatgacctggcggccggcactagaggaagatggggaagatgacctcaggagcgcttgctcaggtgctggagtggaggtcggcaatggggagcaggcggcgccgtgagggaggcgagccgcaggggaggagcttggctggtgctccccggaattaacgaagagag

SEQ ID NO: 23908 - DNA, 371 bp, Zea mays
  Clone ID: MRT4577_12180C.1
cttcttcccatccttgttcatgttgtgctaaaagatgtgcttgttgcattagaatttcaaatgacaatgcttgataaatactgtatgttaggtaactgttggcagatgatgatctcattgttcatgaatagtcttgtatgcgaaagggcttctagcataatggttaaggcttccgagtagcatctctatgtttcggggaccaatttcgggcttgggtaaaaagatcccctcggcgtgccccgcccattcccgggttaggtcctgctcgtcaaccttttgcttgtaccgtgcacgccgcccgctagtgattaactaaaattccgagattttcttggggggaccatgttttgggcaattcttaatataatacc

SEQ ID NO: 23909 - DNA, 904 bp, Zea mays
  Clone ID: MRT4577_121810C.1
cacaggccggcagatcgctcgccatggaggtgaaggtgatgagctctagacttgtcaagccgtcctatccacctggtgtgccgcaaccagacaccacccagcatgtgccttgctcggtgttcgacaagatcacataccacatacagatggccatcatctacgccttctcacctccggtgccctccatcgcggacattgagcacggcctcgccgccgtgttgggcgtgtaccgggcattcgccggccaggtccgtccgggcccggacggcgagctcggcgtgctgctcaacgaccacggcgcgcagctcatcgaggcgttcgtggacgcccaccttactgttgtcgcaccagcgaggccgtcgcctgagctgcagcagctgcaccctgggctacatgtcgagatagaggaggtggtgcaggtgcagctcacgaggttcacgtgcggctcgctcatggtggggttcaccgcgaaccatgccgtcgccgacggtcgtgccaccagcagcttcctcgtcgcatggggccgcaccatgcgcggcttcccgatcggcctgccgccgccgccgctacaccaccacccagggctcttcccgccccgagacccgccgcgctttgagttcgagcaccgcggtgtggagtaccgcccgacgccgcctgcatcatcatcatcgtcatcccacctcgtcacagcccacggtcagacgacccaccgccacgacatcgtgatccacaaggcgcacttcaccggggaattcatcaccgcgctccgcgccaaggcatcagaaggccgcggccaccctttcagccggttcgagaccatcgtcggccatgtatggcgtgccatgacgcgcgcgcgcggcctccgtgacccgcgccagcgtccgccatacgaatctccgtcgac

SEQ ID NO: 23910 - DNA, 370 bp, Zea mays
  Clone ID: MRT4577_121811C.1
aacgaggaaaacacccttattacaacaggcaaaaaaaactgggttggggggacccaaaaaagggggaaaaaaccacctccccaaggggcggcccaaggcgggaacaggggccccaaaaagggggcatcttttttttggggggaacaaacccctaaaaatattttagaaaggggcccccaaaccttaattggaaggaaacttttttaatttaaacggggaagaccttttaaaggggggggctacttaaagcaagaattggcccttggaactggtaaaccatttgggccccaaaccccaaaaagggggccgctttaaaaaaaattaaaccggggaaaacccgggggttcaccaaggggggcttgggggtttt

SEQ ID NO: 23911 - DNA, 512 bp, Zea mays
  Clone ID: MRT4577_121812C.1
ggccggggtccgcccttcccgcctcagaagccatcacgacggaggatctggaatgacaagtgagcgctatgtgacgaccgccgaccgccgcgatgaagcgacaaccccggcgtcgctacctcccggcggaactgcctccaagaaacacattcacgctcccctcctcatcctgattagtgatcatggaggcggtactatgaaatcaattacgccactaaactatgagctctaggattccgcaccacacacgtcgaatacgtacatatcatgtatcttaccaactatggacgatgatcaaatcagtcttgctaggaccatctgcgctgtctcatccacgatgagcggatcacccccgggaagggcatggatctaccgtttatgtgcgcatcaaccattccaaagtgatggctatgaagatgcatgttgataaggagcgcaaggtgctcaatcgaccgccaggtccggttccgcgccgcctaccaggctaaaggcaagattactgaccacgacgt

SEQ ID NO: 23912 - DNA, 458 bp, Zea mays
  Clone ID: MRT4577_121813C.1
gggccacaaaaccccctgtttaaatgggttttattaaaaggacccttaatgagttccaccccccccagaaaacacggtgcctgggccctcaaagggggctttgggttgtttccgttaaaagttaaaccccaaggccccttgcttttgcccacattgaacccatgttaatcctagctttacagttttagaaaatgttgtttcccccccttatttttggggcccaaacaggcaaattttcgggttaaccctttttatacagggggccctttctttttaaaaaaggagtctcctcagggttagtttaaagctttctttttgggtttttttcttgggaaaacattttcgggggccctccgctttttttaaggggccctaaattttttttccttccccttttttttgggggccgcccccccggggatccccacttttttttatttccgcccgggccctatttt

SEQ ID NO: 23913 - DNA, 1570 bp, Zea mays
  unsure (1)..(1570): unsure at all n locations
  Clone ID: MRT4577_121814C.1
accacctgctcgtcgccgccgccgcgcccccgtcctcgccgcaccagtaccggaggcggaggcggcgccgggtgctggggtgcctccgcccgcgcgccgcgtccgtccgctgctgcgccgcggcggcgcgggcggcggaggccaccacgcgtgtcttcgtcgtctccgacctgcacacggactacccggagaacatggagtgggtgcgccgcctgcccgcccaggtcggggcgggcgaggggcgaggcgtcgacgcgctcgtcgtcgcgggcgacgtggccgagaggaggggccacttcgcgcgcaccatggaggtcctcagggagcgcttcgccgccgtcttctacgttccagggaaccacgacctctggctgcgccgcgagggcggcctctatatggattcgctggagaaactgactgcattgcttgatgcatgtagtgagctgggtgtggatacaggcccaagaacgataggtgacttgggaatcataccattgttcccatggtaccacaagagttttgacaaggagaaggatgttaacagtgtgcgtgtcccttcgctagaaatggcttgtaaagactttcatgcttgccaatggccttcagacctgacaaatgatgatgaggctcttgctctttactttgacaagttgaatgacaagaatcatgatgcgtattgaagaaagtgaaaagtagcagcaaacatatatttaacgttttcacactttgtaccaaggcaagagttgtgtccggagaaacgaatgctttattacccatatcttcctaaggtcattggctctgattttttggagaggaggctgagagatatacacagcaacagagaagacagagcagcttgccatgtttttgggcacactcatttctgttgggattctgtggttgatgagatcaggtacgtgcaggctcctctggcataccctcgagaaagaaaacgccggatgaacggtgaaggctggctgccattttgtgtataccgtgacggtttcaacccagaaatttatccagcactgtggtcagattactacaacaagaacaaaagggaacccgagaacactcagctcgcgccttgggttgccagccattacgcaaagtaccacaagttccactgaccctttctgagttgccttggctttttgccgaattgatgcagatcgtcccttcaggatggtgttgaattagctgggaaaaggagatattgacgttttacctgtacatgatcttttcttgtttctacccttaccataacttttgggcaagtaagcgccagcctctgttcgttgtatgttgcagaaatctgaataatgtgtataagattcttcaaagcattgctgcagagatagcgaaatatagctgattctgttcatctaaaaaaaaaaaaaaaaaaaaaaaaaaaaaaaaaaaaaaaaaaaaaaaaaaaaaaaaaaaaaaaaaaaaaaaaaaaaaaaaaaaaaaaaaaaaaaaaaaaaaaaaanggggggggccgttttaaaggaccaaagttaacgtccgcgggcttgcaagttaatattttttttttagggcccccaaa

SEQ ID NO: 23914 - DNA, 261 bp, Zea mays
  Clone ID: MRT4577_121815C.1
ggaagcggcgcctgcaggccggccgattccgtcgacccacctcgttcgcaggcgcacgaagccaaacctacctcataaacctacgctggtccgttgctcgcgcgtccatggctcagagcgtatgggactacgtcggtctaacagggcgagagcagagcatatcggacagttacacttaaggtggtggacaacccaagggcctgtggttgacagtgcagatggagcctgaaagctgatgggttaagcttaaacaacgcagct

SEQ ID NO: 23915 - DNA, 619 bp, Zea mays
  Clone ID: MRT4577_121816C.1
tttttccccccatgtttcacagaaagtgaagacgcgagtggtcaagaagagcatcaatccggaatggaacgaaaaactcaccctctctattgaagaccctgccgttcctattagactggtacgccttcgcttccacctttccttcccgaactctacaagtattctgagcaaacgagtaacagaggaaataatttactgctagctagtagtaccaatctattactcgtcttccttgatatgtgcaggtgtagctgttagttgttatatgtacaatcaattgaacgaaacattcgtgagccatatatgtttcgtactacagtttttttaaaaaagattaaagttgttctgtacggtgagaaaatcacgtctctcctgatgtaatattagtgattatatatgctaactcagcatgcggtcactaccgaatgacttccatattatggaaattaactttgtctattcttacatgcacacttgtaatttgcctatgccagccaatacagttcagattaagccatatttacggtgttttaagcttttacgttgcacgcatcagtttcgtgagcctgcctgtggttttgatatttgagttgagtcccaagactttcctagctcaaaa

SEQ ID NO: 23916 - DNA, 446 bp, Zea mays
  Clone ID: MRT4577_121817C.1
tggctctggaacctttgggctgatttatgtgcttgagagaaacggtcatttaaggacgagcgggaattcacaaactttccatcggccggacccgggtaaatcactcgcatcttatcgaggtttaaacgtgacaagcgcggtactaataattcccgtttcctcgtccccaaggaactactaagtttaaccttaaagtaaaagaaaataaggctcttacagaatctcgatcgcgatccgctcggtattgatgcgagacaacaccccgggccgcttgctggcggcaaacaccacgcggcccttccccggctagccaccgccggactattccggcgttgcattaccggtacccggtaagctacgcacactaccccgcacattggcaaaccgcctaagatggcacgaagatatgtccactcattagccatcgcaaaaagcatcggcaaaaa

SEQ ID NO: 23917 - DNA, 205 bp, Zea mays
  unsure (1)..(205): unsure at all n locations
  Clone ID: MRT4577_121818C.1
cacggcccctncccaacactgcccaggacccattgtccctttaccttcccctcgcggcggcgcctgctcgaccactccgacaacccccagggcctcctgtccggcgagctccacctcgccaccggcggcggcgagaggcggcggggctaactaagtgggtcagctgcggcggaggctatcccagcgccggagccgcgagtagggc

SEQ ID NO: 23918 - DNA, 339 bp, Zea mays
  Clone ID: MRT4577_121819C.1
gtggagcaccacgctgagctcggagctgctggcactgatgatgagaggacacccggtcctgtctatggttgccgaatgagacatcctgttcgactgggggggcaccatgaacggctcctacgggacagcctacgtgtgcacctcctaccgtctcttgttgtccttctacaccgagtacccctactatgcgtccaaagtgacggtggacacctcttatttccaccctaacggggactagcactggaacatcgtgccagtacatactccaagaaagtgccctgcgctacactacgaaaagctcctggcatgcacagactggttggagagcccgacaacaac

SEQ ID NO: 23919 - DNA, 314 bp, Zea mays
  Clone ID: MRT4577_12181C.1
gccacccctaccgttgggtcgccttcccattttcccttcccgttttccttttggtttttttttttttttttttttttttttttttttttttcccgaacctaacgcctcccctgtgggttgatttgagcacaattttttttttcgaatccaaatgtacaaggttttctctgacctgcattagatgtggattcttacaattgttcgcaatgtaagaaacagctttactatcttttttaaaaaagggtccctcaccaagtttctggaccaggggcaaaacatatcttactgtgccgggtataagcaccctgatcgac

SEQ ID NO: 23920 - DNA, 710 bp, Zea mays
  unsure (1)..(710): unsure at all n locations
  Clone ID: MRT4577_121820C.1
gtccgtccacgtcgtgcacccccagtgttgctcttctgtgggacctcggctggcctcttagggtcctgactatgctgacccctccttaagagttggcatagatcccactagttgggtactcttccattgggttttggctgaagtcatcacatcctagtcggctacctgaccttggaaaccacgacttcttttcttagctctggtccgtgtgttcatctattttatctcttgaggtgtgcactgtgtgtttacgtgttcagtgtaatgagtatcttgcntttgccttggcgccctttccttgtccnctccggtgctttttctgtntcttttttctttgtcctttttggtgtgactttcctcttccttcgcctgctggtccctggggtcctgtggggggtcctcctgcttggtgtcccgtttttcttcctccccccgcggatgcttattgtctccccgttcctntcccccttgtcctgggggctgtctttggccccctttttctttgggcgccttttcccctaaagccggccccccttttgtgtcgccctccccttcttccctggggctggccctttcgccggccctctttctggccctccccttttttcntcccccttttgcctttttttgtgtctctgtcccccgttgggcttttggcacgccccttttcccctccccccctccggtccccccccntggccccctccccc

SEQ ID NO: 23921 - DNA, 541 bp, Zea mays
  Clone ID: MRT4577_121821C.1
gagcgccgacgtggcgagcacattcatgggcaccccactggcggacccgcaccactagaacggacgcatctgtggaccgcatcgggtttggaaagagagacaaggggaaccctgctctgaaaaagaggataactacatcaacctgatgtgacctgtcactgtggttccccggtgccataaaacccaactacctgcaccgctcgatggacgctgactactgacttcaacactcgttactgtctaggagaagcccgtgcagtacctgcattaagagttgaactcgcttgaccacaacctggccaagaatgaggcctactgcatgatcaacacccggaacgagaactcacgaattaagtccaacccatagcagccctacaacaaggcatacggcctgcaggcgaatgcggaagagcgagctcatacactgacgctggaccatgctcgacaccctgtgcaccctgttcgtttagcggatcacctgggtcacctggatacacgcacgcaagtggagcttgttgacaggtgctgctaactgggccag

SEQ ID NO: 23922 - DNA, 270 bp, Zea mays
  Clone ID: MRT4577_121822C.1
gctaaaaagcaaccctctcacggggaagctgggaggtacctggtttcaccaaactgaattacggtttcggaggtgaaatgggctggcgaccagcaaagcacaacgaacataatacaaaggcacctacggacagccgtcgatcagtctgaaaagtggttatataacgaaagatacagcgatgcacactaaaagatagtgcctaacaaatatgaacaaagctatacgcttgcaatctaccaagagccatgatgctagcccccatcctccccc

SEQ ID NO: 23923 - DNA, 631 bp, Zea mays
  Clone ID: MRT4577_121823C.1
ggccgccccttttttttttttttttttctttttttttttttttttttttttttggatcgaatgtcacatctttatatataacaggagttctatacaaaataaataattacattataaggagacaacggtccagcaacccaaagttgactgggagacgacggcctagacctctcacgaacacatcgcagcatcctccaagcgcctcatcatgtggtacctgttcttgacctgggacttgagattccaggtaccaacttgctcttcaggtaacacgtgtcctcacgcggcatgggggggaccggacgccgatagcgcgagggtcccgccgaggcactggccttgggtcgcggcgagcacgggtgacaacggtaatcaccagtggatggagattcttcatcgtgttactcgatcccgcgctggagtccccgctcatcttcaatctcacgacaccaggtcgcgccacctcttccgctacgcatgcactgcaccgatccgcggccaagaacgagcgacgacgagcaatatacaggagcactggtggtcctactcccgtacaggagccaaggtttccctccacgctccctcgaggctcgcccacacggttcatttttttttttttttttcccggccg

SEQ ID NO: 23924 - DNA, 600 bp, Zea mays
  unsure (1)..(600): unsure at all n locations
  Clone ID: MRT4577_121824C.1
caattatattactaccactgacatgactttccaaaaagcacataatttgaatcaacacaaccacccacagcctaattattagcatcatccccctactattttttaaccaaatcaacaacaacctatttagctgttccccaaccttttcctccgaccccctaacaacccccctcctaatactaactacctgactcctacccctcacaatcatggcaagccaacgccacttatccagtgaaccactatcacgaaaaaaactctacctctctatactaatctccctacaaatctccttaattataacattcacagccacagaactaatcatattttatatcttcttcgaaaccacacttatccccaccttggctatcatcacccgatgaggcaaccagccagaacgcctgaacgcaggcacatacttcctattctacaccctagtaggctcccttcccctactcatcgcactnatttanactcacaacagctaggctcataaacatnctgtactcacctcaatgcccangantatnanactcctgaggcancnattgaatatgactagcctacncaatggttttanagtaaagataccncttt

SEQ ID NO: 23925 - DNA, 728 bp, Zea mays
  unsure (1)..(728): unsure at all n locations
  Clone ID: MRT4577_121825C.1
gggtacctcgaggccggccgggccggggtctcncattcccacctctcgtagaagcaaagctcgacagtagctaccacaccacttgacttcaccatggcactcgccggcatcaccaaccaggacttgctcgacgcacaggttgagctatggcacagcaccttcgcctacatcaaatccatggcactcaagtccgccttggaccttggcctcgccgacgccatctaccaccacggcggcagcgccacgctgccgcagatagttgacagggtcacgctccacccgtccaagaccctccacctgcgtcgcctcatgcgcgtgctcgccaccacgggcgtgttcagcgtccagcacccatcgccgttgggtgacgacagcagcagtgccagtgacagtgagcctgtctacaagctcacagcagtgtccgccctcctggtcggcccgcgccgcagccacgtcccgctcgccgcctttgtcgtcgacccggccctcgtcacgcccttcttcgagctcggcaaatggctccagcgcgagcttcccggcccgtgcatcttcgagcacgcgcacggccagaccatctgggagcacgccaacggtgacgcggccttcaacgcgctcctcaacgacgggatgctctcggacagccacttcatcatggacatcgccagcaaggagtgcgcggacgtcttccaggggataagctccctggtcgacgtcggcggaggtctcgg

SEQ ID NO: 23926 - DNA, 269 bp, Zea mays
  Clone ID: MRT4577_121826C.1
gaagaaacggaagtgttaggcagatgaagcagtggtcttgctcatgccaggccaggggagagcatcaccccgtccacggatgtagatgacatgacctttatggcctccgttggagcggggaacccttcgtctatgggcatctcctcccaccctgataacgctgaggcgagctccattgccctcccggcctcccctggagggcgatgccaccacgacacctgttgccctaacgaccttggcgatgggccccgcgaaaggacattggaagc

SEQ ID NO: 23927 - DNA, 227 bp, Zea mays
  unsure (1)..(227): unsure at all n locations
  Clone ID: MRT4577_121827C.1
acgagctctctatatnnccgccgccctnnnntttttttttttatcaagattaaaacacttaaacttaacccagaatttcctcacagttagctcccataatatgtacatgcactgataaatcccacaggtatagttcacttcatttagactttacatccatcaatctaatccgcccctaactactgtgttctaatagaatgcacactctcacctattttgcaccacca

SEQ ID NO: 23928 - DNA, 573 bp, Zea mays
  Clone ID: MRT4577_121829C.1
ccgccgcatgaaccgctatgggctgcttgctgagggtcagaacaagcttgattatgtccttgcccttactgctgagaacttccttgcaaggcgccttcagacacttgtcttcaaggctggcatggccaagtctattcaccatgctcgtgtcttgatcaagcagcgtcacatcagggttggcaggcaaatcgttaatgtcccatcgttcatggtgagggtggagtctgagaagcacattgacttttcactgtcaagcccgttcggtggaggccccccaggcagggtgaagaggaagaacctgaagaaggcaagtggcggtggcggcgatgctggtgatgaggatgaggagtgaggatgaacaagtagcatggccccaatataatattatctagttttcataaacatgttcctatcatgagtacttagctgggtgaccagatgctcagtcccctgtgctgactctgcgtcatggatggttatcattttatcttgtgttactagcctatacttagctgctatgtttggagatgtttaatcctgtggttggtttttgacttatgctctgttgctatt

SEQ ID NO: 23929 - DNA, 485 bp, Zea mays
  Clone ID: MRT4577_12182C.1
gggacagggaaagggaaaaagaatgggagcggtagagggagcgagatatgggaaggagtggggatagagagcgtgagaaggaaagagaacgggagaaggagagggagagggagagagaacgggaacaggaacaggaacacgagcgtgagaaagataaggatcgagagcgggatagggaaagggagagggagcgtgataggcagaaggaccgtgagagggacaagaaagattatgattccaagcatgagaggtatgaggatggcggtagcaggaagagtggctcaaagacgagtagggcggaagaggatgcctacttgtataggagagatacagatgtcaatgaaatttcagcaaaagggaagtacaataatcctgatatgcaagctgacaaacacagccgaagaaaagatgattctgaagatacagataagtggcccactgacaatagagacagctatgacagaaagaccctgtccagatatgaa

SEQ ID NO: 23930 - DNA, 649 bp, Zea mays
  unsure (1)..(649): unsure at all n locations
  Clone ID: MRT4577_121830C.1
cgtcgcaaccgcgactagtcttccccaacccctcggtcgtgcctcctccatgtcccctccccctctttctccattccctagccatcgaagctgcggctcgcggccagctcgacgtggtggccctcagcccgccagcgtggtcggctcatggccgatggctccactccccccacgcgccctcatccctagccttggtggtggcggcgcagcccggtgtggcttcccagcccacggtggcttacagccagccgacacggctcactactcgtctagcatggacgagcggcacatcctgtaggagatctcgcccatggtgagcgcgacaggcccgtttctcagggaggaagaagaagtggtctcatttgatcccaccaattgtgttttcctgcgtccgtggcccatatggccctgtgtatggcttgtttcggccaataaagacgtgccacgttgctcaaattcagcggtttagtaaatatacgttaacttttgcgtcgaacaccggatttattccgttccaattgcgttagttctataataatgtcgggtacacattaaaaatattattttattgtaacacatgttttagttgatgtaaaccctgatgagggaatatatcanactaaaataattaataggttgtttggtttga

SEQ ID NO: 23931 - DNA, 468 bp, Zea mays
  Clone ID: MRT4577_121832C.1
gttagtttatctatataactattagaaacatgttgtatcgttgtgcagtgacgatgatgtttctagcaggttcagctgatgcctgatagggtgaccctgaacagaacgacatgcaccttgacgaggccgaaggatggatcgatttaggtggacgctgctgtcaagcaagcatgatgggtggcattccatttcttatttctctggtaaaagggatcaattaggtctgatggtctactcataattgccatcaccacatatttcttgagtttgcacatttcttcagttaagctgaatgcaaaccgtcttgttattggcacacttcggagattcgaccagttcatgaacctggtgatcaacaacactgtggatgttagtggaaatacacacccatatgggatgtgttattaggggaatcggtgtatgacgagcatgagctattcagtacaggagtatgtctcagtgtgacgt

SEQ ID NO: 23932 - DNA, 949 bp, Zea mays
  Clone ID: MRT4577_121833C.1
cctgccgggagtcgtgtcgatgacccctccgctgcgccaaccaaccctccctggcctcgaggcggcacggcactgctacagtgctacaaaccaactacctaccaccactccggcagtccggctagctccataaaggcgcagccggccggctggccggtagcagtcagccagccagccagccatggagacggcctccttcctctcagtggcgctggccctggcggccctcgtccccgtctcgctgctccttgtgaaccggctcctctacggcaaactgcccccggggccgcggcggcgtcccgtggtgggtaacctgttcgacgtgcagcccgtgcggtgccggtgctaccaggagtgggcgcgccggtacgggcccatcatgacggtgtggctgggcacgtcgcccacggtggtggtgtccacgtcggagctggccaaggaggtgctcaagacccacgaccagcagctcgccgaccgctgccgggaccgctccaccgagagcttcagccgaggcggccaggacctcatctgggccgactacggcccccactacatcaaggtgcgcaagctctgcaacctcgagctcttcacgcagcgccgcctcgaggcgctcagccatccgcgaggacgaggtcccggcatggtcgagtccgtctacaaagccgtaccgcgcctggcagtgcagggaaaaacacgatgccttcaccatcacgcggaaaatacaatgagtgcctctgctgcaaacagaagcttggagccaatgccatccttgcggtttcacttgctgtgagcaaagctggagctatggtgaagaagattcctctttaccagcacatcgcaaatcttgctgggaacaaaactctggtgctccctgtacctgcctttaatgagattaacggagggtcacaatgctggaaacaagcttgccatgcaggagttcatgaacctc

SEQ ID NO: 23933 - DNA, 424 bp, Zea mays
  Clone ID: MRT4577_121834C.1
tttaaacaccagaagctaagatgctcattgtgatacctggacgagcagaagatcttatggcccggggaccataggaccataaccacaagtgaagaaactactcgccgtgtgatgccgtactatacctacacataaaacttgcttacactgtatcaggaaaacctttcttttggttgacactctactgaataacgaggcttatctactttctgtctacaccaaactattccaaacccgtgaccttaacataaacatctgagaacagcttagatggatcaggctgtggacacttcttcgctgtagaaatggcaaagtggacttactctctaagctcattctccatgttctttacctattgggccggtgctaacttatggaccaacatgagcttcctaaccctttcaattggatcacactcctgtgt

SEQ ID NO: 23934 - DNA, 2032 bp, Zea mays
  Clone ID: MRT4577_121835C.1
ccggccgggattcactgtccagtcgtgtcgataacccctccgctccgccaagccagccaccctggtccacgggcgtcacggcactgctacaaaccaactacctacctaccaccaggccggcagtccggctagctccataaaggctggagacggccatggagacggcctccttcctttcagtcagccagccagccatggagacggcctccttcctttcagtggcgctggccctggcggccctcgtccccgtctcgctgctccttgtgaaccggctcctctacggcaagctgcccccggggccgcggcggcggcccgtggtgggcaacctgttcgacgtgcagcccgtgcggtgccggtgctaccaggagtgggcgcgccggtacgggcccatcatgacggtgtggctgggcacgtcgcccacggtggtggtatccacgtcggagctggccaaggaggtgctcaagacccacgaccagcagctcgccgaccgctgccgggaccgctccaccgagagcttcagccgcggcggccaggacctcatctgggccgactacggcccccactacatcaaggtgcgcaagctctgcaacctcgagctcttcacgcagcgccgcctcgaggcgctcaggcccatccgcgaggacgaggtcaccgccatggtcgagtccgtctacaaggccgtcaccgcgcctggcagtgcagggaagccgttggtggtaaagaaccacctctcgatggtggccttcaacaacatcacgcggctggccttcgggaagcggttcgtggacgcggccggcgagctggacgagcaagggcgcgagttcaaggggatcgtccacaacggcatcaagatcggtgcgtccctctccatcgcgcagcacataccgtggctgcgctggctggcccccggtcgacgagcaggccttcaaagcccacggcgaacggcgcgaccgcctcaccgtgaagatcatggaggagcacgccagggccctcaagcagcgcggcgcccagcagcacttcgtcgacgcgctcttcactctcagggacaagtacgacctcagcgatgacaccgtcataggcctcctctgggacatgatcaccgccggcacggacacgacggtgatctcggtggagtgggcgatggcggagctgctgaggaaccccagagtgcaggagaagctgcaggaggagctggaccgtgtcgtcggccgcgaccgggtcctgtcggagacggacttcccgaacctgccttacctgcaggccgtcgtcaaggagtccctgcgcctgcacccgccgacgccgctgatgctcccccacagggccagcgccagcgtcaagatcgccggctacgacatccccaagggcgccaacgtcgtcgtcaacgtgtgggcggtggcgcgcgaccccgaggtgtgggacagcccgctcgagttccggccggagcggttcctccgggagaacatcgacatcaagggcgccgacttccgcgtgctgccgttcggcgccggccgccgggtgtgccccggcgcgcagctcgggatcaacctcgtggcgtccatgatcggccacatgctgcaccacttcacgtggacgctgccgagcgggacctgtcccgaggacgtgagcatgatggagtcccccgggctcgtcaccttcatggccacgccgctgcaggccgtcgccacgccgcgcctggacaaggaggaactgtacaggcgtgtcccttcggacgtgtgagccgtcggcgtcctggcatctgctgcgttccctgttttgaaacctgctgctgctgttgcgaatttgtgtaccattaactattcgctggtgaatggtgatgtacgtgtcatagtcgtgtacgagcattttgtgtactgcagaacttgatcgctgagcatacacttttgcccggtagtaatttacaatttcagcattgcaaaaaaaaaaaaaaaaaacggggcttactactagtacgtcgcagtaaacagtgtaaagctcgaaattgagacctcacgaatatgcaccagcctcctcg

SEQ ID NO: 23935 - DNA, 798 bp, Zea mays
  unsure (1)..(798): unsure at all n locations
  Clone ID: MRT4577_121836C.1
ccgggcactcctcccacccttataccagtccccgtcccctccgacccccgcgctgctgtttctggagacggagacagagagggaggcgtggcgactgctgcggagggcggtcgtcagctactgcggcgagcccgtggggacggtggcggcggagaaccccgagtgcatggagatgctcaactacgaccaggtcttcatcagggacttcgtgccctccgtgctcgccttcctcatgcgcggtgagaccgagatcgtccgcaacttcctccttcacaccctccagcttcaggatttttaggcacagattgtggacaggccattcaaagtctctgaaaactgagcatacacaggagacctggtaatggcatccagacacttcacctcgcgagatgttgcctgagaagatggaaatacaaagtgtcaacaaggcaaaaagtaatgatagtttcatctataagactgagggaagtaagcttatgaaaaatttccttccatagatgcctgactggtttgatcaatattaatctatgcaacttatttcatacaatactagtagatgggatgaaanttatttggttntgtccatggcgagttctagctgaagtattttgtggattcagtcaagaagtggggaacacgttctgctacttttcactttcatcagggaagcaaatcagtatctgtcaattattttgtagaaatctagtgggcagcttgtgttcttttttatacatagtttagataattcttgaataattctgagagcatttacatcccttagttatttgttgatatatg

SEQ ID NO: 23936 - DNA, 412 bp, Zea mays
  Clone ID: MRT4577_121837C.1
aattcgggggaggggtacggggcacaaacatggaaaaagaaaaggaaagttccttttttaaacggggcccaaaaacggaaaaacagaagaaccttttttttcggatattaccacccaaaaatagaacagaggacaacacaaggttgaaaatatcctatttagggggggcgaaacaggcaaaacttaaaaacaagaggctttaagaaaacacccccctaactggggaaggcgcaaatttgaaacttccctgaaacaatttggaggggggggccgaaaacttaaagaaaaaacttttgaagggccagcttgtttttgttaaaaaaacaacctgcccaagggtccagccacgtaaaatatgtacctttatggggggggcaggagagaaacccttatctcttgaaaaggctttccc

SEQ ID NO: 23937 - DNA, 1205 bp, Zea mays
  unsure (1)..(1205): unsure at all n locations
  Clone ID: MRT4577_121838C.1
cgggtcagaccccgcgtccgcagccaagcacttgaaggtattacattgtccatgattctcgaacctccttctgaggaggaagtttcactgcttttggaaatattcagcatatgccttactggagggaaagaagtgaacaaagaaatcatgagtaatgtacaagacttggccaaggcattttcagaatacaaagatgaagtcctggtgaaacgtgaagagctgcttgagtatgcccaaagtatcatttcaggactgaagagaaatgctgacattgtgagatgctgaaaccctagaattgcagagaaaactagacgagaagcagaaatcacgaggtcaatcacctgaatatcaagataaaacgtcagataagattgctgctgcaaatcttgaggtcttcaaagaagcacttggtgaactccgcttatgctctagagttgaagaacttctgctgaagcggaaactcctcactctcttatactcccccccgtttcattctccccccgcgctgctgtttctggtaacctccctttcttcgaccgtgtcctctatccggactcgttcccgcttgagaccccgccctctaaggaggaggacgcggcagcgcgacagactgatgaggcggtggcaccggctgtccccttgagggaggagacggagacagagagggaggcgtggcgactgctgcggagggcggtcgtcagctactgcggcgagcccgtggggacggtggcggcggagaaccccgagtgcatggagatgctcaactacgaccaggtcttcatcagggacttcgtgccctccgtgctcgccttcctcatgcgcggagacctggtaatggcatccagacacttcacctcgcgagatgttgcctgagaagatggaaatacaaagtgtcaacaaggcaaaaagtaatgatagtttcatctataagactgagggaagtaagcttatgaaaaatttccttccatagatgcctgactggtttgatcaatattaatctatgcaacttatttcatacaatactagtagatgggatgaaattatttggttttgtccatggcgagttccagctgaagtattttgtggattcagtcaagaagtggngaacacgttctgctacttttcactttcatcagggaagcaaatcagtatctgtcaattattttgtagaaacctagtgggcagcttgtgttctttttttatac

SEQ ID NO: 23938 - DNA, 760 bp, Zea mays
  Clone ID: MRT4577_121839C.1
tgtgcggcgctcgaggcggccgggttgcataatagtatttccctcgccgccgctggcgcccaccaaggcagcgcaacgctcgttcctccaaaggagagatgacgctctaccgtcgtgtcctgctcctccgtcgcctctcccacctccacccctcgcccgttccggccatctgctcctcaccaccacccaccctcgcggggctgctcacccccatggggcgccgccacttcgccttctcgtccgccgaggaggccgccgccgagcgccgccgccgcaagcgccgtctccgcatcgagcctccaatcaacgccctccgccgcgggccacctcccccacgggaccccaacgcgccccgcctcccagacaccacctccgcgctcactggcccgcgcctcagcctccacaaccgcgtccagtccctcatccgctctggtgatctagacggcgcctcagccgctgcccgcgccgccgtctcctcgcgcgtccggcccaccgtcttcacctgcaacgccgtggccgcggccatggtccgcgccgcccgccacgatgacgctgtcgtcctctttgatttcttcttccgccgctctaatatcgtccccaacatcgtctcctacaacaccctcatcctcgcacactgcgaggccgaccgcgtcgacaccgcgctgcaggtctaccaagacatgctcgcgtctgcgcccttctccccctctgccgtcaccttccgccacctcaccaagggtctcgtcgctgctggccgcat

SEQ ID NO: 23939 - DNA, 290 bp, Zea mays
  Clone ID: MRT4577_12183C.1
cccacgcgtgcggccacatgttgagtgagcagacggcggctagcactagcactagcggcggcggcgtcgagcgtcaggacaggtggctgcagccggtggcggagaacgaggaggaggaggaggaacaggaggagttcaggggtccgccgcgggcgggagcaggcacacgtccgtgcgcttcgtcgggagcgacaccgcgcccagcgagccctctccgactatgaccagggagttctcgggcatggtcggcgcagcagccagcgccgcagcagacagccttgacgcggaca

SEQ ID NO: 23940 - DNA, 766 bp, Zea mays
  Clone ID: MRT4577_121840C.1
cccgggcacctcctcccacccttataccagtccccgtcccctccgacccccgcgctgctgtttctggtaacctccctttcttcgaccgtgtcctctatccggactcgttcccgcttgagaccccgccctctaaggaggaggacgcggcagcgcgacagactgatgaggcggtggcaccggctgtccccttgagggaggagacggagacagagagggaggcgtggcgactgctgcggagggcggtcgtctgctactgcggcgagcccgtggggacggtggcggcggagaaccccgagtgcatggagatgctcaactacgaccaggtcttcatcagggacttcgtgccctccgtgctcgccttcctcatgcgcggtgagaccgagatcgtccgcaacttcctccttcacaccctccagcttcaggatttttaggcacagattgtggacaggccattcaaagtctctgaaaactgagcatacacaggagacctggtaacggcatccagacacttcacctcgcgagatgttgcctgagaagatggaaatacaaagtgtcaacaaggcaaaaagtaatgatagtttcatctataagactgagggaagcttcaagctccaagtaacagcatgggattcaccttgaaggcttcccaccgatatggtctatttcaagaatatgttctagtgagtctatggtatatacgagtagtcacttatgcctctacgatataagataatgttttatcagtttctacataatactttgcatg

SEQ ID NO: 23941 - DNA, 2299 bp, Zea mays
  Clone ID: MRT4577_121841C.1
ccgatgtcgacccccctcgattcgcggcgccattgcctccaccacgccccaaccactcgacgtcaatccccctcaattggcggcacccagtccccacctgttgcacgcgatcccttcggcacaccgcctcctagcccagatttgttcgcccctcgccctctccagacttggtgattcacagagtcggccagctgcctaggcaccggcgtccggatctcctgctccgctgctcgccgtctcgaggctctccggcgttgactcggcgcggcagcgccccccggtagcctagttccggatcccccaccgcccacgccccacagattgccccacccgcaccacccaccgtacggccggtgcctccccttcctcgtctccgcggcgtcgcagtcgcaggccggcccgggcactcctcccacccttataccagtccccgtcccctccgacccccgcgctgctgtttctggaggaggacgcggcagcgcgacagactgatgaggcggtggcaccggctgtccccttgagggaggagacggagacagagagggaggcgtggcgactgctgcggagggcggtcgtcagctactgcggcgagcccgtggggacggtggcggcggagaaccccgagtgcatggagatgctcaactacgaccaggtcttcatcagggacttcgtgccctccgtgctcgccttcctcatgcgcggtgagaccgagatcgtccgcaacttcctccttcacaccctccagcttcaggtgagctgatcccgatcctgcttactagttcctcgtctggtcaaaaaattaaaattccagaagaacagctgtaagtaaattggtaatattgagagtgtaagtaagaagaagacccattgtagaagcaaaggccttctgattatctgcttgttgattttgcataacaacaaatgttgctgtaaaccatatcatgatgccacccaatgtctccagacgaatagctagccacctatttgcacccatgttcacaagtgtgaacctaatgttgttgtccattgatctcccattgatgtttgccattctatcataggatttttaggcacagattgtggacaggccattcaaagtctctgaaaactgagcatacacaggagacctggtaatggcatccagacacttcacctcgcgagatgttgcctgagaagatggaaatacaaagtgtcaacaaggcaaaaagtaatgatagtttcatctataagactgagggaagtaagcttatgaaaaatttccttccatagatgcctgactggtttgatcaatattaatctatgcaacttatttcatacaatactagtagatgggatgaaattatttggttttgtccatggcgagttctagctgaagtattttgtggattcagtcaagaagtggggaacacgttctgctacttttcactttcatcagggaagcaaatcagtatctgtcaattattttgtagaaatctagtgggcagcttgtgttcttttttatacatagtttagataattcttgaataattctgagagcatttacatcccttagttatttgttgatatatgatatagtattttcctgctctttttgtatgccatatttatcttctaggcttcaagctccaagtaacagcatgggattcaccttgaaggcttcccaccgatatggtctatttcaagaatatgttctagtgagtctatggtatatacgagtagtcacttatgcctctacgatataagataatgttttatcagtttctacataatactttgcatgccaaccatatcagtgtatttgtagtagtatggtgtataaatgttgctggtcataaagccacgcttgataaggtgttctacgcttgaataaatgatgtgacaggttgttgtagagcagcatgatataagtgaatgcataactctactcttatattatatcattcctctcaatccatgtcttttaactggtgaatcattttaggtttctgtttgatttacttatgcttgttctggcgtgtctttatgctttatacagacttacacagacctgttttgacaagagccgaacagcgatgcttccatttcggaccacggcctagctaaaggctaatggttccaaatgtctgaagtaccgaagacagggctagctcctcgttttttttcatgtcaaaaaaatcgtgtatgattgcaacaatattggcaaaatatcattgtactttatattttgatatactgtgaacaaaacaagtgccctatgagaccatcgtgatttatgcattttcaaaataaattttacgac

SEQ ID NO: 23942 - DNA, 524 bp, Zea mays
  Clone ID: MRT4577_121842C.1
acctcacctggtggggggcggtggcgacctgccgtgcgcgctctccaccgctcgctgatcccacccaggtctaccggtcccgcgctctgcgtgggcaagccggtgaatgtgcttggcctgagcatggtccttggagtgggggaggggggccttgtgtgccaggcggcgagcagcatctccgtcgaccgcgtccccgccttggacaagcggatgctgatgaacctcctgctcctcggcgccttctcgttgcccaccgtcggcatggtcgtcccctacggcgccttcttcgtccctgccggctccgggaacgccggcggcgggacctacgcgagggacatgctgggcaacgacatcgcggtggtggcgtggctcaccacgcacggtcccaacggccgctcgctcgcgcgggggccactccgtgaccccccggacctgggggtggcccgggtcttttatctggccacctatcgggatcaacgccgtgtgcactcacctcggcctgcttcgtgccgtgggacggctcc

SEQ ID NO: 23943 - DNA, 1287 bp, Zea mays
  Clone ID: MRT4577_121843C.1
ctgaatttctgggtgagtttatggccgcagttgggcagaactatggacaaaaggtccttgtccagttcttgcagggattattgctgctctgaagtctgttggtgggactctccgccgcgcgcccgtgcccttcgccggagcttgccatatgaatggtcaaaccccgatggggctcgccgccgtagcagtgaggccgtgctgcagccgcctcatctcgtccgcctccgccgccgcggcgtcaaagacggcggcgggcaccgcgacctcgctcttccccagattgccccacccgctaccccccgtacggccggcgcctccccttcctcgtctccgcggcgtcgcagtcgcaggccggcccgggcactcctcccacccctgtaccagcccccgtcccctccgacccccgcgctgccgtttccggcaacctccctttcttcgaccgcgtcctctttcccgactcgttcccgcttgagaccccgccctccaaggaggaggaggacgcggcagcgctgcagaccgatgaggcggtggcgccggccgtccccttgagggaggagacggagacagagagggaggcgtggaggctgctgcggagggcggtcgtcagctactgcggcgagcccgtggggacggtggcggcggaggaccccgagtgcacggagatgctcaactacgaccaggtcttcatcagggacttcgtgccctccgcgctcgccttcctcatgcgcggcgagaccgagatcgtccgcaacttcctcctccacaccctccagcttcagagctgggagaaaactgttgattgttacagccctgggcaaggattgatgccagctagcttcaagattaggaccgtaccacttgatgagaacaatgaaggatttgaggaggtcttggaccctgactttggcgaggcagccattggccgtgtagctcctgtggattctggactgtggtggattattttgttgagggcttactgcaagataacaggcgacaatgctttgctagaaagagttgatgtgcagacaggaattcaattgatactgagtttgtgtttggctgatgggtttgacatgttcccaacattactagttacagatggatcatgcatgatagacaggaggatgggaatacatgggcatcctcttgaaatcaagctttgttctactccgctctacgatgctcacgagaaatgcttggtgtgaacaatggatcgaaaaatctcatccgtgccattaacaacaggctcagtgcgttgtcctttcacatcagagaatattactgggt

SEQ ID NO: 23944 - DNA, 1153 bp, Zea mays
  Clone ID: MRT4577_121844C.1
cgacgtcaatccccctcattggcggcacccagtccccacctgttgcacgcgatcccttcggcacaccgcctcctagcccagatttgttcgcccctcgccctctccagacttggtgattcacagagtcggccagctgcctaggcaccggcgtccggatctcctgctccgctgctcgccgtctcgaggctctccggcgttgactcggcgcggcagcgccccccggtagcctagttccggatcccccaccgcccacgccccacagattgccccacccgcaccacccaccgtacggccggtgcctccccttcctcgtctccgcggcgtcgcagtcgcaggccggcccgggcactcctcccacccttataccagtccccgtcccctccgacccccgcgctgctgtttctggtaacctccctttcttcgaccgtgtcctctatccggactcgttcccgcttgagaccccgccctctaaggaggaggacgcggcagcgcgacagactgatgaggcggtggcaccggctgtccccttgagggaggagacggagacagagagggaggcgtggcgactgctgcggagggcggtcgtcagctactgcggcgagcccgtggggacggtggcggcggagaaccccgagtgcatggagatgctcaactacgaccaggtcttcatcagggacttcgtgccctccgtgctcgccttcctcatgcgcggtgagaccgagatcgtccgcaacttcctccttcacaccctccagcttcaggatttttaggcacagattgtggacaggccattcaaagtctctgaaaactgagcatacacaggagacctggtaatggcatccagacacttcacctcgcgagatgttgcctgagaagatggaaatacaaagtgtcaacaaggcaaaaagtaatgatagtttcatctataagactgagggaagtaagcttatgaaaaatttccttccatagatgcctgactggtttgatcaatattaatctatgcaacttatttcatacaatactagtagatgggatgaaattatttggttttgtccatggcgagttctagctgaagtattttatggattcagtcaagaagaggggaacacgttctgctacttttcactttcatcagggaagcaaatcagtatct

SEQ ID NO: 23945 - DNA, 799 bp, Zea mays
  unsure (1)..(799): unsure at all n locations
  Clone ID: MRT4577_121845C.1
ccggcccgggcactcctcccacccttataccagtccccgtcccctccgacccccgcgctgctgtttctggtaacctccctttcttcgaccgtgtcctctatccggactcgttcccgcttgagaccccgccctctaaggaggaggacgcggcagcgcgacagactgatgaggcggtggcaccggctgtccccttgagggaggagacggagacagagagggaggcgtggcgactgctgcggagggcggtcgtcagctactgcggcgagcccgtggggacggtggcggcggagaaccccgagtgcatggagatgctcaactacgaccaggtcttcatcagggacttcgtgccctccgtgctcgccttcctcatgcgcggtgagaccgagatcgtccgcaacttcctccttcacaccctccagcttcaggtgagctgatcccgatcctgcttactagttcctcgtctggtcaaaaaattaaattccagaagaacagctgtaagtaaattggtaatattgagagtgtaagtaagaagaagacccattgtagaagcaaaggccttctgattatctgcttgttgattttgcataacaacaaatgttgctgtaaaccatatcatgatgccacccaatgtctccagacgaatagctagccacctatttgcacccatgttcacaagtgtgaacctaatggtgttggccattgatctcccattgatgtttgccattctatcataggatttttaggcacagantgtggacaggccattcaaaagtctctgaaactgagcatacacaggaga

SEQ ID NO: 23946 - DNA, 1767 bp, Zea mays
  unsure (1)..(1767): unsure at all n locations
  Clone ID: MRT4577_121846C.1
acatgagagcacaaacttcgaatatgtttttgctctcttctttcaaccagcggtgttacccagtgtagttcccatcagtggtcgctcagcaacaagacctatttccgttgctgtcgccgttgctgtcgacaaacttcaaatatgttttgctctgttctttcaaccaccggtatcacccagggtagttcccaacagtggtagctcagcaaaaaagaatgagcaaccacctaggaaatgaatggaagggtatctaacataaacctatactaatgtatctctgaagagtctgtcttggttaattctccgttggtagtacacattgtgcatcaacagtataaaaaacaacataagcttcacagtttcacgcagcatgtgacttggccgctcgccgtgagcaccttgtcctcttcttggacaggcagcaagcacagccttcgagcagctcaaggtcctcatcacaggtcagaatagaagccagctctgggttctccagcaacatttttgaggtcagaaaaccagcaatagtccatgtctgataagatcgggattgcttcccaatgaacctcccagatcgagtgtcgtagtattccggccacttgtcatctgagagtctctcctcggccacagtaatggccctccgggccaattctggtctgcccatttttatgcaggccaatgtgaactgccacaataaggttggccaagatccaccattatgatatgaccatggggtatttttaggatcactgccagtaataatgcgccattcatcatcttccattgcagggaagcatatcttcaggggcatgtttgctacaagatcatcccatttttcttcaataaggctaagaattccctcagcttgttttggagtagttagagacgaagctatggcccaaaggttgccaagagagaagaacctaaaatccatgtgagctggctgcagattccctataaggtaacctcctttctcaggaatccagtcaacaagccaggaagggatttgctcagggtaaatgttgaatttgttagtggcgtcatgggagtattcttctgtcttgtatctgtatatctcatttatcttcttcatgtcaacccagtaatattctctgatgtgaaaggacaatgcactgagcctgttattaatggcacggatgaggtttttcgatccatcattcacgacaagcatttctcgtgagcatcgtaaagcagagtagaataaagcttggatttcaagaggatgcccatgtattcccatcctcctgtctatcatgcatgatccatctgtaactagtaatgttgggaacatgtcaaacccatcagccaaacacaaactcagtatcaattgaattcctgcggacgcgtgggatttttctagcaaagcattgtcgcctattatcttgcagtaagccctcaacaaaataatccaccacagtccagaatccacaggagctacacggccaatggctacctcgccaaagtcagggtccaagacctcctcaaatccttcattgttctcatcaagtggcacggtcctaatcttgaaggtagctggcatcaatccttgcccagggctataacaatcaacactttctcccagctctaatcataaaaagagaggagcaatcagtggccagctcaagaaaaacatcacatgaacaccaccgtcctgctgtcttaatcgaccaacacccttgtgggttntaggtagcgcgcagtttggcaccgtaacccggctccggttcatncccgcatcgccagttctgc

SEQ ID NO: 23947 - DNA, 304 bp, Zea mays
  Clone ID: MRT4577_121847C.1
tttaataatttttttatttttttttttttttttttgttttttttaaataatgggggggggcttcaattccaaacaacaaacttatttatgatttggcctaaatccggcaagtccgcacacacaacaaaaccggtccattattaaacaaacactgacccgactcaagacactaacaggagatacttactcaacccccgaatggagagggccccaaacaacgcaggcacattgaaagttgaaaccccccagggcttactggcccccacggagacgggtcacaagggggggggggctcttcttttgg

SEQ ID NO: 23948 - DNA, 153 bp, Zea mays
  Clone ID: MRT4577_121848C.1
atggcgcgatggcggcaacacccgatcctgagggcgagcgacgatggggccctagtgcgggcgagcgacagcgaccccggggccctgaggtgggtgagaggcggcggcactcccaaggcgggcaggcaagcggtgaagcaccaccaagcctga

SEQ ID NO: 23949 - DNA, 1247 bp, Zea mays
  Clone ID: MRT4577_121849C.1
cctcgaggccggctggggcaatcgttcccgacccctctagaggcgccgcccctgccgaggagccgaccgacgggcgaagcgggagggaggcgatggcggcggcttgggggcagaaggccctgggggctctgccgcagctggtgaagtcgctgcggagtgatcccgtctccggcagcgcacgacacaggcgccttccgtctctcaggaggaccttctcgttgtacgatcagatcaacctcatcgacagcgtcccggaagacgagctccgattccagtcgtatgatgacactggattcaaaattaacaatgtaaaatatgaaggcagtgtattgattgtagagaacaagataatgacatgggcacccaaaacgttctcagagataactcctgaaagtttatcaatcttcaaagttgtgcaccctatcccagagatctttattcttggttgcggaagacacgtccagctggtcagtcctgagctgcggatgttcattcggtcaactggaatgaaactagaagcagttgattcgaggaatgcagcttcaacatataatatcctgaacgaggagggcaggccggtggcagctgcagttcttccctatggagtcacttgttaatgttttatcttctataccagttgggcaggcgttctctctttataatcgataaccaactgagctttgtttcgttcgtgctgtttcttggaagttctatatctgtcatgcatgtccaaagtagagttgtctatcttcctgcttttctacttcctctagcaagcccagatgcacagactgttggtatgttttggttgccgagggtacaatcatgcgaccctaggttttgtagcttattgctccttttgtatcgcctaagtcacgcagtactacatggaatcgaacccaaccaagcccaaatgcacagactgtgggtatgttttggttgccgaggggtccaatcatacatacgggcgaaacacttgccactctgcttcgaactgggacgtgcgcccgcctggcgactggcgaggaccacggagtcccggacccggctgttttgccttctgttgatcgtcctaatttcagggctcaggcaggcaaacccgatgggatcctacgtggtaggagtactcgccagttcagatctcccgggttaatatttactgtcacgtcatgttgtatccctatcgcccatatactataaattatgtaattgatttttgccagtgtttatctgtgtttatcccctgt

SEQ ID NO: 23950 - DNA, 369 bp, Zea mays
  Clone ID: MRT4577_12184C.1
gggggcagagagtaccactttcaggggtggcaatatattttatcataaatcacttacagaactgggtggaaaacaccagaacacaacaatggcattaaggttaacaacatggcatggcatggatcaacaggtttgggtcatctatgggagagggatcaggatcacatggtctacgagatatttaatggggcacaaatgcatttccgtgttcaggacttgcagattggaatgactggattttggataacaaataaagcttgggtggcacaaaaaatgcagggcactctcctgcaggtattaccattctggacaggtgcatttgcacccgggatattctgaccaatctgttcatcctggggtatgagacct

SEQ ID NO: 23951 - DNA, 1634 bp, Zea mays
  Clone ID: MRT4577_121850C.1
ttgacccaacccagatccagatccacctagctcagtgcagccgtggctaccggatctcacaacagaatattggtctctgagggtgcggcaccgccgctagagtcccactcgtgcattctccggtagcccgcgaatacctttcctcttcttcccattacccccagcgtgcgttctctcctctcttggcggcgactcggcgaccggcgctgccaccccatgtttggtgcccaggtcttcctggggcccttcgccggcgacgagcatcaccagatgagggatcgagggcggcgcaggcggcgagctcgtgggcggaacagactggtgagattgaggatggatcaggagcttgagccctcctaggcaccggcgtccggatctcctgctccgctgctcgccgtctcgaggctctccggcgttgactcggcgcggcagcgccccccggtagcctagttccggatcccccaccgcccacgccccacaggtcaagttctgtgaccccaattgccccacccgcaccggctgtccccttgagggaggagacggagacagagagggaggcgtggcgactgctgcggagggcggtcgtcagctactgcggcgagcccgtggggacggtggcggcggagaaccccgagtgcatggagatgctcaactacgaccaggtcttcatcagggacttcgtgccctccgtgctcgccttcctcatgcgcggtgagaccgagatcgtccgcaacttcctccttcacaccctccagcttcaggatttttaggcacagattgtggacaggccattcaaagtctctgaaaactgagcatacacaggagacctggtaatggcatccagacacttcacctcgcgagatgttgcctgagaagatggaaatacaaagtgtcaacaaggcaaaaagtaatgatagtttcatctataagactgagggaagtaagcttatgaaaaatttccttccatagatgcctgactggtttgatcaatattaatctatgcaacttatttcatacaatactagtagatgggatgaaattatttggttttgtccatggcgagttctagctgaagtattttgtggattcagtcaagaagtggggaacacgttctgctacttttcactttcatcagggaagcaaatcagtatctgtcaattattttgtagaaatctagtgggcagcttgtgttcttttttatacatagtttagataattcttgaataattctgagagcatttacatcccttagttatttgttgatatatgatatagtattttcctgctctttttgtatgccatatttatcttctaggcttcaagctccaagtaacagcatgggattcaccttgaaggcttcccaccgatatggtctatttcaagaatatgttctagtgagtctatggtatatacgagtagtcacttatgcctctacgatataagataatgttttatcagtttctacataatactttgcatgccaaccatatcagtgtatttgtagtagtatggtgtataaatgttgctggtcataaagccacgcttgataaggtgttctacgcttgaataaatgatgtgacaggttgttgtagagcagcatgatataagtgaatgcataactctactcttatatt

SEQ ID NO: 23952 - DNA, 915 bp, Zea mays
  Clone ID: MRT4577_121851C.1
gagccggccgcgggaccaattaccaaggtctccggggcaaaatttcccgacccctctagattctggaacgaccgccccagccgaggagccgaccggccggcgaagcgggatgggggcgatggcggcggctcgggggcagaaggcgctggtggctctgccgcagctggtgaagtcgctgcggagtgatcccgtttccggtagcgcacgactcagacaccttccgtctctcaggaggaccttctcgttgtacgaccagatcaacctcatcgacagcgtccccgaagacgagctccgattccagtcgtatgatgatactggattcaaaattaacaatataaaatatgaaggcagcttgttgattgtagagaacaagataatgacatgggcacccaaaacgttctcagagataactgctgaaagtttatcaatcttcaaagttgtgcaccctatcccagagatcttgattcttggttgtggaagacacatccagccggtcagtcctgagctgcgaaagttcattcgttcaactggaatgaagctagaagcagtcgattcaaggaatgcggcttcaacatataatatcctgaacgaggagggcaggccggtggcagctgcagttcttccctatggagtcgcttgttagtgttttttcttttataccagtttggcaggcgttttcttgttggaatcgatagctaactgagctgaaatgtcggcatccgtctggaccatcgacaatgctgttttggtgtctaggaaaggccaccctaggttttgtagcatattgttccctttgtaatcgcgggctaacagaagtcacgcagtgtacactacatggaatcgaaataagaatgatggtccctgtcatagaaaattgtttaaaaaaaaaaaaaaaaaaaaaaaaccccccccccc

SEQ ID NO: 23953 - DNA, 281 bp, Zea mays
  Clone ID: MRT4577_121852C.1
agcagtggtaacaagcgcagagtacgcggggactccatgagcagctgcacaaatttcgtttcagctttaaatatctcctttttctgcaagttttctggttgtaaaagatgatggtggcaataatatggtacttgagctcacaggatgcacatttcttgtaacctgtattccagggcgttatctacctgaaaccatagttactgtttaagaataaccaaaggtttgcaaaaaaaaaaaaaaaaaaaaaaaaaaaaaaagtactctgcgttgttaccactgct

SEQ ID NO: 23954 - DNA, 162 bp, Zea mays
  Clone ID: MRT4577_121853C.1
ctctctcactgtcaatcccgacgtcttctttcctgtttggcacgaggaacaccacatgtagaggctcttacaagggcggattctgaactatatcttctgcatacatcatcaagatccatggcggtcaccaacatattacaatgcactccacactcaacagct

SEQ ID NO: 23955 - DNA, 425 bp, Zea mays
  Clone ID: MRT4577_121854C.1
tggactcgtgggcggacgcgtggggggagagcttgctatcctgcacttgaactgcttctgcatttttataaaatttattttagtgattcattgcatcaagaaaactattacttgtggacagcctggggacatatgagtccttttaagtagatgttgttatctgctcataccatgcaatacttttcctcaacaagtggtgttgttttaaatactagagtagaactacatccatgaaaactatcactgctcatatccacgacaaagcaccagtgaacgtgtgtgcgacaaggagggaccgcctgctgttctgagtccaaccaactagacctacaactgaaaggtatgctatatatataatatggtgctattttgacgtgaaccagattggtattgtaggccacacacaaaacagggaccgataaaat

SEQ ID NO: 23956 - DNA, 1458 bp, Zea mays
  Clone ID: MRT4577_121855C.1
cattgggtacctcgaggccggccgccacggaacggaaccgtcaatccgctacgccacagcaacgaccaaccggagccgccgccgccgccgccgacggggacggggacagggaaaccaccaccaccaccaccggccatattaacagctgcgcgtgcacggtggagttctacttccgcccgcgattcgactcgactcgactgctcgttccgtctcgaccttcaggcgggtaagcaggttgaccgtccgcgaattcaccgtatcccgggatacgtatgggttccaaagcgtccttccgcgtcacgctcctcttgctgctcctcgccgccgcctggggacctgctgcacaggccgacgacgctgctgagctcccggatcatattgctattaccttgaaggagcaggtttcttcgaccaagattcctgtccgtctcaagagtggcagcccgctgtgctcagcctgtgaaaacttcacgggcaaagctgtcagttatatcagtgagaaacagacgcaagataaggtcatgggattccttcatgacgcttgctctcagtcattctcgtttgaacagaagtgtgatgaattgatggactcttacgcaaccctcctgtttgccaagatcacggagatcaaaccagaagcgttctgcaaacagtatggcctgtgcaggggcacggctcttttctctggtgtgacaagtgacagcacatgtgtgttctgccaccacctgcttgatgaagttatgtccaaactgaaagatccggacgcggagtttgagataattcagattcttatcaaggagtgcaataagattgaaggccacgtccagcagtgcaagcgactggtcctgcaatacattcccctcatcctggtgaacggcgagaagttcctcgagaagaatgatgtttgcgcgctcgtacaggcttgtccagccacccataagaagactttcagctcagccttgaaggaagccttgttgctgagtgacgcttgaaggttggaggaagaacacgcaaagcgtttagcagtggttggaaatagtgtgtccaagtgccgtgtttgtacatataattgtcatatgaatgcatgaagacgtgtcttgtgccctgcattgtttccatcttgtatcataattcataaacacgttgtcttgagtagatttttatggacatccacaggggatgaaggttaaaatatttgtatcataattcataatcacattgtcttgagctcaacaaagctcaagatttcagagtaggaaagagtggtgtttcagaaacaacagaatacgttgttgttaaaagtgacgctggaagggtttgctgcccttactgtttgtgtgtaaaaaaagtgaagttagtggaatgaatgatcctggccagttttttttaatgaatgattctggccggtttatgttaatgagggattggggccagtttttttttaaaaaaccccacccc

SEQ ID NO: 23957 - DNA, 214 bp, Zea mays
  Clone ID: MRT4577_121856C.1
ctttaagaggggatgcttgcagcgtacactttgagtcctggaccgaacctgaagacgtgtttattatctgagggctaagctccactcgagctttactgtctatacaacaaccacatggggtgacgcctcagaaggatcatagttccgtgccacaaggatgcacggctgacgatgaggcttttggtgacatagttgcaatcccatgacatcgttt

SEQ ID NO: 23958 - DNA, 1223 bp, Zea mays
  Clone ID: MRT4577_121857C.1
cattgggtcctcgactcgagcggggccgggccgggaaaaaaaatccgctacgccacagcaacgaccaaccggagccgccgccgccgccgccgacggggacggggacagggaaaccaccaccaccaccaccggccatattaacagctgcgcgtgcacggtggagttctacttccgcccgcgattcgactcgactcgactgctcgttccgtctcgaccttcaggcgggtaagcaggttgaccgtccgcgaattcaccgtatcccgggatacgtatgggttccaaagcgtccttccgcgtcacgctcctcttgctgctcctcgccgccgcctggggacctgctgcacaggccgacgacgctggtattgctgagctcccggatcatagagctattaccttgaaggagcaggtttcttcgaccaagattcctgtccgtctcaagagtggcagcccgctgtgctcagcctgtgaaaacttcacgggcaaagctgtcagttatatcagtgagaaacagacgcaagataaggtcatgggattccttcatgacgcttgctctcagtcattctcgtttgaacagaagtgtgatgaattgatggactcttacgcaaccctcctgtttgccaagatcacggagatcaaaccagaagcgttctgcaaacagtatggcctgtgcaggggcacggctcttttctctggtgtgacaagtgacagcacatgtgtgttctgccaccacctgcttgatgaagttatgtccaaactgaaagatccggacgcggagtttgagataattcagattcttatcaaggagtgcaataagattgaaggccacgtccagcagtgcaagcgactggtcctgcaatacattcccctcatcctggtgaacggcgagaagttcctcgagaagaacgatgtttgcgcgctcgtacaggcttgtccagccacccataagaagactttcagctcagtcttgaagggagccttgttgctgagtgacgcttgaaggttggagaagaacacgcaaagcgtttagcagtggttggaaatagtgtgtccaagtgccgtgtttgtacatataattgtcatatgaatgcatgaagacgtgtcttgtgccctgcattgttttcatcttgtatcataattcataaacacgttgtatttatggacatccacagggggtgaaggttaaaatatatttgtatcataattcatataagccccctgtcttg

SEQ ID NO: 23959 - DNA, 1412 bp, Zea mays
  Clone ID: MRT4577_121858C.1
cgagccgcagaagtgcaagtggacgaagaaggcgcggaagaaaaagaagacgaagaatgagcagaacgggctggcagccctagtggaggagatctcgctctcgaacagtcccaagcacagggcagcagcaggggagatactgcggatcggcaaccacaacatacccagcagggtgtttacgttccgtgaactggtggacgccaccaactctttctgcccagaaaacctgctgggcgagggcggcttcgggagggtgtacaagggatgcattccagacaccatggaagtcatagcggttaagcagctcgacaaagatgggctgcaaggtaaccgtgagttcctcgtcgaggtgctgatgcttagcctgctgcaccatccaaacctagtcaccttggtcgggtacagcacagactgtgaccagaggatcctagtgtacgagtacatgtcactcggttcactgcaagaccatctcctcgatctcagtccgaaatcccagccactttcctggcacacacggatgaagatcgcagtgggtgcagctagaggcatcgagtacttgcacgaggtagccaacccgccagtgatctaccgcgatctcaaggcatccaacatcctcttggacgcaagcttcaacgcgaagctgtcggacttcggtctggccaagcttggtccgagcggcgacaacacccatgtcagcacaagggtgatgggcacgtacggctactgcgctccagagtacgccatgactggcaagctgaccaagacatctgacatctatagctttggcgtggttctcttggagctcatcactgggaggcgagcgatcgacaccacgaaaccaactcgggagcagatccttgttcactgggcagcaccattcttcagggataagaggaagtttgtgaagatggccgacccattgcttgacatgaagtttcctctgaaaggtctgtaccaagcactcgcgatctcatccatgtgcttgcaagaagaagcaagcagtaggccgctgatcagcgatgtcgtgaccgcccttacatttcttgctgatccaaactatgaccctccggatgacatcaaggatcctctgcccataacagttccaaacctagacatggaaacaactggccaaaacggaacagaaggaggtaaagaacaattgcagcaaaacgaaggagaaagccgccattccacaaaaaacgaagaagaaggtagctgaaatgtggctttctctggaattacgaaatgttaaatcaagccagagctagctccttgaatgaaactaacaggtggacgtggtttggttaggtgtaatcaatttctcaacattcttgaaaccggtgtatgtcatataggcaaagatgtaatatcagctcattttcttgaatgaaactagcgtgtgcagtttggtt

SEQ ID NO: 23960 - DNA, 1150 bp, Zea mays
  Clone ID: MRT4577_121859C.1
ccggagccgccgccgccgccgccgccgccgacggggacggggacggggacagggaaaccaccaccaccaccggccatattaacagctgcgcgtgcacggtggagttctacttccgcccgcgattcgaccgctcgttccgtctcgaccttcaggcgggtagcaggttgaccgtccgggaattcaccgtatccccggatacgtatgggttccaaagcgtccttctgtgtcacgctcctcttgctgctcgccgccgcctggggacctgccgacgatgctgctgaactcccagaccatagagctattaccttgaaggagcaggtttcttcgaccgagattcctgtccgtctcaagagtggcagcccgctgtgctcagcctgtgaagacttcacgggcaaagctgtcagttatatcagtgagaaacagacgcaagataaggtcatgggattccttcatgacgcttgctctcagtcattctcgtttgaacagaagtgtgatgaattgatggactcttacgcaaccctcctgtttgccaagatcacggagatcaaaccagaagcgttctgcaaacggtatggcctgtgcaggggcacggctcttttctctggtgtgacaagtgacagcacatgtgtgttctgccaccacctgcttgatgaagttatgtccaaactgaaagatccggacgcggagtttgagataattcagattcttatcaaggagtgcaataagattgaaggccacgtccagcagtgcaagcgactggtcctgcaatacattcccctcatcctggtgaacggcgagaagttcctcgagaagaatgatgtttgcgcgctcgttcaggcttgtccagccacccataagaggactttcagctcagccttgaaggaggccttgttgctgagtgacgcttgaaggttggagaagaacacgcaaagcgtttaacagtggttggaaatagtgtgtccaagtgccgtgtttgtacatataattgtcatatgaatgcatgaagacgtgtcttgtgccctgcattggttccatcttgtatcataattcataaacacgttgtcttgagtagatttttatggacatccacagggggtgaaggttaaaatatatttgtatcataattcatataagcacattgtcttgagct

SEQ ID NO: 23961 - DNA, 283 bp, Zea mays
  Clone ID: MRT4577_12185C.1
aacactgggagaccaccgcggattccttgcttgagtccaccatgatgcacccatgcacctgctcttgctgctggatgcccctagagcagaccctgtcacaacaaatgcgcgtagcatggacctgcggcgccatactccccctgtggtggacgccatgacgaacgatgagctgtttgctctctctccgctctctggtctgaacactctgtctcgccctgtctgcctgactccagaccaacgaggatcgtgcaactacgaggggcacaacttatagaggatcttg

SEQ ID NO: 23962 - DNA, 232 bp, Zea mays
  Clone ID: MRT4577_121860C.1
gctctggtgttctcatatatattgtgaagcatctgtttgatatcctacaacgtgagccaaatgagttgctgcaatttactctatccagtcctgctgtgtgccaaccaactcccctgcaactcagagcagcaagactgtcagcgagacagcggagtacaccgcagtccgtgagatcgtgagcaagctgacagccgactagtgcatagatgtcgtcgtgccgatgggcacatag

SEQ ID NO: 23963 - DNA, 269 bp, Zea mays
  Clone ID: MRT4577_121861C.1
ctcactatgctctggccgccctctcattctctttttccacacaaaacatctaatgcgccaaataactgatgagaggcgtcactggtttagctacattcatggctcacactatagagtggccaaagcgattttgaatccatcaaacatgtatttgcattgttacattattacctcataaactatccagactgagctactagtgctgagctactgtaacattatagaatgatatcttatacatccggcttgggagtctttataaaacaaaa

SEQ ID NO: 23964 - DNA, 1078 bp, Zea mays
  unsure (1)..(1078): unsure at all n locations
  Clone ID: MRT4577_121862C.1
attgggtacctcgaggccggccggggaaccgtaaatccgctacgccacagcaacgaccaaccggaaccgccgccgacgccgacggggacagggaaaccaccaccaccggccaccgccgcccccgtattaacagccgcgcgtgcacggtggagttctagttccgctcacgattcgattcgactcgactgctcgttccgtctcgaccttcaggcgggtagcaggttgaccgtccgcgaattcaccgtatcccgggatacgcatgggttccaaagcgtccttccgtgtcacgctcctcttgctgctcctcgtcgccgccgccgcggcctggggacctgctgcacaggccgacgacgctgctgagctcccggatcatagagctattaccttgaaggagcagacttcttcgaccgagattcctgtccgtctcaagagtggcagcccgctgtgctcagcctgtgaagacttcacgggcaaagctgtcagttatatcagcgagaaacagacgcaagataaggtcatgggattccttcatgacgcttgctctcagtcattctcgtttgaacagaagtgtgatgaattgatggactcttacgcaaccctcctgtttgccaagatcacggagatcaaaccagaagcgttctgcaaacagtatggcctgtgcaggggcacggctcttttctctggtgtgacaagtgacagcacatgtgtgttctgccaccacctgcttgatgaagttatgtccaaactgaaagatccggacgcggagtttgagataattcagattcttaccaaggagtgcaataagatcgaaggtcacgtccagcagtgcaagaggctggtcctgcaatacattcccctcatcttggtgaacggtgagaagttcctcgagaagancgacgtctgcgcgctcgcacaggcttgtccagccagcagtaggaagacgttctgttcgatgttgaaaaaaaatttttttagttatttgtgttttcaacccccccccttttttttttttttttttggggggccccccttttacactctcccccacttttttggtgtatttataattttttttttt

SEQ ID NO: 23965 - DNA, 360 bp, Zea mays
  Clone ID: MRT4577_121863C.1
gaccaaggaaatcaatttccaaaggaatgctgttgtttacaatacgacccaacatcctacgtaaagataacaatagagatctgacccctaattctttgggaataatgcctccattagggtctgtttgattgcacatcgatcctctattcccctcattttcttcgcagccgaacaaaagaagtttgtactaattataatttaaccgggtccatgataactgtcaaaaatttatcctcccaaaaaacggaaattaggaaaaaatttccttgtaagcgtttgggaggatccaccccccaatgcagcccgggggggggacaacctgcctgggcccggtatgggggatttatgttcccaactggg

SEQ ID NO: 23966 - DNA, 821 bp, Zea mays
  Clone ID: MRT4577_121864C.1
gggggagtgcctgtacccctcctcggtttcttgccgtgccgaacgaccccaagtccccaacacggaacggaaccgtcaatccgctacgccacagcaacgaccaaccggagccgccgccgccgccgccgacggggacggggacagggaaaccaccaccaccaccaccggccatattaacagctgcgcgtgcacggtggagttctacttccgcccgcgattcgactcgactcgactgctcgttccgtctcgaccttcaggcgggtaagcaggttgaccgtccgggaattcaccgtatcccgggatacgtatgggttccaaagcgtccttccgcgtcacgctcctcttgctgctcgccgccgccgcctggggacctgctgcacaggccgacgacgctgctgagctcccggatcatagagctattaccttgaaggagcagacttcttcgaccgagattcctgtccgtctcaagagtggcagcccgctgtgctcagcctgtgaagacttcacaggcaaagctgtcagttatatcagtgagaaacagacgcaagataaggtcatgggattccttcatgacgcttgctctcagtcattctccttcgaacagaagtgtgatgaattgatggactcttacgcaaccctcctgtttgccaagatcacggagatcaaaccagaagcgttctgcaaacagtatggcctgtgcaggggcacggctcttttctctggtgtgagcagtgacagcacatgtgtgttctgccaccacctgcttgatgaagtaatggtcaaactgaaagattcggacgcggagtttgagatattcagat

SEQ ID NO: 23967 - DNA, 532 bp, Zea mays
  Clone ID: MRT4577_121865C.1
tatatttatgttatagcggccaagtagaagagtgtactataagttgtacgtccgaaaaaatagcatgtaaatctataaaatcaatttccatctctcaccctatgaatttgagataggtttaaatgataactttggaaagtggtgaatgtcacattctaaaaaagtagcctattccattagtaagattccaattcctcaaaatgaaaggaaacaaacgggaccttaatctatttcttgtaaaagcatggattgggttggaattgtcaccatggttctaaaaaaactaattgcacttacatttattgtctattaaatctcaaatggacccctagtgtcttgtttagggcctgggcatccaataaaactctcgacactctaggcggtgcacatagacacaagacagtgtttaagtggcgcggaaacacgaaaaagcgtctgcctggctggcttggtgagctatgtgtgactgcaggaaaaatatcttaaacaggaagagacccagaaataggaaatgcagcgataaaaattggaa

SEQ ID NO: 23968 - DNA, 2011 bp, Zea mays
  unsure (1)..(2011): unsure at all n locations
  Clone ID: MRT4577_121866C.1
atctcgctatctccctgatattggtgtctagattgaagattatgcatcagcgacaagtaacgaccgcccggaaagagagccggaaaaaaaggactggaaatcgccaccgcccgcccctatttgagcagccgcttgttccttccgcgtcctcgctgctcctcaattcgattggctccgtgccgacctccatgttgagaaggaaagcatcgcgagttcgccatacggatgggttccaaagcgcctttctgtctcacgctcctcttgctgctcgccgcggcctgtggacctgctgcacatgcccacgatgctgtcgagctcccgcatcatggctcagccttgaaggaacagatttcttcaaccaagattcctgcccgtctcaagagtggcagcggactatgctcggcctgtgaaaacttcacgagcgaagccgtcacttatctcggcaaggaacagacacaggacaggatcatggagttccttcatgatgcttgctcccaatcattctcctttgaacagaagtgtgtcgagctgatggactcttatgcgactctcctgtttgccaagatcacggagatcagaccggaagcgttctgcaaacggtatggcctgtgcagggacacggctcttctctccggtgtgggaagtgacagcacgtgtgtgttctgccaccatctgctcgcgccactcatgcgaccactggaagccgccgccgccgccgacggggacggggacagggacagggaaactaccaccaccggccatattaacagctgcgcgtgcacggtggagttgtacttccgcccgcgattcgactcgactcgactgctcgttccgtctcgaccttcaggcgggtaagcaggttgaccgtccgcgaattcaccgtatcccgggatacgtatgggttccaaagcgtccttccgcgtcacgctcctcttgctgctcctcgccgccgcctggggacctgctgcacaggccgacgacgctggtattgctgagctcccggatcatagagctattaccttgaaggagcaggtttcttcgaccaagattcctgtccgtctcaagagtggcagcccgctgtgctcagcctgtgaaaacttcacgggcaaagctgtcagttatatcagtgagaaacagacgcaagataaggtcatgggattccttcatgacgcttgctctcagtcattctcgtttgaacagaagtgtgatgaattgatggactcttacgcaaccctcctgtttgccaagatcacggagatcaaaccagaagcgttctgcaaacagtatggcctgtgcaggggcacggctcttttctctggtgtgacaagtgacagcacatgtgtgttctgccaccacctgcttgatgaagttatgtccaaactgaaagatccggacgcggagtttgagataattcagatccttatcaaggagtgcaataagattgaaggccacgtccagcagtgcaagcgactggtcctgcaatacattcccctcatcctggtgaacggcgagaagttcctcgagaagaatgatgtttgcgcgctcgttcaggcttgtccagccacccataagaagactttcagctcagccttgaaggaggccttgttgctgagtaacgcttgaaggttggaggaagaacacgcaaagcgtttagcagtggttggaaatagtgtgcccaagtgccgtgtttgtacatataattgtcatatgaatgcatgaagacgtgtcttgtgccctgcattgtttccatcttgtatcataattcataaacacgttgtcttgagtagatttttatggacatccacagtgggtgaaggttaaaatatatttgtatcataattcatataagcacattgtcttgagctacggtgcggtcagtcaatttatatatccagaaaatttcagcgcaaaaaannnaaaaaaaaaaaaaaaaaaaaaaaaaaaaaaaannaaaaaaaaaaaaannnnnnnnnnnnnnnnnnnnnnnnnnttttttttttttttttttttt

SEQ ID NO: 23969 - DNA, 295 bp, Zea mays
  Clone ID: MRT4577_121867C.1
atcgcatcattaaccttcttggagataaactcggaaggggcgttctgtcattctgtaatatggccaatctgccatatccaaccaacatctccatgatctgttgatcagctgttcttcagtctgttcacttaagagcccagttttggcgtcttatacaaatgcatgaaaatctatagaagttgtattgaaaaaacaatacaacttccatcctttaaaactttcagaaaccatcttgcataacacaacagtttataatattcttattcttttgaagcagacatgatgctgtatttat

SEQ ID NO: 23970 - DNA, 381 bp, Zea mays
  Clone ID: MRT4577_121868C.1
cacaggacttactgacgaaaagattaggagtaacttgaatcaacggaaatgtgtcttaaaagcattggatgatcctctaacaagtgttgtaccatgctgggtgcgccaggaagacgatccggaaggctagtacctggacatgctggattgtggtcatgactgtgaaacagcatgtgtcaaacaatggctggttataacagacctgtgctgaatttgcaagaatacaggactggacacctagaaacattgatgcctttacccttatgaataagcctaccgactctgggcaagtaggttacatgtaacatacacgctgccatgactagcatagtatgttacagctttcccatgatcatcatacatgttggaatctatactata

SEQ ID NO: 23971 - DNA, 258 bp, Zea mays
  Clone ID: MRT4577_121869C.1
ggaaaaaaaaccatggaagggtcccattatattagttcttaaaagggccccaaatggccaatccataaaaggcataaaactagcatggcactctccccaaatttttgccaggacccaaatttcttatttctttggaccccaaaaggcctttggttcattaagaaacccttttatgttcatgccccttgaccctttggtaaatgggtcctaatcctttgaggacattgcccctattaccggccggaataagagggtttt

SEQ ID NO: 23972 - DNA, 356 bp, Zea mays
  Clone ID: MRT4577_12186C.1
atgtccgagaactcactggtcatagtcgggaagggctcgctgggcacggtgtcgctcctgacggagcggatgcacgtgtgcctgatccagcgtgcgacggacccccacggcttgccgtgggggtccggcggtacgacgacggctggctcggcggcgggctcagcgcgtggatgtccctgaactcctcctcctcctcctcgttctccgccaccggctgcagccacctgtcctgacgctcgacgccgccgccgctgctgctagtgctagccgccgtctgctcactcaacatgtggcacgccgcttcctccctcttcgtcgacgctaagtctctagcggccgccgactagataagcatc

SEQ ID NO: 23973 - DNA, 409 bp, Zea mays
  Clone ID: MRT4577_121870C.1
gtgggcgggatccagccttcttcccggcgcttgtgattatcctagcttgtcgggaccaaccgggcctatctggaccgcagcgtggtcatcgtcgttggtctgtacgacgagtgcgacttcgctgtcaagtggcacgtgcagagctacctacggcccggggacgcctttgtgctggtccaggtgcgctccacttccgggctgtacggcgccgactggggctccatgccggtatacggcgcatgacgaggactacgctggcgaggacgccgacggcggcgccgagggcggtgcctatgtggaggagctgtttatgatacgggtggaggactacggcgccttaacctgcaccaaagcgcaggacctcgcgcgaccgatggtggacgaccagatacagtataagatccacgta

SEQ ID NO: 23974 - DNA, 283 bp, Zea mays
  Clone ID: MRT4577_121871C.1
tacgacggccgggccggacgggccctttaataatgggccctaaactagatgagagttgaccaggacataagaaataatggcgtgccttataaatcatgaaggggtactggattggaggagtttcagccactgatagtgactgtccatgtaagcttggtaatcttgagtggggggtagaacccatggggggggctcggttacaacccctaatacgctattacatgtgctgggctaaactttgccgattttgaggtggaaacaatctttctctacccttgggcaa

SEQ ID NO: 23975 - DNA, 434 bp, Zea mays
  Clone ID: MRT4577_121872C.1
gagacacacattatcatgtgtggtatgaccaataatatatgcatggtcataataaagttttggttttaatgaaaaaaaaaaaaaaaaaaaaaaaaaaaaaaaaaaaaaaaaaaaaaaaaaaaaaaaaaaaaaaaaaaaacaaaaaaaaaaaaaaaaaaaaaaaaaatagtttgtcccttgcccggggggtgcgttaaaaagaggggaaattttggaaaatttcccaaaaaattgggggcgccgttctaaccatcattttaaaagggccaaattcgcccttaatagggaggtggaataaaaatgtaattgggcgggggtttaaaaacttcgtaaattggaaaaaaccttggggtaaccaaattaaatcgctttgaagaaaatccccttttcccaagttggcgtaataccaaaaaggcccgaaccaatggcctttc

SEQ ID NO: 23976 - DNA, 199 bp, Zea mays
  Clone ID: MRT4577_121873C.1
gggggagaaaccacccaaaagtcccactccgctttaaccaaacaaaggacacccggccacttcttagaaaccccctaaacgggaggggtaaaaacgggccccggtgggggcccagaaaaaaaaaccctttttacctaacccccacacggggttccaacaaaaacggggggtcacaaccccctgttaaattggaaaacaa

SEQ ID NO: 23977 - DNA, 688 bp, Zea mays
  unsure (1)..(688): unsure at all n locations
  Clone ID: MRT4577_121874C.1
cccagttaagcaacatannnntggaacaaaaatgagctagaatgtcagacctctagctaatttagcattattatttcgacaactcagttaagctgcagaaaatgatagattctaaaagacaaactacccccacaattcaggcttttgagatctcaataattgtacgaagtttccaacacataaaagctgctttacaacggcaagacattgatatacaagatatgctggcttaacatacactgctgctcccgaaaagggggtacagttagtgcgcaagtagcaagccttccattatttgcccaggtgcatccaatgatttgccgcctcctttgatcattcaatacaggcacataggtttaggctcagactttagcggcaaatacttgctttgtatctatgacttcactcgtttggtcatcaccaacactacttgcttctagctggctttgctttgccaaagctcgtcttccttccctgcgaaagtccctcttcgcagctcgaacctcgtctaagccctttttaatcttagcctcaacctcgggagggaagaagcctacttctatttcagccaaatctgaatacatcttttcgatatttgctttccacactatccccatctcggtatccattttattgtaaggggtcttaggagtattatcattatcccaccagctttgtcaatacatcg

SEQ ID NO: 23978 - DNA, 279 bp, Zea mays
  Clone ID: MRT4577_121875C.1
gggaagtgagatgtggagaagtaaaacgaacgattacaagcctgccaagtctagacgtctggctcacaaagaagagaagcttcgcaagtctaatgatgaacagacaaccaaacctgggacagccacggaatttcataacatccagaccggcgcgggtgagctccttgttacatacgagggatccaggctagctattaaagacctaaggaggcttatggatacatgccacaaagaagacatgactggtgcatcggaggccacttttctgtatagtgaaaa

SEQ ID NO: 23979 - DNA, 1706 bp, Zea mays
  Clone ID: MRT4577_121876C.1
aaataatttcttttttttttttttttttttttggggttttttacgcaaaatcaaatttcatgtacatggtaaaatcaaattccatccatttatgtacagtttcatgtttagttacacaatcaacctatgggacgatgtctagggcagaaattgaaaaacaaatctaatgacaaaatcacatacattatgcaacaaaataccagaatgggttacaaaggcagagcgtaagttgtatgtaacaagagacatggtagagagccgccattggagaagattacccgagttagaataatagaaagaggagcctactatagagcggctcaactgtatgttgtcttgcactcatgccgtacccggtaccccatctctctccaaaaagaagaatctgctaacttggatcagcaaatacctatcaagatgcagatgctcactccagttcatgttgattattagtcagagtaatcataacaatctgcagaaggatgatcggtgctagcctcaacaaaaccgacattttagtctaggttgctgccgatctggatatcaggagagcaagccgcaatgctttctgcttacaaagcttgtgtgggtttttcaacatttctatacttgctttctttgtacctaagatgacacgagcaatgctaaatgaatcccctttctccaaggcaaactgccattcccttgctgagacgtcaaaccaatcttttcttgaagatacagttgttttaacctccacatactctgtgaaaccctctgggtgtgttataacaatatcataaggcagtccggtttcaattctgttgttcacccacctaacattgttggaacctagctgtttggccaaatatttctcgaccagttcttcaccaagcctccctgttcttaactggtttgcatctgaaagtcgctgattcttgtcttctgcaagattggccagtttctcatcgaaatttgttagctcaacatcaaccattgggtttgaacctgttcttaactggcttgcatctgaaagtcgctgattcttgccttctgcaagattggccagtttctcatcgaaatttgttagctcaacatcaaccattgggtttgaacctgttcttaactggcttgcatctgaaagtcgccgattcttgtcttctgcaagattggccagtttctcatcggaatttgttagctcgacatgaaccgttgggcttgaatttccagcctccaagttcaaataagcaggtgcatggaaaggttcagcagacatcaccatctgaggctcatcaaggatttccgatgaactatctccaaacaatgtagtttcagttcttggattctcttctataatccaatccctttcaagatcagcagaaagcaaactatcttcggtgtgtccatacatagcaggcatgtttaagtttgatgaaggtccagcatcattcacctttgcctcttgcatgcttgcatgctggtttatgagaggtgttctgaagacgggtgctgttctccaatagtttagaggccaactagaaaccatcacctgtgccttctgatgattgggaatactaaattcatggacaggttggaaatcaaccccctgggtatcagcaccaccttggttcgctgaaccatgtttggctgcagacaaggaagagaaggaccagatagcttcatgctcaggtaactcaggcacattctgattattaacgataaacccg

SEQ ID NO: 23980 - DNA, 586 bp, Zea mays
  unsure (1)..(586): unsure at all n locations
  Clone ID: MRT4577_121877C.1
aaaccagcaacccaatccaaaccagacaagcaagtaatcccccgatggctcatcgcgttctcctcctcctctctctcgcgtcggccgccgcggttgccgccgccgtcgacgcggaggacccgctgatccggcaggtggttcccggtggagatgacaacgatctggagctggacgcggagtcccacttcctgagcttctcgcagcggttggggggggggtcnacgccttcttcatcactggtagcgcantgacttttcactcggggacttccagacccttctcttcggtgactngccggtcaccgtctttggcttcaggaaccctgtggacatcccgtgcggtgaggctggcgctgngtttgtcgtggtgtccaccgtcgtcttcgctgtctcggtcatggtctctgctcatctcccgggtgttgccgcgattgttgttctctctgcccgctgcagagatgctcccatgtttgttgttggtgtccctggggacaatgtctcctcggctgttaacggtggtttcccttgcttgctgccttccggttctggcttggctcctcttgcttgtggtcgttcttgacatcttt

SEQ ID NO: 23981 - DNA, 268 bp, Zea mays
  Clone ID: MRT4577_121878C.1
ggcatggagcttctggtgtgctatgcagatgagggggtttatgtaaacacatatggaaggatccccaaggatgtagttctacagtggggatgctacatcagtagcatatattcgatccaatcagacaatgggctggggagagaaggccatagagatccgatctgtggaaactggtctattggatggtgtgttcatgcacaaaagggctcaaagactaaaattcttgtgtgaacgcaatgacaaggtgttctttgcctctgttcggtct

SEQ ID NO: 23982 - DNA, 319 bp, Zea mays
  Clone ID: MRT4577_121879C.1
acgaccttccccttacctattcgccgtcccttttctggtggccttcccacgccggcggcctacgggccaacccggcgacgcgccaacttcgtatttttctttcccggctacgcgggcgggggatcttcggatccgcgcgggggagggagatccggattggatgggcctcttcgggcgcgggtaggccgggctgatctgatccgacccgtgccggcggggcaatccgggcagggtggctgggaaatttcggacctgggcggtggtgatcccgggggagagggcgggccttgctcgatctccggataaaagctgggaattt

SEQ ID NO: 23983 - DNA, 496 bp, Zea mays
  Clone ID: MRT4577_12187C.1
gagtcttctagtcggcggccgctagaggcttagcgtcgaggaagaggaggaagcggcgtgccacatgttgagtgagcagacggcggctagcactagcactagcggcggcggcgtcgagcgtcaggacaggtggctgcagccggtggcggagaacgaggaggaggaggaggaacaggaggagttcagggacattcacgcgctgagcccgccgccgagccagccgtcgtcgtaccgccgggcgcgcggcggcgagccgtgggggtccgccgcaggcgggagcaggcacacgtccgtccgctccgtcgggagcgacaccgcgcccagcgagcccttcccgactatgaccagggagttctcggccatggtcgccgcagcagccagcgccgcagcagacagccgtgacgcggacagcgacgtcgtgggcagggccgaggaggaggaggaggaggagctggaggagaccaacccgctgccatcgtgccggacagcaacccca

SEQ ID NO: 23984 - DNA, 356 bp, Zea mays
  Clone ID: MRT4577_121880C.1
cccacgcgtccgcccacgcgtccgcccacgcgttcgaaaaaaaaaaaaaaaaaaaaaaaaaaagaaaaatttaaaaaaaaaaaaaagaaaaaaaaaaaaaaaaaaaaaaaaaaaaataataaaaaaataaataaaaaaaaaaaaaagggcgtcctttttaaagaatccaaatttacttacccttgctttcaaaatcataacttttttataatgccccctaaattcaattaactggccctcttttaaaaacatcctaatttgaaaaacccttgctttcccaaattaaacccctttgaaaaaaatcccctttttccaaattgcctaattaccaaaaagcccccacccaataccctttc

SEQ ID NO: 23985 - DNA, 383 bp, Zea mays
  Clone ID: MRT4577_121881C.1
gcaaaagttccagcgtgacatcctcctcgcgttgccgtccttcggggtgttcgtgaggtacccaaggatcggcaggttcctctaccggtcacggtggcacaggctcctcgctctccggcgacagcaagaagagtccttcctccctctcgtcgccgccatcaggaaccggcgggaggcgagccgcggtaacacaacgttgacgacttacgtggagtccctcctcgatctacgtatccatgaagatggtggcagggcagtcaccgacggcgagctcgtcagcctcatctcggagtttctcggtgctggcacggagtccacggccgcggcgctggagtggaccatggccaaccttgtcaaaagccccgacctgcagcaaaagctta

SEQ ID NO: 23986 - DNA, 2804 bp, Zea mays
  Clone ID: MRT4577_121882C.1
ccgggatcatcagctacactacagctaggctttgagaggagctgagagaggatgagcgagtctgagtcgtccaacacgggcttcgccgcggccctagagctgtggcaagaaaaccagctgcgcatcctcgtcctgattagcctcgccacccagtgcttcctcttcgtcttcgcgccgctccgtcagcaccggatcccaggtccgctgaggctctccatctggctggcctacctgggcagcgacgccgtggccatctacgccctcgccaccctcttcaactcccaccggtgcgacaccggcaccggcaccggcaccgcccgcgccggcgtggagctgctgtgggcgcccatcatgctggtgcacctgggtggccaggacagcatcccggcctacaacatcgaagacaacgagctgtggcggcggcatgtcgtgacagcggtgtctcaggtcgccgctgctatctatgtgttcgtcaagtcgtggccaaaatccatggcggcgactgctgcccatctagtggttgaccaagacactcgtaaccggataaatgccttcatggcccataaaagtgagatggcggcttacgggagaatcttgggaccggcgcttcttctcttcttctctgggatcaccaaatgcgtgtgcaagccctgggacctcaagagggtcagcgtcaacagcctcgtggactcctcctcatcgggctcctcggaagagaaggccgatgccggtgagagtgagatggattcgcttcaggagtacgtgggagctgcagcacagtatttcgagtccgtcggccacgaggaggaggaggacgacggcggcggcggcgacgacgacgatgacgacacctgtaaagcagaggaagtttggaagccctacaacctgtgcgtggacctggcgcccccctactccggccggctgagctgcctgaaacacctggcgcgcagcccagcggacgaagcccatcgcctggtgaaatccagcctctccgcgacgttccaccagctctacaccaaggaatcgctgaagctgcacgacatgtcgcacattgtccttacagacaaccgcgccttgaaccgattgaagctggtcacctcggctcgagggctccggacggtagctgcgaccaccctgctcggggcgatcgcggcgttctacggagaaggcgacgttgaccaggacccgacggacgtcaccatcacgtacgccctgctgtggtctgctttcgtgatggagtgcgtcttgcccaccgtgatccaccacacgttcggctggatagagcggctgttcaccgggcaccggacgtggccggaccaggtcgcgcagtacagcctcatggggtacgtggcacgcggccggagccactcgtggctcatgaaggcggtggcctgcctcggctgcggggacctggtcgaccagctctggaccatgaagccgcgcatgggtgcttcgtccagggagatcaccggcctggtccacgcccacgtcgccggagcgtggatggagggccacatagccggcgcggactcgttccgggcgttcaacgactaccgaggccagtggactctcggcaactgcagggagatcggggtcggcgtatcatccatggtggtactgatgagcagcgtgtcgaggccgttcgacgagagcgtcctcgtctggcacctcgccaccgacttctgcttccacttacttcaggtccagggagacccgtcccgcgccaccgccaccgccaccgccaccgcccgccgctgcatcgagatgtccaactacatggcctaccttctcttcgtcaagccggagatgctgatgcccggtgcccggcgcaagctgttcagggacgcgtgccgcgagctcgtgggcctgctcgaggaggatcgtcctggcgcgccgcgggcacggggcaaagagagacctcgcacacaaggtcgtccagctgctcaagagggacggaggcgacgtcctgggctcagcaggcgtcggcgtcggcgtcggcgtcgttcgccgggcttggtgcgtagccgagaaactcgtggattcgcacagtggcgacgaggagaagatgtggaccgtgatacagggcgtgtgggtggagatgctctgcttctcggccagcaggtgcaaaggctacctgcacgccaaaggcttgggaacgggcggggagtacctgtcctacgtgtggctcctgctcctgtacatgggcatggagaccttggcggagaagatgcagaggacggagctgtacgagggctccactgcagcagcgttatccatcagtggccagaatgtttgataccgctcggtctaactactctttggaaggatcggagtctaatcctctcaagtttagataaattttaagataataatgtttattgttatatgtgtatccagatccgtcatgccacggacaagcgtgcttctccttttcgcaatttctcctattggtaatgtttgtttggactggtcgtatttagatggcttctcctataatctctttctagattgtaataactttttctatatttatgcttaatggtcgatgaaagaatatcgttgtgttgtgtgaaatagtttttgctttcaggatatcacgacaccgggatcgtctcttccgctgcaccttttttatcgccggcgcccactgccgtcactatcctgcctgcctcgcaggctggcacgcccacctgcgcgatgcacctagcccgccgcagcgcttttgtccatgcgcgaggacctagcatgctgtgttggaaattgggccggtttagcatgtgcttagggtcaaacgggttcgcgtc

SEQ ID NO: 23987 - DNA, 376 bp, Zea mays
  unsure (1)..(376): unsure at all n locations
  Clone ID: MRT4577_121883C.1
ttcgtgngtggtcttgnccgtcgtctcccngtcnnctttgggttgcttgntcgttgtcttctttgntgcnntttttncttttttgntcngnnctccttttttttnntgttgtgncntttgtttctgtnccttgngtcttcttttgtgtnngncttggtccttgcncncctgttgnttttgttcgcgttcgggtcttggtgcccccnnnncctgggtgtgncngttcngtnngncgcctccnnncgncgtggngtcgnngngnggtgnngtttgngttgnngnnggcttcttttctggcttctcctttgncnnnntgtnnnggnnccgnngtttttttgntttggttcngttgttggtgcttttnnnnnnnnnnnnn

SEQ ID NO: 23988 - DNA, 690 bp, Zea mays
  Clone ID: MRT4577_121884C.1
ggccggccgggttttgatagtggacgaagctttgaactgtgaggtctccacaaattgaatacaagccctggattcttggcttcttgtgggcttccaaggctctcacaggccaccactggccatgagagtaccgacgaatatatttatggaagggccaagaaactgtgaagtatgaatggtggccatgacttcatacagaatttcactgccgttgaccagtcgccagtgttaccccatgctgtcaacttggcataattgttgacctggaagttttatggtcgaaccagggattgatgcaggcttgcggctccatttcatttctgggtgtatgccaggaatccatggatcaaagggcagcgctgtagttggacacttttttttcccgtgctctggttcagttgaaagttggaccccagtaggttggagccttagcatgtagccagttttattagtgctaagtttttaggcaagttataagttatagcacagaattgagtacttgacagtgttaccgttacattgtttatgtagtcatcttcattagcagcctaggcaggcaacatgaatccagtagctgacagcattcatttactatatatataaaattatagtatgttgtagtcatcttgtaatagaatatgcccccgtttcttgggaatctgtgcctctaaaaaaaaaaaaaaagcggcc

SEQ ID NO: 23989 - DNA, 397 bp, Zea mays
  Clone ID: MRT4577_121885C.1
ttttccacacacacatgacacaacacaactcttaggcagcgagcgtctctcctcttcctctcccacgcaccgcgccaaggaagacagcgagagatcgacgctcctcttctctccgtcggtggtgcggctgaccgccctactccagcgagatctcgctgcaatccctcaagatctgaacacagatctatccgacaagatggtgaagatctgctgcatcatagctggctatgccaacgcaccaaccatgcgatgacattgccctaaagtgaccagacattgaggaagacgaagaagacatctccaagccccgaattgaggaatgggacagcgatttctttccgacccccccgcccggactcgatgatgatgagaagcaaagcaagggaacgaacctctt

SEQ ID NO: 23990 - DNA, 964 bp, Zea mays
  unsure (1)..(964): unsure at all n locations
  Clone ID: MRT4577_121886C.1
catgaacgagctgctcaggctcgacgcccgtggtcgccgacggcgaacgtcaaagcgcagaggcggatgcaggtgaagcgcgtccagaagtacgtggagacgctggacgcggtggcggccaggaacncccgncaccgtccgcaagtccggcgccaagccagcaccgccgccgccgcagcagcagcagcaagcgaggcaggcgcggtgggagatgctggacctgctgtcgtcgctgccgtccacgtcctcggcctcgtcgacgacaaccgtgagctccacggcgtcctccggcgcgccgccgaccaaccgcctggactggatgctgttctgacgggcgggcgagtgcagtgcagcccggcgcgaaagcagtcaagccggatgtggggaaagcggaaggcggagtgcagaactgcagatgcgatgcgatgcgatgcttgtgtgccaagaattgcaccccctgcagaaatctggtggcctccatgattgggcacgggctacctagcttggccacacaactgcattgctctgcatggtaccgtaccagccaactcgattcatcaaccatgtcttcttctttctttccttttgagattctttcctttttcctcatcttcttgttcatgaaacgtttgaggttctttttgtgtgcatactattcagatagacagagaaaaagagagagggggttggttacttggtttagggcaaatcaaatgtattcagattgggaataaacacaccactggagtcaaaaaaaaaagattgttgtcgtccatccccaactgcagtcggtgtctctcaactcggaaggaaggaacaatggaagaaatgtagacatgcctgctacacatacatgcactactaccagtacccatacatggattactacacttttgtttgagagtgatgagaggtcggttgtctgtccctgtgctgtggtggatgcagatgaattcaatcaatg

SEQ ID NO: 23991 - DNA, 304 bp, Zea mays
  Clone ID: MRT4577_121887C.1
aagcatccccaaacaaatctttattaaaactcaacccattccaacacctcttaatatccttcttattcatccttatacctaacaaaacgatattaccaagcatcatccaaatcttcattctccacctttactttttactcttgccatactttaaatttatatttcttagaccatcccttccctcatccttttttctctgcaaaacatcaaaactcacaactttccatatgatgcttttctgcattaccttatgctactcttctttcttctcatccccatcggactatcttgaatgcacttctac

SEQ ID NO: 23992 - DNA, 539 bp, Zea mays
  Clone ID: MRT4577_121888C.1
cggacgcgtgggcgctgccgtccacgtcctcggcctcgtcgacgacaaccgtgagctccacggcgtcctccggcgcgccgccgaccaaccgcctggactggatgctgttctgacgggcgggcgagtgcagggcagcccggcgccggccggccaccggcgcgaaagcagtcaagccggatgtgggggaaagcggaaggcggagtgcagaactgcagatgcgatgcttgtgtgccaagaattgcaccccctgcagaaatctggtggcctccatgattgggcacgggctacctagcttggccacaaactgcattgctctgcatggtaccgtaccagccaactcgattcatcaaccatgtcttcttctttcattccttttgagattctttcctttttcctcatcttcttgttcatgaaacgtttgaggttctttttgtgtgcatactattcagatagacagagagaaagagagagagggttggttacttggtttagggcaaatcaaatgtattcagattgggaataaacacactactggagtc

SEQ ID NO: 23993 - DNA, 241 bp, Zea mays
  Clone ID: MRT4577_121889C.1
accactcgacccacgcgttcgtcaaccatacgataccttttacatcttttggacatcttactacaccatgtgcaattggctgaatctatatagcaattcacctgctcctatatcatattcaagattcatctcgtctataactacgtaattatcctattactgaattatactactttaatttgctcgacaaaactattgtgaagatggataaaaatgtgtagtgatggtggaaaaattaaaa

SEQ ID NO: 23994 - DNA, 486 bp, Zea mays
  Clone ID: MRT4577_12188C.1
gaggaaccgtcagaaacaccatctgatgatgcggagtacactgcttctggagaattgttgtccttgtctctctcagatgtctctgattccagttactgttctccagcgtcggatggtgtatcgtggagtacgcgccgtgcagcaaggcttgatccaatggtcgacgctgccgtcgtcgctagccacccgggaagacctcgaagcactccggcaatgctttccactagcgcctgcttggggacaagccagcgctcaaggcgggggcaatgtcagcactcaggagactacgccaacagtccaagctcctacggctgtcatcgcggacaggggaactgatgaagtacagacttcaaagccaaagaggagggttcggcccagtagccgggtgatgggtccagaatgggtgcattagacttaagtctcgctagcccaagagtattatttatgttttgctgtatccgaactggagggaaacaagaaagaaaa

SEQ ID NO: 23995 - DNA, 730 bp, Zea mays
  Clone ID: MRT4577_121890C.1
ctgtgcggcgctcgagccggccggtcatccaaaactacttgctactgctcgcgcatcaccttccatttagcatatccacccatcttactcccgtcgtgcaacggcagtcatccactcagccttgtccgccctgcaccgaacagccagaacaccacacaaatggctccgatgccactacgcacaccatcgcaagacgagctcacggaatgaacgaagaacccctgatgggtgcgtcgtcgcggcaaagtcgcctgatgggaccacgactactacaggatacccgctagcgccgacatagatacctctgctcgtcattctcactgcacaaggcatgcataccacatgagtacgcaactagccaggtccagcgaggctgccccggtaatgatgacaacaaacataatggctgacagtgtcgcatccaccgtacgcacccgggggtagcacacaacaaccaaccagcccttctgcctgcataattacaatatcaagtccattctcatgatgcaccagcatgagcatgcgctcttaagagtggggctgaccatcattgaaaggatgtactgctagtccaaatctgactacacacttgctgtcagagctacagacctgagtttgaaccggagaaaccatctgataagatgctgctgagacattaattctgaaacttgactctcttgatgtgtgtgacaggaacaactgttattctactatcacttcctatttttcc

SEQ ID NO: 23996 - DNA, 391 bp, Zea mays
  Clone ID: MRT4577_121891C.1
gcagcagcgtcagctagcctaccagtacgatacggctgcgtgcgacgagcgagttggtaccaccggctgcgagcgacttgccatatatcatatccatccagagctcccctggccctggttgactcgtctggctaggtgcctccttccattggccatggccatggcctccttgttccggcttggtgcctgatcgctcgacctcaactgactcatcgctccgtcgtctataatatatagctgctgctgctgctgccgtcccggtcggacagcggatgagtgccgctgcactggtggcgatccagctgggagcgagaggggcgcaagcaggaagaccgagatggcggcggcggggccgaggagggccggcgcccggttccttctcgcgcggggc

SEQ ID NO: 23997 - DNA, 641 bp, Zea mays
  Clone ID: MRT4577_121892C.1
gccggccgggttggggtcacctcttcttaccatgactactgtgcttgattcatatgacgacgagcagtctgattttgcgtcgcgccggctacacatggatccatcgattagatggctccgggcatcatgcggcgtgacgagctacggcgctgctgtcgacggacatcgcgaatcgcgctgtggagccgctggttccgtacgcctcgtcgccgaccttctcggcgtgcgtgcgtcgccgcctgccggacttcctgcactcgccgaacctcaagtactcgtgcctcgggtactactacctgatcagtcacgccgtgtacctggtcactcactcgcccgtcatcgagctggagtgcagagccgagctgtgcagcctcagccgtgacgagctgtgatgcaaggtgatggggggaggtcaccgtacgacctcgtcgacgcgaagctcgccttactcgacgtgctcttcttcaccatctccgcctacatcatgtccaggaccaggtccgggtacctcatcgacttctcgtgctacaatgcggtcgacaagatcaaggtgtccaaagaggagttcatcgacctggagcgcaagtacggcaagttgcaccaggacaagctgtagttccagtcgcgtctgctggccaagt

SEQ ID NO: 23998 - DNA, 3011 bp, Zea mays
  Clone ID: MRT4577_121893C.1
ggggttagatcgcagcacattacccgaatccgagcaatcatcatttttcgcctttcttctacctcccgactctctggcctctcctgactctgccccgcctcatcactcccattccaccgacacgcggcggcggcgtgtcgcgcgcctccgctaaaaccgtagcccgaggcccgatggccgccccgccgcaaccgcacccacaggcagcggaggagagggccgcgccggcggttcccctgcccactgccccggcgggtccgcggccgtacgacgtggcggtcgcggcggcggagctccggccggtagactgcaacctcgccgcgctctgtgaccacgtccaggcggaggggttcgggttgggggccttctccgacctcgtcgtggaggccgcgggcgccacctaccgcctccatcgcctcatcctctctcgtagcgcctatttcaggaatatgctacatggtccttggagagaggcgggagcacccacagtggttttgcacatagatgatgccaatgttgattcagaagcaattgcaattgcgcttgcatatctttatgggcaagcccccaagcttaatgataacaatgcattccgggttcttgcagctgcatcatttctggatcttcaggacttgtgcacgatatgtacagattttattatttctgagctttggacatcgaactttttacaatatcagttgtttgctgagagtcaagattatggtagccatggagagcgtgtcaggaatgcttgctggggttatctttgtcaaagtgccacactggaattgcgagaggttctaccaaagctttcttcacagactttgcatgctctccttacatctgatgaattgtgggtacctaacgaggagaaaaggtttgaactagcattgtttactctacttgcaaaggttactacgtgtgagatacaagttagtgggaatgaaacaagcttaccaagtgctgatcgatccatgaggaaggggaaggctccaatgaacgaatctggggaggaactgttaatggactctgaattgaagaacttgaagttgcatgataacttggggaatgaaattccccataacattattgctatttcagatatgaatggtgaagctcccaagagaatggagtttgattgttctactggaggaccatctggagaaagcacttcatatcaatttaatgaaaataactggatttctagtgagcaaactgcaaataattatttctcaagaactttcagtagtggtgttgttcctactgagtggggaaggcccaatgcaccactttggggtggcagggtcgttggacggcggcaaattagatacattagaggaagctcttgtctatctactgatgaatataatgcttttatgaatatatttgagagaggttctcttctctactgcaatatgtcctttgatgcactgctaagtgttcgaaagcaactcgaagaatttggattcccttgtaaagctgtcaatgatagtctatggctacagatgcttctgtgtcacagggtgcaagcgattgttgctgatacttgcaggaattgttgccttatgaatagttcttgtgcttgcaagcaagcatatgtgagctcgcatacacattacaggcaggagcatgacaggagcagtgcctccgacaacataggtaatgtctaccttgcggatggccagggtgatgggaatggtgtacttgggcctgtccgtgttaatgtaagaggagcagtcgatggacttgctggtattgggagagggaactcaaatgtgcctggtgcagcttgggctcctacacgttaggtcttctcccgtgtcccttatgggcttggttcaagaaatggccagcaatttgccattgatgaatcagaacctagaattgaccgcaatggagatatttcagcagatggtctgactgcattggttaaccttagccaagaaaacaatgctgctcatctgcaggatcaaagtctatttgagacagggatgcagacaagatatcgcagtgttccatctgtttccactccaggtggttcttctgtccagatgcaggagtcaaaggagcatgaatgggaaaccacaaaggatgcaactatatcattagacatgaaaacacctcttagccattttccacctttccgctttggggttgagttcgatgatgtgcacaggcttgctgatggtcatgtgaaacattcgactgaagtgttttatgcaggctctctatggaaggtgagtgtccaggcattcaatgatgaggatcctcatgggcgacgcactcttggactttttctccaccggcgcaaggctgagttgttagatcccttgaggaaggctcacttgtacgtcgacccccgggaaaaggtcactgcgcgctatcagctcatctgtccatcaaagagggaggtcatggtatttggatgcctgaagcaggctgggacgctgctgccgaaagccccaaagggctggggttggcgcactgctatactgtttgatgagcttgcagatcttctccagggtggtgccctgcgaattgctgcagtggtccagctcgtctaaacttgagttgtagaaaacaactgcttgcttgcaaggatggtgacaccacggcagtttgtgtagttggtacctgcaagaactcaatccgtcatgtattcgttctctgtaattgtgtattactgtatagtggttcgttgtttgatgctcactccgtcctaaaatatagttctttctggtccttttttccgtccacattcgaacaaatgataatgaatagacatacatacaaactacattcataaattaagttaagtagtcaatgcttgtttagtgtaaaacgaattatattttaggacggggtgagtatgtaagaactcaatctgtcatgtactcgttgtcatgtactcgtgctctgaaatattgtataatctatagcggtttgctgtttggtaaataaaagagaatatatcagatgcaaaccaaccacttgtaaaaaaaaaaaaaaaa

SEQ ID NO: 23999 - DNA, 190 bp, Zea mays
  Clone ID: MRT4577_121894C.1
acgcacgcgtacgccggcatctataccttcctcttcttcgttttgcaaaccttccccgaggatcaccaaaacgacaatttcacacggctggcggggcttatactgcgcttccccaccagctacaccctgctgaacaatgatgagctggacaacacgaaagatattgcgccagacaacttccggctagact

SEQ ID NO: 24000 - DNA, 246 bp, Zea mays
  Clone ID: MRT4577_121895C.1
cggacgcgtgggccagcgctgacatgctcctcaccggccaccaacctaaccgtgaacttattaaaagggctgggggctttcactaccgatcaataaacttgattgctgaaccttggccgaccggacaatttccggccatggaaaatggccaaaaaggccgggccctggttttttattacccaaacctgaaggaagcgctattggcattccgggaggaaggccggacccaaaacttgaacatttggg

SEQ ID NO: 24001 - DNA, 1910 bp, Zea mays
  Clone ID: MRT4577_121896C.1
tgaatctggggaggaactgctaatggactctgaattgaagaacttgaagttgcatgataacttggggaatgaaattccccataacattattgctatttcagatatgaatggtgaagctcccaagagaatggagtttgattgttctaccggagggccatcaggagaaagcacttcatatcaatttaatgaaaataactggatttctagtgagcaaactgcaaataattatttctcaagaacttccagtagtgttgttgttcctactgagtggggaaggcccaatgcaccactttggggtggcagggtcgttggacggcggcaaattagatacattagaggaagctcttgtctatctactgatgaatataatgcttttatgaatatatttgagagaggttctcttctctactgcaatatgtcctttgatgcactgctaagtgttcgaaagcaactcgaagaatttggattcccttgtaaagctgtcaatgatagtctatggctacagatgcttctgtgtcacagggtgcaagcgattgttgctgatacttgcaggaattgttgccttatgaatagttcttgtgcttgcaagcaagcatatgtgagctcgcatacacattacaggcaggagcatgacaggagcagtgcctccgacaacataggtaatgtctaccttgcggatggccagggtgatgggaatggtgtacttgggcctgtccgtgttaatgtaagaggagcagtcgatggacttgctggtattgggagagggaactcaaatgtgcctggtgcagcttgggctcctacacgatatgtcttctcccgtgtcccttatgggcttggttcaagaaatggccagcaatttgccattgatgaatcagaacctagaattgaccgcaatggagatatttcagcagatggtctgactgcattggttaaccttagccaagaaaacaatgctgctcatctgcaggatcaaagtctatttgagacagggatgcagacaagatatcgcagtgttccatctgtttccactccaggtggttcttctgtccagatgcaggagtcaaaggagcatgaacttggatcagattgggaaaccacaaaggatgcaactatatcattagacatgaaaacacctcttagccattttccacctttccgctttggggttgagttcgaggatgtgcacaggcttgctgatggtcaggtgaaacattcgactgaagtgttttatgcaggctctctatggaaggtgagtgtccagccattcaatgatgaggatcctcatgggcgacgcacccttggactatttctccaccgacgcaaggctgagttgttagatcccttgaggaaggctcacttgtacgttgacccccgggaaaaggtcactgctcggtatcagctcatctgtccatcaaagagagaggtcatgatatttggaagcctgaagcaggctgggacgctgctaccaaaagcgccgaagggctggggctggcgcactgctatactatttgatgagcttgcagatcttctccagggtggtgccctgcgaattgctgcagtggtccagcttgtctagattagttgcagaaaacaactgcttgcaaggatggtgatagcacagcagtttgtgtaattgatatactccctccgtcctaaaatatagttctttctggtccttttttccgtccacattcgaacaaatgataatgaatagacatacatacaaactacattcataaattaagttaagtagtcaatgcttgtttagtgtaaaatgaattatattttaggacggggtgagtatgtaagaactcaatctgtcatgtactcgttgtcatgtactcgtgctctgaaatattgtataatgtatagcggtttgctgtttggtaaaaaaaaaaaaaaaagcggcc

SEQ ID NO: 24002 - DNA, 475 bp, Zea mays
  Clone ID: MRT4577_121897C.1
gggaccctcgaggccggccgggaatcatctgacgctctgcccgtgctagtgcttctctgctcacgccgacaattggtgcgtgtttcgtatgcgccgcccctttttgctgctctgcttgtgccggaccccgatggtggctcagccaagcggtggcagcaggtcactcctcccaacgttggctcttggttgccagtcacgctgacccgtggtaggtgtgattcctagtgtgtgttgcctacaaatacatggtggttgtgatgcctctgggtgctctagtcatggtggcttggttcgtggtcacgtaggaggtgtttgacagaatgtgtgcatggacaaaatgttgtctggtgcttggttgtctatcaattgtatatagcttatgtcttgtaatgagattgattgagtggagaaataaaattattgattgaatttaaaaaaaaaaaaaaaaaataaaaaaaaaaaaaaaaaagcggcc

SEQ ID NO: 24003 - DNA, 603 bp, Zea mays
  unsure (1)..(603): unsure at all n locations
  Clone ID: MRT4577_121898C.1
cccagcgtccgnaaaaaaaaaaaaaaaaaaaaaaaaaaaaaaaaaaaaaaaaaaaaaaaaaaaaaaaaaaaaaaaaaaaaaaaaaaaaaaaaaaaaaaaaaaaaaaaaaaaaaaaaaaaaaaaggggggggtgggttttaaggggtatcaaagtttaagttacgaggtgcttggaaaggtattggttttttttttggggggggcttaaatttaatttaattggggggggtttttaaaaggtggggattggaaaaactttgggtttaccaaatttaatggttttggagaaattccctttttggcaggttggggtattaggaaaggggccggaagggttggcttttccaaaaatttgtgaaatttgatggggaatgggaacgntttttttagggggtttttaagggggggggttgtggggtttatgggaagtttgatttttttttttgcaagggttttagggccggttcttttggtttttttccttttttttatggaaaggtttgcgggttttcccggaaaggttttaattggggggtttttttttggggtttaatttttagtgttttagggtttttttactttaaaaaaattggtttagggggg

SEQ ID NO: 24004 - DNA, 293 bp, Zea mays
  Clone ID: MRT4577_121899C.1
atggggcaaaaacttttcatttttataatttaaaaacctgtccccgattaaaagcaacccgagagaccaaaaccgggggcgcggggaacaagcccaagggcattgaggggcttcttttctagcgtaatacctgctacggggtgtcacgtaccagggacaccaccaccaccacggggggggccctaaaccaagtgatcactaggggggggggggcataaactacttttttattatgggccaatctgatgcatgacacacacgtagctaggacattttttttaccacaaccactg

SEQ ID NO: 24005 - DNA, 280 bp, Zea mays
  Clone ID: MRT4577_12189C.1
gggactcgtccgaccaggcgtgcggggagacgagacatctctggcactcgcgatccgactagtgccaatggctggcctcggcaagtgcggctgccaggccggcgagtccggcgagactcggaggccgaaggctgccttttttttcgcgaggggggcacccgctggagcctctaacccgtcttacttgaaaatgatcatggaggctatgcccgggctgagggagaggacctgatgcagcttcgaaagcgatcggcaagactggggagagacaagcaccgct

SEQ ID NO: 24006 - DNA, 448 bp, Zea mays
  Clone ID: MRT4577_1218C.1
cctttttcttttttttttttttttttttttttttttttttttttaaacgggcaaaacggggcagggtaaacactacgactcaaataataacattacaacttacaacactacattttgatctgggcaccgttaaacactttacattagcccttccactaattttcagacaaattacaaatctacattacaaggaaatacttttctcaatgtgggcaattgcgaccacaacccataatacacaataggcttcccaggcaaataaaggaaaacccttccatctgatgaacatgttttccttctatacggaaaaaatccaccagcaaaaaattcaggatgtccccccaaactgatttcccacccacattatcagcatgtcctggagctcttctaccattcatcctcctacttttatgggatccttcctgactggtcaactaacgcgcctatt

SEQ ID NO: 24007 - DNA, 735 bp, Zea mays
  unsure (1)..(735): unsure at all n locations
  Clone ID: MRT4577_121900C.1
gcttatgttcttatatgactactagctagaagttagagcctagatgatggctgcttctgttggcgtgaaagctcgagtgctcctaaatggtcgtcgtattagctgatacgacatctacccgatgcaatagataatattgtttacacgcgtgagtccaaaattgttggctttgggtcggagcagttaatgcgagaagtgtattttatcacttctgagtgcaaccttttttttattatttttccgagcttctgcctcttgcatatgttgtagattctcgccgagaagggagtagtagtattacctgatatctatgctaattcaggtggtgtggtcgttagctactttaattgagtgggttcagaacattcaaggtttcatgtgggccgaggagaaagtggacgatgaactagaaaaggacatgagcagtgcttttcaacacatgaaggccatgtgcaaatctttggtgctgccgaagtgtgtcgtgacattggaattgcaggtctagaaaaacaagctcattagatttctgaaaaaacattagaagttattagattggtagcatttttttaagatttaaaattttatagaagtcatcattttcggtttattggaagaaantatttttggaagttgaaaagatnngctctaacatccaaccnnacgcanaactatcttgcaaccanctctaacacgatttcggtaantatgtttttatgatacgagntatatgttttt

SEQ ID NO: 24008 - DNA, 630 bp, Zea mays
  Clone ID: MRT4577_121901C.1
taaaaaaaaaaaaaaaaaaaaaaaaaaaaaaaaaaaaaaaaaaaaaaaaaaaaaaaaaaaaaaaaaaaaaaaaaaaaaataaaaaacccaaaataaaaaaaaaaaaaaaaaaaaataaagttttttccttcccgggggggcccttttaaaagggggatttttttcgaatttttcccttaaccttggggggcggttggggctttttttttagggggccccttttccccttttggggggcctttttaaatttctttggccgtttttttacatcgtggggtttggaaaacccttgggtttccccatttttttccctttgcaacaattccccttttccccatttggttttttaccaaaagggcccccccctttcccctttccaaaattttgcccacccttattgggaattggccccccctttttgcgcccttttaaccgcgggggtgggggggtttccccccatggtgcccttttctttggccagtcccttagcccccgttctttgggtttttttcctttcttttttgccccagttcggcggtttttccccgctagtttttaattggggggtcccttttgggtctccttttagagttttttcgggcccctgccccccaaaaatttttttggggg

SEQ ID NO: 24009 - DNA, 147 bp, Zea mays
  Clone ID: MRT4577_121902C.1
ctaatgtctcgcgtgggtgcgtaaattatacgtgcgacatggagatatggatacagtgggtgctgtcgtgtgtcatcggtgtgtacggcactccggatgatatgcttcgttccgttttactttccaacgctggtagataagctgacg

SEQ ID NO: 24010 - DNA, 690 bp, Zea mays
  Clone ID: MRT4577_121903C.1
tggtttgtagtttagtctactcaagccatggtgttgaaacttgaccatacttgtctcaatgagactttggagtgaaccaaatgagcttatgttcctatatgactactagctagaagttagagcctagatgatggctgcttctgttggcgtgcaagctcgagtgctcctaaatggtcgtcgtattagctgatacgacatcgacccgatgcaatagataatattttttacacgcgcgagtccaaaattgttggctttgggtcggagcagttaacgagagaagtgtattttatcacttctgagtgcaaccttttttatttttccgagcttctgcctcttgcatatgttgtagattctcgccgagaagggagtagtagtattacctgatatctatgctaattcaggtggtgtggtcgttagctactttgagtgggttcaggtaaaatgcctgttcgtcgctgcttcattgctcgattggttcctttctctaatctgctttcttgtgccatgttgattgatcgtgcagaacattcaaggtttcatgtgagctgaggagaaaggaacgatgaactagaaaaggacatgagcagtgcttttcaacacatgaaggccatgtgcaaatctttggtgctgccgaagtgtgtcgtgacattggaattgcgggtctagaaaaacaagctcataagatttctg

SEQ ID NO: 24011 - DNA, 422 bp, Zea mays
  Clone ID: MRT4577_121904C.1
gaagggaagggggggattgcctacaacaaaactgtaatgctcgaacgaacccacctgtgcttatccggaatgactcgcatcagggactttctatttaccacttgccacaatttctcctttgcaggaaaacaaaaaaaaaaaaacttctcaggggccacgggttttacctaaccccttccatttccccttgttacaccttaggatacaaattttctatgtgaccaggtcctttccaaaaggaacagcaaacaaacatgcaacactactatctcaatgagctagaaatggcaatccaattcatttccaagcaaaaaaaatgcttattaacattgctaaactttgcttgacaagaacagtcctgctactggtcttggtcctgggcagtccagtcccttttgacaaccaaaaggattttctccctg

SEQ ID NO: 24012 - DNA, 937 bp, Zea mays
  unsure (1)..(937): unsure at all n locations
  Clone ID: MRT4577_121905C.1
gttcctatatgactactangctagagttagagcctagatgatggctgcttctgttggcgtgaaagctcgagtgctcctaaatggtcgtcgtattagctgatacgacatcgacccgatgcaatagataatattgtttacacgcgcgagtccaaaattgttggctttgggtcggagcagttaacgcgagaagtgtattttatcacttctgagtgcaaccttttttttattatttttccgagcttctgcctcttgcatatgttgtagattctcgtcgagaagggagtagtagtattacctgatatctatgctaattcaggtggtgtggtcgttagctactttaattgagtgagttcaggtaaaatgcctgttcgtcgctgcttcattgctcgattggttccttgctctaatctgctttcttgtgccatgttgattgatcgtgcagaacattcaaggtttcatgtgggccgaggagaaagtggacgatgaactagaaaaggacatgagcagtgcttttcaacacatgaaggccatgtgcaaatctttggtgctgccgaagtgtgccgtgacattggaattgcgggtctagaaaagcaagctcattagatttctaaaaaaacattaggagttattagattggtagcatttttttaagatttaaaattttatagaagtcatcattttcgtttattggaagaaatatttttggaagttgaaaagatgctctaacatacaaccaagccccacatcaagccctttacataagcactacaggaagaaaaaatacagtaaacagaaagaatcccaatgatgttaataaaaaagaaatagaaataaaaaaatagaaaaaaataaggagcccaaagggggggggccttttttgggggttcaaggttcctatcccgggcccgccaatttaatttctttttatttgggaccc

SEQ ID NO: 24013 - DNA, 617 bp, Zea mays
  Clone ID: MRT4577_121906C.1
acttatgttcctatatgactactagctagaagttagagcctagatgatggctgcttctgttggcgtgcaagctcgagtgctcctaaatggtcgtcgtattagctgatacgacatcgacccgatgcaatagataatattttttacacgcgcgagtccaaaattgttggctttgggtcggagcagttaacgagagaagtgtattttatcacttctgagtgcaaccttttttatttttccgagcttctgcctcttgcatatgttgtagattctcgccgagaagggagtagtagtattacctgatatctatgctaattcaggtggtgtggtcgttagctactttgagtgggttcagaacattcaaggtttcatgtgagctgaggagaaaggaacgatgaactagaaaaggacatgagcagtgcttttcaacacatgaaggccatgtgcaaatctttggtgctgccgaagtgtgtcgtgacattggaattgcgggtctagaaaaacagctcataagatttctgaaaaaattgggagttattagattggtagcatttttttaagatttaaaattttatagaagtcatcattttcgtttattggaagaaaatttttggaagttg

SEQ ID NO: 24014 - DNA, 162 bp, Zea mays
  Clone ID: MRT4577_121907C.1
tgacttaccagatacctgtatgtaagtcctgagcatgataatctccccacttgaatggatactggactaatcccacctttaggaaaccgtattgagcatccgacgatggtactccaagcaggctctggtacatcagcctgctcatcagtcagtgatactcag

SEQ ID NO: 24015 - DNA, 545 bp, Zea mays
  unsure (1)..(545): unsure at all n locations
  Clone ID: MRT4577_121908C.1
atgagcttatgttcttatatgactactagctagaagttagagcctagatgatggctgcttctgttggcgtgaaagctcgagtgctcctaaatggtcgtcgtattagctgatacgacatctacccgatgcaatagataatattgtttacacgcattctcgccgagaagggagtagtagtattacctgatatctatgctaattcaggtggtgtggtcgttagctactttaattgagtgggttcagaacattcaaggtttcatgtgggccgaggagaaagtggacgatgaactagaaaaggacatgagcagtgcttttcaacacatgaaggccatgtgcaaatctttggtgctgccgaagtgtgtcgtgacattggaattgcgggtctagaaaaacaagctcattagatttctgaaaaaacattagaagttattagattggtagcatttttttaagatttaaaattttatagaagtcatcattttcgtttaaaaaaaaaaaaaaaaaanaaaanannnnannnaannaaaaaaaaaaaanaannnngg

SEQ ID NO: 24016 - DNA, 303 bp, Zea mays
  Clone ID: MRT4577_121909C.1
gggatctagctagacgagcgaccttgggatcagaatacgtctagtctcagcttagtgtccgggtattttgttcactcagccattaatccagctggtcctgcttacgtttggttgcagaatttcggcttgcaggcagatcgaaatgaccacggcggtactgggaaatctatcgagggacaagggtacaatagtgggctatcaggggcgccaccgcttacatcatatagaggcaataggtaaatgaagtttggcttgaaagaataagtgagaaatagcccaaaatagactacaatttagggaata

SEQ ID NO: 24017 - DNA, 1263 bp, Zea mays
  Clone ID: MRT4577_12190C.1
cattgggtacctcgaggccggccgggtacctttctcggccttttggctaagatcaagtgtagtatctcgttcttatcagtttaatatctgatatgtggactatgtgttcacttcgatattaaatttattttttttatcggtcgctattctgatgtagaccttagaactgcaaaagatggagagtatgtgaaggttactggggttgttacttgtggaaatttgccccttgagtcctcattccaacgggtgccacgatgtgtgtacacttcaacttgcttgtacgagtacaggggttgggactcgaaagccgcaaacgccacgcaccgacggtttacttggggtctcaggtcaatggaacggcacgcggtggacttctacatctccgatttccagtctgggctgcgagcgttggtcaggacagggtccggtgcacgagtatccccatatgtggacgagtctgttgttatcgacataaacccagacaacaaggacatgtcgcctgagttcctgaggtggctccgcggaaggaatctctcgagcgatgaccggattatgcgcctcaaagaagggtatatcaaggagggcagcaccgtgagcgtgatgggtgttgttcaaaggaatgagaacgtgctgatgatcgttcctccggctgaacccatctccactggctgccaatgggccaaatgcatcctcccgaccagcctcgacggtctggtcctgagatgcgaggacacgtctgacctggatgtggtaccagtctagttggttccggcgcggaggaggagaaaaagatgccttgactcgatttgagttggtttctgtgggttgttagtgttggagggaaaaaaaatgtgcaaatgcagggtgtgattatgggctaagtaaagttacaatgtcagtggtcggtcagctacctggagattggtcgtacagtatgtcatgtgtaatttttgtcgtctcgttttggttgagccatgggtggtgcttgtaacaaaaggatggcttggtgtcagtactacctaccctaccatggagcctgtttggagattcagtggtctggtttcccattcatattttgttcttttttcttttggcgtagggttccgacaatgccctggaagcctgcagtttccttctgtacccagatctacatggaaatcgcttacctaaacttgagaggcatatttccggtggtgagaaaccaatgtaaaaaaaagttgattccaattcgtgttgacgcgtttccgaagcttaccggaggat

SEQ ID NO: 24018 - DNA, 616 bp, Zea mays
  Clone ID: MRT4577_121910C.1
atactagctagaagttagagcctagatgatggttgcttccgttggcgtgcaagctcgagtgctcctaaatggtcgtcgtattagcttatacgacaacgacccggtgcaagagataatattgtttacacgtgcgagtccaaaattgttggctttgggccggagcagttaacacgagaagtgtattttatcacttccgcctcttgcatatgttgtagattctcgccgagaagggagtagtagtattacctgatacctatgctaattcaggtggcgtggtcgttagctacttcgagtgggtacaggtaaaatgcctgttcgtcgctgcttcattgctcgattgtttccttgatctaatctactttcttgtgccatgttgattgatcgtgtagaacattcaaggtttcatgtgggctgaggagaaagtgaacgatgaactagaaaagtacatgagcagtgcttttcaacacatgaaggccatgtgcaaatctttggtgctgccgaagtgtgccatgacattggaattgcgggtctagaaaacaagctcattagatttctaaaaaaatattgggagttccagacattgtagagtgctcttttgtgcaatcaactgtgacag

SEQ ID NO: 24019 - DNA, 735 bp, Zea mays
  Clone ID: MRT4577_121911C.1
cagaattcggctcgagatgagcttatgttcctatatgactactagctagaagttagagcctagatgatggctgcttctgttggcgtgaaagctcgagtgctcctaaatggtcgtcgtattagctgatacgacatcgacccgatgcaatagataatattgtttacacgtgcgagtccaaaattgttggctttgggtcggagcagttaacgcgagaagtgtattttatcacttctgagtgcaaccttttttttattatttttccgagcttctgcctcttgcatatgttgtagattctcgtcgagaagggagtagtagtattacctgatatctatgctaattcaggtggtgtggtcgttagctactttaattgagtgagttcagaacattcaaggtttcatgtgggccgaggagaaagtggacgatgaactagaaaaggacatgagcagtgcttttcaacacatgaaggccatgtgcaaatctttggtgctgccgaagtgtgccgtgacattggaattgcgggtctagaaaaacaagctcattagatttctaaaaaaacattaggagttattagattggtagcatttttttaagatttaaaattttatagaagtcatcattttcgtttattggaagaaatatttttggaagttaaaaagatgctctaacatccaaccacgcaaactatcttgcaaccactctaacacgattttggtaatatgtttttataataaaaaa

SEQ ID NO: 24020 - DNA, 833 bp, Zea mays
  Clone ID: MRT4577_121912C.1
atgagcttatatacctatatgaatactagctagaagttagagcctagatgatggttgcttccgttggcgtgcaagctcgagtgctcctaaatggtcgtcgtattagcttatacgacaacgacccggtgcaagagataatattgtttacacgtgcgagtccaaaattgttggctttgggccggagcagttaacacgagaagtgtattttatcacttccgcctcttgcatatgttgtagattctcgccgagaagggagtagtagtattacctgatacctatgctaattcaggtggcgtggtcgttagctacttcgagtgggtacagaacattcaaggtttcatgtgggctgaggagaaagtgaacgatgaactagaaaagtacatgagcagtgcttttcaacacatgaaggccatgtgcaaatctttggtgctgccgaagtgtgccatgacattggaattgcgggtctagaaaaacaagctcattagatttctaaaaaaatattgggagttattagattggtagcatttttttaagatttaaagttttatagaagtcatcattttcgtttattggaagaaatatttttggaagttgttggaagttaaaaagaggctctaacatccaaccccgcaaagtattttgcaaccactctaacaagatttcggtaatatgtttttatgagacgagtatatgtttttattaaacaagtgtgctaccaaatgcatgattaaacgaaatgggcttcctgtgaccggagcgcatcaggctaggctgtttgggatttgcatggccaactggtgaagccgaacacaaattgttctggcttcaggcat

SEQ ID NO: 24021 - DNA, 498 bp, Zea mays
  Clone ID: MRT4577_121913C.1
ggccaacccaagggcggaccaacaggggggttgtcccaaaaaggaccttcaaagggggcccctgggttttggcccataaaaaatgggggtcccccccaaatcctacgggccctaacggtatttttaaaacaccaaccaaaatggaaaccggattttcccgctaacagggttaacacacccccggggggggcaacgaggaaatggcccccccggctcccgggcctagattggggcccccaaaatggtcctttaacaacccattaaggcccccggccggcccataggggggttaaatttttatttcataaaaaggccggcccaaactttcccccaagggaagggggaaccagccccttcaccaaaaagggggcggaacccccctggttttggcccaaggggaccccaaaaaactggcccggaacatcgaaccccttcccggggcttttaaggggggggaaaccccgaaccatggaaggccccccccccccacgggggggg

SEQ ID NO: 24022 - DNA, 929 bp, Zea mays
  Clone ID: MRT4577_121914C.1
cccccgcgtccggcttatgttcctatatgactactagctagaagttagagcctagatgatggctgcttctgttggcgtgaaagctcgagtgctcctaaatggtcgtcgtattagctgatacgacatcgaaccgatgcaatagataatattgtttacacgtattctcgccgagaagggagtagtagtattacctgatatctatgctaattcaggtggtgtggtcgttagctactttaattgagtgggttcagaacattcaaggtttcatgtgggccgaggagaaagtggacgacgaactagaaaaggacatgagcagtgcttttcaacacatgaaggccatgtgcgaatctttggtgctgccgaagtgtgccgtgacattggaattgcgggtctagaaaaacaagctcattagatttctgaaaaaacattaggagttattagattggtagcatttttttaagatttaaaattttatagaagtcatcattttcgtttattggaagaaatatttttggaagttttaacagagttgctcgtgccaccctcttgagaggctgggaggcatgagaccattgaccacgcattacagattcgacaggcgcattcaataattcgtgtccaacaacgttggaggatcagtgtatacggtaaaattcatcagaaacggccggcttggaatgagcccgttgaagggtgttgtgcttgttgatcctgagttaccaatggttggttcaccagttcttggtgatgaaaattttatttaaaccattttattgtattttagaaagctaatttggcctcgacagagttactgtaccttttcatttttaatgaaattctggtctggggtttgaagttcccagatgtaaatgatttgcaaaaaaattgcagaagggattcaaataaaccagttatcattcacacagttt

SEQ ID NO: 24023 - DNA, 315 bp, Zea mays
  Clone ID: MRT4577_121915C.1
gccttaagccccatctctgcggtggctctatagccttttgatgcgttttccaccatcctttataactctctctcgtgaagttgcttctcctaagcaaccctctacaccccctgcccatcagattgcttgtccatgcttcagatcaagccggcagcttggcgcttatttgtgcctctgatgacggcaacagaactgctggaatcagtgaccgagccagacaaaaattataggtggcgcgagttctaacccctctcgcaaatcgcaactccagctagccaaccactgacctccagccacgggttggtgctgctcact

SEQ ID NO: 24024 - DNA, 600 bp, Zea mays
  unsure (1)..(600): unsure at all n locations
  Clone ID: MRT4577_121916C.1
aaagataaatccttgccatcatagaatattctacttggtcttggngaagaagtagggattggtaggctgcctgactgactcagtgggtggagcatttgactcttgatctttgagttgtaagtttgagctccatgttgggtgtagggagtacttaaaaagaaactttttttttttttttttaagatttacctattgattagaaagagatagagagagagagagcacaccagcaggggaagagacagaaagagaatcctcaagcagactccctgctgagcacggatttccagaacactgagatcatgaccagagccaaaattcagagttggctacccaactggatgagccacccagatgtcccaaaagtaaactcttaggaaaataaaaaaagaagtagggattggaaccagaaagtacaaagaaagctcaagacttgggctcagctatctaggaaagagaatgtggcatgtgcacaaatttctcttcagaataagctacggtaaaagtatgaacaaacagctaagaaaatatggaataccctggagaaatttttttttatttttatttatgatagtcccagagagagagagagagaggcag

SEQ ID NO: 24025 - DNA, 355 bp, Zea mays
  unsure (1)..(355): unsure at all n locations
  Clone ID: MRT4577_121917C.1
ctaatagagggaaccggccggtcctccccnaagggggttttttttaaaaaggagaaaaacgggcctactaaaaaggggccactgaacaacttatatggcaaataaaagaatccccaatggggggccccagacactttttttaaaaatttggggcaaaaaaaattttccaaattcccccttggacaggcggactggtgtacctttaaagcccgagctcggggttggaaggttaaacgggggtggtgttacaaaaaaaggggttaattacgggggcttcttggacccgaattggacctcccaaaacaagaaccagtgctttcttcaactggaagccctggctttggaaaggtttttt

SEQ ID NO: 24026 - DNA, 173 bp, Zea mays
  Clone ID: MRT4577_121918C.1
tctattagattggcgatccaattgaggcacgcgactatgagtggacggaaaggggttcctctgtagatcaactggtgaattgcatcaatagtttcagagaggctgcatctaccaatgaccagacagttgaccatattgacatatctgagaaacagaaggtcatcaattaatgc

SEQ ID NO: 24027 - DNA, 777 bp, Zea mays
  unsure (1)..(777): unsure at all n locations
  Clone ID: MRT4577_121919C.1
cattgggtacctcgagggccggcggggctcctcttccccactccgcctcccgagagacggctcagtctatcgtccgtggcacggccaacggtctctgctatcggcgggatccgcagcctccgctctaagacatcaaccacgctagaccatagcgcccgtgtgtgagatacgaccatgctcaattcaacgcacgcgggaagctactgatcttacgtccccatgcggaggccacgagaccctctcatgtgtggccagaacaagatctaccgccaggtcaccttctccaacttgcgcagcgtgctcggtcccaaggccgacaagatctccgaggtctgcgacggcgacggcgcgtctcatcatcatctcacagcgagggaagctctaccagccctggcccactcgtgcataacaaatgctatacaatgggaccaacattggtgactacaatgctcaacattcgaatgccgcgctctctgcaactcagagctgccaccactaaatgacaaacacgacggcaaaattcgaggctcttgcagcgaactcacatgcacttgcttgtggaggaacttggcccactgagtgtgaccgagatgaagctcctagagacaccgctcgaatgtgctcntgtcacaggcgcgacagctgaagacactgcttatgatggagcaagagcaaaagctccgcagaaaggatcgacacctgagagaattgaacaggcaagtcacattcaagcttgcagctgtaggttggaggaactacagaatcgtgtagtatgca

SEQ ID NO: 24028 - DNA, 2455 bp, Zea mays
  Clone ID: MRT4577_12191C.1
ggtaccctccgggttcggccggggacacgactctcggcaacggatatctcggctctcgcatcgatgaagaacgtagcaaaatgcgatacctggtgtgaattgcagaatcccgcgaaccatcgagtttttgaacgcaagttgcgcccgaagccttctggcggagggcacgtctgcctgggcgtcacgcagcctacacacacggtcgctcactttctctcgcctcctgtcccccccgcgtgcgcgcagcgctctctctctctccctcactctcttttgaggagtgaggacgactggggcgaacgtcgccgccgccgccctacatcaggtgcccaggtcgttgttcggcccttcgccagctctttttcgggcacttcgccggcgacgaacacccaccagttgctgatgcaaggctttcaaaagattaacagtctcacttgatgcaaaagcaacacaatcacactaaaggtttggattagacatttcagagcatgggttcgcggtttccatcccaccagctaagcaatggcttgtatgtctcgggccgacctgagcaacctaaagagaagtccccagtcatttgctcctcggctatgccgtacactggtggggacataaagaaatctggggagcttggaaagatgtttgatctccatagaaaatctggtccattgggtaatcaaacttcaaggaatacttcctttggtggtgctgcctccaactctggaccagtttctaatgctgtcggtcgctccaactactctggttctatttcgtctgcaattcctaacactggaggatcttctaggacaaaaactaattctggacctctcaataagcatggagaaccaacaaagaggtcatctggcccccaatctggtggagtaaccccgatggcccgtcagaactctggccctctgcctcctgtacttcctacaactgggctaatcacatcaggtcctatcacctctggtcagttaaattcatctggtgctcaacgcaaagtatcagggcctcttgattctagtgtatcaatgaagatgcgtaccacatcttttgcacacaacccagctgtcacaaatctcaatgtgggagatggttactcgattaagggcagcattccgaccacaataatctggttggtcgcgttgctctttttggttgggtttgtagctggtggcttcattctcgctgctattcataatcctatcttgcttatagtcgtggtggtgatatttggctttgttgctgcacttgtgacctggaacatctgctggggaacaagaggtgtgattgattttatcggtcgctattctgatgtagaccttagaactgcaaaagatggagagtatgttaaggttactggggttgttacttgtggaaatttgccccttgagtcctcattccaacgggtgccacgatgtgtgtacacttcaacttgcttgtacgagtacaggggttgggactcgaaagccgcaaacgccacacaccgacggtttacttggggtctcaggtcaatggaacggcacgcggtggacttctacatctccgatttccagtccgggctgcgagcactggtcagggcaggatccggcgcgcgcgtgaccccatacgtggacgagtccgtcgctatcgacgtaaacccagacaacaaggacatgtcgcctgagttcctccggtggctccgcggaaggaatctgtcgagcgacgaccggactatgcgcctcaaagaaggatacatcaaggagggcagcaccgtgagcgtgatgggcgtcgttcagaggaacgagaacgtgctgatgatcgttcctccagccgagcccatctccactggctgccagtggggcaagtgtgtcctcccgaccagcctcgagggccttgtcctgagatgcgaggacacgtctggcctggacgtgataccggtctagctagagaggttggttctggcgaatcctctggcgcggaaagggagtagaaaaaaaaagatgccttgacgtttggtttggtctccgtgggttgttagggttggaaggatgtgcaaatgcagggtgtgattattgggctaagtaagtaagtacaatatgagtggtcggtcggttacctggagcttgatcgtgatagtatatggtatgtaatttcctcttctcttcttttggctgagccatggatggtgtgcttgtaacaaggatggcttgatgtcagtatactaccctaccataccatggagcatatttggagattcagtgggttccagtccgtattatgctcctgtttttttgttgtagggttccaacaatgccttgaagcctgcaatttccttgtgtaaaaaaatctcaaaaaaaggcccctagggccaacatggactatagcaggtgtatggtgcaaaaaaaaaaaaaaaaaaaaaaaaaaaaaaaaaaaaaaaaaaaaaaaaaagaaaaaaaaaaaaaaaaaagcggcc

SEQ ID NO: 24029 - DNA, 336 bp, Zea mays
  Clone ID: MRT4577_121920C.1
ggcccaaaaaaatttattttattccttcataaaacatcattacccaaggacattccgaagtagcctcataaggggtttcattaaaagggaagggcccttaacatatggggcccaaaaaccccaagggaaaaccataggttgcgacagttattggggtcttgaaaaataggggagaaaaacgggggccgaaaaaccggaacaaaactttggtcgccctaatgaaaaaacggcaacaaaaacggggccaaaaaaggctggcggtgaaaacggttcccccacggttggcatttttcggccccaaaaaattaaaagcctttcctgggaccgatggggggg

SEQ ID NO: 24030 - DNA, 675 bp, Zea mays
  Clone ID: MRT4577_121921C.1
cccggctccaatctccactctgtccggcgcccctttcttctgacgcgcccgatgcagcgatgctactgcgatggatcgcagctgaggggcgtcggcgagcgcggccgtctaggtccctcgcgcgcgctctctcgtacggtagggttgtggacgctgccgctcgcgatggggagctcagggtgttcgtggtcgcgggcgaggtatccggcgactcgctcgcttcgcgactcatggcggctctcagggcgctgtcccctgtgccggtccgtttcgctggcgttggcggtgaactaatgtgcaaggaaggtttgcaatcactttttcccatggaagaaattgccattatgggcatgtgggagctgctgccgcacatatacagtatcaagaggaaaattgaggatagtgcaaatgcggctatgctatttcaacctcatgctgtggttacaattgattcaaagggtttttcttttcgactgttgaagcaactgaaatgcagaagcaatcagaaggttcaaagtcctctgcatatccattatgtttcgccgtcattcttggcctggaaaggtggtgaaaagcagctctctaagttgcataattttgtggaccacatgttgtgcattcttccttttgaggaaaaatatgcagataaacgggttgcctgctacttatgtgggc

SEQ ID NO: 24031 - DNA, 158 bp, Zea mays
  Clone ID: MRT4577_121922C.1
aagaatacgactaactgtggtgtaagacctcagtggataacaagatgaagccatggaacatgagaacgtccaagtgactctctcaacaactcgcttatcctcctgatcgcttggtagaagagattccaaacatgggaaattccagtagtgagagcaag

SEQ ID NO: 24032 - DNA, 337 bp, Zea mays
  Clone ID: MRT4577_121924C.1
ccaaggggaaaacaacaagctccaattaggattcatccttaagtgcggtgaataaggagaaccagtttgccgaaacataagcggcagcctacaaagatcaggaaggatgtgaaccttgacagattattaaggggagcacaagttggaataaaaatggttacccgtgagccggaaaatagccaacagtggtacatgggaaactgatcatcgacggtgccaaactctctgagaagtcccaagttccggtcaggggtatgctggcacaaggacaaaaactggcctggcccgaagcttgcattggcccttgaggcctggcgccttaatgacacaagcacac

SEQ ID NO: 24033 - DNA, 660 bp, Zea mays
  Clone ID: MRT4577_121925C.1
gactagttctagatcgcggcggccgctcgcgatctagaactagcccacgcgtccgcggacgcgtgggcggcgcacagcaggtggagatgccgccgccattctcgccggctggcggcgccgggcagcggatctcgctggcggaggcgccgtcgcccatcagcagccggccgccggcatcgacgccggcgaagcagtacgacgagctcggcgcgtccggcgccggcgccgtgggcttcgacgccgagggcctggccgccgcagcagctggcgaggagggcgccagcggcggctcggcgggcaaccggtggccgcggcaggagacgctggagctgctcaagatccggtccgacatggacgccgccttccgggacgccaccctcaagggtcccctctgggagcaggtctccagtcccaccactacgctgccaagaacggaggcaccgggaacgggaacggcggcggcgcatcagagcacggctccagaggcatgcaaacgcaggcgagcaacggcagcgttggagccagcaggttcgtcggcgaaggcggcggcgcggcctcggcggcgaagaagccagaggacattatgaaggagatgatggagcagaggcaggcgccgcagcagcagcagcagcagacgcaggcggtgggtcagtggctata

SEQ ID NO: 24034 - DNA, 895 bp, Zea mays
  Clone ID: MRT4577_121926C.1
gccggccggttccgcacgagggaccttatcagcatcgtcgctcggcccattcgaggcccacagagtgaggaggagtcgaggagcaggaggctagggtttaaggtgcacggcgatggcgacggcggcgaagaccctagcgcgggctggatcctccctcttcggccgcattctcgcgtccccttccataatccgccccgggctgcctctcgccgggctgcggccgcacttcccaccgacggcaccggcggggttggacgcttacgaggcggagaccgtcgccaggctgagctcgctccccggcgagatctccttcccctgcggcctcccctcgctccgcttcttcatcgacgacgttgaggatcctgttgctaatgaccctctccagttgcttccgaaaagaacttaccagcccagtaccatcaagcggaaaagaacccatggattccttacacgtaaatcgaccaagggtgggcgcaaggtgattgcccggagaatcgcaaaaggcaggcacagaatttcagtttagcaagatcccatagcagcactggatgttttctgtactacagattcgtatcgtgttctttgtgtgaacgacatatttttaagctttttgaagtttttgcataccaccctgctgaagcatgaagctgagcccccgcgcaagcagctgaaacaaactcttgctgcgaaataaacaagtcaaaggaactggaaaattgccgcgccgaatgaaaaaaaaaaaaaaggttcatttgggagcagctgcgtgccgcatttgtgtttgtttgtgctgggattgccacgtaacagaaatgcctgcgttgtctgaatgtgggcccaataacaacttggcttgttttcaaaagggggggcaaggggggagagattttattct

SEQ ID NO: 24035 - DNA, 436 bp, Zea mays
  Clone ID: MRT4577_121927C.1
cggccgctcgagcgccggccggggctgatcatccacaatacttcccgttcccacgcacgcacgcgatggccacctccgccgcgcctgcgtcgccgcacgccctcttcctcccctacccggcgcagggccacgtcatcccgttcatggagctcgcccaccgcttcctcgaccgcggcttcgccgtcaccttcgtcaacaccaagttcaaccaccgccgcgtcgtcgcagccgccggtggcgcggcgacggcatactcttcagcaggaggaggacggctgcgtctcgttgcggtcgaagacgggatggacgacgccggggaccacgagaacctcatcctgctcaacgccgccatgtaggaggccatcccgccgcaggtggaggggcttctcgacggagaggacgtggacggcgatggtgtggaaaaagtgaaatgtgt

SEQ ID NO: 24036 - DNA, 113 bp, Zea mays
  Clone ID: MRT4577_121928C.1
aaccaacactacaacagcatcctgcaggcacgcaaagcacgtggacctctgcgacgatgcctagctcgggcgacgagacttgtcagacggtactctgaacaaccctttgacga

SEQ ID NO: 24037 - DNA, 276 bp, Zea mays
  Clone ID: MRT4577_121929C.1
gcgtacgtatgctcggaattcggctcgagataagtgtgtgtttttggtgcctgagtcagaggatctcgcttcagttttagaacacaccactccatcttccggggcgaggtgggtctgcggataaacaatccaacaccagcaccgccctaccggaagatagctgcatctgagacggtgtgcccattcaatggcgagctggtggctgagaccattgagattagccatgactaggggcacaagttcatgttagtgcacgacacctgacaaagatacaca

SEQ ID NO: 24038 - DNA, 248 bp, Zea mays
  Clone ID: MRT4577_12192C.1
ggtgcaaaccccgaaggcagaaagaagcccgacgggggggtaaagagacagaagccgcggttacaccacgagggaggagacgagaacggaagggaggaccactgggagacgggacacaaccatggccgaacagcaggcgacacgcagggccagacgacaggcacagggagggccggagggcacacgggacgagaaaaggatgcgcaccacacacaggagagacacccccaacgggagaggatcagagg

SEQ ID NO: 24039 - DNA, 344 bp, Zea mays
  Clone ID: MRT4577_121930C.1
cctacggtgatggcactcctgattcagctgggaagtaggtttccaccggatgtatggtacgtacctttggccattgtctcttgatcggtccagtgttacgtcactactgtagagaagagaacggttttggtccttgaggcgccccgtgtactggtgttgtcgctgtagaattgttacttaaacagtatggtgatgattaatctcagcattttttttcttgcagcaaaaaaaaaaaaaaaaaaaaacaagatgaaatatattattttgtaattatgaccaggtgtactgtgctatacattaaaagtatatatttgtgaaaaaaaaaaaggggcggccgttttaaa

SEQ ID NO: 24040 - DNA, 382 bp, Zea mays
  Clone ID: MRT4577_121931C.1
aaaaccgacaaatgaattaactggataaagctccaaaagcggaaccatgatacaggccattggaaaccgttttaattattaatacgggggttcaaaggccaatagggaataagggttaaagatttgaaaagacccgaaccccagaaacaggggtctgggtgctaattttcactctgggaaaaagaaaaggaaactggctgtcccattaaccgcaaaacccaaattggcgttttgtaccccccgaccaaggtttaatttcatcatgcccggggggaaggaaccccatgccttcaaggggatggaggcacaaaccaaaacaaaagggcccttttctttttaccacaagactgagggaaggggggccccaacgccctcctttttt

SEQ ID NO: 24041 - DNA, 161 bp, Zea mays
  Clone ID: MRT4577_121932C.1
aaagaaagttttttttttgtttcaaaccatgtttgccttacattcgttgatacgatagaaaaaattatgtatttatagcatcacggagttcaacgaaagttataattcttcatgaccaggtgaacattgacatattagattatttgttcacgccacaactg

SEQ ID NO: 24042 - DNA, 346 bp, Zea mays
  Clone ID: MRT4577_121933C.1
tgagtctgagaacctcacggtttacatttatcaagtgatcgccactggtatggcagggggatctgttgctgctgcgtgccagtgcgtgatcactgctgatgattctgaagcatgactttctctaggaaatgctgctaatacttgtaagggcggataccagccatgacgacgcagttacacgcacgctgctcgggagatgcttacagtaacgctgacatgacttagcacgctgcagcagtcgcacgtccatgctggaaaagatccttgtagtcatgatatggcttctgcgtaaggaatccgcagaagctagcgacgaccggatgaccattgctgtgcgaatgatatt

SEQ ID NO: 24043 - DNA, 332 bp, Zea mays
  unsure (1)..(332): unsure at all n locations
  Clone ID: MRT4577_121934C.1
ctagttctgattccagctgccgccctttttttactttttctttcaatatttttttcttagagattctctttattctttttgcattctttttttcccctccaacagacacacaaatctcaccatctctgttatctaactacaccccccacaccttccaaattttttatccccacaatgacataacccaaatatgcaaccatttcgttcccaaaaacatttttctactcataatccaccactacacccctcattttacccccccccccccctccctttttttattcaaaaaattccccccatcggggaccaaaacaaaangcctcttttcctac

SEQ ID NO: 24044 - DNA, 172 bp, Zea mays
  Clone ID: MRT4577_121935C.1
gacgaatattatctcaattaccagtcttgagtcccccctctccttccccttcccaacgctctcgctgcagaggaaaggcgaagacggcgacgaccgccgcagcgcttgccgcacccgcgtccatgccctccacgaccattctaccgcagatactggcatgcgctccgcacac

SEQ ID NO: 24045 - DNA, 309 bp, Zea mays
  Clone ID: MRT4577_121936C.1
gggaaattcaacgtcgccgaagggaacttcctcgtggcgcacacccactcggaggagctagagaggcagaggattctcctgtcagaggtggtgaacccgatgcaaggatgcttcgggtgcttcccccgcctgggtctgaatcagtcgtctcccgcctcgaaagcctcgtcggtcggttctgagagctcgaggaggaatccttctaccatgggatctgctaggctttcgccgtcgtaatgtctctctacgaagggggatcgagctgaaggagttgagcaaaggctattacgatgcttggtatgattcaga

SEQ ID NO: 24046 - DNA, 2772 bp, Zea mays
  unsure (1)..(2772): unsure at all n locations
  Clone ID: MRT4577_121937C.1
gtgggactgggcttttcaaatcaacagatgaagaatccccactgatatccatggacgacgaaggatggatcacaattccgtgcaaggcacttcctgaaagttggaacgacatatcagaaatggttcagttgcaggctctggaccgttccttcctttttccagttatcaggcgagcaggttcctatactggcgtgcctgtcagcttctaagcaagatgtacaggttatatccccctttagaattgccgcagtaatgtctaagaatggaacttctatgcaaaactttacaaataaatctagccctgtcagtgcaaatggtcatgataatggagcagctggagaaagtggctatgaggatgttgaacccaatggtgaagcatctccttcaggacatgatattttggagactcaatctctccttcagatggaggatcataagcagcagatcgaacatgtgttgcgaagatttagagaatcaaatttttttgtccggattgcggaatcagtggaacctctatggtccaagaaaagtgtaacttcaactacgatagcagatgaacgatcagataaccagggaaatagtaagagatcaaggagtaatgtttataataccatttctgataaaggggtttttgatggtaacacatctgggggagttgctcgagatgttgtcaagtgttattctctgcaaaatggagacatagcggttgttttgcaagtgaatgttagcgttaacaaattggaagatcctgtgcttgaagtccttcagtttgagaaaagtatatcaaacaattgtatgcctgggaatcttgtggatggacattgtgacagtaacgatgaattcatcgatgacaattactattgtatttgaggaggcatccaaaggaggtgctcctttgtctttaccaattgctagtattgaggttgggcatggtcacagcttgccaaacctagcactcaggaggggcgaggaacactcttttattctcaaaccagcaactatgtcctcaagggaacggaagactaacagtcatgcacctctggccttatcactcccaacgatgaccggtgctactttaaatactcatacaccaaaagctggtgagccgtatgctgatctaagtgaccaatatgctgtactggtatcttatcgctgtaattacacagaatcgaaactttttttcaagcaagcaacaagctggcgaccctctgcagccagcgatcttatgatctcagtatcatccgaactgtctttacggaatcctagtcttggtgctcgtgttcctcaactccccgtgcagatactaacactcgaagctactaatatgacatccgaaaaccttacttgaggagtccttgctccgaggtgctccttttcttcttcagttgctagtattgaggttgggcatgccaacagcttgccaaacctagcactcaggaggggcgaggaacactcttttattctcaaaccagcaactatgtcctcaagggaacggaagaccaacagtcatgcacctctggccttatcactcccaacgatgaccggtgctactttaaatactcatacaccaaaggctggtgagccgtatgctgatctaagcgaccaatatgctgtactggtatcttatcgctgtaattacacagaatcgaaactttttttcaagcaagcaacaagttggcgaccctctgcagccagcgatcttatgatctcagtatcatccgaactgtctttacggaatcctagtcttggtgctcgtgttcctcaactccccgtgcagatactaacactcgaagctactaatatgacatccgaaaaccttacattaactgtccttgctcctgaagcatctggttcttcttcagttgtatccttgaactcatctccaaccaccccaaatggttcttttgatggtgttaatgagtcatcaaaaagatctgggctgggaaaagatggaattggctttcgaagattgaattctgtcctagctactccaaaagaaggtgataatggaggaaacagaatgagtaatgcttcaggctgtactcatctgtggttgcaaagtgcagtgcccctagggtgtgttcctgcccgctcaagcaccactgtcaaacttgagctgctaccattatcagatggaattatcacacttgatactctgcaaataaccgcaagggaaaaaggccttgcttacattccggagcactccttggagatacatgccacctctggtatgtcatcaggaaggtcataggataggagagcatcaagaggtatactgttctgtatattgggggcctgggactcagcctgtacaaatgagttggaaacaaccaggccaagcatgtttttttttatctcatttgtattggatggacataaggcgctcaccttggagagaaactacccccagattttaccgaaggatggttgctgccaacatggggaaactaccccagatgaatcattatgtatcacaattgtgttacaaatccattcatttcatactgaggtcgccgagacactggtgttcgtcttcacaaaggcttatgaaattcgtaacgtgttgcttagttttgatgccgttattgttgttggtggtgttcatttaatcccactcatgttgctgagttgtaccatatgcgggctctgatcataatatactggagaaatagaaacatgtgtgtccattggccattgctcatcttcatgatgatatatcagttgctcatgaatcaaaaaaaaaaaaaaaaaaactcgagccgggnngcccgg

SEQ ID NO: 24047 - DNA, 402 bp, Zea mays
  Clone ID: MRT4577_121938C.1
tatatgggcatcgtcactcatcttaagccgatttccctgagtccatagggacgaacataggtcgtctcaacgaactggcgactgacatgagccttcaggcaccccgtcgctggagccgctggccgttatcgctgtcatcgccgagatgacttactttcttgtagaccgacgtggtctcttccgacgccgaggggagaaccctcaggattatcttatcttatgcacatctgctcgaaagagactggcgagacatccctatgtagcacggtgttgaattcacctgtcgactatagcggggatgtgggtaagggataagcgatattaaattcatggctcctaggaaatgcaatataatgcatatacttgacataaggaatgtctcctaacttgctagagaatgag

SEQ ID NO: 24048 - DNA, 1548 bp, Zea mays
  Clone ID: MRT4577_121939C.1
gtccggattgcggaatcagtggaacctctatggtccaagaaaagtgtaacttcaactacgatggcagatgaacgatcagataaccagggaaatagtaagagctcaaggagtaatgtttataataccatttctgataaaggggtttttgatggtaacacatctgggggagttgctcgagatgttgtcaagtgttattctctgcaaaatggagacatagtggttgttttgcaagtgagtgttagcgttaacaaattggaagatcctgtgcttgaagtccttcagtttgagaaaagcatatcaaacaattgtatgcctgggaatcttgtggatggacattgtgacagtaacgatgatccatgtcaggagctgcttagttggttgctccctttagatcgcacattaccacctcgttctttggcaccccctactctcaatccaagtgtatcgcacaagcaatcttattctgcttctggttctcaaatattcaacttcagaagttactccatgccttcagcctcttctgttcagacaccaaataatataagaccaccaccaatatctgaaggtcaagaatttatgcctgaaaaacctgcaaaaaccccagatattataaatgatgggcaactttcgtttagaggagttcctttagaacctgaacggtattctgtacgttgtggtttagaaggtgtgtatctaccagggaaaagatggcggagaaaagttgaaatcattcaaccaattgaggttcattcttttgctgcaaaatgtactgtggaaaatcttctctgtgtcacagtaaagaatattgctcctactcatgcaaaagatatagtcgtattcatcgatgcaattactattgtatttgaggaggcatccaaaggaggtgctcctttgtctttaccaattgctagtattgaggttgggcatggtcacagcttgccaaacctagcactcaggaggggcgaggaacactcttttattctcaaaccagcaactatgtcctcaagggaacggaagaccaacagtcatgcacctctggccttatcactcccaacgatgaccggtgctactttaaatactcatacaccaaaggctggtgagccgtatgctgatctaagcgaccaatatgctgtactggtatcttatcgctgtaattacacagaatcgaaactttttttcaagcaagcaacaagctggcgaccctctgcagccagcgatcttatgatctcagtatcatccgaactgtctttacggaatcctagtcttggtgctcgtgttcctcaactccccgtgcagatactaacactcgaagctactaatatgacatccgaaaaccttacattaactgtccttgctcctgaagcatctggttcttcttcagttgtatccttgaactcatctccaaccaccccaaatggttcttttgatggtgttaatgagtcatcaaaaagatctgggctgggaaaagatggaattggctttcgaagattgaattctgtcctagctactccaaaagaggtgataatgggagaaacagaatgagtaatg

SEQ ID NO: 24049 - DNA, 168 bp, Zea mays
  Clone ID: MRT4577_12193C.1
ataccatatacaatgtcgctgggagttaggtgatgttgtttgggcgaatgcacaattcaaagatgtgccgactactaagaaactctggaccacacttactcatcaaagctcatgtatcaactcccgtggctcatggattctgccgaaagctagaaaggcaagttcttc

SEQ ID NO: 24050 - DNA, 175 bp, Zea mays
  Clone ID: MRT4577_121940C.1
gccttgacctacactttgtcgatcagcacgttcttccacctctacatcatcaagagcaagaacctctttctcccgcaagtgaagcatcagcgttactcctactattgcgactgaaacgactgatgatcacatcgatggatatatgtatgcagaactcaatatatatacgggccct

SEQ ID NO: 24051 - DNA, 250 bp, Zea mays
  unsure (1)..(250): unsure at all n locations
  Clone ID: MRT4577_121941C.1
tcgtgggaactgtgttaggtcaggtcccttgttgtccttgcattttcagactatgtatggaacgcatttgggtaatgtacnntattcggcgagatcaactcatttcaagtaacctttctgtctaatgtcttcctatcctgttaatcgtctcttaganntgtttggcgtgtcctggtttgagatttcagtctgctagtctgcataattctgtaccttgttgctacagtctatttgtactttcttaatgtaa

SEQ ID NO: 24052 - DNA, 147 bp, Zea mays
  Clone ID: MRT4577_121942C.1
atatttaggcgtgggctctgcagacaatgggcaacctcaacgaatcaggaaaagacgaggctttactcagaagtatgtggtatgcactccgatacaggacttcatctcccgatcgacactctgttcgacgccgatacgatggaggga

SEQ ID NO: 24053 - DNA, 283 bp, Zea mays
  Clone ID: MRT4577_121943C.1
cgtaagctcggaattcggctcggccgatggagaagctcacgttaaggccccgccctctcgtctttaacggggcgtcttttgacagggaggacgggagaacaacggctaccataggggggaggcggggcaactgctaacagccaaaggaagcttcccagtctggccacagcaacggggccaaggctcgggcgaacggtgttagaaggtacagaagagggacggaacggatgcacgaaaggagtgaacttgcagatccaagtatggccggtgaagaagagaagtg

SEQ ID NO: 24054 - DNA, 574 bp, Zea mays
  Clone ID: MRT4577_121944C.1
gggtacctcgaggccggccgggagcacacgcactcatgcgggagcagctatgcatgctcatctgaccactgctcttgccccaccccgccgcaggagctgcatgatctgctccgggcacgaagctccgactcctacacctctccaatggtgagtaaggtgtacgtcgtcgtactatttgatgattgcccatgatgccatgctacttgaacagatccacaaggcgcctccgctgtagacggggttgaagcctagaatatgacacggcccctgaaacctccctgacgaagagcttggcaaagatggaagcaccccctaaatccgctccgacagctgtcactccgcaagatactcgaaggatacttacactatcctcctcgaggacacacgcgagattctacctgcacggatgaggagatgaaggagatcgtcgatgacactggcgtcatctgagagtgagcttagacttggctcacctgctgacgacgtcttcatctgcactgcataccagggtggtgatcatgagacgactacactgactgatagcactccagtgactcttcctacatgatgttcg

SEQ ID NO: 24055 - DNA, 253 bp, Zea mays
  Clone ID: MRT4577_121945C.1
ggacaggcaacttttaccagttttattcactcgttttaattttcaagaacgttttttggggaacatcccaaatttacccggttttttcccccctctttggcaaaaaaaaccaacattagggtaaaaggtttggggggcttttttttttgccgaaaaaaacaccggggttttttaacaaatagggaaaaaataggggcgggtgccgggccccacttttaaccactttttttgtttatggtggggaaaccccttt

SEQ ID NO: 24056 - DNA, 411 bp, Zea mays
  Clone ID: MRT4577_121946C.1
cctcgaggccggccgggactgtctacgtatcccactccatccccacaccaccaccccaccatcttccggtcttcccctccccacacccggcgggatccccatccccttcccccggcccgatggagctgttcgcgcgcgccaaggtggtgcggctcaagagccaccacgacaagttcctgtacgcggacgaggacgaggcgcacgtgacgcaagagcgggacgggtcgtcggcgaacgcgcggtgggccgtggagccggcgccgcacaacccgggcgccatccgcctgcggagccggtacggccactacctcaccgcctccggggagccgttcctgctggggatgacgggtctttttttgacgcacaccgcgcccgccgcgccccgccccgccaacgcgtcggaggactggg

SEQ ID NO: 24057 - DNA, 382 bp, Zea mays
  Clone ID: MRT4577_121947C.1
acagccttcgcccttttttttttttttttttttttttttttttttttttcagtaaaagaaaaacatattgtacgtggtaaatgtttggaagtacccaccgggtgcggtgtacatgagtcggaatgtcggatggggctgaatatatataatttcacacccctgagccttgactgggattcaacgcctctagagggtttacactggcggacaaaacactgcccttctggaaagaagcttcaagggggctcaactttttttttttttaccccacatataccacaacctggatttggaggatattattcgggaactcgctcgaggccagtttaccctattggtcctttttaagccgaaccctcaagtttttccacccgtgggggca

SEQ ID NO: 24058 - DNA, 617 bp, Zea mays
  Clone ID: MRT4577_121948C.1
ggtacacggccctcctttcgagttttttttttttttttttttttttttttttttttttttttttttttttttttttttgtgttgtgtgttttttttttttttttttttttttggatggcaacaagcccttcatttattacgggggagaaattcgattcaccagcccacacgtttacccaaaatacatgggccgtttcgggccggccgtttttttcccgttaacacaatggtttatttgaggttattaatgtcccagttcgaacgaaacactccgggggggggaggggacccagcccctcaaatggaaatgctgttggggatccccttggcagggagccctgggggggccccactggggtcaaaggggttgggataaaccaccatgtaggggaactcgggggggccgttcctgttcctaagttgggggtcggggttttcgcccaccaccttgcccttaattttgaccggggcgtcgttaaaccttttaaacccccccagcccccgggcgtgggaggtccactcgggggtgtcgccctggccaaggtacacctcgtgggaggagggcttggaaaggatctcaataagcaaaatcccaatgatggtctggatctggctcg

SEQ ID NO: 24059 - DNA, 689 bp, Zea mays
  Clone ID: MRT4577_121949C.1
actacattcgacgaaattcccccgcatctccttcgattccttcctcagtttgtctcggaatccgccaagatcgaaggtctcgccggaacctggcgctggccgtaccgaccccggctggatctccgtgctcaagagttattgatggttcttgggatccagagggcgtggcggaggagttctcggcgatgagcaggctggcgtcggagctccaccggttgcggaggtcgccatgggaggtgctgtgctccgcgctggtatcatgcggcctggtgctcttctcgcagctcgccgtggccatagtgccccgcctcctcccatccatctccctcctcgccatgctccccgtcgcaggtttggtattcctggcggctattctggtgggcaggttctggaggaggttcatcggagtggccgcgtcggcgccgctgttcgtgctgttcaatgtgctgtttttgtggggcgtctacctattcgtcatccggagagatacctcttctctactagacatgctgattaatgctgagtgtgcactgcttctgtggggactttacaggattctttctggtgatcccggcattgttgcatacgaatcttcatttttggaagaggctggctgcaaggatttcgtggatgctatatgctcgagtgagaagtaccccatcactctcaagggtgaggcattgtaactg

SEQ ID NO: 24060 - DNA, 264 bp, Zea mays
  unsure (1)..(264): unsure at all n locations
  Clone ID: MRT4577_12194C.1
acgacgtcagcaaggcgaccggtaagtcccgttcccccattattannggggtgtgaaccaaagatagttttgttcggctttnctgannnnagcaagttgaaagcgctcatcaaggacaaattcctggtgaagaagcttccttcatcgtgccaaaagttctttttaggcaacaaaaaaacaacggcagttaacgagcttcttcaaattgtggtgtcgtcgctcctcttaacaccaacggaagtgacaagccccaccaccattact

SEQ ID NO: 24061 - DNA, 521 bp, Zea mays
  unsure (1)..(521): unsure at all n locations
  Clone ID: MRT4577_121950C.1
gtttgtggggtttttaataaaaagtcctgttttagtatatatataatatcaaaacatagcacgggggtccaattaatatgtgggttctgccaaagcaaccggggcaaccaacatgcacgcagacacacgttcgtgcatgatctcatagagtgggggggacgtgcagagagagattgcctacctgaacaactctgttaatttgtctatcacgacacacgacacactgcctatgtgtggcagccaaataggcctaacttattattggtcaaacaccaccacatgctagattgataataaatatatacaacgacggccatcgatgggaccagcatttggaggggtcccacttccacgtgccacctgagttccaggctggggcggcctgcgctgactacgctcgggcctaaacgaactggggcgcggacttcttctccggggccacgaccatgacgacggtggcctgcgccgtgtngatcgtctcctccacggcagggcacttgttgccgaacttgcagcttgag

SEQ ID NO: 24062 - DNA, 406 bp, Zea mays
  Clone ID: MRT4577_121951C.1
aaacgggaaggcccaaggcccaaaataaaaagggggccggaaacccaaaacccaaaaaaaacaccaaaaaattctaacacatcgggggggaaagggggctcggaaaaaaaaaaaaaaaagggggacccccttccaaaggggaagctaaacaaaaaaaatcccaaggggaaaccaaaaaaaaaccggccccccaaaaaggcggggggggcccttgaaaaaacccccccggggattttggagcccaagggaaaaaaaaaaaccccgggggagcttaaaacccgggggggggatcgacccccaaaaggcacaagagccccgaaatcaggaggaggaaaagccccttcccaacgaaaggtccttcaaggaaactaaattggacgaggcaccccccaacgaatttttcccc

SEQ ID NO: 24063 - DNA, 172 bp, Zea mays
  Clone ID: MRT4577_121952C.1
aagattacgaccgagatgcaggtgtcttgttggccgctcattatgtgatcctaggcagcgagcacctctacgaagttgaccatctattggttcacctcgacaggttttgcgagagtgaaatgcaagccacaggtaacggatttcggagtggccgcttcactgtagattggcc

SEQ ID NO: 24064 - DNA, 266 bp, Zea mays
  Clone ID: MRT4577_121953C.1
gtccacagggcatttcctaactctggaagatgacataatcaagtactcttctgatgccactaggtctgcgcttgatgatgctggcgatggtatggatgatgcaaattgcgtcactgtaactgcaaattctgctgttatgaggcttacgatagacatttcatggatggaggcggtacagctgctgaaccgacattaagaactgtgctgccactacatatgctgaccgtgcgttttcaacgagatgaccatgtatcatggaactgaga

SEQ ID NO: 24065 - DNA, 279 bp, Zea mays
  Clone ID: MRT4577_121954C.1
atctttcatctgaccatccatatcaaatgttttcattcaaacattacccagcatcatggtttgcagtcagaaattgtggtccttatgtctcatgagacttgcagcccttctactgtgttacatcagcaacatcgagaggcaacttcctaggaagttggggtagtcgtcagagtcctaactgaataaataatatgaaaagtcacctcgccttgtgaattttggaaaggttgtccttcgttggtttttggttggctggttggtttatgtttttttctttac

SEQ ID NO: 24066 - DNA, 330 bp, Zea mays
  Clone ID: MRT4577_121955C.1
gccttttgcgtgaccttgtacacctgacctacgtactcggatgcccttccggccttgcctcccccgcgcgcctatagatatctgtcctccgctacacctaacagccaagctcacggagtcggagtgccaccgcggcttacaagaaccacccccgcctgcctgcggagctcggccgtaccatgcgctgtggaacgggagcgggagcggcggcgacaatgtcctccaacggcaagcccaccccacagcccgcggcggtcagcgccggcgccggtggcccgacgaagatgtaccaacgacccatctaccggccgcaagaggcgcccgcgaagc

SEQ ID NO: 24067 - DNA, 517 bp, Zea mays
  Clone ID: MRT4577_121956C.1
ataaaaacttaaaaaggcttgtttttttttgcccccattgttaaaaaggggaaaaacaattggggattttttaagcaaaaaagccgcccccccttaaattacaattgggttgaaggggacaattttgttggggtttttcacttttaaacccccccttggttttttttttgttttccccaagggggggttttttttctgtactaactggcccaggggtttgtttaaaaggggtcccccttccaccaggggctttgttccccctttccccaggggtttcaaattcaccccccgggtttccccccggccccttttaatttttcctttttttggccccaattaagggggatttttttttttttgcaccaccccttgccccacttaagcccccggttttttaaggtttcgggttgggtttattgacatacaagggggggcccccaggggggggtccattaaacttgtattcttttttaaagggatttggggcctttaaaaccatggaccccttttttttttt

SEQ ID NO: 24068 - DNA, 1402 bp, Zea mays
  Clone ID: MRT4577_121957C.1
gttttacagacagacagcagcacccgcgcctgggtctggactgactgactagtgactcagctccacccacatcccccttcgtcgtcttctccctccctgctagctgacctccaatccacgataaggcaagataagctagctaggaaggcaagggatccgatggacaagtacgagcccgttcgcgagatcggggcgggcaacttcggggtggccaagctgatgaggaacaaggacacgagggagctggtggccatgaagttcatagagcgaggaaacaggatcgacgagaacgtgttccgcgagatcgtgaaccaccgctccctccgccaccccaacatcatccggttcaaggaggtggtgctgactcccacgcaccttgcgatcgtgatggagtacgctgcgggcggggagctgttcgagcgcatctgcgacgccgggcggttccacgaggacgaggcgcgctacttcttccagcagctggtttgcggcgtcagcttctgccacgccatgaacatctgccaccgggacctcaagctggagaacacgctgctggacggcagcccggcgccgcgcctcaagatctgcgacttcggctactccaagtcctcggtgctgcactcgcgaccgaagtcaacggtgggcacgccggcgtacatcgcgcccgaggtgctgtcgcggcgagagtacgacgggaagcacgccgacgtctggtcgtgcggagtcacgctctacgtcatgctggtgggggcgtacccgttcgaggatccaaaggacccaaagaacttcaggaagacaatacagcgcatcatgtcggttcagtacaagatccccgagtacgtgcacgtctcccacaactgccgccacctcctctcccgcatcttcgtccagaacccgtacaagaggatcaccatgagcgagatcaagacccacccctggtacctcaagaacctgccgagggagctcaaggaggaggcgcaggcagcctactactacagccgccagggagacagcagcagcagcagcagcaataatgcgacagcagcacccgcctactcgtcgcagagcgtggaggagatcttgaggatcgtgcaggaggcgcagacggtgcccaagccaccgtccaggcccgacgaagcagagcaacaggaagaagaagacgaccatgacgatgacgacgactacgacagaacggtgcggcaggtgcacgccagcggagagttcgacatgattatgagcagactccaaatctgactcttagtatcttgcctgccattggtagttttgtgttgtaatgcgtgcctgtaacatgaatttcagtcaaactatacactatcataatggtgatggtattgatgaaaatattcagtggtaaaaaaaaaaaaaaaaaaaaaacacccccccc

SEQ ID NO: 24069 - DNA, 216 bp, Zea mays
  Clone ID: MRT4577_121958C.1
aaaaaaaaaaaaaaaaaaaaaaaaaaaaaaaaaaaaaaaaaaaaaaataaaagagggggagcttacattcttgtgcttgcaaacagtaataactttttttttgcgttcacctaatttcttttttcgggccgccgtttttcaactgcctttactggggtataatcctggggtgtcccagcttattttgcgtagttcacattcccctttttgccagct

SEQ ID NO: 24070 - DNA, 575 bp, Zea mays
  Clone ID: MRT4577_121959C.1
gcgcagtatccaaccatccgtgcgaaaaaaatctgatattgacaacagagaaggccagatactggaatctccggttcttggctgatcatttacaatcttcattcacatgaagtcaggacagtctgttctttggcacaagaatgccagatgaggacgcactctggtcagagttgaggatgatgcttgcccagttcgacgagcggtgcactatccgtgacggaatgcggtcgctgtcttcaccccctgacgcttcgtacccatcgctggtcgacctcgacagttggatcccttgctgtggagtgcttcctggagcagtgagagctgtcagttgtaagtcttcagctccagacgaggagacagctgagactcggtacagatgcaggtcaggcgaatccaagctgctatctggagatgacccaccagcattcacacaggatgcagccctactgggatggaaggcgctcagtgcctcaagttgcaatggtgctaagttggacagtgcttctggggccatgtccctgctggtagaatcaataacatctgtagatatctttgcaacaggtttgagagagaga

SEQ ID NO: 24071 - DNA, 1206 bp, Zea mays
  Clone ID: MRT4577_12195C.1
atggcacctgtagtcagatctgaggttggcttgacgtggtctgctttcatgaccgttgaagcagcggtactttgcctggcaagcaagaatggcgggaagaatggtagcatctgcctatccttgaaacggattctatcttcggcgtgtgcaggttacattcatgctgaggagtttaatccaagagattggatcatcccttgcttggactatgatgagcgtgataacaaaaaaatttcctttctggcacccaatggtatgtacagccaaaggaaaatgtctattaaaagtaagaggattgcggattcagttgaggccttaattggggcttacctcagtactgctggggaaaaggcagcatttcttttgatgaaatcattagggatgaatatagaatttcacactgaaattccagttgaaaggaaaatttcaatgaaagctgaagagttcattaatgtgaggagcttagagggaatgcttggttacaagttcaatgattctttattattgctcgaagcattgacacatggctcatatcagacttctggccctacttcatgctatcagaggctcgagtttcttggagatgctattttggatcatcttttcactgaatattactacagcaaataccctgactgtactccagaattgttgacagatcttagatctgcctctgtgaacaacaattgttacgcgcatgcagctgttaaatcaggattaaacaagcatatccttcactcatcatcagaactgcataggaagatgagctactaccttgaggaatttgggcagtcatttacaggtccatcttatggctgggaagcgggcattggtctaccaaaggttctcggggatgtgattgaatcaatagctggtgccatttatctcgacagcaagtgtgacaaggaggttgtttggagaagcatgaagcggctattggaacctcttgccacccccgaaaccatcgagcctgacccggtgaaagggctgcaagaattttgtgatcgtagatcattcaaaataacctacgaaaaaaaccatgttgatggagtctcatcggtcattgctcgggtgaaggctggagagactacatactccgcaacaaaatcaggtccctgcaagttggtggcgaaaaagttggcatcaaaggctgtgcttaaagatctgattgctggtcacaaagatacagaggctgctgcagtatag

SEQ ID NO: 24072 - DNA, 734 bp, Zea mays
  Clone ID: MRT4577_121960C.1
cccacgcgtccgggagatacatgcccggggtttttatgccaatctcggcaatgacactacctactttatgaaaaggcatgagaagccgtaaaatttcagacaaccttattgtttctgccttgcgtccgagcataatgggtatgcaagtgatcaaccatattttgatgtgcaatgaagtgtgaacctctggcaaacaaggataacaaggaacataacgtaccagtattgtgagttctatggcatatttttgcagatattgtagtggctgagataaaagcttcacttacatctgattggccacctcataatgtctattagctagttattgttggaaattatgcacactaatcaagttcacagaactctttctacagttttgcaatggcaaaagcaatataagctttgattttccttttagttgctgtcagtaacttaaatcttatataacagctagtatcagatagtgtgaagatgaaacaagcttgtagttcccttctctctgacaagcttatgctagagaagcaactccagcaagttaacacttcactggagtcatctaaactgaaaattgcccgtggcgaagagcaggtattgtcttacttctgttttgatacttcttttatatggtatcatttggtggcaagttacggtcactgaatttttttgtgtgccaacagagtcctaaaaaaagcagacatcaactttctaaaatatatttattttagtgcttacac

SEQ ID NO: 24073 - DNA, 359 bp, Zea mays
  Clone ID: MRT4577_121961C.1
ggtgttttttttattttcttttgaggtgtcctacacttaaacgggtttgggacgttttttgaatgcacaggttttcaggaagaaagccgagcagacggttgatgacactggaccccaaaggcgcgggtagagacaaggacaacgctgcaggtggaaaaccccgatgagaaggaaaatgtggaggcctggccgagggaagcacatgttgggggcgtgaacaccagagcttatagggacagggcctgcaggatcaggatggggggacgagtggccctagagaagaaggccgagagccgagaggaccatgctctagggagacacgagcgccaacagggacggccttcccaggtgccgacggc

SEQ ID NO: 24074 - DNA, 2506 bp, Zea mays
  Clone ID: MRT4577_121962C.1
aattcggcacgagggctcccccattccgtccactcccctctctccccaccaagcaccagcccacggatgcggtcgcgaccaccgcggcaaggtcgaatccatggctagagctagcagaagcagaagcagaagccgcgggcttggcgcttgaaccctcgatcctcggggggtcccggttccttctccctgcattgatcgcgtcactcgacgcgagaaggcgagcgaagaggaaaaaaaaaggaggatcctttcccgtgtttcttctgtcgattctgcggttctttgcaagtggcaatgaggcggcatgggtggcagctcccgtaccaccctctccaggtggtggccgtgtccgtcttcctggcgctggcgttcgcgttctacgtcttcttcgcacccttcgtcgggaggaaagtgttccagtacgtggtcatggggctatacactccgctggtattatgtgtcttctttctatacatctggtgtgctgcagcaaacccagcagatccaggggtcttcaaatcaaagaagtatctgagcttgtacggaagcagcaaacacaagcatctgaaggaatccagaaagggttcttcagatgctcggttacaaatagagggaactagagaaaaacaagagcatgaggtcgcagcatctagcgagaggtcaattactcaatacaaggacaataatccatcttgcttgagtccaaccttctctgcttctctccttctattctaccctctctcttttgttttctcctgctgccaaccacatgaaagttcctctgagcagcaagccaccgaggaagggatgtttttctgcagcctatgtgaagttcaggtgttgaagtatagtaagcattgcagagtttgtgacaaatgtgttgatggttttgatcatcactgcaggtggctcaacaattgcattggaagaagaaactatagaaggttttttattctaatgtcaactgccgttatcttggtctccatggtttgtgcaatttgggccagcttatcctacaatcagcaattggagtattggtgctagtgctatgctttgttgagcgaaaggaattctctatgcaaattgtttcaaagcttggaagcagcttctctgtagtgccttttgttattgtggtggcatcatgtaccatcctagccatggtcgcttcactgcctgttgcccaacttctttttttccacattcttctgatcaagaagggaatcagtacctatgactacatcattgcgctgagagagcaagagcaagatgatctgagtgggcagcagagtccacagatgtctcgtgtaagctcctacaccggactcagcagtactagttcctttggtccacttcgtcgtggttcatggtgcactccgccaaggctgtttcttgaggatcagttcgatgttattccatcggaggctgcttcttcgcataattctgctatgaagaggaaagaagaccaggggaagaggaaaaagggctcaggggctgtgaaaataagcccatgggcattagctcgtcttaacgctgaagaagtttcgagggttgctgcagaggcacggaataagtccaaagttttagtgccaatcagaaaagatgactattcacgaggccacgaaacagatagtagctatggaggcaccagcagtggtaggatcgatctaggacccgatagcaagaggagaacaaacagaagaggaagacagcccagtgatctctttctcaaacctgttgcaaagatatctacagatgctattgattctgccagcagcgacatgtccaatttagcaccattgcaacttgaggcacggagcgccttccatcccagcagggctgcatcctctgtgaatgttggtgggtcatctccagatagcagcttggattcgcctgacctgcatctgtacagagtctcagctgtctcatcgtctggagccgaagacttgcagctgacagctctcactgctccaggaagcacttcacatcaagggattcaactgtcgagatcgaccagcgatgggtatgaagcgtcagggggtgaagacagcgaccgcattccgtcacagatagtgcaccgctcgtcaaactgggcaagcatcatcctcaactctgaccagagtgcgtcctcgtctggcattcttgtgccgaagaacagattgtcctgaattcagataaatgaagattgtaaatgatcaaccaagaacgggaggttccagtatctgagctttgttttcaatgtcgaatcttgttgcagggatggcttgatactgcgcaaatcattaatttttttattagtttctgaatcgctaggtaggcaagtgtctgaatttcttccgtggggtgttcaggtgcttgtaattttgctgtcagacgacaatgaactgatttgtttagaggttggtaccttggatcaaatgcctgattagttggtgattgttcttgtggttgacttgtcggctctgaccatttgctgtgatgaaaacaatggcatgcacttatatgctgc

SEQ ID NO: 24075 - DNA, 131 bp, Zea mays
  Clone ID: MRT4577_121963C.1
ctcatgttgtttgttcttgcatgaggaatctaccactaatattgtcctcattgatgcatacatgtgtgaactcaaagcattgtgcatgctatacttatttatcaaacaaatacaaaagcttccttgtacct

SEQ ID NO: 24076 - DNA, 330 bp, Zea mays
  Clone ID: MRT4577_121964C.1
cggacgcgtgggcgctagggctcgccctttttttttttttttttttccagtacgacatgatatgatgcaatacatagatacggtacaagaggttaactgatctgatcggatcggacatttatatcccagctggggcagcatgcaatgggcattcttcagtttggtctgaacggccggcagtaatataatggtgatcttggagcctcatgacaaacaagaggagacagcaggggaaagctagatgcgttttgagacaatgcatgatgcttcgtcacgtacagtatttgtaaatgccaactgctcgtgtccatcaaattgatgaatgggcta

SEQ ID NO: 24077 - DNA, 1147 bp, Zea mays
  Clone ID: MRT4577_121965C.1
gaaatgaaagagctcacatccttgattattccagaatgagaaaggatggcgtctccttttgatcatccatccctcacaaaggggcaacatcaaagtacatacaaaaccgaaagagggagaacataaaaaaaaagagagaaaaggacagagaaaaagatgtgtggggaagtgagatcaacaggacctcttgttatggagcctaccacaactcacatagcagatacatcaaggtctacaggtaggacggaaacagagaacaagacgatcaatggagtgattaggttggcactaatcatccacccctatcagaagatcacacaatcccgagataggccccctccttccctatctcagactggtgtgagaaacatgtacgatttggactggaatcgttggatggtgactgtgcaaggtgtggggtggggaagcctgtgtgtgtatgtacatcgttgatttggtgttgcagggttcctagccatgtagcaatgtggatgcgggcgaagaagatagggtcatcagcagcagagcagcctcctccacttccattaggagcctccgtttctgcaccacgtgaaagttgctgctcccgctgctactgctgttgctagagctgtcttttactccagtcttcgcctcgccattattttgttgttgttgctgctgcttgttgtgctctaggccaagctcttgcctcctcttctttcggtaccgaatcccgcaagcgttgcaaagtgacctgggcccggtcgggccactgcgccacatgggcgtggtggtggcgcggcattcgacgcagctcctggcgcctttctccgtcaccacgatcccgtcgatcttactgcgatcggcggagcccatcggcgtcggcgccagcgccggcggaaacagacggcagccccgatccgtggccgggttggcgataggattgcttggagaattctggtttttctctgccggcgtgcgtggtctggtctgttctcttagatagaagcgtgtagtagagagcacagagtagttgcggggaagggaagggggatgtgtatctgtgtggggggatagaaatggatggattctgagcgtgggtcagaactcggaatggggaggaagggctgtccgtcccggaccggccggctcgagcgccgcacag

SEQ ID NO: 24078 - DNA, 1607 bp, Zea mays
  Clone ID: MRT4577_121966C.1
ggagcgagagagagagagacagaaagagacacagtcacacagcgtagggcgctgcggcctgcggggaggaagggcaccagcttggtctttctcatccattcgcaaatcgcaacaaatcttgcatcttatcttaccctagaaaaacaaatcttgcatcttcagctgtctgtacgtgtgtgagagagagagagagactgcgtgccgcagcagcagctctggacaggcttacagtcagagagcgagggaggagccgggaagaggaggccggagggaacaaaaggggaagtttggttctttcctctaccacctggagcgtccccttgctagcgcccggtccggtgagctccataccatccagggagtgtgaggaaccgtcgtcgttgctggcgatccaagagaccaggagatgggcagcggcaggaacggcgctgtggtgaggcggtacgttcggtccaaggagcccaggatgaggtggagcgccgacctccaccgcagcttcgtgcaggctatcgactccctcggcggccaacacaaggctacgccgaagctcattctccagttcatgggcgccagggggcttaccatatctcatgtcaagagccacctccagatgtacagagctgcaagccttggcgcagaaagaggaggagggacgccagcccagctgctgcaaaggaggtactcatgcagcggtgatgagcgaggaggccccaaggaggagttcctgtgctgcccaccaccaccacctctgaaaagggcccggatgggatacgagagcatgcagggaagccatggagtcagtgatgcgaggactactgctgggggagggggactgtactgcatcgatgattacatgcaagccatggccgtgggctggagaataaaggaggagggcctcatcagatggcagaggagagatgcggctgctgctgctgctgcgccttccaacctccaagccatgggatgtttggtgcaagaatctgccccctttaaggtacgccgaccagaagcacaccgtcttggttctgcgctgaagcagcaggacgacgacgactccagcaaagaggacggaaacggacggccccagtccagcaatgcagcgaaggaggacgggccatctgagcagtgctcgctctcgctgtccctcggtaatctggacgcaaaatgcgggcgtggcacggcggcagcggcctcctcgcgaagcggcgagagcagttgcatcctcacggcctcgccggcgaggaggagctccagcgacgactgctccggccactcaggctgcttcgtcgtcggcccgggtggtgttgttagcctggagctttccctgtccatctgtggatcttagctagaccactccggccacttctggacgacgattctgtacatcagtgggcggcgttggtgatcgccgcgtttgtttttggtgttcgtgggcaggcacatcatgaccgtgttagaaagtttagtaaccttagaaccatagcgcatgttacttctagctaagctagtattatgttacctctctacctctagccctagctggtatgtgtaagtggcaaagtcaccaggcagcctccctttcagatccagagtagtaccattgtggc

SEQ ID NO: 24079 - DNA, 336 bp, Zea mays
  Clone ID: MRT4577_121967C.1
attgtggacttaaagactttcacatgggaatatttcgaatatgccaccacttgcatttcgcttggcctgtgaatcatacatcgtttatcccacattgtacacttgctgctattgtggtgacagccctgatggacttctgattgactctaattcaggagagactgttcacacactgcatggccatttggattactccttcgcgtctgttttgcatacagactgacgaacattcgtcactgggaaccaagacaagactgtctagctctgacaccatcgcaatctcttcagatcatgatgtgaattgggtggcagcatcggtgccgtcaggtcgattcg

SEQ ID NO: 24080 - DNA, 266 bp, Zea mays
  Clone ID: MRT4577_121968C.1
attggggtattttggggcgttcacatgttcaagggaaaggaaacagggccaaccccaagaaaaggaccgggagacaaaaaaagggaaaagcaggaaacgggaaacaagaaaaagcgcgaaaaacagacccacgcaaggggggggggggatgcggactcgcagaagaaaggatggtccgggtaagcgcagaccggataccggccaaaaaacaatgggggatatccccccccccccaaaaaggacaaacggaaaagggcaacctgaaa

SEQ ID NO: 24081 - DNA, 757 bp, Zea mays
  Clone ID: MRT4577_121969C.1
actctacctgccactcacccgtcatctcgagacgagtctatcgacgtctctactcccgcgcacaaccaccagtgctagcctagattattatgtcaacgttttattgaaaggaagatgtgggactctttctggaacctcaacacgagagtaggtcgaacaagagttgaagaagatcgtctcactcttccctaacttacgtggctagcagagtttgctgggatggctcgtgtgcgtacacatcgacttggactgctccctcgtgaccaccatatccgcagaacaaggtgatgtagcgcatcgatgagactctgtgtagcggacttgcattactgcggaggagtccgcgtgctcgagggtgcatcctcatccctgacttcggtcttcatgccagatgtatttccagcaccagcccgagctgctgaggaagaggacgaccctgctgctgatcgtgctgggagcggtagacctgccactcttcgacggctgctgctcagtgtgctgcggctgcgatggcttgtctcaaaaatacagagtctggtaaggcctccagttacttgctgggaactgcatcggaacatgtgatgcacatgagcgagcttgatgaagctgttaggcgtgcccagatggatggttgactctgtcgcgcatccaagcttgtcccattgggatatggtatcaacaagctgcataccgtgatgaccatagtctacgatcatagtctctggcgacactctcattgaggactatcagtgcgctg

SEQ ID NO: 24082 - DNA, 225 bp, Zea mays
  Clone ID: MRT4577_12196C.1
tagcccgggcgggcagaagagcgggctctagaaacatgcctgacgtacacgctagaccatgcgacggctacggcgccttacgccacgactgctctgcgggccatcatggctgcgacttaacaacagtcttaactggcccctagcttgctgatcatggaaccgggtccaccccaatcgtgggtctcaagctcagcttttacaatgcgctcggactccactgcgttt

SEQ ID NO: 24083 - DNA, 219 bp, Zea mays
  Clone ID: MRT4577_121970C.1
acaagcatcgactccttactggagcagctaaggtaaccgactaaatagaataaaccgaatgcacaccaacaaaccccactaccgatacgagtcgatggacgccgagggcgagaagaagatgataaaccacaaaagctccgatggcgaggtgttcgaggtggaagaggcgatggcgatggagtcgaagaccatccgacacatgatcgaggataactgcgc

SEQ ID NO: 24084 - DNA, 335 bp, Zea mays
  unsure (1)..(335): unsure at all n locations
  Clone ID: MRT4577_121971C.1
gcggggctgcaaggtacgtacggctgcggtagngccgcaaacggacatcgacncgcgctcagacgtctagtctccttgatgccaaagagcctgtgttttgcccatcatagattcatgacactatcaattgattgaataggtgcgtcctcctaccaaaggagctatcagagtatcgcttatagactaaagtgtttcatagcaatggggattaaatatagagatnaggaaaaggaatgaggccgaggagagggtcaataaggaccgagctgctcagaactgagatgaatgcaaatatgtcgacaggactgcaggcgagaagcactatgagacgcatc

SEQ ID NO: 24085 - DNA, 273 bp, Zea mays
  Clone ID: MRT4577_121972C.1
gctagccgctaggtgccgaggccttcatcggtcttccgctggcgacggttcgcctcgcgcgtgcgacgcctgggtggactaccgccgcggcggcctcaagtgccgaggcattcgtcggtgtcttagctggcgacgaacaccaccaggtggccgacgaatttgcaacgtctttataagacggctgtaaatctgtgacaattaatattttgcaagtgaaactttgtgattttgctgggggcacattctggatattggcttatgatatggcaacaa

SEQ ID NO: 24086 - DNA, 301 bp, Zea mays
  Clone ID: MRT4577_121973C.1
tcggctcctcctgctggtgtccgccaaggcccggcggctcaaccagaagtggaacgacgtggtcgacgatgctcatccaagaacacgtgcagagcttgccctccggcgagagcgaggagagcgatgcggacttcatacacggtgtgctcttcatacaggaagaggacggcctcactactgacaatcttaaggccatctttgttgacatgttctaggcaggcatttatacactcttacctgacgctcgaatacggcatgggcgacctcattaacaacaatcacgccattgagaaactatata

SEQ ID NO: 24087 - DNA, 630 bp, Zea mays
  unsure (1)..(630): unsure at all n locations
  Clone ID: MRT4577_121974C.1
tccgcatctggtctttgngatactgactaaaatcttgttctgacttctgagcatttcagcatgttgcataagtcacctacccagtgttattaaaactacatttaaacgttaaaactctaattagaggttgaaaccgtgttttagcgttttgacgttctaaactgtaacacaaagtgtttcatgcgttttagaccattagctacttttgagcccaatctgttagttacttttggggtccaatccggctcatgggtgaagttttggtaagctactaaactctctgttttggtatttaacttcatgttattgtctgaaattatgatatattggtattttttctatgttgtttaaaattacgtttaagcaaagtttaaacgtttaaaagtcaaaacttcacccatgagcgtgtcaacattttatatttttaaaaccttgcacctacttagaagtggtccagttctcagtaggtattagattagctgatgcctttttgtttactctattagtttgaagctctgatgggttcacaggtttcatgaagacctttttcatattcttgtcacttttgctctgcacttagcagtgttctatggtatcattcgctgtgcaattgaagtctcactgcattat

SEQ ID NO: 24088 - DNA, 766 bp, Zea mays
  unsure (1)..(766): unsure at all n locations
  Clone ID: MRT4577_121975C.1
gtgcggcgctcgaggcggccggctctgatagtcacatcttcttcgatgggcgatcactatggcatcgccgcctagtgctcctcctgctattatacgtcaaccagcctgaagctgagctccccgacccacagccacctgcccgggcagtcctgatgcgcacgaacaggacatggatcaatgctgcaggtgggcgcagctgacggcagtgcagccgtcacggcggccaaggacgcacgcagctcttccaggcattccgacaccaggtgaatcatgctcttcgacggagtatgaaaactctgaaatggcggagtacgcttgcggggccagcacgaccccgacaggagtatacactacgtgcctctgcagagcgagtccgacagtaacctcctgcacagggcagggaggcctcctgacgacatctccagcgttggtctcgtagagaaacacaggcctgtcactcaagtctgaagcggtgctgacgataatgtgatacctcaacctgcccttcccgtagctctccgtcttcttctagttcgtccctctgtagatgcgtcgttgctactgatttgttttcctgaaaaaaaggagaaaatgatcctccacgccaatcgngcacgtgtacgtttgcagcttggcccaccctgtccttgccgtacgagctccccgaaaattaatgtgtgtatacctatttggccaagggattatggcatttgcttggattgtgaatggagcagcatcttaaaaaaaaaaaaaaaaaagcccctat

SEQ ID NO: 24089 - DNA, 893 bp, Zea mays
  Clone ID: MRT4577_121976C.1
gttgatgctgacttttcacaacgcaagtctgggcaaagtagttcaaggcagcatgcttctaggccagaagcctcgcctttggactttgtcattcgtccacagtccaaaattgaccctgagcagatacgagctcgtgctaagcaggctgtccaagaccagcgtcggctgaagatgaacaagaaattgcagcagctgaaagcgcccaagaagaaaaaccttcaggcgtcaaagctcagcgtggaaggccgtggcatgatcaagtacctgtagatcacccactgtggcatccgcagtcagcagtgtcctgcacatgatacagcgcctgcagggattgctgaattggtatgaagcatcctaccaccattccatggcaaacagctcggcatcagtaattgcttggatcttttatccaagtatttttcttgcctgcaacatccgtgcttcagaaaccagttgagttggctacactatcattgcagaggcatatactacgagcttgcataaacatggcgctttcctaccagagtggtgcctttatattgtataaatatttgtcatgtttatgagttacaattagctagggttgaagttcgattgtttgtacttgaaagaaagtcatcacttgtgaaaaatcgaaacatagtgcgacaaatgattggttgtgcttaccaaactgtaactcaattgtgataaattacaattcttcagcagtcctcatcttgctgctttattgtaagatagtgtgctcaggctcaggctatctgcagtgactcttctatgtcattctctattttaaacagtgttgtctatagtgtaaaatattattttatatgatcatatatatgatatatatatatatgatctgttggacacaaccttatttcctttgtctt

SEQ ID NO: 24090 - DNA, 290 bp, Zea mays
  Clone ID: MRT4577_121977C.1
agtgattgtaggtttctttaagactctgacatctaactggctatcctcgtcttcaggatcctttaccatctgatcatcatccggcatacgtactgtttggatattcctccaaagacgtcagacctcatgacgggactgattctattatatggcttcctgataaggcgaacttgggtcatctcacaaaaacccaatgcacattgtactgaatgtatcaacatcgagataatgaagatattctcctattgcgactgctgggatgacctggattttctctaaagagtcattga

SEQ ID NO: 24091 - DNA, 198 bp, Zea mays
  Clone ID: MRT4577_121978C.1
gcccaccacacaacagaaaattggcataaattttctactaattggtgccccagaatgtttgaatttattccaattgataagttttggttggttaaaacaaaaatatgtcactatgaatgcatatcaaaggtgctcttactagccctctgtgttcattgtcatctatttatacttcattgttatccacttatagctctc

SEQ ID NO: 24092 - DNA, 217 bp, Zea mays
  Clone ID: MRT4577_121979C.1
gagcgcgggcggcacgacggactggaccaccgatgccgcgcatagcgatcggcgctggcaggccgagcgggcggtgatcgcggcgaacacggcggccggcatgcacgggccgggcgcgggcgacctgtccaccgcgctcgatgcgagcgagatcctgaatacgatggaagcggcgccttcgcgtgtcggacccggctcgggcgatgcggcgaacctg

SEQ ID NO: 24093 - DNA, 244 bp, Zea mays
  Clone ID: MRT4577_12197C.1
tgagagcaaccgcagggacacttgcaggggcgactccggcggtcctctggtgtgcggggatgcggtcgaagctgtggttacgtggggatctcgagtctgtggcaaccggagaaagccaggtgtctttacccgcgtggcaacctacgtgccgtggattgaaaacgttctgagtggtaacgtgagtgttaacgtgacggcctgaggggacaccggagaccgtgactcacaataaatgcatgcatct

SEQ ID NO: 24094 - DNA, 546 bp, Zea mays
  unsure (1)..(546): unsure at all n locations
  Clone ID: MRT4577_121980C.1
attcgccaacgctgcgccgccgccgaactttggagaggagacgcggaggacggcaagatgggattcgagaaggagatcctgaaagccggcaccggccccaagcccgtcaagggccagaaggtcaccgtccactgcaccggctacgggaaggacggtgatctgtctaagaagttttggagtaccaaggaccctgggcagcagccattctctttcaacattggtctcggttcagtaatcaaaggatgggatgagggagtcatgggcatgcaattgggtgaagtcgcccgtcttacgtgcaccccagactacgcttatggatccggtggctttccagcctggggaattcaaccaaactccgtgctgatattcgagatcgaagttcttagcgccaagtgatgcgcaatgcgattcatgatggttctatagaacactgcagcatcgccatgcctctcgattaccaaaataattgtaacgccacttcatgttaagtgccactntatggtgatgttccaagtgcattgagtgaaactttggaaccctattacc

SEQ ID NO: 24095 - DNA, 450 bp, Zea mays
  unsure (1)..(450): unsure at all n locations
  Clone ID: MRT4577_121981C.1
cgggaaacccnagccgccagancncacgaaccacncgagcttccaatttagggaaggggaggagcgacggggggcgggggggagacggcgaagggcggcgcgccaacccccaagaagaaggggacagcaaccttcacgatcgacagcaccaagccagaggaggacaagatcacggagggcgcctcgctcgagaagagcctgcaggagcgcaacaaggacgccggcggcaaggctggcaacctcggcgactccgtcaccatctctcgcgagaagaccaagggcaccgccacctctgacggaccctactccaagaggaaccagaagtacctgaccaagaagaacttgaagaagcacaacgtgcgggaaaggcaacacgtggttgctgccaacaaggaccgcaacgactatgagctccgctacctcaacaaagccgagaaccagggcgaggaa

SEQ ID NO: 24096 - DNA, 675 bp, Zea mays
  Clone ID: MRT4577_121982C.1
gatttcaattcccaatctcgacttctcctccgcccctccccccgcctgtctcctccccactgaattcgccgtcaatctcgccacctatgcgtaatcccgcggccggttcccctctacccgcccctcccatggcagccgacgtctccatccccgcgccgcctctctgccttctcgtctcctcacagccgtgcgcccagtaacgccgccgattctcccccctcgtcttctctgtttccagggctagtagaggatcggtgctttggagcgagagagtgttgtctcgcaggttttgagttctcatttggcaggtcggtgtttgctcttctcttggttgcaccaaaggaaaggaagtctgtcaagatgaaccgtgcaagaagaggagggagattatttcccctctggttatgcgcagtggtttgtctcatggctcggccgggagcttgcagtgtggtgctgatggccaataacacaaccctgtcgttcagcgacgtcgaggcgacatttactccagaagtgaaaggttcaggtttaaacggtgtaatttacaccgtcgaacctcttgatgcttgcagtcctctgacaaagaaagcagtcgaagggcctgcatcaccatttgcgttgattttaagaggcggctgccaatttgatgataaaagtagaaatgctcaggatgcc

SEQ ID NO: 24097 - DNA, 817 bp, Zea mays
  Clone ID: MRT4577_121983C.1
tttcagattgtggacatcaagaatttaccatctgcaattcctgagaaaagcgtttatgtatggtacaccaagactaaaccagatgcattcatccgtgatggcggcaggttggatatttcatcgaaaacagggaagagtatcggagcaggtttccaatgcgaaccgactggcgaaatcattcttacagtaatggttgatcaggcctgttttggggcatcatcatcatcgaacaaaccagaaccgttggggaaggtttcgatctctcttcaagaggttacagggcatgattccaagctctcctttgagaggtggtttgaactgaaaactggtggtgcgtatgccggttcccctcctgtcagtcttcgtgttgccgcatcttgttctgtcccaaggcaggctccacaggtccttagcatggtcaatgtaaagccttgctctctgaaggcctgcctattgccacattccatcaaggatcaaaatatgagctcctggactcgcttcgtgtatgattgtggtactgaactcattcgtcttcagataagggagcacaaggccaagagtggcatggctctcgttcgagaattggtcggagtaacaaagtcatcagagcagccattgcagcttgcacaattcacggaaaacaaatggtcttttaacaactccaactcatccatcactcttgacctgaaaccaagcaaggatggctgcataaatgagctcaaatacgacagcaaactgatcagactatacaggggaaggagactagcatatgaactcaaatgctgcagtcagcatgctgaagatactgcagcagtta

SEQ ID NO: 24098 - DNA, 405 bp, Zea mays
  Clone ID: MRT4577_121984C.1
cggcacgagatcaggagttggctcgtggatgccttgcagtgcaaccctggacccggcgaccttgaacagttagttgactctcatctaccccagatcagatgtcaggatgcttatggcgcgcatgatctgagcacgagaattttcgtacaattttcttcttcagatgtaaagtctctccttcgctgccctgcttactcatattatttacgctgcacatgctcctggtgcctcctattaccatgtttatgctttcaacactccatgattattctttttccccccctgtacactgccatccgtgcatgtctgccatgactggcattgctcgctacttcctttgcgttgcgcccaacaatcgcgagggagaaaacgagtgcgggcgcggcccgagcgagcatggagtga

SEQ ID NO: 24099 - DNA, 456 bp, Zea mays
  Clone ID: MRT4577_121985C.1
gggggataagattaaaaaggcgactggcccaacccaacaaaaacagaacaattttcaacatatacaaacggaatacataccccagtaaaaaaaaaacatggggatacaagatcacccccccccgtaaaaccaaaaacgtaccacgttgaacacaaccagcacgtttattccaggtgttactccacagggcaacccacattatccacgtgtacacaaacctgacacagtaatcaaagggcagccgggcttttcttttgggtatcacttaaaaaggcattcgggttcagcttcgcgccgccgatttccttcccgggggtaaggggcccctccgccgaataccctttcttaacgttttcccccggggttttggttggctgtacgggcttggaaacccggttccccccggggagcaacccaacggcctggccgggccccagaacgcgctgggctaccggg

SEQ ID NO: 24100 - DNA, 294 bp, Zea mays
  unsure (1)..(294): unsure at all n locations
  Clone ID: MRT4577_121986C.1
ctgtaccggtggccatccatgttacatgtaccctgaattcgttctcctcctattgcacttgtacgcgtgcgatcttgnaaaaccattgcggaacaaatcnaccagcttataggtgattaatgattaagttgtctctgatcctttctaaanaaaaanaaaaaaaaaagaaaaacaaaanaaaanaaaanaaaaggaaaagaaaaaaaaaaaaaaaacaaaaanaaaaanaaaaaaaaaaataaaagaaaaagnaaaataaaggggggggcccccccctttttttttcattttaat

SEQ ID NO: 24101 - DNA, 335 bp, Zea mays
  Clone ID: MRT4577_121987C.1
gcgaagcacattagcaacaacctaacaacttttgctaccaagatattatccctccttgcgcttcttgcgctttttgcgagcgcaacaaatgcgttcattattccacaatgcttacttgcttcaagttccattattacacaggttcttccaccagttactttaatgggctttgaacacccatctgtgcatgcctattggcttcaacaagcaattgcggtgagcgtttttcaacaaccaatattccatttgcaacaacaatccttgttcacatttaacaattcataccattgcaactcaacagcatcactattttctactactactgagccacctat

SEQ ID NO: 24102 - DNA, 475 bp, Zea mays
  Clone ID: MRT4577_121988C.1
gacagaatatacgtatatactaaaccaaatgtagaacctcatcataaaccctgaacttacaaggaaaaacggtctaattactgtaagatacagacacagagcctcaaatcccgaataggtaactcttctttcacgtgataagttaatcaccaggcatccaccaaaccttccatctccatcacctattccagtgcttgccaacgcggaacagactccacaacaagcacaaggacttgacatacacgcccaaacaggccaccatctggttcctatccaaccacatcccggcaaacgcgatgccctccacacttctttatttactacccttctgcaaaccatgctatttactactgccgttctgtgctgcttctgctctataaatccacgcttgtcctcttgctcatactgtacatgactctgaagtctgaacctccttcagacatcatccaccatcttgggagcaaattttttcaca

SEQ ID NO: 24103 - DNA, 445 bp, Zea mays
  Clone ID: MRT4577_121989C.1
gcttgcaatttgttttgccccatctttcgcgggctcaattatttttctaaccctaacctgggttggaggtgtaattattttgaaaattccagtttcccccttttcaccccccctttaggggactttcaatacccaatctgacctgaaggattttgagggtgatctcctagctcggcctgctcaagaattgctgctgctgctgccgatgcttgggcttttttgtccataccccgttttttgggggcttcctgctggtccaaaaacacaattttgcccttgacctgcctgaaggggcaaagaggatccttattttcgcctccccctggcggggacacattcttcgtgcgcgaaatcctgacctaatgactggaaaggtcacacgagaggggaaaatccatgccggacaggaaacggctcacgggcaggccagggcattagacttata

SEQ ID NO: 24104 - DNA, 573 bp, Zea mays
  Clone ID: MRT4577_12198C.1
aaaaaaaaaaaaaaaaaaaaaaaaaaaaaaaaaaaaaaaaaaaaaaaaaaaaaaaaaaaaaaaaaaaaaaaaccaaaaaaaaaataaaaaaaaaaaaaggtttgtaaaaaaaaaaaaggtttgcccttgggccgaaacccccctaggggcaatttttggggattcccttcaccctgggggcggttggcccattcttttagggggcccatttccccctattggggggggttttacatttcatgggccggggttttaaaaccttgggattggaaaacccttggggttccccaatttaacccctttgcacaacttccccttttccccagtgggcgtaatagcaaaaaggccccacccgttgccctttccaaaagtttgcccaccctgattggtaaagggcccccccctgtggggggcctttaagcccggggggtgggggggttccccccagggggccccttaacttggccggcgccttagggcccgttttttttgttttttccctttcctttttggccccgttcgccggttttcccgggaaagctctaaagggggggctccttttggggtcccgat

SEQ ID NO: 24105 - DNA, 792 bp, Zea mays
  Clone ID: MRT4577_121991C.1
gggaccctcgaggccggccgggcccgggaaaccgatttccgatctttccgtccttgcctccttggtcttcttgatttttccttcctacctccaccggttataccacctgctagcgccgtccgccgttcctcaggaaaatcctctcacctgagtatggagcagcaccccacttgcgcccagccgccggcgccggcgcccctggctgggcccgtcgtcccggtggacttcaaggtcgtcaagaagggacccgagatggcgatgcacgacgcgatcggccgcctcgccttccgcgtcgcgggcagcgccggcggggccacggcgctccaggatgacgctggaggtgtcctggtcaccgtcaggagcagcggccagggcgagtggcaagcattcagtgggaatagtttggaggagagacacatcattttcactgcaaaagctatacctgcttcttcaagtcgagaggaggtacatgtgttcatctcaccaagaagcactgttgaagattctaaaccaagctacagactcgtaggaagtgcattccaaagagcgtgcacaataataaagggggactccatcattgctcagacaaatctcttgtacaaactcaagaagaatatctattcacggcgtaaattcagagtgactatttaccctgcaaacgataacatccttgtcatggcaatggttgctacattctttatcaaaaaatgacagatgatatggatgcctgctttggtttcgaaactttggtggctaactctgctaataaatcatgtgcactgttctcgttgg

SEQ ID NO: 24106 - DNA, 440 bp, Zea mays
  unsure (1)..(440): unsure at all n locations
  Clone ID: MRT4577_121992C.1
cttccatnnnactactccaccccctcatccatnnacctncnactactactttttccaccaccaccaccaccacnagcgggggggggggggtgctttttttggggcgaggncncccacctgccccaggggggggccaagaagaagcgctcgcggcgccatcgctcanagggggatattctcgcgctgngcctgctcatgctntgccgcggcgaccgcctcctcgtncaggcgccgccgccgccggggcgcggcccggtgttcatgtgctctttttgcgggaagtccttcggctcctacctggcgctggggggcctcatgacccgcctccgggtcttgctgtcgtcccctcctggcgctcatgggcagtttcccgcccccccgggngggtgccctcttgggtgggtgccccctttcctcccccccgtctctgcccccccgct

SEQ ID NO: 24107 - DNA, 534 bp, Zea mays
  Clone ID: MRT4577_121993C.1
cttccttttttttttttttttttttttttttttttttttttttttttttttttttttaaaaaacaaacaaacccacaatgagggagggatctataatatctcaatggcaatatattacaactaccaaacctgttttaaaggacttttcatcaatatattgactagcatcaagttgaaactttatcgatatcactagtatttgctcaaacataatatttaaacaacagctgttaaaatgttatcacgatttttacaataaaaaaaatccacaactgtttcatatattcgagcatttgttgatcggtttcaggaaaactttaaaaattggggttccatcaaaaccgaatcattgtttcctatgggacttcttgggctgtttcgttttgaaaaacacaagtccatttgcaagatcaaacgagctaaaatcatttaaaacttgatcaaaaccaaaactaggaacttcttcacctttttttctagtctgtgaacctttttttgtttcggctcccaaaggggcatccgctggctcgtttt

SEQ ID NO: 24108 - DNA, 588 bp, Zea mays
  Clone ID: MRT4577_121994C.1
gcgttcttttgcaagacaattgatgttcttgtggagggggggggggggaagaaaaggtcgatgctatcagcctaccgccgcctgaactctacaggcatgttgaagaatttctggagatgagttggtgaaggcattacaaataaaaggaaagattcccagaagaaaagctctttcagcattggagggtagagggtaagtatactttctgagcagggctatgtttccaaagatggcttatctggaggcactgaaagtttggctgatattgttgaggatgaggatgaggatgaaattgtagatgacggagaagtagatgaaggcgatgttcacatcaagccggtttcaaggaagccccctcagctatttgcagaagttgatgtgaagctagtcttcaaggaaatttcatctaaatatttacgaaagcgcattgtagagggaggaaagcgaagtgatggacggagtccttgggaacttcggcccatcaattctcaatgtggcttacttccaagagctcatggtagtgctctgttcacgaggggagaaacacagtcactggctgtggtcactttaggtggctatcagatggca

SEQ ID NO: 24109 - DNA, 616 bp, Zea mays
  Clone ID: MRT4577_121995C.1
ccggccgggatgccggccatttgaacaacccctgcatctccctcgccccgctcccttctctctagcgcctccctgccctcgggcacgaccagccctttccgcggcgcagctctgcccttggctctcctgcgcacagctcggcgtggcgtggcccggctccggtgagcagttgaagaaaccccgacgccaagcaccttccccaccggagcttcgctaacctgttgtctgtttctcctcgctgtgcttcatcgtgatggtctggtgagaatgcgatccatctccaagcttcgagggatcgaagatcaagcgttggcgaccatgtgaccaagctctctgagttctatgaggctgaagatcctgagcatctgtttggtgaatgcaagtgtcctctgacccattatgtcccatttactttataatacactgtcccgcatactatgaacaatctaaggatttactagctttctatttaccttgtccttgatttaccttttgggttactatggttagctacatgctagcgctttactttaatcaatgaacatgatgagatacaatgttgatactatgattttattctggatatgatggtcaaaaaaaaaaaaaaaaagcggcc

SEQ ID NO: 24110 - DNA, 413 bp, Zea mays
  Clone ID: MRT4577_121996C.1
tccacgcgtccgcagtcatctcaaacttatttatcatgtaatctgagatctccagttgatgtcaatgttggagatggctctgagacctcacctgggcagcataatggtctggtcactctctcttatataatggacttttttggatcaatgcttccaggctaaaatgttctatgaaattcttcatgtctgcttccactaattgcttccattgagcatggtgaggttagattttttgcatcaccataattgttttgagcctgttactttgctttcctctttgattgtctttgtcagtcttttgtttttttttatcttccaagtggaaacactttttctaattgttctattttactttattttttcttttgtttattcttttttttttattctttcttttttttttatttcttttt

SEQ ID NO: 24111 - DNA, 229 bp, Zea mays
  unsure (1)..(229): unsure at all n locations
  Clone ID: MRT4577_121997C.1
gggaaagggcgggcacgancgcancaagagnaccgganacgccggtggccgtgttgnttnngggatcattgtgacnccagggctgaaaacgatcgncggactngggngtgcctgnnaggnccgtctccngccgnccccagcagacgagnctgnacattcggntacatcgtgnaataagagcgtngctgatctgtgatcatcntanttgtcntatgcacctgtagcnanc

SEQ ID NO: 24112 - DNA, 173 bp, Zea mays
  Clone ID: MRT4577_121998C.1
accaatcctatctaccctttatcacctgtttttgactttcccccagcttatatgaacaggggacacgaacatgccggtgtcgaatttgcttccaaggaacgtgtgctagtccttcctcctccatctctgggacactctagacggcttacgcttctggaccggtcgctgtatgc

SEQ ID NO: 24113 - DNA, 373 bp, Zea mays
  Clone ID: MRT4577_121999C.1
caccccgatggtttcatcaagccaaccaattaaacaagaatccttacccaatgcgctactactggcttacactagcggtagaaaggggttgaacacatgcattacaacacttggggagggctcttacgtagtcctaacttatgaacatactctacatatacttgtttggtccgggcaatgattaacctcaacagaacatatttggtttacatagacatagctgcggggccaccatgcgcagatccacagcaatagctctggaccgtaaaactgcttgatccgctagcaaaaagagacctctttttccgagatgatctgtgatatccattcttataagggctcctacttcttgatctgctttccacaggtgatc

SEQ ID NO: 24114 - DNA, 680 bp, Zea mays
  Clone ID: MRT4577_12199C.1
agctcaaaccatgtaggtgtagtccaatgacatgaaacttcgtgagatatgtgtccgtttgtgaagcacctatattcacacttttgcataatgctctaaatttagaaatggcgaaacaaaattgggtaccgaacaaaaatttgcccaattggtttggctccaagatgcaaactttcctgcgtttgacttcataggaacccgagcccttttgacatttgatactaccagtattacagaccaattctggttccagtttctactgctaacagagaatcacaccttactgttgcaaccagagaccttttgacattccagcaattacatccggtgcgggcattgtctacatgattgcaacgctcaagtaatcaccgatttggaatccgagctctgcaagagttttggcatcgtcgcctcttccatgaccataagcaaaggtcgaacccacctggataacactaggttagtgttgttagatgacgtccacttggcgatcagcctttattccgatacttgcttcgttcatccatcttcgggttaattcatcaacattatcttgcggaaaagctcacgctttccattatcttgtggtcgactcaactctggttatccgcatcacatggttaattcacgtaccagcatcaaacgtgactcaatgcttgtgagaatgttgataaattctg

SEQ ID NO: 24115 - DNA, 324 bp, Zea mays
  Clone ID: MRT4577_1219C.1
cccacgcgtccgcccacgcgtcctcccacgcttccgcccacgcgtccgcttcctagcaccttgtcgtgttctattagggcgataattgctcttatttcccatccttaaccacacagcccacttaactatcattcatgcaatcttcttcggtcaggtgacatcagaggctatctatcaatggacctcatctatacaacgctggctgacatgccaaataaaggtcaaatctataacatttgccaagccaatatcctatgtcattacaatatctcttcttttattactagtgctttacgtctttcaactctctcattcttctttact

SEQ ID NO: 24116 - DNA, 466 bp, Zea mays
  Clone ID: MRT4577_121C.1
tcggaacggaattcccgacccaagccacgcgtgcaacgcactgacactacgtaccaacaatggctaccaagatattaggcctccttaggctgcttggcctttcagcgagcgctgctactgcgaccattattccacaatgctcactagctcctatagccattattctacagttgcacctatcaccaactgtaacgtgcttatgacataacccaattcatgaactactacatgatccaacaggcaagcgcagatggcatactacctctataacgctagttgctacaacaatcattaggcactattacaacatacaaactatggcgcatgcacagccacaacacatccaggcacatcaactactgcaacatgtactagcagacaacgctgtctactattagcaacagcagctgcttgcattcaaccaactatgctcatcgaactgtgcttcataccagcaacaacaaca

SEQ ID NO: 24117 - DNA, 317 bp, Zea mays
  Clone ID: MRT4577_122000C.1
gccggccggtctcggtcaactagtacccttgtcttttgtctcctaagacaagggctggagcctagttcagaaggcagagcgcaagtggtgaatgtgttggcctggtattatcagaagttatttactccttccattcttttttatttgtcacggtttagtttaaaaatgaactaacgggcgacaaatattcgagaactgagtaagtattattttcagtgttgtgcaatgttcaggccagctagggcaacttgcacaggggctaaaagaagtaatgcatgttccagtttatgcaaaaaaaaaaaaaaaaaaggccccta

SEQ ID NO: 24118 - DNA, 144 bp, Zea mays
  Clone ID: MRT4577_122001C.1
ctagaacatatcgagaactgaggtggtgaataaatagagtctagaaggctacctaacactgcattaggaaaaataatacagtatcgtagatactacagtgatcttaaagatcagagaaggccatatattaagaaatggtgtagt

SEQ ID NO: 24119 - DNA, 342 bp, Zea mays
  unsure (1)..(342): unsure at all n locations
  Clone ID: MRT4577_122002C.1
tactttgaaacacagataatacgtttaaagggacccttgatcatcatcataatatgctcttattcaataacactaatgtccttctggaatcagaatgatattagaatgtataatgcatacttctgtaaatatcatatcgtataaaagagataacatttgattaaatagcatactttctatatagctttaggaaacatatctaaaaataagtactagaagaactgaatacacctattattgtttgaaaatacattagggaagaatgagatacaagatcccgacaacaggtattattcacaacaatgtctgtacactgtcccggactggacacttgnaaaggta

SEQ ID NO: 24120 - DNA, 469 bp, Zea mays
  Clone ID: MRT4577_122003C.1
tgtgttttacctttttgttgtcccggatcttttattttttttttattatctgtgtcttttttagtttatatttttttgttttccaacacaaacgcgtcttttggaacaatgagcgaataaagatcctcgcctagtggcatggaggggccccctaagacatggggcgaggcagcggatccagtatacccccctggagggggcatttggtggaaatatgtgaagcccctgacagtgctcatagctactatggccctagcgagagcctaggattacccacacgatgtatcttctttacccaaaggcttggccccggtggtgtggcaaactcgttctacgaccccccgtcggacaaaaaaacctggattgttgatgggttcttttttgcaaacgcgcctcttggggaagaaattctgacctgtcttcttcggagctcgctgggggtggatgaccccgaaacagattggggcct

SEQ ID NO: 24121 - DNA, 201 bp, Zea mays
  Clone ID: MRT4577_122004C.1
tcgcgcactcctttccttaaaaccctatccgggggccgtcgccgcacccgatctgggtttctctgtcgatttttaattttcctcgcgagccccaacccttaaccttaaacttttacccgccggcggcggcaccaccaaaactgtcacttcgccaccaccgtgcccaaaaccccttccagagccatataatttatttttgat

SEQ ID NO: 24122 - DNA, 563 bp, Zea mays
  Clone ID: MRT4577_122005C.1
ttttttttttttttttttttttttttttttttttttttttttttttttttttttttttttttttttttttttttttatttttttttgtttattttttttttttggtttaaatgttatagtttcgttgtgtggtaaaatatacattgtgtttgtttttaagaatgttgaattgttcaaaaaaaaaaaaaaaaaaccacgcggctgtacgaaaaaaagagagggcagaggaaagaggggggggagaaagggggagagagaggaaaagacaatacctgaacggggggagagaaaaaaaaaaaggggggtttgaaaaaaaggggaaaggagaaagaagaggagactcgggcgcggggctttaaaaattggggggggggggggggaaaaaaacagaaaacggaggggggccaaaaaagaggccggatagtcggagggggggagaaaaaaaaaaaggggggcaccgaaggaaaagggtacaaaaactgggggggctcagttccctagcggagaaaataaaatgcactcgcaagaaaaggggcccccaaaaaaaaacggggtgtggggat

SEQ ID NO: 24123 - DNA, 428 bp, Zea mays
  Clone ID: MRT4577_122006C.1
gatactatttttttttttttttttttatttcttattatcttttctctattctcaggaacaaaacttttttcttttcattctaatcgggcattcagggcattggccacactgacactgccacccatggggaggcgttaccaattattactcaatcatcatcgataaatgactcaacttgttagctagccagcggctttactacatcacataatttcttcagggggggacacctgccgcagcagggtaagggcatggagtcggttgctgtaagccccacatttcctttagttgctgccctatctgctccgccaacaaacccgagacctggtcagtttatggctgctcctcgcaaaaggactggagaaacaagcccaaaatcccctggcaccggggctgaaccttcacctgcctgagctgctggaaacact

SEQ ID NO: 24124 - DNA, 173 bp, Zea mays
  unsure (1)..(173): unsure at all n locations
  Clone ID: MRT4577_122007C.1
tgggtggggttttgtncttttaaagccccggctggggggtgcatgnnttttgtccctgtggggtggtnntgctgtttnttctgtgcntgggtcnctctgtgcctncgtgtggcgcttgntttgcgggtctttgtctgcctgtccggctcgcgggtttctttttttttttgcgc

SEQ ID NO: 24125 - DNA, 274 bp, Zea mays
  Clone ID: MRT4577_122008C.1
cttgtgcagccgcccccccctctctctaggcttggaggacgcccctcgcactcctgcacccatatgcagccgccaccccacctcccccatcaaaccctagccggcccctgctcaagctctactatccgaggtgccattctgctaccgctctgatctacctcgcgtttgtgcatctctccaactgcatttaggaggagggaagaagaacggtggaaagggggcggatatctaagcggtggacttctggatcgcaccaagggccatgccctaactt

SEQ ID NO: 24126 - DNA, 1003 bp, Zea mays
  Clone ID: MRT4577_122009C.1
gggttcgaggccggaaggcacccccgcgcacggcatacccaccactcgatccaccacacgagagaaccacttccatggccggcgcctcatcgtgagctcctcgcagcatcgctaccgcgcccttgcgttagctctgtcttcctgtcgcacgtacgttttgtttattccttttcttggagcgggatcggaggttccaaccggcaaaagagagatgatggtagggaagagggagcgggactgcaagaacccgatgcggcggacgacgagcatgacggagttcgcgccgcccgacgcgctcgcggcggtgatggaggacgaggagggcccccagctgtccgacgacagcagccgtgacggcgggcagcaggactggctgtccgcgctcggcggcggcggcggcggcgtcgggggcgccgcggcgcaggaggactggctcgcggcgtaccacgcccgcgcggcgccggcgcgggcggggctccgccggaactcggccgactactccgccgtcgagaccgccgcgttcctgcgcgcctgcgggctctgccggcgccgcctcgggcccggccgagacaccttcatgtacaagggcgaggcggcgttctgcagcctggagtgcagggagcggcacatgacgcaggaggagtggaaggacaagtgcgcggtgacgtcgatcaaggacgctgccgcgggctcggccaaggtcaagggccgccgcgccggctccggcaaggctgggggcacggtggccgcagcatgacgacgatgctgatttgctgaacctacacctagctacctagctaccaccagcttctcctcaactagccagctgcaagctccgattattcacccgtgcaaccatctatatactaaccatgcatcatatatgatatatccccagctagctcaatcgattattaattatttgttatccggatccatcgctcatcgctgcatgcaagccatactgatagatataatactataccattagcttgattccatc

SEQ ID NO: 24127 - DNA, 517 bp, Zea mays
  Clone ID: MRT4577_12200C.1
gacacaaatgttcatcacaggttcaccatcataagcctgtatgttcatcaactggtctggctccaagacgcaaactttcctgtgtttgacttcataggaacccgagcccttttgacattacaaaccaattctggttcgaagtgtctaggtaaatttgaaactaccagtattacagaccaattctggttccagttcctagtgctaacagagaatcatgccttactgttgcaaccagagcccttttgacattacagcaattacatccggtgcgggcaccatctacatgattgcaacgcttaagtaatcaccgatttggaatccgagctctgcaagagttttggcatcgtcgcctcttccatgaccataagcgaaggtcgaacccacctggacgcagctgagccggtgtggagcagggatgagtacatcggagcgtagagcctgctccagctttaacgacgccgaagatgcgtcggagaagaccggcacgcctgcctgctcgagctcgaggagcgctggc

SEQ ID NO: 24128 - DNA, 307 bp, Zea mays
  Clone ID: MRT4577_122010C.1
ccgccagggctggatcgcccttaagagggtaacaacgcagaacgcggggacactgccaaaggtcccgaaaagctaacatgttgcctaactacttcagagattttgactgcctatgttgtgatcaatgaagagatatgtttctttctgcttagtttatagtgagtaagggcaatttgagaattgagaatgattgagatctaactgataagaggaacagttatcgttaagagtctataaattactggcgtgttttaacagtggatggaaaacctgggttcctacttaattctttgagaaatcttttttg

SEQ ID NO: 24129 - DNA, 364 bp, Zea mays
  unsure (1)..(364): unsure at all n locations
  Clone ID: MRT4577_122011C.1
ggcaccaactactgcgatgacctgtgctcgtcaaccacggtgtctagtccgaggaacactagatgcctccattcaaccaagtggctggattggactcaaatcttgatgtgcagcgaccacaactaccaataatccacgtacctgatgactaccctcaaaaattacttgcgaccaaccaacagtggatagtgaattctactgcttatctacagaagcaactactactacgatacaaaccactggctggggtgagcccagctacctttttgatgcaaccacagatggcgacattataccaccacgatgttcataacgctgtcacccgntcacatatgccacatgagctgtcattcaaccaaattga

SEQ ID NO: 24130 - DNA, 832 bp, Zea mays
  Clone ID: MRT4577_122012C.1
gggtacctcgaggccggccgggacaccgcgcccggcatacccaccactcgatccaccacacgagggcacgagagaagaaccacttccatggccggcgcctcatcgtgagctcctcgcagcatcgctaccgcgcccttgcgttagctctgtcttcctgtcgcacgtacgcttgtgagacaagcgagaaggcacgtacgtttagtttattcattttcttggagcgggatctgaggttccaaccggcaaaagagagatgatggtagggaagagggagcgggactgcaagaacccgatgcggcggacgacgagcatgacggagttcgcgccgcccgacgcgctcgcggcggtgatggaggacgaggagggcccccagctgtccgacgacagcagccgtgacggcgggcagcaggactggctgtccgcgctcggcggcggcggcggcggcgtcgggggcgccgcgacgcaggaggagtggaaggacaagtgcgcggtgacgtcgatcaaggacgctgccgcgggctcggccaaggtcaagggccgccgcgccggctccggcaaggctgggggcacggtggccgcagcatgacgacgatgctgatttgctgaacctacacctagctacctagctaccaccagcttctcctcaactagccagctgcaagctccgattattcacccgtgcaaccatctatatactaaccatgcatcatatatgatatatccccagctagctcaatcgattattaattatttggtatccggatccatcgctcatcgctgcatgcaagccatactgatagatataatactataccattagcttgattccacc

SEQ ID NO: 24131 - DNA, 373 bp, Zea mays
  Clone ID: MRT4577_122013C.1
gttcaataattattctgataagataacatgtcgtaataagatgttgtataaagattatgatagctttacgggtggaccggcatacacataaaacccaattccatgcacagacatctttgtacaccgtggcaaatctatgatatgagctcattaataaattgccgagtcgggaaaggcagcatagaattttaacacgataacaaggacacctacgagccttatgttcttaacacaatcaacgtgcccttagggaattatgcgccgagcatgggtgaaatttgactaagttgcccttgatatgaaaaaacccaaacagaatcttgcacttgtggattctggagatgtagaacatatggctgatgtttggtttaaa

SEQ ID NO: 24132 - DNA, 809 bp, Zea mays
  Clone ID: MRT4577_122014C.1
ttggggtacacctcgaggccgtgggggacaccgcgcacggcatacccaccactcgatccaccacacgagggcacgagagaagaaccacttccatggccggcgcctcatcgtgagctcctcgcagcatcgctaccgcgcccttgcgttagctctgtcttcctgtcgcacgtacgcttgtgagacaagcgagaaggcacgtacgtttagtttattcattttcttggagcgggatctgaggttccaaccggcaaaagagagatgatggtagggaagagggagcgggactgcaagaacccgatgcggcggacgacgagcatgacggagttcgcgccgcccgacgcgctcgcggcggtgatggaggacgaggagggcccccagctgtccgacgacagcagccgtgacggcgggcagcaggactggctgtccgcgctcggcggcggcggcggcggcgtcgggggcgccgcggcgcaggaggactggctcgcggcgtaccacgcccgcgcggcgccggcgcgggcggggctccgccggaactcggccgactactccgccgtcgagaccgccgcgttcctgcgcgcctgcgggctctgccggcgccgcctcgggcccggccgagacaccttcatgtacaagggcgaggcggcgttctgcagcctggagtgcagggagcggcacatgacgcaggaggagtggaaggacaagtgcgcggtgacgtcgatcaaggacgctgccgcgggctcggccatagtcaaagagcgccgcgccggctccgggatagctgggggcacggtggccgcaacatgacgacg

SEQ ID NO: 24133 - DNA, 1125 bp, Zea mays
  Clone ID: MRT4577_122015C.1
cctcgaggccggccgggactcggggcacggcatacccgccactcgatccaccacacgagggcacgagagaagaaccacttccatggccggcgcctcatcgtgagctcctcgcagcatcgctaccgcgcccttgcgttagctctgtcttcctgtcgcacgtacgcttgtgagacaagcgagaaggcacgtacgtttagtttattcattttcttggagcgggatctgaggttccaaccggcaaaagagagatgatggtagggaagagggagcgggactgcaagaacccggcgaactcggccgactactccgccgtcgagaccgccgcgttcctgcgcgcctgcgggctctgccggcgccgcctcgggcccggccgagacaccttcatgtacaagggcgaggcggcgttctgcagcctggagtgcagggagcggcacatgacgcaggaggagtggaaggacaagtgcgcggtgacgtcgatcaaggacgctgccgcgggctcggccaaggtcaagggccgccgcgccggctccggcaaggctgggggcacggtggccgcagcatgacgacgatgctgatttgctgaacctacacctagctacctagctaccaccagcttctcctcaactagccagctgcaagctccgattattcacccgtgcaaccatctatatactaaccatgcatcatatatgatatatccccagctagctcaatcgattattaattatttgttatccggatccatcgctcatcgctgcatgcaagccatactgatagatataatactataccattagcttgattccatcaaaaaaccaaaaaaaatgcgggcacgcatgtttggtaaaaaaaatttttcaagctttgttgctaaatatgctactggaggactataaatgttgctaaaccctttagtggagcgaaacagcagcatgagtaaacgtccttgtgtacaagtggaaaaaacaaaggtgaagggaggaaatttatgtggcttcggcactactagcttggcaaatgccctgggccccggatgatccctgtccctgcccctagccctgagaacaagacggtgtaatttcagtgtttaaaaaaaaaaagaaaaaactcgagactagctcgtgc

SEQ ID NO: 24134 - DNA, 668 bp, Zea mays
  unsure (1)..(668): unsure at all n locations
  Clone ID: MRT4577_122016C.1
tcaatgggcatctttattctgctgattgtcgtgatggctgtagagcgtgcgagtttataatagagagatgggatcatggacaaggttcattgacaccagacaccatatgggaagctcacggtctctcgaagccgcagcctttgtctcccttaatgggaagctctgcatcatccgtaacaatatgagtatcactattgttgatatattggacccaacaacagctactgaggtcgacagtgcgcgcatgtgggaggcttttgctcgaaaggggcagcacagatcatcattcatggcaaacctatggttaatcatcacaggtcgtaatctgaagacagacattatgcattgtcaggtgctccaagtttgagtttgtccatgtatgaagtggagtatacttacacaacctcagagcctgacttggaagctgaaatgggtacatgagccataccaaagagaccagctttcgctttgaactctgtaaatatccctgatttcgtccttttgaactttctaattttggcacctatctgtcagtgagcttccaagagattggtcctggggactggagaaagaatatgccatggctcatgaggcattaagggtttgaatggcagcatgaaccccatangtcanaagcgtangaagcactgacgagaggaggggtaagc

SEQ ID NO: 24135 - DNA, 1353 bp, Zea mays
  Clone ID: MRT4577_122017C.1
gtttctactaatcttctacttattccattctctttaattcaaaatgagcggtgaaaatttgatcatgagctcggtgaatggtgttagcagcattcggccggagattgccttgaatggtttggcgaatggtctcaaaagtaatgggattaatgggcatcacgaacacacaaatggacacacaaatggtgttgatcataaacaagcaaatggtcataaacatgcaactgttgacccccgaaattacgatgacatcatccgcctggccgaagttatccgtgacatggttgatcttaaagaaagtccaacaattggtgtcatctgtggctctggacttggtgatctagcagatctgctagttgacaaacaagttgtgccatacacaaaaattcctggtttccctcaaactagtgttgttggacataaaggaaatttggtatttgggtacttatccggcaaatatgttatgtgccttcaaggacgatttcatccatatgaacatgatatggatttagttttgtgcaccatgccagtccgtataatgcatcaccttggcgtaaaaaccatgattgtttcaaacgctgctggcggcatcaatcacaagtttaactatggtgatctcatgatcatcaaagaccatgttttcatgcccggtctagttggattcagtccattggttggcttgaacgattcacgttttggtgctagatttgtttctgtccatgatgcttatgacaaacagctaagaaaaatggcactccgaatcgcagtggaagaagatattagagcacatgaaggaatttatgtgatgtccggtggaccacaatacgagtctccagctgaagtcaagctttacaaagttctcggggccgacgcattgggtatgtccacatgtcatgaagtgacggttgcacgccaatgtggaattcgtgttttcgggttttccctcatcacgaacattggtaatgatgacgcagatacttccgtcgaagtttcccatgaggaagtcctcgagactgccaaagaagcaagtgtcagggcgtgtagattcgttagtcgaattgttgaccatctatgaggttgtaatgatctatttttactcatcatgttttcttttcaatactcaacaaaacttgaatttgtgtaagaaactcgttttattccctgatgtctaaatattatagctagataaattaaatgtgcaaattttgtgccctaaacacgactgttttctttcatttatatgctaaagtttagggcactttataatttgttttcggagcggatttttctttttttacatatcgtttgtatataatgttgtcttagtattagtttataaactttatttttctt

SEQ ID NO: 24136 - DNA, 373 bp, Zea mays
  unsure (1)..(373): unsure at all n locations
  Clone ID: MRT4577_122018C.1
aattcggcacgaggcacacgggtgcagtggggggctcnctcgccgggccccgggacgtgacacatcgcacgggcgaagcagcttgcgcgggtgccgcgtttcgcctcccgcctgccgtgccgcccgtgaccgcgagaaggccggcagctttncatgaggaggaggaggatgggggcacggcgcgggntcngcgagcccatgatcagcttccgccagcagcgctgaagcagtcatcgcgaagaacggggggcacggcgccggcggcnaggagatccacgggctgagccgcgtgtacaaggacggacacgtggagcggctcccggggatcccagccgggccctggacgtggggcgggacgggcccggacgcgccg

SEQ ID NO: 24137 - DNA, 313 bp, Zea mays
  Clone ID: MRT4577_122019C.1
aagcaaacaatacgggtgcataattgtattcccaccggcaattactatccgaatagactcatcatttctgtgccggggggaagtttttgttacagcctttccccccaattttaatacacacaaacccttgttggaaaaaaaatttgtttcaaccctccagataaaacaaattcctaagtttgacaattaagtggccaaccgctgcattagctaaagggccggtttttactgacaggacccccgagggaacatgcctgcattgtgtggttgcgttttgcacgccagccttacggaagtttggatctgcggggtt

SEQ ID NO: 24138 - DNA, 653 bp, Zea mays
  Clone ID: MRT4577_12201C.1
cccaactggtctggctccaagatgcaaactttcctgtgtttgacttcataggaacccgagcccttttgacattacagaccaattctggtttgaagtgtctaggtaaatttgaaactaccagtattacagaccaattctggttctagttcctagtgctaacagagaatcatgccttactgttgcaactagagcccttttgacattacatcaattacatacggtgcgggcaccatctacatgattgcaacgctcaagtaatcaccgatttggaatccgagctctgcaagagttttggcatcgtcgcctcttccatgaccataagcgaaggtcgaacccaccttcaaacattcaacaagtcatgaaagggcaacaatgcagtggaacaagagttgtgatggtgtactgaagaagataatccatgatgaaatagagattgcctggacgcagctgaaccggtgtggagcagggatgagtacatcggagcgtagagcctgctccagctctagcgacgccgaagatgcgtcggagaagaccggcacgcctgcctagagaagatgcctggagaagaccggcacacctgactgctccagctcgaggagcgctggagatccacccgcctagagaagaccggcaggctgccgcgtctgcccgcc

SEQ ID NO: 24139 - DNA, 239 bp, Zea mays
  unsure (1)..(239): unsure at all n locations
  Clone ID: MRT4577_122020C.1
ctcggtttctgatcagcgagacatgggnaacccgcggcgtcgccctgctgctcctcgcggcggtgctgctcctccaggcgctcctccccgcgtcgtctgcgggcctggtgcgggtcgcgctgaagaagctgcccgtcgaccagaacggccgcgttgccgcgcgcctctccgccgaggagaggcagcgcctcctatctccgaggctccaacgctctgggctcaggcggagacgaccactc

SEQ ID NO: 24140 - DNA, 239 bp, Zea mays
  Clone ID: MRT4577_122021C.1
aggaagctgaatcgacctattaagcggcgaatgtatccatttttgctgcaacatggggaatgctacgctggcatagatgggtacctgttaacttctgcttggcgatttgctagagtgatggtctagatatatagcgctactcgaatgtatgtggaatgctaccgtataacgcacatttgggtgcaatgactgttgcattgctgcatgaatgatatcgctggtacataatacagaaatac

SEQ ID NO: 24141 - DNA, 648 bp, Zea mays
  Clone ID: MRT4577_122022C.1
gccggccggtccgggtattcctcgcccacgacaactccccctcgaaacaacttcttgctctcgcttaaggtgacgcccgccacttcctcccagattagatgacaaaatgcaccaaaaaagcatgaatctctaggaaatatgcaaccacacatgctgccatgttacggacaacaatatcaagaagatgaaggtatcccagcactccaaatacttctgagatttctgtggaaagatttgcatgatgagtaaaccacttggtatctataacatgcaaggactgtgtacaactccaacgccggcgcaggctacacaatgaactctgttagtgctctcatcgtgtgagatccactctccggaccctgaggaagaaaagctaagcatgattggctatagattgatgaggactacctgtattttttgacgtcagacaagaggcgtgaaccattttgactttttagctaaaagaacaataaatgactatctatctgcatggaccactttgtcactcatgatgtggcgtgctatattgatggtatggactatgcaatgcaagtacttgcgcatattgaacttatgatatgtccctacatgctggcgctgtctagaactataggacccccgaactatggtattcgatatctagcttat

SEQ ID NO: 24142 - DNA, 627 bp, Zea mays
  Clone ID: MRT4577_122023C.1
gaagtcgctttcctaggacatattatcatagatggaggaatcaaggtagaccccggtaaaataagtgaaatattaaattggaagcaaccaacagatgtgtccaagatcaggagtttccttggattagcagggtactacagaagattcatcgaaggcttctccaagatagtgaaacctcttacttcaatgctggagaaaggacttggatgtgtgctaatgcaggaaggaaagtatcacccagaaaaagcaaacgtggtggcagatgctttgagtcataaaggtcaagtgaacagtattgctacctatttgatgccgcaagaattatgttgggaaatcgaacaacttaatcttagtatggttaataatacaaaagcaaccattatggaagtggaatctgctttggaacaagagattcgtaaaggacaagaatccgatgagaaaattaaggaaattaaaacacagattaatttgggaaaggcctctgacttcacagaagatgaacaaggcacaattttgtttaagaagaggatctgtgtaccaaaaattgaacatctatgccaacttattttcacagaagctcatgattcggcttattctatataccctagaagtactaagatgtactag

SEQ ID NO: 24143 - DNA, 2609 bp, Zea mays
  Clone ID: MRT4577_122024C.1
gtacccccgggctcggccggggattccccctcttatatttccgttcccctgtacccgcgtggtcgagggttcgatctcgctgccccccaaaacttgtttcgtaaccatcctattttttctctcgaattctttcttgtgattaaggcctggctaatttctattcttcaggtttgcagatcggcgcagttttggtcgcaaaggcgtggtcgttctcctcgagcatcgatttagggttcttcggctttctatgatcaggaggagttgctggattattttatcagggaacagaatggtgtgattcgttgattggattacagtctggatctctcttgcatcaaatggttgagcaaggcaaaccacgaagcatcccgacgaaggcgaagaaatcgccgttcgtggaggtagaggttgacgagattggccaggctagtggggtggtgtttgcaagggaatcaccgctggcgcctaagagcgaccaaggatgcagcgttagccatagtcatggcgacgacgaaacacatgaatcggatgggtgcgtgcaaagccaggggctagacgagcatgggtgggtggacttcggtcactcactgcagctggtgctgttctcgcgacagtggagcctcgctgaaagtcttgttgacctagcagatcagcagccgatgctggattatggcctgtcgattgcccttgatgccatatggtttttgcggacgaaacaggatcttgagggtctcaacagtctgatatcgaagattgtggcctcaggggccaaaggattttgcaagagcaatcctcaggacatcgctgctcgcgtcatgtgttgcagcgtgccaaagcaaggctatcacagtgggtaatagcaaggagatcgtcgcagagagattgcatgatcgtctgcgagattgtcctggtgctgagcatctaaaaatagaggcaggtgccaaggtgcagaagttcatggaatgggctttacagtgtattcatatgcatcattgttctgaagatacacatatgtacagatggaactacaatactctccaagaggtacagcttcatgtatcagcatttaggaccttcttggacatagctggtgacaacttaagtggcaagatttttactgaggcatttgatgcggtctgcttcccccttacactcttctcaagtttatttgaacctggatggtcttctgggagttcagcagtctccattaagggccttttatcatcgctggtggaaggaggcgctgacaatgtaaatcagtgttttcttgaagcagcgcgctttggaagtactgaacttgtacgcattctgctgaaggtcgcatatcagaatagcttggctgtggacaccgatctggctctggtgtatgcctcacattactgcaagttcaaaacaatggaatgcctagttgatgaagggaacgtgagttctttccttggccctctgataaaagctgcagagcgtgggtgcttgcaggttgtccactggttcgtcagtcgaggcgtctctgacattgagatgtgccttgccctgacgactgctgcctccagcggccatttcgtagtggcgtcgtacatgcttgcacatatccctcagcaaatccttgaagctctcagcacacagatcctcaaagccgcgaggggccagggcagcaggccgcttgatggtgtcaccttccttctgagatccaacttcctaagagacgcagctgcaacatatgaggccgcagacatcattgcaaccgggggcaccaacggtgagctcccggacctggttgccttcctgaaagaacactggtcccaggacgcgtttgctgaaggggtgagcgccggtgaaatgcacttcgtgaatgtcatgagggtcctcaggagaggggcgtccccgatctgcctggaggacctcccgcctgagatggtgctcggcatcacgtacctgccactgtaccgtgagtgcctgagcgcgggtgggcagctgttgccccaaaggctgaggggggagctgctggaggcggtgcaccggctcggtgagcccgttggcccggagagccaggggaaggacctcgtgctggcactagagcgccacatgccgtcgttcttggttggatcctgagatgtttccaggttgtaaaagaagcttgtgcaggctataccttgctttaaaaaattgtatggagcagtgttgattaccaacttctggctgcggtggaatcagcaatagatttggcgcgtcacatgtctcgtgatcgtgtagaaagattttgtttttgttttgtattttgcatgagaaagaagtttctttcttgattgcctattgaaggggcctgttcttgttgccagctgagctcttccaattattttccgggctgcgcacgagacgtacatgtgtgctagtggtgctgttagtctagtttgtgttgtgttgtgttgagtgtatgcgttgtgtgcgcgcgggcgcgtgtggtggtgctaagagtagtttctgcgtatactgggccttcagtggtatgcctggtaatctcaataagtatcgctttcaagacatggattcttcagcaaaagggtatttgatgcatgccttggtgggagtaatgtctaggttccgttccttcc

SEQ ID NO: 24144 - DNA, 848 bp, Zea mays
  Clone ID: MRT4577_122025C.1
cattgggtacctcgaggccggccgggatgctttcttggatacgcgtataggcgctgtgtcatagcgtctcttcccaccaagatgcggctctccaccggaatcatagcgagcttgctgacgtggacgaccattgcttccaacaataacaaggtcgttccgcgccaaaacaacaacacggactacaaaattggatttactccactcaaaactgaatggactgataccgtgggaaccaacccctggcctgagtacccacgtccacgccttcaacgaccagactggaagaacctcaatggcgtctggcgataccagaacacccaaaacggctctgatgcctcaccgccattcgggcagcgacttgaaaaagccgtcctggtcccattctgcttggagagtgctttgtcgggtgtgactgagaaggaccgcatctggagctggtattcgacatcgtttgaagttccatcaacttggccaagcggaaacagtgtcgttttgaactttggtgccgttgattacgaagccaccatcttcgtcaatggccaaaaggcaggatttcacagaggtggttatttcgagttcagcgttgatgtcacttcgtatctgaatgccaatggaacaaacgagcttttggtatacgtctatgatccaactgacatggaccgcgttcaaatcccaattggaaagcagactctgaaccgtggtggaatgatctggtatacgccctgcagtggcatatggcagacagtgtggctcgagtccgcacccaaggatcacatttcgaaactcgatctcatggctcataatggatgggaaaggtcgtcgtcactgtgcatactagcactaattcg

SEQ ID NO: 24145 - DNA, 672 bp, Zea mays
  Clone ID: MRT4577_122026C.1
atatcacctcttaggcttgccatgctgcctcccatggaagggtggctacgcttgtgcttggtagccctatttaccctactagcgatttggctcctcaagctcatcactggtggaaagtgcagaccggctgccaagaaacagctgcctcctgggccatggactctccccgtcatcggcagcctccaccacgtcgccagcgtcctcccccaccgcacgctgatggagctatctcgccggcacgggccgctgatgcttctcaggctaggcgaggcccccaccgtgatcgtctccaccgccgaggccgccgcacttgttatgaagaccaacgacctcgcgtttgcgggccgaccgcagagcgcgacgttggacgtcttcggctgcggcggcaaggggatcgccttagcaccctatggtgaccactggcgccagatgctcaaggtctccatcgtggagcttctcagttccaggcaggtgaagcgcctcgagggcatcagggccgaggaggtgggcaacctcctccgttccatcaccgccgccgcctcgagtggtggcgccaccatcaacctaagcgagaagatgacggcgctcagcaaccacgtcgtcacgcgggcggttttcggcggcaagttttcgcagaaagaggagtacctccgggagatggccaaggtgttt

SEQ ID NO: 24146 - DNA, 246 bp, Zea mays
  unsure (1)..(246): unsure at all n locations
  Clone ID: MRT4577_122027C.1
atgctcgagttttttttttttttttttttttttnnnnnnggcggncggccgccgagcccaaaaaccgcacgctgctttagagcagcttaatttaatttgtgatgaaaccaaaaaagaaggggaaggaaaacccaatctccgaacacaaaaccctggtatatccaaacaagccggaggggaaaggaagtttttcccaccccaagggttaagtggcaggcgcaggctggcgcccaaagacccccccca

SEQ ID NO: 24147 - DNA, 1014 bp, Zea mays
  Clone ID: MRT4577_122028C.1
cgcgcttcgcccccgacgagctcacgctctgctacaagacgctcaatgacgcctgcccctactccaagttcgcgcacctcaccgccaaccaggccatcctggaggctacgggcgcggcgaccaagattcacatcgttgacttcgggatcgtgcagggtatccaatgggcggcgctgctgcaggcactcgccactcgcccgggggagaagccatcccgggtacgtatctccggcgtgccttcgccgtacctggggccaaagcctgcggcgtccctcgccgcaaccagtgcccgtctccgcgacttcgccaagcttctcggagtggacttcgagttcgtcccgttgctgcggccggtgcacgagctggatcggtcggatttcttggttgagcctgacgagaccgtagccgtcaatttcatgctccagttgtaccacctccttggcgactccgatgagcccgtgcgacgtgtcctccggctggttaagtcactcgatccatcggtggttacccttggggaatacgaggtcagcctgaaccgggctgggttcgtcgaccggttttccaatgcactgttgtattacaagccagtgttcgagtcacttgatgtggcgatgccacgggactcaccggagagggtgagggtggagcgatgcatgtttggggagcgcattagaagggccattgggccagaggaaggagcagagaggactgataggatggcggctagtagggagtggcagacgctgatggagtggtgtggctttgagcccgtcagactcagcaactacgccatgagccaggctgatcttttgctttggaattacgattcgaagtacaagtattcgcttgttgagctaccaccagcgttcttatctctggcttgggagaagcagccgctgctcaccgtgtccgcttggcggtgagtccctttttgtgtgtgtgtattggtgctgttgtatgtagcattgtcataggaccagggaagaaatgaatagactggttttgcattgtctt

SEQ ID NO: 24148 - DNA, 258 bp, Zea mays
  unsure (1)..(258): unsure at all n locations
  Clone ID: MRT4577_122029C.1
cgcgaggggcagaagcagagaggcgcccggcaaggccgagggcgacgggcccagcgaagagccangaaccnggcgggcaagccgggcgcgcgggnacgagcgagcggcgaccccggcaccggcaagaccagccccagcggcggccgcgccaccgagcaggngcccgagaacgcgccccagcggangccccccaccgggggggggggggacaanaacccccacccnnccgccaacnacaccanccacacggagagcacc

SEQ ID NO: 24149 - DNA, 324 bp, Zea mays
  unsure (1)..(324): unsure at all n locations
  Clone ID: MRT4577_12202C.1
agccagncaaggaaanganacagcaggnnaacagcannccnccagnngagaaacaacaagacangnangnncacaagacagcttctaaacatggagagggggggatgatctctgaagccctcacaacctacnaatgatctgggggcgccattcgcgtacagttaacaatnggaggaaaaaaatncctatgctnnggaccacaccacatggagaagnnnccatcatgggagaccggctnacattacnnggacgnggncgncccgnggnncaganataanccccccggagaagnncctatcatgagaggggacnngcannacatga

SEQ ID NO: 24150 - DNA, 221 bp, Zea mays
  Clone ID: MRT4577_122030C.1
cccacgcatacatgcacgcgtacgcccacgcgttcgaggacacgcgggctgagggacagatatgcactgataggcagcttcataacaaacagatttatccacgtattaatgtactggcgtatctttgacgattgatgaaaagggctagttggggatggcctgacacgtcgataccattcagatgtatcttatcaggtttgtgccaactatgctattggaaa

SEQ ID NO: 24151 - DNA, 257 bp, Zea mays
  Clone ID: MRT4577_122031C.1
cctcctttgtttttttgaaacagggcaaaaagggggggttcataagctcgaaggaggcacaacaagccaagtggtaacccaacaccaaggagaacgcccccaaaatgagggatcaccagccgctcgagaaggagggcggccacaacgtgcacaaacaaaaaaagagccgaaaaaagacaatcggggaaggagaccgctcggaggacaacgcagcacgggggccgaccacgcccaaccaggggccgcggccaccaaag

SEQ ID NO: 24152 - DNA, 295 bp, Zea mays
  Clone ID: MRT4577_122032C.1
gccggccagtacacacacccgaccgcgaagaaaccgagcaacaaaaacatgcgagaaatggagcacaagaggccggttgtccgccgccaggagcccaccgtcgcaaggacggaggacgacgtggcttccggcgacgaggaatccgacgtcgagttcgagttccccttcgtgagccaggagtccggcgcgggcgcgggcgccgcggcggccgacgagctcttcgcggacggccgcatccgcgcgtcctacacggtgtttggccgagtcctagacgaggccgcggcgccggcgccga

SEQ ID NO: 24153 - DNA, 693 bp, Zea mays
  unsure (1)..(693): unsure at all n locations
  Clone ID: MRT4577_122033C.1
ctcgtttggttattgatgtactatttcatctcatgtcacaaatttggcataaggaaatgggtattggtggctactagtttgtttccacgtattatacatgtacaatggaacagttgataatagttttgcatgaactattggcgttggctatctaaaaggacagaaaggcagacatgagcaacaaatcctgctccatgggctgaaactgggattcgtgatggtcagctaagcataccttcgccttcaaatttgcgtagcttcttttttattttgcaagttgtttggtctgtcgttcaaatgccttattattctgtgagctgttttaagactgggcctcaattttttttccaggcagaaagtgctactgctgctctcagctgtagtggtgtggtactgggatccatgccaataaggtaaaactctgactgatcttcttacgctttgcattgaggaaggagctcttctgggcgattggataacagagtcgttctagtgtgtttttaggatgagcccgtccaagacgcccgtgcgtccccgtgcccctcgccagctgatgtcgtcctaggtatacantacaggaggtgctgacgatggcactgctcatatataagtaatagagatagacatgtatgaaaagggtcttttgttttcaagtagtgtgtagttgctgttacttttacagctaatgcaatc

SEQ ID NO: 24154 - DNA, 424 bp, Zea mays
  unsure (1)..(424): unsure at all n locations
  Clone ID: MRT4577_122034C.1
ctttgtctttttcgcctcgttgtttctgcctgctgggtggggtggtgtgtcggctcttgcctgggcggcgggtgccttgttcctgccgtcngttgcttgcttcctggccttgtggtgtctgtttctgtcgctgctggtcctgcccgcttcatgctgcttcctgcctcgcgtntcgcggctggggggctgttggggtttctcgccgtccctgnccttttcctcggggttttcctccgcccggtttgcctgcccggctctcgcctcgcgtcctctcctttcgctnccccggtgctggcgctcgcgtgggggtgcctgttgttcgggcctgtgctggggtttaaatctgtgcgcttgcccgccggtttttttgtgccttcctcttctggtgtcgcctccgtctgcttcttcttggcgccggctttgt

SEQ ID NO: 24155 - DNA, 536 bp, Zea mays
  Clone ID: MRT4577_122035C.1
tttttttttttttttttttttttttttttttttttttttttttttttttttttttttttttttttttttttttttttttttttttttccggccccccccggggaaccagatccgtttgcccaccgccggggccaacataccccaggtctaaaaaaatcccaaaagggccggggccccaatttaagatttcaatcaacaaaacacaaaaagggacccaaccgggggaaaaaaacatggccaaagtcggtcaaaaaaaagggccctccacaaatcaagggccaaggaaacacgccgccccccccaaaggcttcccaacaaccggtttaaacaaaaacagtaggcccattgcccaacccccggtcaacccggattttctaaacccggtagttgggggtgggcaacccccccacatcatccccaaaaagcttcccccaacccccagggccaaacggggaaaaacaaaaacaacccccaatggggggataacggaaagggcccccaaaaaaacccccgggcgccaaaatcggcgggatacc

SEQ ID NO: 24156 - DNA, 264 bp, Zea mays
  Clone ID: MRT4577_122036C.1
cccatccaaatatgggatgggggggaaacatccttttaaaacataaggccgggggggtccataccaaatacacacaggacatttaaaacttaaggagaaaggacacacgtccacagggggggtttggaacacgttaaacgggtaaaaacaaaccggccgggtagttagacaaggcacggggccgaacgggctttggtttatagctaaacgccaaaaccaggccccggggtccttagttccttacaaaaaccaaaatcggaaagg

SEQ ID NO: 24157 - DNA, 683 bp, Zea mays
  Clone ID: MRT4577_122037C.1
tagggtaccggtttcccccctcgggtcgacccagcgtccggtgttaatgcgttcgtgcaatgttctttacctttacgattggaaaggatctctaattggaaattgtgagccaaaatacgacacatacaagccttgcttgaggcacaatgcggcacaatgagaaatacaactggactaccatgaagtaaacaagttaggaagctccatgtgatgtgtcaaatgctgaagaaagatcacaggcgagctgtggcataaagcaacagggcatgcatgtggagcacaggtgacaacttgacaacctgggacagctgaagctacagtgtgtccagtgagcagctacaaacccatatgtaggggcatatgccagttacccccctgtgtatcagtatgcagcccagactggggtatattacacggtatcccacgattggtacgcaccagcagggaccggaaacccaggctgaggggtaccagcatggagcccaggctggggcgtaccagcaggtagcgggagctcaggctgtggcatccatctgggagccacagctgtggcgtactatcaggtagcctacactgtggcgtactaactgggatcccaagctgagacatatcagcaatgaaaccatgctggagcatatccatattcttatgatgctgccacggcttacatatatgacagttat

SEQ ID NO: 24158 - DNA, 321 bp, Zea mays
  Clone ID: MRT4577_122038C.1
ctgacacgtgggatatccttacgcggactataacatttctcaggattaaaagattgttgagaccatccactccgctaaggcaagccagatctttgacagtcgactctccctagagtccaggtcgacgcatatttgtcacatggacccttggtaagggcagtatgtcccagaggagcatcaactggtatatatgaagctatgtagtttagggatggaggctctcactattaggggaagggtgttttccaggctgtgaacactgagaatactgatattggacctgctatgattggctgggaccctacagcacagactgagatg

SEQ ID NO: 24159 - DNA, 2258 bp, Zea mays
  Clone ID: MRT4577_122039C.1
cggaagccatcggtcagctcggtgccagacagtgttaccagggaggatccttttaccaagtacgagctgctccatgagcttgggaatgttgcatatggtgcagtttacaaagcaagggatctccgaacgcaggagctagaagctgtcgagatcatctcattaacagacggggaagaaggctatgaagacatatggggacaaatggggatgcttcaccaatgcttccatccaaatgttgacagatactttggaagctgcctcggagaagacgtccgatggataattatggaatactgtggtggtggaagtgttgctgacttgataggcatcacagaggagcctcttgatgaatcccaaatagcttacatttgtagagaagcactaaagggccttgcttacctgcactccatttttaaagttcacagagatattaaggggggcaacatccttctaactgagcaaggcgaggtgaagttgggtgattttggtgtagctgcccagctgacaagaaccatgtcaaagcgcaacacgttcattggtactccacattggatggcaccagaggtcattcaagaaagtcgttatgatggaaaggtagacgtttgggcattaggtgtatctgcaatcgaaatggcattgggcacggcatcagctatggacaatttatgctgtgcgggaacacttcatccaataccatttccttaaggcaattgacatttcaccagagaaatggtctctcctcttccatgattttattgcaaagtgtcttactaaagaccccagacttcggcctgctgcaattgagatgctgaagcacaaatttattgagaagtgcaatagtggagcttcgaaaatgttggcaaagatcaaggtagcgaagaagattagagccacactagctgtgcaaaatgagctgtctgaccctgacaatacaacgcaagatgtgccttttcgaataaatgaggactatggggaaactgtccctacaagttctcagcaacacatgaaacatggcacatataatgattgtcaggcaggtgattttggtactatgattgttcatactgaagatggggacgaagtgacagaatcacccattttcccaagaacagaattcatacccggccttggtagcatcaattctttcacacatgatccaaagagagcagaacttatttcaagtttttgggcggagaacataggtgatagtgatgccaataaagaccgagatacagattatggtcctgacatgcaggaatcaaaagtgatctcacctttaactggaacagtgaagaagaatattggtgcagaagggactataaggtgccatgataatcaaattaacttgtcaccaggacttgcaaacacaacaactaaattgaacaacagcccaagccgtaaagcgttttcagttcaggataagctctggtcaatttatgctgccggcaacactgtaccaataccatttcttaaggcaattgacatttcaccactagctctagtatcagaaaatgaatcaggaaatggcctggctgggtcaagtacaaatgatgctttggaggcagttagggagctgttcagtggtgatgggcaggcaaagaaaggacggaaagggcaaaacgaagtccctcttcctccgggtgtgcatcacaggctgacgacaagccccacattgatgaacctggcccaagctctagcttatcataaaacgtgctatgaggacatgccgctacaagattcacaagcgacgcaagagcagcaaacgatacaaaatctttgtgacacacttcgcacaatactgaggttgtagatctgcaagagtgaaggctgcaacctttggagttccgaagcctgcatggagccaagggtgaacgtggcactgatcctgctcgtggtggagaactgaggatcgaaggaacgcatgacatgtgcctaccgtggagcaggcctaatggcttctgcgttttagcctgtggacgctttggtcactggaagctgggttgacacaggaatctctacggaagtggaaatttctgtccctgttaatagcctcttggagtttcactatgtagagacggcatcaaattttgctaatcagattttgtggcactaacgcatattgtagcctggttttgtatcgttgtcaatgcatttgttctccaaataaagagaaatagttaagcagaaataaacgaaaagttatttctgctggctattcgaaatcatgggaggcgtgatttctgctgtcttgaccccgt

SEQ ID NO: 24160 - DNA, 2513 bp, Zea mays
  Clone ID: MRT4577_12203C.1
caaggaataaaacaaacaaaactaagaaatgtagctcaaaccatgtagttgtagtccaatgacatgaaacttcgtgagatatgtgtccgtttgtgaagcacctatattcacacttttgcataatgctctaaatttagaaatggcgaaacaaaattgggtaccgaacaaaaatttgcccaattggtttggctccaagatgcaaactttcctgtgtttgacttcataggaacccgagcccttttgacatttgatactaccagtattacagaccaattctggttccagtttctactgctaacagagaatcacaccttactgttgcaaccagagaccttttgacatttcagcaattacatccggtgcgggcactgtctacatgattgcaacgctcaagtaatcaccgatttggaatccgagctctgcaagagttttggcatcgtcgcctcttccatgaccataagcaaaggtcgaacccacctggatgcagttgagccggtgtggagcagggatgagtacatcggagcatagagcctgctccagctcgagagacgctgaagatgcgttggagaagaccggcacgcctgcctggagaagatgcctagagaagaccggcacgcctgcctgctccagctcaaggagcgctagagatccacccgcctgaagaagactggcaggctgtcgtgtctgcccgccaggcaccggagatccgtccacccggtaggccgcgcgccgaagatctgccatgcgccggagatctatttgtccacggatccgtccgcctggtaggccgccgcgccgcgtccgaagatctgctaggcgccgaagatccgttcatccgcgtatccgttcgcttggtaggccgccgcgtcgcgtccaaagatctgccaggcgccgagaagatccgttcgtctgcggatccattcgcctggtaggctgccgcgtcgcgtccgccgcaggcctccacgtcgtcgaagaagcaggtcgccgcgccggggaagaagcaggctgccgcgccgctgaggatgtgccaggcgaaggagagatggagagttggagtcgggatcggggaagaagaggctgcgtggaaaaaagcctatgcttctttttgcctgaaaccatgacagactttctcatactactggaactttggaaaggcctcatagtggtaccatgcctcgtcttcttgatagagatgaatgggaagtcacaatcccttggcaaatgggtaacacgacttgtgggtaaatgtgcacaacatctggataacactaggttagtgttgttagatgacgtccacttggcgatcagcctttattccgatacttgcttcgttcatccatcttcgggttaattcatcaacattatcttgcggaaaagctcacgctttccattatcttgtggtcgactcaactctggttctccgcatcacatggttaattcacgtaccagcatcaaacgtgactcaatacttatgagaatgttgataaattctggttcgggcttgtcgttgaacatctgacaggtgttgagatcttccgcccccatgacccagatgaggctgatcacgaggaggcgaagcacggcgaggcacgtatcggacgagcttctgatattaaagacgatgacacgtgtcatgatgaggcggcatatggcgaagaaaaataggaatgaatgatgacgagagaacagaggcgcgcagagggaagtcggcgtgcaggggacggcaggtccaacggtcgtcatggcgcggtgcagggaggccgagtggaggacagcgttgccggatcacgcaggccgagcaagaagctcggcgagtcgacgaggttgaggggcatgcgcagggacgagcgagcagggaggagcatcgagcggagctgtggacggaggaacgcgagccgggaacgcgacgcggcggccatggccgagcagaggaagttccggccgggcgcggcgagcagagagaagcggctgccagacgccataggagacgggcgtcgagcaagcagaggggacggggcgcgccgctgggagctccgcaagagatagatgggcgtgcagggagccatgggagagagagccgagctggagctggaagaagctccggccatgggggatacaaggggctagggcaagctcggggaggaagaccgcgacgtgtaggaaaattggacgccaagcaagagcacgacagggaggagctcggccgggcgccatggggcgagctcgaggaagctccacggcggggttcgcggcgcaggacgcaggcgcgcgtgcatagagggagatgcgcacggctggcgagcgcagggagcatggccagggcacggccgagctggcagcagggaggagcagaggagcacggtgcggcagggaaggaggaagccaagcgccctggtgagtagaggggattcgacgagcaggagtcggcggcctggagaagaagggcagcgcgcacactgggagagaaacctagcgccagagctcggcggaaggagtcccggccggcctcgagg

SEQ ID NO: 24161 - DNA, 290 bp, Zea mays
  Clone ID: MRT4577_122040C.1
gatgcatcgccgcgtacgcttggatgctcttatacagccgccctcctttttttttttttgctagggaaaaaaacatattaggggactttctgaaaccagggggagtatacatgagacgctttacaagaactgacatcagacaggggtaccagcattgaactacgtatcaacagcattcactcatgaaccaatggaaacaacatgctctagcagctctgtgatcgtcacacgctactttgaacaacacctaggaccacctagtaattaagagactcccttcttgccttcac

SEQ ID NO: 24162 - DNA, 460 bp, Zea mays
  Clone ID: MRT4577_122041C.1
gatttcggttcgagcctatggataattatggaatactgtggtggtggaagtgttgctgacttgataggcatcacagaggagcctcttgatgaatcccaaatagcttacatttgtagagaagcactaaaggttctaacaccacatttgtggggcaattaaatgtcttcgaatatttaacttttgtgtgcttattttcttctccagggccttgcttacctgcactccatttttaaagttcacagagatattaaggggggcaacatccttctaactgagcaaggcgaggtgaagttgggtgattttggtgtagctgcccagctgacaagaaccatgtcaaagcgcaacacggtattcttaacagtgtttcttttgctacttcaaattccaaagttcaagaaacttcacatcgatgtgacaaacaaaatgaagtgcagatgaaacttgtcaatgccagtttact

SEQ ID NO: 24163 - DNA, 453 bp, Zea mays
  Clone ID: MRT4577_122042C.1
ggttaaacccgcaccccaaaataatcgccagatgggggaatgttttgttgaactaaaaaaaacccatggttggggggggatacaaaacgaaacaaatttagtttgggccccccaaaataaattaataacaatacaagggaactgaaaactgaatattctttcctccaaaactggacttggttgggaacttaaaaaaaccaggggaaggggagcctaacaaggagaacaggaagccccaccacggggaggggtatgggcgggaaaaaaattccaggccaacatccaaaagaaaactgttcgctgggtcgaaagcaaaaatgtatttttaggggcctgcaacttaaaaaggcgtccggcagccaaaaaaaaaaaaactcatataagtttcagcttatattcaccagccattgggatatatttaacccaggggggggcctgaaaaccactctttta

SEQ ID NO: 24164 - DNA, 554 bp, Zea mays
  unsure (1)..(554): unsure at all n locations
  Clone ID: MRT4577_122043C.1
aaacccaaaccccggcgggcccggcggcgcagaccgacaaaaccccaaggcagggggcccggggcccgccgccgacaccgccgctacggcggcngancacgcgngaggaagggnnncgncgcngacccaagncnccggcgngccggggncgcagnggggcgacgagggaaagggcaagcncgncgacgngcccgccccccgcnncgacagaggcgggcggngccaggggggagcgaacgcnggacanaccancnacaacncagaaggcaagaagnnngctcngcancnnngnnccatcnggnnanncnccangaagggacactgngnngnngnnggcaanggagcagncanccangnnccagggcnncnnnggagaaannganggnncnngagnccaanggagnccgcngcggnggaaggaaaccggnanccgaccgggcacaacngcngnnngancngcaccaggcngngganggaccaagggaagcagagcnngaaaaaacacnnanagggacaacnaagagaggcagnggaccnngggacagcagcaagga

SEQ ID NO: 24165 - DNA, 384 bp, Zea mays
  Clone ID: MRT4577_122044C.1
atgctccatcaagttcatgacagatggtattttgctgcgagaaatccagggggattttctgttgaagcgctattcagtgatcatattggatgaggcacacgaaaggagcttgaacacagatatacttattgggatgctttctagaattataaagattcgcaaggatttgtatgcaaagcagcaggaaaaattacggtctggatttaagatcaaaccagaggataagatcagtcagttaaaggtggtgctcatgagtgctactctgcagttaaaggactttatttcaaatagaaggttgtttggcgtgatcccaccagctgttaaggtacctgtgcggcagtttccagtatcagttcacttctcaaagaggacacatgatgatta

SEQ ID NO: 24166 - DNA, 123 bp, Zea mays
  Clone ID: MRT4577_122045C.1
tttacacgtgcccctactctaccgggaactttttcaaccatcaatgagctcaaatcgcaaccactgcacgatgcaacacaggtcttcaatgacgacagtagtattccggaaaagctgcactga

SEQ ID NO: 24167 - DNA, 252 bp, Zea mays
  Clone ID: MRT4577_122046C.1
ggaagacgcagctaacaactttgcccgtggccactacactggtaattcaccatgtgtatgtgaatatgtaataggagtgggtattatgcttctgtgactgtggatatgttcaattctaattatgtggaatgcagttgggaaggagattgtcgatctatgcctggaccgtgtgcgcaagcttgcagacaactgcactgggctgcagggattcttggtgttcaatgctgttggtggtgggactggcctctggac

SEQ ID NO: 24168 - DNA, 372 bp, Zea mays
  Clone ID: MRT4577_122047C.1
agttggttcctccattttgagtggaggactgacttgtcttcgccatgctgatggggtttcccgtggggtactcggagacgcccaagctgctgctgcacctcctgttactccaggaccacctgcgccgactctcctcctggctgctccgcctcacgggcgccgccgacgccgacgccgacaccgacacctgccaccctcgccagccctgcgccaacgaccaactcctggaggagcactccaccgcggtgcgcttcaactcactgacatgcggaagcggaggaggggtgacggctcctcacccaatgcccgagggctgctgcatctgcctgggcgactttcacgccgacgacgaggtgcgccgcgaccggggct

SEQ ID NO: 24169 - DNA, 276 bp, Zea mays
  Clone ID: MRT4577_122048C.1
gggagggcaaaagggcaaaataaactggtgcccaatggggccaaaaaaaaagcttttttttaaagcaaaaagtaaacggggccttcccctttggtaaaaaacaaacttcttatggtgcactttacgggctttggatgggggaatttttaacccccctgagttcttgaattggggggtttttccccggccccatggggggggggcgggtttttttttcccccttcaagggggactggaaaaagggacccccctttttggggggatttttgggaaaaa

SEQ ID NO: 24170 - DNA, 467 bp, Zea mays
  Clone ID: MRT4577_122049C.1
gggggaaaaccccgggaacctttcgggttttcagggggggttgggaaaaatggcccccgggtttaattttaccaccaggaaaataaggtcaaatgggaatgggccttaaattaaggggggcccccctccgggattttcaacccccccggcgggggcccgaaaaaacccccaatttgatggatttgttggaaaaaggcccaatgttttaagcttccctttacccaatcccatgggagccaaattgggggctttaaaaagcaacttaggagcaatagtttccacccttggggccttaaaagggtcaaaaactttcccaacaaaacggaaaacctttaggggtttcccccaaccaaaaaagggaattcccatgcttaaaaaggggacaaggctccctgccctctccattataaaacccattattattaagttttttaaccgggcctgcgcaacttcccaaatttttttgg

SEQ ID NO: 24171 - DNA, 250 bp, Zea mays
  Clone ID: MRT4577_12204C.1
tggctctcaatgctggcggcggcactccctccatccacactagcttaagagaggcgctccctactccctcctctaggagcaagccgcgaggctccgacccctcgcgcggcgctacgcgcctacgagctccctgctttcagcgcggagctggcataccgtcactctcgggactgagagaggggtgatctatcactgatctcggaagacggaagactccctgctgacatgctcaccttctccccgcgccgcg

SEQ ID NO: 24172 - DNA, 589 bp, Zea mays
  Clone ID: MRT4577_122050C.1
aacctcttctacggcccgggaaaaaaaaacctgagtttcttctacggccgcctcgagcagcgcgtgccgacttgataccctgggaaagagtccatggcgtcctctgcccccggcagaggaggaagacagctgatcctactaccggccgcggcggcggctgtggcggtaatggtactaattggggcggaaccggcgttggcgtgttacccgcgcgtgttcagcttcggggactcgctggccgataccggcaacttcagattctactacggcaacagctccggcgagcccgcactccggcaaccctacggcgagaccttctttcgccgcgccacggggcgattctccaacggccgcctcatcctcgacttcatcgcggacacgatggggctcccgttcgtgcggccgtatctgagcggtcgccgcgcggaggacttcgcgtccggcgctaacttcgcagttggcggcgccacggcgctcggcccggacttcttccgctccaggggtttcgacatcggcgacggacgtgtgcacctaggcatggagatgaagtggtttcacgatctgcttgagctcctctgccgcagcggcc

SEQ ID NO: 24173 - DNA, 1017 bp, Zea mays
  Clone ID: MRT4577_122051C.1
cattgggtacctcgtgacggagccgggttgttgcctcgttgaggaatattccacatcccctcgtttccggcaaaccgcaatgaagtctctgacccccaccgccgctggctccgccgcagatttttccgactctctgccctccccgatctcccctgcggcggtgccatgccattccagccccggccgccactactacctcgccgtcgaccgcacccagttcaaaatgaggacactcttggagctcctgggggttgtcgcggatcgccgtggtgggctgccgattgcaacatgtgtttcctcccgtgatgagcttgatgccgtctgtgctgccgtcgcaaacctcccctttgtgtcagcgtcacctctgtatagtgatcaagctgaagcagagcgtgcatctattcttgagaactttcgtcaagaaacaactcagtggaataaaactgctaaagctaccaatattgccgaaagttctaagcttgaaagtactggctctaaaataagcattatagttgcaacagatgcttgcttgcctcaggcagcgatggcagaggcaccccttatggctcgagtgctgataaactatgagcttcccacaaagaaggaagcttacttaagacgcatgtcaacatgtttggcggcagacggaattgtgattaacatggtcgttggtggtgaggtggttacactcaaggctttagaagagaacagtggtctgcttattgctgagatgccaatacatgtttcagaaatattatgaccgttccagttgtacaacatttcagaagttactgttctgattgcacactaactactcatggtttacttctactttaatttttgaattgcttttcatgtttcagaatgttctcaaattatatctctaaagcattagaataatgctcattgcttcttttttcctctgtataagaaatgatagaatatagtcatggttcaacatccaaaaaaaaaaaaaatatagcggccacatcgtatctatgttgatgcttacaagtc

SEQ ID NO: 24174 - DNA, 960 bp, Zea mays
  Clone ID: MRT4577_122052C.1
aaccgcaatgaagtctctgacccccaccgccgctggctccgccgcagatttttccgactctctgccctccccgatctcccctgcggcggtgccatgccattccagccccggccgccactactacctcgccgtcgaccgcacccagttcaaaatgaggacactcttggagctcctgggggttgtcgcggatcgccgtggtgggctgccgattgcaacatgtgtttcctcccgtgatgagcttgatgccgtctgtgctgccgtcgcaaacctcccctttgtgtcagcgtcacctctggtagttcacaaacacaatttcacctccttagttgtaacttcctctatgcattttcatttgttctattttctctgaaattttttggtggcttggaagcaatatgccttcatctagtatgttttctctgaaaatatatgacgtttatcaccaacataaatatttttatgaacccataaattgttgcacaaggtcctaacaggtatatgatccttactattatgatgttcttacttcacatcaacctccagatattactaatggtcttctatgtacagtatagtgatcaagctgaagcagagcgtgcatctattcttgagaactttcgtcaagaaacaactcagtggaataaaactgctaaagctaccaatattgccgaaagttctaagcttgaaagtactggctctaaaataagcattatagttgcaacagatgcttgcttgcctcaggcagcgatggcagaggcaccccttatggctcgagtgctgataaactatgagcttcccacaaagaaggtgagctttaactatatttctgtgcatatttgttgcttttagtccattttatgcaaaaagcatgaatctgtgtatgctctctttcttatttgctactccctgtgtcccaaattataaggcattttggctattgtatagatatttttactatgt

SEQ ID NO: 24175 - DNA, 269 bp, Zea mays
  Clone ID: MRT4577_122053C.1
cccacgcgtccgcaacgatttggaatttggagaaccctatgctggcctcccggacactgctgcccgcgtctttgatgctggcctcctcggcgcattcgccatggccggccacgcggaagacgccgaggtgcggttgcaggagatggtggtgacgtgcggtgacgagagcgtcgacagctacacgctcacggatgctgttgtgtacgtttaattattgggatgtaattattagtgatctgtgcagataagattttggggaaaaaaaaaga

SEQ ID NO: 24176 - DNA, 309 bp, Zea mays
  Clone ID: MRT4577_122054C.1
cggaccacacccttccggttgcattgactcggtttgggccaattttttttgtttttggccgggaaatgccggtggcataattatggaaaacagaggggggggccctagcctcgaccctgttttggaagccctttccttggatgccattggattaatattaaccaatgccctaaaaaaccaagggccaaccaacttgtttccacatgatgggaaatttgttgaactatccgtttgtttcattatttaaattttctcattatcccctttattgaagtgtaatccccttaaaaggttttcgattgttacttt

SEQ ID NO: 24177 - DNA, 253 bp, Zea mays
  Clone ID: MRT4577_122055C.1
gtctcagtgaaccggcgaggtctgactgatacatgtctatctcaacaaaactagctgacaacagcaactagactcgtatacatctatcaggctatcatatcttacacattgattacatggtgatgcctcggcattatgcgacctacaagctctaagacagcagactaatcgctggtgcaacattcacgtatattcagcgaactttctgttccgctgcctgatatgaccaatgaagtcagcacgatcaactgtc

SEQ ID NO: 24178 - DNA, 525 bp, Zea mays
  Clone ID: MRT4577_122056C.1
gttggtcaacacccacgtttattaattgtttaattgttatgccttggaaagaaatacgggcttctttgtcatgggatgttaactcttttattaacagggttaacattgtatttgctttgtggatttctcttttgaagttgtggattcaataaacaacagctgggcttcctcagctcctaggggacaaggcaaatgcattacagtcatagaggggagcaggacaaaatggagaacaagcttgaaaaaatttaaggcaaatgtcactcccatagtcaagggaactgatcaagcaggtctgcatttcaatgaaaatatatgaaatatttgtcaaaataattaacatcggtaaaaattagaacatgtagcttataaaatgcctacacaggtttggcagaaatagacccaactgtgtcattaggctcatagtacatacagacacaggaccatccaccttaagagcaagtctcccggtgagcagaggccaagcatatttcaaaagcaattccacaaaatgggcagtgatca

SEQ ID NO: 24179 - DNA, 419 bp, Zea mays
  unsure (1)..(419): unsure at all n locations
  Clone ID: MRT4577_122057C.1
ctgcgaggtcgcagatccgcccggctagacgaagccgcccgcacacatggtctccggtgagctcgcctgcacctacgccgccctcatcctcagcgacgacggcatcgccatcgccgccgagaagatcgccacgatcgtgatggcggccaacctcaaggccgagtcctactggccggcggacntcgctaagctcctgcccctccgcggggccggctcccggtgctctccggcctgccgctggcgggcctccacggcggggctggccctgcccacgacagtggtgctgccccgccgccttccgctcggtctcccccccccccccccgtccgcaaggagcacgcgacgcccacctcgtccgccgcgctgagactaagggggcccgtcctccctaccgtgcctcgccgcccccggtggggccc

SEQ ID NO: 24180 - DNA, 424 bp, Zea mays
  Clone ID: MRT4577_122058C.1
taaggctatggatttatctccacatgaagcattatgtcatagttactctgatagggcaaagaggggaaaaataataatgggaaaaaaaaaaaaaaaaaaacaacataaaataaaaaaaataaaataaataaaaaaaataaaaaaactcttaactataataaaaaaaaaaaaaaggggcccccccttttaaagaacccaactttccttccccttccttcccaccttatattttttttttttgtccccctaaattaaattcccttccctcctttttccaccctctttacttgaaacccccttttcttccccaattattccccctttcaccaatcccccttttccccctttgtttttataccaaaaagccccccccccttcccctttcccaaatatttccctctctaatctccttatgccccccccc

SEQ ID NO: 24181 - DNA, 518 bp, Zea mays
  Clone ID: MRT4577_122059C.1
cctgccgggcaggtggagacactaaagcaagaacagctgtggttttgcataaagacgccaatgtgaagacatcctgaaaaaactggcgttgggacagtgcacaggaaaagtactaaggctcgtatatgctggctacttaccggtatttgcacaacctaaacgaacagctatctgtaacaaaacacgtttaccttaggcggaggcggagaacatctctccatatgtggctgccttttgcccactttacgccaccagcacgaggtatcccacaccccaggagccacggctgcgtttgacaggcgggatgaatacatctcataacgactaccaacttgatgatacacaaatgacagatgctatgagggggtaggtgttttcggggacataggcatcgtgttcaccggagcgtgaacgttcttcccctctcgggagcggccatgacacgccgacgtgcctgtcagattcctttgtggggaaggtatgtctaaatctcctacagccatttcaccaatctagcg

SEQ ID NO: 24182 - DNA, 352 bp, Zea mays
  Clone ID: MRT4577_12205C.1
tctctccactctatcatctcctacttttttccatcatccaactatttcaatcccaggtgcccttttaacccaactcctcatatccaatcctttttcataaactactcatccttttttccaacttccctttcctacattaatccatttaccataatctgttcaccttttacacctaattctttataaatactacctatcttttactgaattctatcctccttattttcaatctccctctctttctcacctaacacctctcaatctcactactcttccaacactttttccctacctcctgcttaaccaattacaacattttctatcccttaatcatataatataactcttacct

SEQ ID NO: 24183 - DNA, 351 bp, Zea mays
  Clone ID: MRT4577_122060C.1
gggggaggacaactaagggtcccatgggcccccccaaaaagtaaagcgccccgggaacaacccatgggtaagaacaggcggccacaacaggaacaacttcacccactccttttggacaaaacaaattccgatttataaaacagaggggaaaaaaaggaaagctccctaaggggggcaaaaattcttaagggcttcttccttggggaaggtattcgggaagagccttggggggaagggaaacaaacccttggacaaatttcggagggggccttcggccaccccaggagccaagggtatatcttaaaggggcttcttgcccccggagaggggggttataaagaaaaagacggg

SEQ ID NO: 24184 - DNA, 733 bp, Zea mays
  Clone ID: MRT4577_122061C.1
cattgggtacctcgaggccggccgggatctcgtgtggcctctatcgatctcatacgtcaagaggatgctgtggaggaggttcgacgccgccactgcgcgttgcagctgtacgacttctgttccgcggattctcatcctactcgatctcttctgtccattctgaacgtgacctacgcctcgtgtgcgctctccttcgctacgcactccacgcagatggaacgcacgtaggaggcgaccgctgataacctgtgacgggggaacgctacgcttgagaccttcgattctatcggagcaagtcatcgaagcctctcccgacgttgactagatcggcccacacgactaccatctcgatctcagtcgaggcctacacaggcactatatcatgtgcctgcggaatacggccgctaagattctctaccatcaatcaccaaggcatagtaaccgaatgccggtgataacagcgtcagacatgtactgagtacgtcatatgggacaagccgcagatcatggatggtgctttggagcagagtgctcccgaaataactgaatgtcttggatgctaacggatgccactattacctgctctaccgatccagtcgaagactatctgtaccggcgattatgggcccattacttcgagctgtaatagggaatttggcatgtcgcttctatggtcaggcgaacgccgatgatctctatgatctgaactgcagcaacaccaacgttgttgatc

SEQ ID NO: 24185 - DNA, 412 bp, Zea mays
  Clone ID: MRT4577_122062C.1
gtccttaaagagtttcacctaggtgtcgacatgcgtggagtagggtttacagtcggacatgtcagcctgctccagaatgtcgaggacatactagcgctggtgaaggaagaggccttggggctgacgctccatgttgatctcgaggaagtggtggagagggcctaggtccttcatcgcgaactcgcgctgaagggcgacgatcttgtgctgaaggagggaaacactggacggcgtgagcacgatgtcgtaaacgtagagtaggaggtagatgatatcaccgttgcgccgatggatgaacaaggatgtgttcgacttggtccaacgatgccaagggagaccaagtaggaggtgaagcgactgtaccaagccctcggcgcctgcttgaggccgtatattttaagtggttcggaca

SEQ ID NO: 24186 - DNA, 228 bp, Zea mays
  Clone ID: MRT4577_122063C.1
atggatcctaaggggaagggaatcgtgatcaacgataaggagaaggagtccttcgtcaatgagcttaaagatgacaagccaaccgactccggctcgggtcatagacaaaaggaagggaagaagaagaagacgaggcgcatcaaggagatcgtctactacgatgacagtgatgagtctacttcttcccaaaaggacgacgaccacaacgactacgagcaaaggaaaccg

SEQ ID NO: 24187 - DNA, 361 bp, Zea mays
  Clone ID: MRT4577_122064C.1
cccacgcgtccggacatctcttcttacccgtctcttcacctcaactcacatcgggctggcctcgtcttccttctgttgctctccatctcggcgaaacctccacctcacacgccatctacactcctattcttccgaccagcttcacctcagtacacgcccccgccgctcccgcctcatatgccgaccccgtgaaaagcccacgctccactgcctccatggttcacgccgcggtgctggatctgcctcttcaaggaccctagcagtgcaccacgccacctgcttacaaagcgcgctttctacctctcctcccactccggggaggtgtccctacccgtagggaatgtggacgatggatacccac

SEQ ID NO: 24188 - DNA, 875 bp, Zea mays
  Clone ID: MRT4577_122065C.1
cattgggtacctcgaggccggccggggtgagcgctttcttccttcagccttctcgttatcctgaacgcggcaatctccgaaggtcccatccaaaacctcgccgccggattcgcacctcactctcgcccgcgcactacgaattgactgacgcctacgccctaccgctgcaagcagcaccatagcgggagccgctaccatggcgtcctgctacaacccgtggcgcctattcccaggcatgtcgacggcggtccctgccgggcccgtcacggcgccggctcattctcgcacctgcaagtcctcgaaagtgttcggtgctttgcctcaccggaggggtctgctgttcctgggcacgcggcgtgccaggatcaagtgcgtcaaggacaactcgctccatttcgacccgtcgaagatagaaccgccaccgtactccagctacttcgactccacatccggtcagctcgagccggcgtcgggcgctcgggcaagcatacccgggaaggagtactggccagagggcacggcggcccgcgtccgtgccgcgcgagcgcctgctccggttggggagtcagctgggatgccatcatttggcacgaagccggggagtaggaggagagggtataaggagcaggtgacgtcggcgtcaggaacggagggtgcacagactgatgacagaaaggatggtgatgaacctgatgtggctattataggctctggggacgatgcattggaggagataaaggattcggggggatgagtatgtcatttatgagacacccagagaagaggagctgagtgagtatgacatggacaaaatgatggggcggccacacccgttcattgatccagcaaaggcaatgtcactaggggagccgaaa

SEQ ID NO: 24189 - DNA, 356 bp, Zea mays
  Clone ID: MRT4577_122066C.1
tggacacgtgcgatggtctcgactctggtactatatgctaccaagacgctgactctgagcgcgactgcgatgacgaggcacatgttacgtgatgcgcaacgagttgcacagatggccgatgcctgtgataaaccaggttagtgccgactactacgctgctctgcctaccaccacatgccttgctaaggcatgcatggcggacctgatgcttccagtctacgcttcccatgccccgagaaatagctaccggtgctatgcgcttggctagtgtgatgactgctatcatgggagactcagcagtgccagcttatatgtgtctatgatctcgcagccgagcacttggaaatctgggccca

SEQ ID NO: 24190 - DNA, 669 bp, Zea mays
  Clone ID: MRT4577_122067C.1
ggtcagagatatggcaacacttcattaagataaaagatgataaaggtattgttaagactgctaggtgcaaatattgccaccgaaacatgaaggcagaagctggccaacatggcacatcttctttgaagagacattttgtcgtttgtaagcgcaatccaaataagttcaataaagatccatcacagtgtattctacaagcaacacattgtgaaggtatcagcactttcaagtttgatcaagaagcattaagattggctttcgcagaaatggtcatagaagatgagcaacccttttgctttggggaaaaaccaggattgaggaagtttctatccaaagcttgtccatgatttcaacctccatctagaagaacctgtactagagatgtagtgcgttgtttcttccaagagaaagctaagctaaagaaattcttcaaagattcttgtcaaagggtgtgcttaacaacagatggttggacttcacagcaacaggatagctatatgacagtgacagctagttttattgatgaaaattggaggctgcataagaaattaattggatttttcatggtaaaggggcataaaggtgatgatattggaagaaatgtgctgagatgcatgactgactgggggttacagagagttatgacagtaacagtggacaatgcaagcg

SEQ ID NO: 24191 - DNA, 581 bp, Zea mays
  unsure (1)..(581): unsure at all n locations
  Clone ID: MRT4577_122068C.1
caatttatagtggaaaatgtgcaatatgagnacactcttcatgttgtagacttagtgtaataaagctattacattgcacaatgtacataaagtgttctgggaatagcacaacatacacaaactgttctgtgatgcgagcaatcaaactttttagtaatgtctgtgttcaaatatctatttgtaacataaaattgatgatgtagatttatcagggaccacatcttcatggtattattagacatgggttttataaactttattataatagaaattagtggtcaaagtggcattgtggagacagttgacgacttgacgtcgtgatgatgttcttttgtgagcactgagcagatggcatgtcacgtcaaaaatagtgtggagaccactacaaaggctttatgtgttggtagctggtgtctttgggataatgggttggggaatttggaagcaacattcttatacacattactggatccttgtcagttgtggttttgaaagtttgccagaaattttggacaaactatcttgaacaagaatttggagattagtcaataccttagagagaatataacctcactattgta

SEQ ID NO: 24192 - DNA, 713 bp, Zea mays
  Clone ID: MRT4577_122069C.1
ggggtaccggggcccccccctcgagtttttttttctttttttttttttttttttttttttttttttttttttttttttttttttttttttttttttttttttttggatggccccccacaaaaaaattataaagggattcctttagacgaacgaaaatacaaccaatccataagctcccgcttttgggtaatgaaaaaaataaagccatacccttttggccaacgatgtttaacaaaatgactcccggataaaaaacaaaacatttccccgggtcacaggcctaaaataaatagccatttgggccgataacctagttaaattaaccaacctccccttttttaaacccggaccggttttatacacattttaaggcttgaggggaggaaaaaattcagtttgccctcccccctgaacgatgagccacccttagccgttttttttttcctaaaacattttttttgcctgggcagcagccaataattttccgttactttaagggacaggggacccatgagcctgagcattcttaactccaaaaggattgcctgcagaatttagctaacattttgaactgggcttttaggactggttaaatggaaataaatattttaagttcaggatggggtcaccaaatccacccagtttaattgaaggggaagtaatactgccttcctcatggacagacttttgttgaatcaaccgatttttgaatt

SEQ ID NO: 24193 - DNA, 284 bp, Zea mays
  Clone ID: MRT4577_12206C.1
taaataaaaatttttttttttgcaaaggggtggttggtacccgggggtttatagacattcagatcctcagtcatgcatggggccgggatttaatacgggtaaacatgggcctggcaaggggggccacacattacaccgtttttacttattattggacacaatttttgacgcttgccgagaaaacgaagcgggtgcaggttttcaggaacacgccttttttgacgtagccccacgcccaccacctttttttccttagttttacacttttacttaccacaagggag

SEQ ID NO: 24194 - DNA, 305 bp, Zea mays
  Clone ID: MRT4577_122070C.1
caacgcaagaaaaccaactgggccgggatgctttaaatgcacttacataacatataataaaatcacacacatatggcggctggcgtgtacacccacaaaactaggctatatacaggagtggaacacacaagtgtgactcttgcactgcaatatggtctatacactcgacatctatttgtctccttcgcctaacaaactcatattcatgggaggcctttccaagcacaaaatattcatatgctcatgagcgaacccgatccgcatggacggctctgctgcaacttgcaagggataaaacaataatc

SEQ ID NO: 24195 - DNA, 348 bp, Zea mays
  Clone ID: MRT4577_122071C.1
ggacaagaaaaaaaaccaattttttggggagggaatttccatccaacgcccttattatcccaccggctcttccccacaggcaacccactggggaacctacgggtttgcacatggctaaagcttttcgggaacccatttttcggggtgtttcccgcgggcgcggagaaataatgaaaaccccgtgccggcccttttttcgggggcgcgcaaaaaaaaagcccttttcttattttttccaaaagaggcaacaaaaaaaagtttgtcaaacaagcccccctgcgacgagtttcatggcagctgtagagcccaaaaatgatgccgactaacgaatgtttttcgctctccggt

SEQ ID NO: 24196 - DNA, 190 bp, Zea mays
  Clone ID: MRT4577_122072C.1
tatttattttgtatctgtagggcatgccaccaagatccactgtgcatccaatgagagtaagcggtgcttctcaatgcgttgtcagttatctgcagttaatgaggctaataggctgtaacctgtaacagaataaactgctctatctttggtgcagtgtacttgtctctttaatttcatttctgatgcattt

SEQ ID NO: 24197 - DNA, 733 bp, Zea mays
  Clone ID: MRT4577_122073C.1
ctcggttttttttttttttttttttttttttttttttttttttttttttttttttttttttttttttttttcaacccaaaaaaaacggacctggttggataaccccgacccaaaacggccttactggaaaggaaataaacaaaaaacaggaacaaccacaaaaccccaggcgggaggggcacaaagggggccccggcccccattccccccaccaaaccagacgacccaaatttttttaacccaatgtaattcgaagcccgaccgggcccttgttttatttacaacacacaccttgtcacacagggaaagagggaaaaaacccggcgggttcgggttgacctaaaaagaaggccccagcgcgcccaacgcaatgggccccccccccccccaccctaaaacatgaatcccccaacccgttgcccccccccgaagggggcgaacgggccacggcctaattggtgggccttttgggccacctaaggggcgggttgggctttttggggctcctaaggggccggttaacccgcggggggctcttaaaaaaaaaaaaaaccctgggcctaaggggtggccggttttgtttttgtttgggaagggggcgctgccgtttcctctttcactttttaaccccccgcgggttcgggttccggttccccctcttttgccgttttttcctctttgggggttttttcctccgccgccaagggggccgcttgggcctaagggggggaag

SEQ ID NO: 24198 - DNA, 252 bp, Zea mays
  unsure (1)..(252): unsure at all n locations
  Clone ID: MRT4577_122074C.1
aggcactcaaacgnaagctcggaacccctatcgcgatcgtttcttcctcctcctcaacaaccgtgcttgttacatccaacattttgacggacaaacacacgcccaataccaactacatgaaaaactatccaacctacatctacctagctcccaatgcctgtcctaccaaaacctaccgaacaaaaaacaccatcaaactaacaaaaacactcacttacacaattacaccaatatccacaactgcactaccca

SEQ ID NO: 24199 - DNA, 194 bp, Zea mays
  Clone ID: MRT4577_122075C.1
gtccgaaaaaccttgctgtcctgccaccatggggctcgtcgctctcgtcctgacctccctcgccatttcgacggcttgggggctgccaccctcaccgcctattgtggacaccgctcagggcagagtcctgggaaaatatgtcagcttaaaaggatttgcacagcctgtgggcgttttcctgggaatttcttttg

SEQ ID NO: 24200 - DNA, 260 bp, Zea mays
  Clone ID: MRT4577_122076C.1
ggccgcatctatggagggatgggccattcattaaccatgtgcaaaacaatttccagtctcaatttaatcaatactagagtgcttgtacatgcaacaggctggccatgcatgaaccatgacccatgcaacccgttaggttcctttacaacactcatgcatctatctttgcacagctaacaactcaccgatgattaaaaacgtatcctgctccaccaacactgtaatataacctgagggtggcgaacacgtttttattaacg

SEQ ID NO: 24201 - DNA, 170 bp, Zea mays
  Clone ID: MRT4577_122077C.1
atataggacctctcacaataaacaacgatggaaacaggaagacgcaagcggcgacaaattaaagggctttctaacccaaccaaaccggtctccacatccccacaccacagaccaagtgtcacaccgatgccttgccacgcattattccttactggaagcccctcaatttt

SEQ ID NO: 24202 - DNA, 312 bp, Zea mays
  Clone ID: MRT4577_122078C.1
agaaaaaaccttctttttattaaaaacatggcagaatggggcagggggggcactggcacctcccttcctgggtccccttggaaaaaaaaactatacgtaaccctgctattgcactgaaggagcgcaagttgatcaatcgctttgggtttgggccatatacagacttgacgcgggcagaaaagaagtctgaacttatttcgtaaagaagctcatatagagagctgaagagtagcccgcccccatcccatgcggaattcccccccgcgagatcacttggggagctgatcctccttggtcgcttcctccagctcc

SEQ ID NO: 24203 - DNA, 219 bp, Zea mays
  Clone ID: MRT4577_122079C.1
gtcaatgagtgcttgtattcctttaaacagtctgacatatttactcgtcactttcaaaccagaagcatgaaaggaaggagatattgtggggtccgtttaactcgatagaaagcgcagggggatggcccccggcgcaggctcttgacccgctcagcgctgaccccaccgccctggccgaggcacttagccttgatgagctggacttcctcctcatcctcc

SEQ ID NO: 24204 - DNA, 279 bp, Zea mays
  Clone ID: MRT4577_12207C.1
gtaccgatccgaattccggcacgaccacgcgttctgcaaggaagctgacaagcggtaggggctcaccggccgtaccgctgggccaccctgatctgctgtgaagggctccagcgggaacacacctatcgggacccacaaaatggtgaactatgactgaccggggcgaaccatcagtaaactctggaagaagatcgaaccgatactcacgtccaaatcggtcgtctgacttggatatatgagggaatgactaatcgaactatctatgatatggtgccacta

SEQ ID NO: 24205 - DNA, 483 bp, Zea mays
  Clone ID: MRT4577_122080C.1
gctggtagcgcccgcagcgtagccgccggcgccggataataatctcgccggggacgacgctcattatttcggcggccgcccccctggtttttaagggtgtttttgacaaagacagatccacaagtatacttacccggggatccaatcaaatccactcggatccagaaggaaggacatggggaccagttagagttctacacttcgggacgagaaacttttctattgacaagtacagagtagctcgaagagtgaaggctcttgtgttggagctgtattattgaacataaccgacttttttaacaaatagtgggtcctgaatactaactcacattgagggtgccgaatgaccacatataaaacgaccgatggacacctctattatgtgtgtaacacgggccattgttatgggccacaagaggctgtgcctttaaagcttcaaaccattgacccaaccaatgctacccacaacctaacattttccag

SEQ ID NO: 24206 - DNA, 430 bp, Zea mays
  unsure (1)..(430): unsure at all n locations
  Clone ID: MRT4577_122081C.1
ggaaagaatgaaagtaganttntaagaatgaatgtaggttgaaaaaatgaaggattagattatgaatggatagaagtatggtttataaaagnaaaaatntttggggggggggggggaattatagangtganatnaaataagtggnnataaaagattggagaggaaggggaatattataatgtgttaaagggtgataagaaaaataaaaaaaggaggatagaaaaaanngagnaaagaaaaaataaaggatggaaatggtataaggaaaatgatgatgtaaaaaaaggagatgattnaattgggatagagatgnagtntaaggggaaaggnttggnttgattgaaaggaaaaggtatggaggggaatggggggaggaaaaggtnaaaaaaagatagggggaatnnaagttggaaataaaggggaaaaattt

SEQ ID NO: 24207 - DNA, 154 bp, Zea mays
  Clone ID: MRT4577_122083C.1
gacaagctatattgttttgtttcctttagctatctacatatcttgctagtttactcatttatcggtgatgagtaacgtattgtcacccatcaccatgggtggcagtgtgagcaatgacctgtatgaaccattgtaatggataggaataatatat

SEQ ID NO: 24208 - DNA, 293 bp, Zea mays
  Clone ID: MRT4577_122084C.1
agccctgtgtccttcagagaggctagctgtacacaaggaggcactaccagagaatcaagtttgaggagtggcccaggcttccagcctacggaccatggaaggctcatcgatgggcagttcatccctgctgtcatcagagccaccacagatcatcatcaacccagcccgacagaagatggtacaaaagctggccctgtatgaagagggggtcttggatagcctgcaactgctgtcatcaggctttttcccaggactgtgattagaaccctaaaagagaaagagaccttaagaaa

SEQ ID NO: 24209 - DNA, 166 bp, Zea mays
  Clone ID: MRT4577_122085C.1
acactaacgaacgaactcttgctcctttcactatctagctgaggtcgaccatatcgggtgtgcttaacagcacaaagagtccggcacaaaaaaccactctttttttttttcccccccctatctttctccacttttactcccatcacctcactactattttcatact

SEQ ID NO: 24210 - DNA, 240 bp, Zea mays
  Clone ID: MRT4577_122086C.1
ctcatacattatttttttcttttggcctgtaacacttcaagcacttaatggctcatctacagtcttagtcagcacctaacaagtctcgccaatgactttcctgccttttttgcttaaccggtcaaagttaccaatatgctcttactatttttttctattttggcttttaacacttcaaacacttaatggctcatctacagtcgtagtcagcacctaacaaggctagccaatgactttcct

SEQ ID NO: 24211 - DNA, 1111 bp, Zea mays
  Clone ID: MRT4577_122087C.1
ctcgaggccggccggggggtacccgtacgcaatccaatatcttcgtgctccagcctaccctagactccgccgccaccaagtgatcgaggtcgtcgtcctgcgccccggccctgtggcctctgtcgatccgccgccgcgcgccaaggagcaggctaatcatcgcgcgccgtcgttgttcgtcatcgactacagccccgtcttcccccaagcggccaccaagtgatcgaggtcgtcgtcctgcgccccggccctgtggcctctgtcgatccgccgccgcgcgccaaggagcaggctaatcatcgcgcgccgtcgttgttcgtcatcgactacagccccgtcttcccccaagcgccaatgttcgtccccaactccatccacacggaacacgaggtgtcaccagtctttgtctgtgcgaaaaaaataaatctggattaggggacggtggcgagtcgcaagcggccgactgccaccatcgaggagtagtgtgggcaggctgccggcgagggcaagtgtgcgcgactaccgcgaggacgagtgtgagcgggctgctggcgaggagtgtgtgtcgatagctggcggggacagattcttggatcacatccattggtttttgtgactcgcgtgctaaaaagggaaagtactctgccacgaccatacttaggtgtagagagtatgggagatgctctttttatgcccgttgcatggccaacaaacaagatgggtcgtaacaaaaaatcaacgttgacccaaggttctacagcagcagaacttattcggtgatcttttgacccatctttgctgataccgacaaagtacgcatgctgctgttgtcaagggaagaggtgctggaagcaaggatcagagtgcttgaagtgtgtgaaaaatgattactcgcatgcatgctagccgttggcgtaacacccagctgatggagagattttagtttgctagatgaatctttagactttgcatgtaatagaactgaaagatcacttcagaatttagaaaacatgtatgctattatttttatatgttcatcacacaaattgtgttccaaaacaatatatgttggaattcaaagtcaaagattgatctctttcttttagtaatc

SEQ ID NO: 24212 - DNA, 454 bp, Zea mays
  Clone ID: MRT4577_122088C.1
ggtatctacatactactatttgtttattacaaggtttatgttactccaagcggcccgtacgtagcataccttcccaaggaacgctgaaaaagcccgcaagagccttggggcctgaccaataataagccccctgttttcttggttgccatttcaaccgcgctatatagaccaaccacgttctagatggccagatttacatcacgtataagccatcacaaccaggcacaagccgcctggagaccattctatctcactatggcttggtagttgattgtcacaatgtacatacaatcaatctataacatcagtaaccttgtccttgcagaacttcatgcaactggcctctcctgcgatatcacgatcaatgcaatagtctggctacagattcaaaagcgttgcgactgcagacttctagcacgtatagctccttacttaaaaagatagctaccttact

SEQ ID NO: 24213 - DNA, 165 bp, Zea mays
  Clone ID: MRT4577_122089C.1
cgggttctggttgataacaacacgcactatgcggggcgtacactggttgaactgttcggctagatcgtttcagacctgtctgacctgtttgttaacatggaagcgcttaaagtgctgaccttgtgctacatctacatcagtgcactcagagcagcgattcgggat

SEQ ID NO: 24214 - DNA, 295 bp, Zea mays
  Clone ID: MRT4577_12208C.1
ataacacaaagtcgggctctagtgtatattttgggttatatgatatcatcgcggaccaattaatatatggatacagcacatgcaattggatcaaccaacatgcaggtagacacacatacgtacattagcacaaagactgacgccaaacatccagcgagagatagcaaactgcacaactctgtttctctatgtctcacacacaccacacaatacctatgtatggcagcccgctccgcctcgcttattattgcacaaccaccaccaccagctatatagataataactcatatccatg

SEQ ID NO: 24215 - DNA, 441 bp, Zea mays
  unsure (1)..(441): unsure at all n locations
  Clone ID: MRT4577_122090C.1
gtgtgaaattgtaaacggttaaaaattttnnataggaaaaagttattgacttgattttgccaagtttggttnngagcttggatccattagtaanggnntgacagtgttttggaatttgcccttaagcagtggtaacaacgcagagtacgcgggccattaattctttggtagtaggttgaaacttcaagaaatatctgcagttgagcttgcacaagtgttggaatcctttaccgctttgtagatctgctatgtgctaatgtcgctctattaagtacagaaagcaaattgtggtaacgttttatatatcgaatatatggtgatggcacttaagccggtgcatggtaaaaaaaaaaaaaaaaaaaaaaaaaaaaaaaaaaaaaaaaaaaaacaaaaaaaaaaaaaaaaaaaaaaagtactctgcgttgttaccactgttaaaga

SEQ ID NO: 24216 - DNA, 285 bp, Zea mays
  Clone ID: MRT4577_122091C.1
gtagcatcataaatggtattttttgtgtttataaagagttataaagctcaaaagtccgactgacattttttaccgaggtagaacatacgcgcgcggaacgcaccggacagcagaagaacatcggagagaccgtgttaaccaactaagggcaagtctggagagcgctcacgagagggctcctcacgacataatcatgcccgggggacaggcacgttacggttccgtcggccagcttctgctatatggtggctccggatggggtgctcactgtgacccgaaacgtgt

SEQ ID NO: 24217 - DNA, 471 bp, Zea mays
  Clone ID: MRT4577_122092C.1
tttgggctggattatgtgcttgtttatgtgcttgggtttgtgattggatctccgttctggtaagtcttataagttcgagctacgcatgtcgtaagtatataaaggagataaaaccaaggcctatcactgcgggatatcgatcgacggactagcccctgacctcagtcacgatagaggcgatttgcccgaacctatttccggaaacggttaagcgacaaaaggccgggattaaggaccgtctggcacgcgtgcgggcgaaaagaggaagtcaaagacattcgtaaagacgggccacggcgagtgaggtcttttattaaagaccttaggcggagtaatctcgactccttatatggagtccactgttgctaatgggaagatacttggtggcgtaaaggtagagagcgacagcgagtctcgacataacgtaccggagagccttaaagtctgagaggagcagcagtagtgctgtac

SEQ ID NO: 24218 - DNA, 223 bp, Zea mays
  Clone ID: MRT4577_122093C.1
cgaagagcagcccaggacgacaggtctgttcttccataccgaggtggtaccgtcaccgccaaggcgagtacgataggtcgagatggaggacaaggtgcacatgccatcagcacctcgggaggccggagcatctgccctgcgccttacgactctacgagaagcaccaagcgaagaacgacccctagcacgcgcacagacacacgatcacggatgaggtcactgc

SEQ ID NO: 24219 - DNA, 262 bp, Zea mays
  Clone ID: MRT4577_122094C.1
atctttaccacccccaaattaataatcccagacagcccacctttacaaatggggagaacttgacatcgcaccaccgaagacatccttctacctttgctctcaagaatcacatgaaagcacgacggccggcctataagcaatttcaacattttaatcactgcggcaaaagaaaacctaacactgggcactggtgatcactagcgtccaaccattcaaaaccggagtcccctgaaacaaagggctctgtcaggctaactcggat

SEQ ID NO: 24220 - DNA, 168 bp, Zea mays
  Clone ID: MRT4577_122095C.1
ttccggcaagctgcaagctgtgtgtggcgctttcgtagctgtgccaccccctatctctgtgtgcagtgcaacgagccagcagtagcatacagatgccgtatctagcccctgacctctagctcgatcacatgtgaccaggatccggttgccccaggtgtggaggcggcc

SEQ ID NO: 24221 - DNA, 851 bp, Zea mays
  unsure (1)..(851): unsure at all n locations
  Clone ID: MRT4577_122096C.1
ctactcctcctcctcgccgtcctcctaacccaggcgccgcgccgccgccgccaccgccacatcctccgcccgccgccatgtcgaagaaaggaggtaaaaaggccgcggcaggcggcggcgagctgtcccgcttcctgcagccgcacctccagaccatcacggacaccctccagatgatgtcggaggcggctcccgggggattggagcggacggagtggtcggaggtagtcgcgctcggccatgtggtgtccaggcaggccaccgtcgctgggatggtctggagcggagacttgcctggtgcggaaacgctcaaggagaacattgctgcgtatttcaacgtcctgcagggtttccttttggcttgccatggaagcaccgtcggtgctggtcctactcttcacaagtatatcactagttctgcaaagggcgtggtggatgccagcttctcgttgttcaagctagctgtttctgcctacgaatctggcagtcctgaccggaaaacaatcatacctccagtgacaggaactgtatgggaagcttgtcttgctcttaagaaggtgcctgcaaccaattgtatcgccatagggcgagctatgacccaaatatgcgtatgtctgaaggatatcctacgggagatgaaagaactcccgattggtgattctgatggtaccaaagctgaaaaatctccaacggagatgtcgccatgagcttttcagataaggacgaatcgttctctgatcttgaggaagatgaaggcttcaccgaggaggagatagccgtcgccagtttggatatcgctggtacagcagattcgcttgacgcggtgaaangaactatccgtttcatcacta

SEQ ID NO: 24222 - DNA, 227 bp, Zea mays
  Clone ID: MRT4577_122097C.1
ctctttttcttttctttacgagtagcgcggtcttgctaactattcgactcatacaatcatggattctatatgaaagatggctaccggacccccattcttatcattcgggggggcagacatacaataaatagacgtgaccataaacaccaccaatcaacaaggccatgctcatacacatcgactgcccaaatactgcggagacatgctaaagactaacaactatcctt

SEQ ID NO: 24223 - DNA, 320 bp, Zea mays
  Clone ID: MRT4577_122098C.1
ctactagctacatataaagctcttttttacaccacaaatggcacctcaaggcgggggggcttattatgcttctcgttcttcctccaaccgctgatacaggaagccttcactctgagagaacacaagcttctatccctatactttttaacacatacctgtcaccagcaacatacttagattaccaaaattcaaacaatctaccctacttgatccaacacactaattgatacagactattaccttacatacccttgtgcctctaacactcactatgaccattacagtagctacctctaacgcatttaccgacactaaacatc

SEQ ID NO: 24224 - DNA, 1949 bp, Zea mays
  unsure (1)..(1949): unsure at all n locations
  Clone ID: MRT4577_122099C.1
aggagcagaacgggtgtaggttttattatatnggcctcggacgaaaactttttatccagtatgtgcgaatggctgtagagtcttgaggtttctatcattaaaacataacggagcatcaattttacatttcttttccttcttctctaccaataatcagctatacaccaccatcaatttgagtctcgttttaaatacagctgcaacaagtatactgactgaaaatgagacgaatgtagaagaatgaacaaagttgaacaataggcaacgaaattatgttctcaaaactcatccgatcctgaattgttgcggtcagctcgagttctccaatcgatatgactatacgagtgctctagatattttctttgcacattaagcctccaaactgttttgcgcttctatcgtggacgcacttgctcataaggaaatgtctctcaggtctccttctcgttctgggactctgtatgaaaaccctagctcttctcctgattgccgcctcacgatgctagccctctgcatcaagcgcacaagttgctggacaacctctgacatgggtgggcggaactctggctcaggctgaacgcagagtgcaattacgtctgcaaaacgagagagtgatttagctgggtacattccgtttaatgctggatcaaccatcctagcaagtgcatcaatatcatgaagttgaggggtagcccatctaacaagagactgttctgacctctctctggaactgtctagtggcttccgccctgtcaatagctctaacattaccactccaaaactgtatacatcgctctttacagtataaatgccagacattgcaaactctggggcgctatagccaaatgatccaaatacttcagttgaaacctgtctttcagtatttggagtcaaggcagcaagtccacagtcagataggtgtggattatgctcctcatctagtagaatgtttgaagacttcaaatttctatgaacaagagacggcatgcacacctcatgcaggtactcaagtgctcgagcagtgcctagtgctatccttacgcggatgttccatgtaagcttcctgcttatttcaacagagaagtgcaacatatcatgcagcgttccatttacaatgtactcatagacaagaagtctttgcccatgttcaacacaatatcctgtcaatggcacgatgtttggatgccttagccgagacatgctcgatacagcctcaaggaaattgtcttcttcctgtaaagaaagtgcggcgctatctatctttttaacagcaagaacctttccattcgggaaatcggccttataaacacgaccaagtgagccctcacccagaagagaatcttgacagaaactattagtagcaacttggagagaagcgacagtataaggtgttgcagttatggggacctttgtctttcttacagaaccatttttaccgtaaactctctcaggagtcattttctcagcaggtgggagcttcacagttgctatagacgtgtcatccatctgctctgggatttccctgctagaagctctctcaatgtttactgttagaggtcctccaaaatcttttgattcactgctggcatcatcagttcttttctgagcattgcacatgcagcataacagaagcagaaacacacataaaacagcaactattgatccagcaattatgcccacaagcggacctgtcccaaggccttgcttcttgttactttgaacagtgtggctttctgaacctttaggagcatctcctggcccctgaggatgcttaggacgattccgtggcctttgagggggtggtggcataaaaggtggtggcgggggagcaggtccattggcaaatgagtttccttcaagtgttacatctggaatggagctgaattcttttggtatccaaccactgaaattgttgtttgctatgtttaatgtagtaaggcggacgctgg

SEQ ID NO: 24225 - DNA, 307 bp, Zea mays
  Clone ID: MRT4577_12209C.1
agcgtggtcgcggccgaggtaccgtcagtatgatcactgcctgtatcaaacttgtctgcgctgaaatcattaaatcgtggtctgatgtaaagccattgtttaatagaagaggctagacgaagatggcctggtgagtgtctttattattagatatgttattgtaccatgacactgcaaagcaaggatacgaacaaagcttcgaaactctctccatttaaaaaaaaagatatgtggcatatgttccaaccaagctaggatgagaggcaatggctaataatggccatgctatttgggacgtgggtttgat

SEQ ID NO: 24226 - DNA, 444 bp, Zea mays
  Clone ID: MRT4577_1220C.1
gccggccgggccgatcaaaaaaaaggaaaaaaaaaacaactggaataatctgaactctcctagaaaaaaaacaaaaaaaaaaaaaaccacgggcggcattgatttctcctggttatttacaggacaaacaactactaccatttacccagctagttggggggaccccggttgccttcttgacacacccacagttgtggccgttttaccagcacgctgcgcctaaggttggaaccctcttacaatggaaacaatggtggccattcaaccaattggctttgacaaacccagcagggttataccaacaacccatcatggggggggccctcttttagatttcttaggagttacggttcaataataaggttttttgccggaggttgggggcttcccaaaaataagaaggtccttttctaaatgcaaaaaaaaaaaaaaaaagggccccta

SEQ ID NO: 24227 - DNA, 306 bp, Zea mays
  unsure (1)..(306): unsure at all n locations
  Clone ID: MRT4577_122100C.1
ccaactaatcctccttctgtgctaccccnccgcggacgcaggcctggaatatactgaacaacggacctaaacagacaatacctctggaatgaagcaaacaccggcagagccggcgagggcgaagaacaagcactctccagcacctgaagatgaacggggctcaccatacctggcctgattccggccctctacaggagctgcagaaaagaaactcacggtgacccccaaggctgaggccacctgaagcaactggggggagagctactagagactgcggcccaatcccacgagggggtgcgcccccac

SEQ ID NO: 24228 - DNA, 267 bp, Zea mays
  Clone ID: MRT4577_122101C.1
ggagcgaggagcaggccgcctgcgtaatgtcgaagtactcgatcagcagcttctcttctcgacgtggcgcctccgccaccctcctccccgcgcgagtacctctggtctgggctccagcacgctgaattagtgcatcaaggttcatgactcagactgcatatggcactatcaaaacctgtttacacgaaacacggtgttatgaagtcaagttacaaatggagcatgttagcccaaataggaaaagaaagctaagtaagtgatctcgca

SEQ ID NO: 24229 - DNA, 304 bp, Zea mays
  Clone ID: MRT4577_122102C.1
catctcactaagaacataaagtaaaaaaaatattacaatagctgttcacaaatgtaatgtaactcgatatagtaaagtagaaaaaaatgaagtaaaagtgtagctgtttgctccttaagtcgagagagagcactgagttacttctctctacgatgttcttaacatattttcagctctctaatcatctggccaacgaatagatgcctatcagcaataatgcaaatacatttgcgtgctcgcacaaacggtagtaatagtcacaaggaaccaatgaaatcaggcaatcttaggacgagcagcaaga

SEQ ID NO: 24230 - DNA, 399 bp, Zea mays
  Clone ID: MRT4577_122103C.1
aaacgggcgaaaggatccagcagcaccctttgcgcgcggcggttaactcgtcgcacatctcggggcggcgcggcgcctccctcccggccctgccggcgagagcgcggtccgatgaggcggcggccgttcctggaccagcgacggccgtcgttcaagcgccggtggcagcagcggccgtggtgggtgcgcctcttgctctccctcctcctcgccctcgcatgcgtcctcctcctcgctgtcctcctcggctcccccgaccccgacacctcgccgtccaccttcgccgcgttctccagatccgaggccacctcctcccctcttctcagtcagagaacttacttggagggaatcacggatgcgctcaacatgactgacgaaatgctgagcgcaggctcgttc

SEQ ID NO: 24231 - DNA, 286 bp, Zea mays
  Clone ID: MRT4577_122104C.1
tcggactcgtgggatccatctccttatgtgaaataacataacatgcagtgattaccatgggacgggttctgctagctgttaatacatgttgattgatcagcattggatgattgcgaatactaaacaagtcatccttcttcacaacaatttccaatactacctaatccatgtgtattgtgaataaccgcacaagccgtcatgtggtcggcgcatcatagtaatactacatgacagcctcttcatcttattactaatgtagtacatcatcatccccgataaaacataa

SEQ ID NO: 24232 - DNA, 425 bp, Zea mays
  Clone ID: MRT4577_122105C.1
gaggcagagtgcgcacccggggtacctagctcgcatctgctagcctaccatggctgatcaccaacggagcgcgaccggaggaggcgggggctacggcgacctccaccgcggaggcggcatgcacggtcaggcgcaccagcagcagaagcagggcgcctttatgacagcggtcaaggacgacacggacgcgaccttcagcggggcaatgctggtgctgtccgagctgattctgatcggcaccacgatcgctctcacagtggacaccccagtgctggagatcttaaacccagtgctggagacggacgccatcgaactggagcttatggcagtcgggttatgaacctacagcggcctaggcgaagatgaactttcccgggggctactggatgtaacagtacccgacggtctagcacccggaaggcgcc

SEQ ID NO: 24233 - DNA, 490 bp, Zea mays
  unsure (1)..(490): unsure at all n locations
  Clone ID: MRT4577_122106C.1
ccccaaaaaggaaaacaaaacgggggagagggggaaaaaaggaaaaaaaaggccccccccccaccacaaaaagcggagggggaagaaaaaccaaaacnnaaacaaaaaagggggggggaggaaacaccacccaagaccaccaaaggggaggaaaaaccccggccaacccaccaagcccgggaaaagggcaaacagaaacaccccaaacaccaaaaaaaccnggaaccaaaaaccaaaaaggccccccaaaagcaaacccgaacaacaaaaacaaggaggaaagaccaaagaagaccccccgaggaaacaaaggcaacaaacacggggcaaaaaggccgaacccnccgcaccaaccgaaaaaagcgaaacagggccacccgaacggagggcccaagagggccagcgggcccaaaaacacaaacacccccggacccgggggcgaacccagaaagcccggaccggaaccggcagggaaccagcaaccccaaaa

SEQ ID NO: 24234 - DNA, 349 bp, Zea mays
  Clone ID: MRT4577_122107C.1
attcatagttttaggctgcttttaaataaatcaagaacacagtacatgtctattgctcacttattcataccatgcatatgagcatattccctttttcttattacatgcccggaaaaagggcattgatattaaccttgttacaaaaaaaataaatgctccactaatgacagcatggaaatacctaccatatcgacttgtacattccttacacgcgtggaaaccgtgcatcatgcccaggaacagagtggtctttcatgatatacaggaactgcattgcccaaaatcattccggaaacagaatttacaaatctttcagctacaacacggtcttgttgggtaccataccata

SEQ ID NO: 24235 - DNA, 219 bp, Zea mays
  Clone ID: MRT4577_122108C.1
ggcgcgctcgagaacagcgcgaggccgcaggccgcgatcagcaggccggcggcgatcgggccgcgaatgccgaagcgcatcacgatccgcgccgacagcccgagcgagaacgcggccatgatcaggttcgccggcaggaacgcgaggccgacctgcagcggcccgtagccgagcacgcgctgcatgtagagcgcggacaggaagaaccacgcgaacatc

SEQ ID NO: 24236 - DNA, 345 bp, Zea mays
  unsure (1)..(345): unsure at all n locations
  Clone ID: MRT4577_122109C.1
tncttagcagtggtaacaacgcagagtactttttttttttttttttttttttttttttttttttttttttttttggctcatatctagttatattttttatttataaaaacaaatgaaacaaagacccaattattagcattttataaatgggcagttaactacaggcaacttacatacaggggggttgatgctaaattggcaacgtcaaaaggttttttttttacctcggaaaataacatacaacccttgagggatattctggcaacttacaaagaaaaaatggggtattggcagctatggatggacccgggtactctgggttgataccactggttaagggggaat

SEQ ID NO: 24237 - DNA, 280 bp, Zea mays
  Clone ID: MRT4577_12210C.1
atatattgctactcgaccaaagttttgtaagaaacaatacatgatttaggggatgggatgtaggatattttgagaagtacttacaaaagatttatctgtaagcttgacctcaggggtacggttttagctccctagactctttaacagcttttgctctaaaactatgtaaagtgtttcttagtgatgaaaaagtaaagatcttgctaacattaatacatggagcatttcacctgttagatatgaaattcttatgtggacttatttccaactaactttttcg

SEQ ID NO: 24238 - DNA, 256 bp, Zea mays
  Clone ID: MRT4577_122110C.1
aaggggggggccataaccccattttaacacattatcccctttttagaacaaagggcctttacgggttctggtaaaaaaccatgcataaaaaaattggcaaacattttagctaatttaagggttaatagtaactaatacctcgatgccctttttatcctaaatccttaattagctggaaccttcctggtgggcccaaagacctttttgatcaaagaatccttgggggacattagttgggagaactcggcctttaatt

SEQ ID NO: 24239 - DNA, 574 bp, Zea mays
  Clone ID: MRT4577_122111C.1
gggtccctcgaggccggccgagttggactagtggagctggaagagacgtggttccattgaatgtaacaaaaacttactacattatcagtggccgagggttctgcttcagcggcatgaagatagcagttcatgttgaaaagctgccacctccaccaaaagctgcccctgtaaagtccgcggcaccgacccttttttcacaagaccgcattcttctcatgcctgttgtttttgccattggagcagcatgggatgcattcattcatttctggtagtgatattattttacacaccaccattgcacaacaccaatggatagtgttcatgttgtgttactctttttcttttttctcaaaggcaattgttgcttgcatggtgatattagtagttgacctcaaatgggtcaaaggatgatgtttcaagttaggtagtgtttgtgtttgattttcaaaatgtgttgcatttctgtatgttaatgatcagaaatatgtcaaactggtttaaattaatttaatttgctggaggattccctgaacgaacaaaaaggcgaggataacatgtacttaaaaaggcggcc

SEQ ID NO: 24240 - DNA, 191 bp, Zea mays
  Clone ID: MRT4577_122112C.1
actagttctagatcgcgagcggccgccggttttttttttttggtgggtgggtttttttattaaccaaaccgtttgttttattcgtcacgttctccgagaaccggcgcatcgccgtgcgggcatggacggatgattttatttacagccatgcggtatatcttgattggtgttactacggcctttgtcagaag

SEQ ID NO: 24241 - DNA, 792 bp, Zea mays
  unsure (1)..(792): unsure at all n locations
  Clone ID: MRT4577_122113C.1
gtcgtgcctcataagcgcggcctcgcgccaacaagaacctcggcctcgggagtcgggaggcagcaccgccgggggagccgcagcgcagcgcaacggccggcgccgggacgagagatcctcgaatgtacatgacaaggaaacttttccgtccagctgacccctctctgatctcgccaccgaagcgcacgctggacacccgtggttgtggcaccaaccatgctgcagtacctggacttctcgcacgccagcacctcaaggaagtgggcgcacaggagacagggcgacggacttgaagctccaaggaacagcatggagttcgcgttggaggcttcccacagctatggcgtgtttcaggaagatgttccgcactatccctgcaatatgaggcagtacccaaaatcagggctcaaccacggctttaacccagtgaagaagctgattcaggaggacatctcgttccgaacgaatgaagtccagaagaggcccggcggcgtcatcgccagactgatgggcatggaatcgcctccactgaacgcagctactgaatccatcagccgttcggagatcaccccgagaccaacaatgccaagaagagatcctcctgaaagggagacctcagccaagcatgtctccttcgtgcagcacggcaacagggactccaccaagcaggcgtcaaagcaggagatccgagcctatggcgaaggagagggacgtgtttgggcagcagaacaagaggggcaacgactggagtaagccgcagccgcgggagcacccgcaggnaggaggagctgc

SEQ ID NO: 24242 - DNA, 596 bp, Zea mays
  Clone ID: MRT4577_122114C.1
ttgtttttttttttttttttttttttttttttttttttttttttttttttttttttttttgcacccggggccaaatttcctgggctttttattaaaagttccgggggggcccttatcgggggccttttggatccccccgtacaaaactgccccccggagggttaaacaacctttcttttccggcgcaaacttcggtggggccacccgttaatacccctgggtgggtacttgggacattgttggggggggttccgggttttttcccggaagctggggttctttccccctttccgttgggtaactgccgcgtgtttggcctctgccagatgggggacagtcctcatgctcaaaccgggcatgctggtcctcccatcgggtgtcatatgggtgggggattcctgcctcatggatggggcttgttcgcttttcagcccggtggaggtgaacctccccttttgcttaatggtatggctccaatcaccgggggttcctctgggtttcggcgctttagatggttgttgcctcatgttaatgatcctttcggccatggccttcagttccggggtccattcgttggacatctcgctgtccctggg

SEQ ID NO: 24243 - DNA, 428 bp, Zea mays
  Clone ID: MRT4577_122115C.1
gggctcgccctgattccttcacctctgtgcgagttgcgcaagtgaatgaacgcccctagcttccgggccgcgggcgcgtgattcagcgccggcggtcccctctgattggctgcagaagcttgtggatttgttcgcgcgctcgcagatcggggctggtttgtctagatagaaggtgctctgttgcgtacgacagggtggcggcgacagagctgccggtgtttgattatggtcctttttcagccggagagctgcggctttctcgttaattactcggcgcggaaacagacttgggctgcacaatcttgctatctgtggttcaattggtccagcttgcgctctgattgccccacaaaactgcttgcgtgtcctctcacgtgctggaattgctcatctgatcgactggcgatacaattggctagccgattaca

SEQ ID NO: 24244 - DNA, 772 bp, Zea mays
  unsure (1)..(772): unsure at all n locations
  Clone ID: MRT4577_122116C.1
ctcgaggccggccggggtttacgtattcagtttttccacaacggcggcgatgtcgtcggcctcctcctccgccgccgccgccaacgccggtgaaggaagcgggggtgcggaggagggcgtggagatcacttacgtgagctatggcggggagcagcatctgccgctggtgatgtcgctggtggacgaggagctcagcgagccctattccatcttcacctaccgctacttcgtctacctctggccgcagctcaccttcctgcaactgagctagttactagatcaattcgggcaatgatggaatctggctgtgaggagcttgtatcttctgatcaggtgacacttgaggcagaagttactaataagggtgcccttgctctgtatggtcgccttgggtttatccgagcaaagagattgtacagatactatctaaatggtgtagacgcatttcggctgaaactactgtttccgcgccctgataatgacccacaaatatttggtataattgactagattctccctactcgtgacagcatcctaatcagtaggttgaattgagttggagatctgtaatccgatcatttttcgctctgttcatgcttcctcagctatcatgtggctgtaatattgctgtacttacatataaatgttcgagggggttttattttcttcctgtctntgaattaagggtgttgtaagaccctttttcttttgtgagaaaaacaacgncatgccgcagttgcagaagggactggggcagttcttttgctcataa

SEQ ID NO: 24245 - DNA, 549 bp, Zea mays
  Clone ID: MRT4577_122117C.1
gggggaaccacccgtgcggcgacgtcgtgcgcgtcgcggcagccgtcctggccgcaaagctttccgcgccatcgaattcgcccaggtgcgagcgcgccttgttccatgccgcgctcgcctccgtggccgctgcctagcccatctccttgatgtcgcacgagcccccgttgcctagtcccggtgctcgtgcttaccctcggctagcgtcgacgctcgcgcgcctcctcgtcgtctctgcggtgcacccgctctcatccatcgggttcgcgcgtgctcgcgtttgctgtcgggccgttgaacccattttctcctgctcgacctcgtcttcgtccttctggtggccatcgtcaatatagtgctggacgtttgctctttatctggtcgcaccggctgtcgatcttcttggtccttttcgtgcaaaccagcaagcttcgccaccgtcattcaactgctcgccccgtgtgtgctcgtaaattttcttggtcatgtcctctgagctgaacaacgctccatcttgccgttatcgccaagtcccacgcagctatgttg

SEQ ID NO: 24246 - DNA, 390 bp, Zea mays
  Clone ID: MRT4577_122118C.1
tttatttattttttttttttttttttacttttattttttttttttatttaatcggtgggcattatttaactcttctacatatttacagcatcaacaactactaccattcatccaactatctgattttagccctgctaccttcttgatacaaccacagttgttacctttataacatcactcttaacctaacgctaccaccctcatacaactgcaacaattgctgccattcaacctaacttactttaaacaaacaccagtatcagttctaccaacatcccataattgaacatgccctcaattagaaatcttacaagttatagttcaataataaagttttttgacagatccttgtagcttcccacatataatacagtacatttctagattgtt

SEQ ID NO: 24247 - DNA, 1007 bp, Zea mays
  unsure (1)..(1007): unsure at all n locations
  Clone ID: MRT4577_122119C.1
ggtacctcgaggccggccgggccggggatccgaagtctccagggaaccccgcacacgacatcatcaccgggactgcggcgatgtcgtcggccgccgcctcctcctctcccgccgccggtagcgaaggaagcggtggtgcggtggaagggcgggagatcgcgtacgtgagctacggaggggagcatcacctgccgctggtaatgtcgctggtcgacgaggagctcagcgagccctactccatcttcacataccgctacttcgtgtacctctggccgcagctcaccttcctggcgttcgatgccagggatggcaagtgcgtggggacggtcgtgtgcaagatgggggagcaccggggtgcattcaggggctacatcgccatgctcgtcgtcctgaagccctaccgaggaaggggaatagcaactgagctagttactagatcaattcgggtgatgatggagtctggctgtgaggaggtgacacttgaagcagaagttactaacaagggtgcccttgctctctatggtcgcctggggtttatccgagcaaaaagactgtacaggtactatttgaatggtgtagacgcttttcggctgaaacttctgtttccacgccctgatcctggcctgcctccaatgatggttggcaatgacagggatgaccagaagatggattctccctacttgtgacagtaccctaatcagtatgtagaattgagttggagaccctgatcattctttttttgctctgtttcatgcttttatagctagcatgtaactgcatattgttgtactaacatataaattttcgaggtgttttatttcctcctgttctttgataaggatgtattaatcaacttcagatcaaacaataagaccgtgcagttcttttgctcaataaacaaaacgcatgccgcagttgctgtnnnnnnnnnnnnnnnnnnnnnnnnnnnnnnnnnnnnnnnnnnnnnnnnnnnnnnnnnnnnnnnnnnnnnnnnnnnnnnnnnnnnn

SEQ ID NO: 24248 - DNA, 697 bp, Zea mays
  Clone ID: MRT4577_12211C.1
aaaaatatcgcttcgctgctctactagggctcgacccgacagaatgttagctgctttatcgcgctgccgccatgagtacgtgtgggtcgtggtcatggcccggatcgccatctcccatagtcgtgaagatgcccaggagaatataggaagtgcactgtgactgcgacacttcagattgtgctcaacacttatgattcaccgacggacacgagcttcacaggctccgtgaggatgccccctatccgtcgccccgacatgagagcgttgcatgcttgttgacggcctgcctgctgaagaggcctaaaacatggcacttgactaactggctgatgagggtctctggaagatgatcatggacaaaaagcttgttaaaatacttgacgagaaatacacatgtcgtttcttggcatcagaggacatctctctcgctgattccccgtctccttgggcctggtctcaacaaagcaagagaggtcccgaccctgggtactcacctgctatccctcgaatccagggtgatgctgactaaagttgccgtcaagttcatctacacgatgtcctgtgcgtgatggacgacgtcgtttacttgttaatgtgtcgagatgacatccttcagatcatccatatgagcgtgaacttccttaggtccttctgaacaagactgtgatgatgtctgatgcctctacgtcaagagcac

SEQ ID NO: 24249 - DNA, 460 bp, Zea mays
  unsure (1)..(460): unsure at all n locations
  Clone ID: MRT4577_122120C.1
tcgagcggccgcccgggcaggtgtacaagcttttttttttttttttttttttttataaaaaaaacaaccgcggccgcccccccggggagggcggcagatataaataacaatgacggcggcgggcgcacgaggataaagggggccggaccccccctaccggggggggggagaaaaaaaagagggcggtcgtccacctacaagagaggggaaaaaaaaaccccacccccaacaaaaatcttggggaagaagaacatctttcctcctgccggtggaggaaaaaggaagagaccaatagcgctcttccccactcgcgcagcctcaggggggaaagaggaaggcctctccctgggaataaaaaacaacgggggggggggggggggnnannttaataggnacaattnnaaaaggccgaaaactcacgacccccgcttttgttttttttttttttttggnggtgggg

SEQ ID NO: 24250 - DNA, 1034 bp, Zea mays
  Clone ID: MRT4577_122121C.1
cgccggtgcctcccccggcggcggcgatgtcgtcggcctcctcctccgccgccgccaacgcctgtgaagggttttgcgccttcgatacgtcgtttacgtattcagtttttcacacaacggcggcgatgtcgtcggcctcctcctccgccgccgccgccaacgccggtgaaggaagcgggggtgcggaggagggcgtggagatcacttacgtgagctatggcggggagcagcatctgccgctggtgatgtcgctggtggacgaggagctcagcgagccctattccatcttcacctaccgctacttcgtctacctctggccgcagctcaccttcctggcgttcgatgccagggatggcaagtgcgtggggacagtcgtgtgcaagatgggggagcataggggtgcattcaggggctacatcgccatgctcgtcgtcctcaagccctaccgagggaggggaatagcaactgagctagttactagatcaattcgggcaatgatggaatctggctgtgaggagcttgtatcttctgatcaggtgacacttgaagcagaagttactaataagggtgcccttgctctgtatggtcgccttgggtttatccgagcaaagagattgtacagatactatctaaatggtgtagacgcatttcggctgaaactactgtttccgcgccctgataatgacccacaaatatttggtataattgactagattctccctactcgtgacagcatcctaatcagtaggttgaattgagttggagatctgtaatccgatcatttttcgctctgttcatgcttcctcagctatcatgtggctgtaatattgctgtacttacatataaatgttcgaggtgttttattttcttcctgttctttgataagggtgttgtaagacctttttcttttgtgagaaaaacaaaacgcatgccgcagttgcaagaggactgtgcagttcttttgctcaataaacaaaacgcatgccgcagttgctgtagtgtttaattgtgaaaaaaaaaaaaaaaaagcggcc

SEQ ID NO: 24251 - DNA, 762 bp, Zea mays
  unsure (1)..(762): unsure at all n locations
  Clone ID: MRT4577_122122C.1
gcagttctcgttgcgctgtattgcagtaggagcaaagcatcgtccaatcaatagactatacaagcatacaacctccattactatncatacaaccatacactcactccactttgcaccaacacaatttcaatgccacatctactacttaacttaagaaggtcaaaaaaaaaaggttagcttgaaaattttacctactacaggtaattacaacaattgcactctcttctttcttccttttttttcctctctctttctttctctctcgctttttgattcgacacgcaaagaacggcaggacgacgcacatgtaaggagcaggaatgcaggacgatgaagcaaaggcagcgaaactcgctttcacaagcccccgcacaggtcacgcacctccgagctaccgaagctggcgagatcggaacggtgcaggtggttcgactggttatccgacgcggcaacgtcgtcacgaggcgaggcagcggcagagcgccggttggcgggcaggggagccggaggcgccgggcagcagtgccggacggtgaccctgtgcgcgacggcctcggccgaggagctggagctgcccgtgactgtcaccgagagcacgacctccaggtctcgggtggcctcgcgccaccggtaccgatgtgctccgtcgacgtactcttcctgcgtcaggaagtcgtcgtggcgcacgacgacttccgctgttctcctggccgatagacccatcgatggttgacctcaagccgaagtggaagccaaaggacg

SEQ ID NO: 24252 - DNA, 548 bp, Zea mays
  Clone ID: MRT4577_122123C.1
ggcggggcgccgttccgaacggagggttgctctaaatcctttcatccatggtggttctgcgaggtcgaaagcggcgagcgaattataagatgctggacaagctgtgggacgacgtggaggccgggcctcgcccgcacacgggtctcgagaagctccgcaaggccaccaccgaccgtccgctcggcatcaacaaagacgcggacggcggcagctactagcgggcgcagtcgatgacgtcgaccccgacgacgccggtgacgcagtacgcgtcgtcgtgcgtcgacgacgtcgcgcggggccgtaaacttgtggcgcagtgacttccacccggggagccccctgtacacgaagggtatgggggtcaggctcttcgaccggtcgcagtccaactcccccaccgtctaccactgggtctactgtgagtagaccaggagcaaccaccgctatatctggcgagatggatgcacaaggaatacggcatgatggttggtccttgtggttatctaaaaccgacgcatgctgtattataggtagtcatcactatgtat

SEQ ID NO: 24253 - DNA, 1290 bp, Zea mays
  Clone ID: MRT4577_122124C.1
atgcccaccaacatctcagatggcatcagaaaaagctctaggctggagaggaatgaagatgtgaaggtggccgataaagctatttccagagctgaagccaaagatgctttcctcaacaaaggccactacaagaagctgaaaaaagatctgatttcaaaaattgacacccttgataaaatcagtgaaacttcgggattatcagatactgatagatttatgaaacttgacctggaatctaacctcaagaagattgtcgatgaggaaaacattagcctcaagcagaaagctagagataagttcatgttagatggtgatgagaactctaaatacttccatttgctagccaagcataaaaagaggagactcaagatcttaactctttctcatggtgatagtttggcgcatgatgattcaagtatttcgtttgataatttggacatgaaacaccttgaggaggaggacaaagatcttcttatatgtcctttctctttggaggagatcaaagaggtggtgttttctctgaaacataacagtgctccgggccctgatggtttcccttctgaattttttcaggacttctgggacactattaaaagtgatttgtttaatctctttaattcctttcacgatggttcccttaatattgagagacttaattttgggatagtcactcttatcccaaaagttcctgatgcaactgatattaaagcctttcgacctatctgcttgctcaacgtctgttacaaaattattaccaaagttctgactaataggttggctcattgcatcacctctatgataagtgaccttcagtatggatttatcaaaggtagatatatcatggatggtgtcctttcacttcatgagattattcatgaagtgaaacagaagaaacataatggagtgatttttaaagttgattttgaaaaagcttatgacaaagttaattggaaatttcttcataatatgatgattaagaaaggctttggagataaatggagtgattgggtgttgaagactgtgaaaggtggtaaagtggctatcagaactaatgatgtggttgacccctattttaaaacacacaagggtgttcgccaaggtgatcctttttccccactcctctttaatgtggcagctgatggtcttgcttgtttgattcaaaaagctaaagatgaaggtattattaaaggtctcattccacatattatctctggtggttgctgctgcttacaatatgctgatgacactattttttgctgcaagatgatcttgaaaatgccagaaatctga

SEQ ID NO: 24254 - DNA, 1527 bp, Zea mays
  Clone ID: MRT4577_122125C.1
cctcgcctccccgttactccccccgccatcaatgccctcttcctccacctgcgtccctctcctcctccgccgcttcgttctcctcctctgctccgaccaccacttcgcagctggctcgctctcgacggcgttgccgccaccgagcccgtcggcgagacggaaatgaagcctctgcacctgcggagcagcggcagcttcaagcgcctgctgctcctctccatcggccaccggtcgccgccgaccacaaatccgccggtggcggacgccgacgccagggagtccccggaggagccgggttccccgcggtgtagcagcagcgggcccgcgtggcgctgcttctcgtacgacgaggtcgaccgcgccacgggcgggttccacgagcgcaacctggtgggccgcggcgggtcctcggaggtgtaccgcggcgagctccccggcgggcgcgccgtggcggtgaagcgcctgctgggcgcgtcggcgtgcgagcggcgggagcgggacttcctggcggagctgggcacggtggggcacgcgcgccaccccaacgtgtgcggcctactggggtgctgcgtcgaccgtgacctctacctcgtcttcgacttgtcccgccgcggctccgtcgccgccaacctacacgacgaggcgttgccggcgatgggttgggcggcgcggtacggcattgcggtgggcacggcgcgggggctggagtacctgcacaaggggtgccggaggcggatcatccaccgcgacatcaaggcctccaacgtcctgctcaccgacgacctgcagccgcagatctccgactttggcctcgccaagtggctgccgtcggaatggacgcaccgcgccatcgcgcccatcgaaggcaccttcgggtgcctggcgccggagtactacacgcacggcatcgtggacgagaagacggacgtgttcgcgttcggcgtcttcctgctggagctcgtcaccgggcggaagccggtggacggcagacaccggagcctcctcagctgggtaacagtggcccggccgctgctgagcggcgacggcaaggtggaggcgctggtggacccgaggctcggcggcgactacgacggcgagcaggcgcggcgggtgacgttcgtggcgtcgctgtgcgtcagggcggcggcgacgtggcggccgtccatgaccgaggtgctggagctgctggaaggcggcgagatccggcaggaccggtgggcgatgccagagacggcggtggccaacgacgacggcgagcagcagccatggtggttcgacgttctcgacgacttcgacgacgacgacgacgaccaagacgcaggcggcgaggagttcagcaccccgtccccttcctcctcctcgtcgtcgtcaaccacaagcaattagccatttacatccccagatacctggactcactgtgacgtggagttctgctagtttgtcctgataggggggagggcgggtcccaccacctgtaaatacaaaaaaaggttatctcttgaaaatgtttattactgggtgacgatg

SEQ ID NO: 24255 - DNA, 407 bp, Zea mays
  Clone ID: MRT4577_122126C.1
gccggccgggttccgcaccattagcggccgtcactgctgacatttccaggtgagttcttacttcttagcctcgaagttcctcatccccatcgtttgttcatcttgtccccggcgcccatgaagggtcccagctccgcgtggcgtatcaggcgtcccgggcgcctacagcgatgccaaggactacccgctgcgacgctatcccctgtgatccatttgagctctggatcgccgaccgagtcgtgctagccgtgctctggatcgttttatttgcttcattctagttatttcgatgtggtttttagcttaattatttaagacttatcatgttattaatgcacaaggttttatcgaagtggaatatatatatatatgattttacagaaaaaaaaaaaaaaaaaaggccccta

SEQ ID NO: 24256 - DNA, 190 bp, Zea mays
  Clone ID: MRT4577_122127C.1
taataaacattatttcaaaaacaaaccctctaaaaatatccaaacttacgggccctttacagagggacgtaaaaaactcttctatagtatcactctaaattcggttcactttccgtcgcgtcacatcttcatccctggccataccctaccttaaccctacttaattcactctcaattcattcccctttcc

SEQ ID NO: 24257 - DNA, 226 bp, Zea mays
  Clone ID: MRT4577_122128C.1
atatgcgaatgacatccggatgaaaccagtaataataaggaattgagaactcaatagatcagggataacggacttacaaagcaacgaccgcatgacctgtagaatgacaccacccatctaaaagatacaggctaacaaacgcatgcatgcaaagcaatacatgtcatataagaaagcctaaattgacacaactgatcgtctagtaacaacgaagcctcatgtaaaa

SEQ ID NO: 24258 - DNA, 1564 bp, Zea mays
  Clone ID: MRT4577_122129C.1
attttcgaaactgatcactactcttcaacaccaagtatgtcttcttattctgttcactagcatgccagttgttacttgcattaccatatcataatttttaaagactatggatagcaggtccatctatattgctgacatacctatggtaagtacaaatcctttgagtctttgagaaaggatatctcattgaatttgttctttttggaattgtccctcaacacaaatgctaaaatgatttttccataggagagaatgtatgatcctccattttaaacaacctttttaaataccagtatgaaataatactttttcctttgagtatccatctgtgttcctataatttaaacaccagtatgctcatgcccacctgcagcacggtgttgactccaccttctagtgcctccttatccagctctccatgtagacatgtccaatatttctccagtgcctttaaataacctaatgagggcatgtaaacattttgttatacaatgactcatttatgtcctacagatttgttatgcccatatgccagttattggaaaaacctatcatgagcagcaatactgattaaaataataatcaactttgctattttcatgtgttgcaaaataagtagaacatatcattgaacaacatgttgtcatttttttagacatttttaagttgagtatcaacatggctctggtttaaattattgcgctcttactcaggatgagattgaagctgctcgaatggcagcgatcaacaagaaaattaagcgtgtattgactgaagtcctttcaaaggttttattcttgacttgatcttgtttacagtttacattattgaatccgtctaagaggtgcaaggttattcctgattggttagcttcttaccctttttccatcacatacagaatcggctatcttaaggtcagtgccccttcataattgttagctcattttatataacaatatgtattgtgattgagagcacacagtcggatgctttttatatttccaaggaattatgtgttctctataagttgtagcatctaactatgtaacttgatgttatagattcaatcacaaaaaatcatttaaacctacgaatattgaaataattgattggttgtaggctgggcaaaaggttcgtgaagaaagtgaaaggctgcgagcctgcgacagcaggaacatgagcagattgcaatgaagcgtaagcgtgaaatggctcggtgtagatgacgtggcataaacacaaacacacaaacattaaagggattaaaaattatatgctggacaaaggttcccaatttaggttaccaaaatgttgttcccaaagttctcatcatggacaagcgaagtgaacaatacgtttctctttagtaaaatcgttgattttcatttgcagaacctctgtttcaagttcctcgattcattttggcaagggtcatctatcttctgtatattttgctccatcaaatagtttttttttcattttttctagacaaagtaggataattttgtattaggaccatgtgattgtacaatttgccaataattatgagaccaacacccttttg

SEQ ID NO: 24259 - DNA, 472 bp, Zea mays
  Clone ID: MRT4577_12212C.1
ggaaacaaaacaatatctctcccccagagggcaaacttggcccccaacaaaagggggtccaaggcaaataaaaacatcgcaggcgcagaaacaaattgaggcccacctaggctgctctgacctggaaaagctgacgggcattttctttcctaaaaaaacacttaaaaacaccttttcctttcctaacaaaaattaacacgaattgccccaacgaactactcgagggctactgaaaaaaaaaaaccttttgggcccacaacccttttttcctgccagggggaagaaaaacccccccaagctctaaaaggggggaaccggcctgctactttgccttggaacctttgcccaccaggcttggaaaccctttcctgggttttttgggctttttgggaaatactctgaaactttggtcttgcttttcccgaaaaacatccagtccaaggccaagtcgtactcaaacgtggtgggctgg

SEQ ID NO: 24260 - DNA, 592 bp, Zea mays
  Clone ID: MRT4577_122130C.1
agcgacacgtcacatttgcagccgccggagcccgaagatcgctcagcgcgcggaccaactttggaccgccgacccatccgattgcttacagtgcttggtctatccgatggctctgactacggaagccattatgagcacatgagtagcatgaacaccatgctgtacttggtgatgaatagcgtgtagcacaccctgggtctcaagagccgactcacgacgctgcgcacctccaagggacagctgatcatcatcgcaagcaactgaccttcacttacgaagtttgtgattgagcactacgccatgctgcccaaagttagtgtgcaccatttgcacggacacaatgttgatgttggcactgtctgccggctggacttcagggagcgctgtctctactttatcgacccaggggacttggacatcatcagaaccacccctgggacccagtgagccagtcccggaacccattgcagatgcttcgcctttgttaaaatgagacgagatgtagcgcttcggtcctatgaacggttacttttttatcttgtagctatgtaacaacggtaccatgtgcccatctaccatactgatagtgcct

SEQ ID NO: 24261 - DNA, 375 bp, Zea mays
  unsure (1)..(375): unsure at all n locations
  Clone ID: MRT4577_122131C.1
tctcatgcaaaagcgtgaggagttctgttccacaatattntcatgagtatcacacttgagaggtaagacatctatttccgatttcaactcatgtcattattttgcaacagaactcctcacgcttaatgccttgacttccgcgtgccattactatgaataccccctacccatttgggggttgtccggggggttcttttanaaaatctttttacaaaactctttaatctactattcacatcattcccacattatttaaancattatcaataactctctnatttttaacttncncttccatttaacttacctcatttattancattttttttctttacctctcncctttatcccaatctccccacattattatttttt

SEQ ID NO: 24262 - DNA, 1148 bp, Zea mays
  Clone ID: MRT4577_122132C.1
acttgtcttctccaggcccgcagcctctctcctgctcccctgccagtgccacattgccacaccctgactccgccatggaaaacatctccaaaacctcattccgcaatgagacccgcagccgcagcagccaccgctaccaccgccgcgctccgtctccgcgccgcctccctctcgccttctctcgctgcctccctctcgccttctctcgccgccctcctttctcatcgtagatcctccctcattcttcctccgctgcgccgcatctgctcccttgcgcctccccactcctccgccgcccccaattcgcagcccccgccgcagttgctctctcccatcatggacgcgcagttcgtgctcttccgcgcgcagctcgacgagtcttccaccctccgcgaccgcatccgtgccgtcgtcgccgagattgagtccgcctcccgcgtcgccaccgccgcgctcctcctagtccaccagcccgtccccctggcagatgtgcttgtgaaagccaaggcgcaggtagaggtgatcaaggggttgtacgcgcgcctggcggaagtcctcaaggaatgccctgggcagtactacaggtaccatgctgattggaggactgagacacatatggtagtgtcgatgcttgcattcatgcactggctggagacaggtggcctactcatgcatgctgaagcccaggagaagctagggttgtgctctggggagtttggccttgatgttgaggactacctgacaggactgtgcttcatgtccaatgaatttcctagatttgtagtaaatcgcgtcactgctggcgactatgactgtcctaaaagggttttgggcttcttgaccgatcttcatgcttcgtttaggatgctgaatctgcgcaatgacttcttgcgtaagaaatttgatgggatgaagtatgatttgaggagggtggaagaggtctactatgatgtgaagatccgtggacttgtacctgcgtagttgaaacaagagacatccttggtaatgttagattgttaacatactgtggtttggcttttgtcatccataacgtgttcatctagctaaaatgtgaaatatattctgttggagcgtatgtgttatggactgaacttgggggcactcgaatgaccttgctcatttctttt

SEQ ID NO: 24263 - DNA, 136 bp, Zea mays
  Clone ID: MRT4577_122133C.1
caaaacgagcacactctcgcctccgtgtggtccagacgtccagtcctctaaccgtaccaggaagcatcacaccaggcaacagaagctcacgctgggatcggctaccaacaataatatcgttcctcgcctccctcac

SEQ ID NO: 24264 - DNA, 459 bp, Zea mays
  Clone ID: MRT4577_122134C.1
ggcactgcgacttcatggtgcatgtcactgactactggatagcaccactgcatagcatgatgtgggccctgcctaccttcctataggtcttactgcgatgtgctgctaactcgaccattatgcctcaatgctcacaggagctcctctgtccagcgacacctgtgagatctcgacaccaatctatccacttctacatgggacagaaggccatcacctactagcatctgactagcattgacgatagccctacaacatccatgagctctgttgcaacactcatcgttagtacatctgcagctccattgactctgacactagctacttcaacggctgctgctaccagcactgaatcaatgagcgtgctatgaaacttgctggttaccttcagtaacaacagcttctttcattgattctactagacgtggtgaacactgttttctagtcggcggctctgcagct

SEQ ID NO: 24265 - DNA, 1257 bp, Zea mays
  Clone ID: MRT4577_122135C.1
cttttcttctcgaaagataaaaggtgtttgtctttgaaagctagaaaaggtagctttctattatggcacatcagtccaaaccataatttagtcatttttatactacacgtgcaatgggtatgaatccaagttgtgagagcgtaagaggtgaacatagcaaccagtatgaaactacttaagttgatggaagagcagttcccttgctatgactgatattttatcgaaatgcatagcaaaagctatgtgactagaaaaaaacggaaacatcttatagtttggaatggagacttaacattttgttggctaggacattgggctatatcttgctacctcctcacttggcacaaataacttcatttgtttcccagagactgttattaatgctttgcaggaatacacattatttcttgttatccattgaagtatacaatacttaagcccttggttgatagtgtgcttgtaaagattaactctttcgaggagaagacaactagtggaattttgctccctacgacttctcagtccagacctcagggtggagaggtagttgttgttggaaaaggaatgataattggggataataaagttgatgtcaatattcagaaatatgtcaaggaaaaatttagaacaacaaccgaaaagataaattcaagaactggccgcttcaacaagagtctgtccatgaggatggcatgcagcattacttgcccttcgattgagctgggtggctacaatgcatagttctttgacaagtttcaaagtttcaagagaaccaagctcctgaatgaacacagcttcacaactgaacatggaatgtgcccggttcattttgagatgtttcggaaaagagagaaaaatcaagacaccaattcgagagaagtcgcaaacggatcgaacagatctgttaggcagcctttaagcagaagtgatagcagaaggctttcatcaaatggaagacaagctggtgcaaagtagggacttacaatggccttgttcagtttttgcctttttcttagtgtttgtcatgagagattgcgaggatgttctcggctaagcaatgagtgacaacaaacccaattgaaggttgtcagtgtggtgagttgtgatatcaacgactggtgtgtgatgccattaacccctttttttcttattggccttccagctatgttgagttctagctaatcctttgtatcatgttcataatataagtatacatagtgaaaagaaaggaaatcgattgatcaaaagatggcgcct

SEQ ID NO: 24266 - DNA, 446 bp, Zea mays
  Clone ID: MRT4577_122136C.1
aaaattgggggggggggggggggggtgaaaaaacaagcacaccgcgaagaaaaaaggggggggggggaaaaaaaaaaactatcgttttgggggggggggagaataaaacagaaaaaaaaaggggagggggggggggctttttaaaaaaaaaaaacacccccagatatttgggggtaggtccccaaaaaagggggtgctaccgtattgtaataaaaaaaaaaaaaaaaaaaaggcgcgggctttagaggatatgcgtatatatatataaggtggcacaccccggggaaaaggcggcattgcgcgcttttgtggggttgacgaaaacaaaaaaaaaagcggcccaaaaaaacccgcgcggctaaagccactcaaaaaaaaaatgggtgtcgtaaccgcgaacaccaacggagcccgggaaattttgggggggttttaaaaacccccca

SEQ ID NO: 24267 - DNA, 482 bp, Zea mays
  unsure (1)..(482): unsure at all n locations
  Clone ID: MRT4577_122137C.1
cctcgaggggccggccgggaanaaaaaaaaaaaaaaaaaaaaaaaaaaaaaaaaaaaaaaaaaaaaaaaaaaaaaaaaaaaaaaaaaaaaaaaaaaaaaaaaaaattagaacggggggggagggggggaccccgtacgtttccaccgttgaaggaactccccccctccccgggggcccgggggcccaccaacaatggaagtcgaagccgccgcccaccacctgcccgttgggccgaaccgccttgtcccggtccggaacaccagaagaagcccgccgccgaatccggcctcccgttgttccgccgggggaaagccgcccgtccagttccacggggggaaaggaagggggtctgggttcgccgcgggggtcgggttaaacccttcgggaaacaacgacctgtccctctccatgggcgaaaacaaaaccccgaaggtcaagcctccgccgccgcttacccaagggcgcttcaaaatctttatca

SEQ ID NO: 24268 - DNA, 331 bp, Zea mays
  Clone ID: MRT4577_122138C.1
caacatatacaggacatgatcactgcagacacggctgataatcgagcatgaggttcttatgactacttggacacatctgcaagagctggtactagagccatgtttagcacaatgctcacatgctgctatagctatccttgatgctcagaacctataaactgaggtctcttccgtatgtgaaaaaccattgcttaatgacttcactatcctactagcaatcgcagctgacatattaaccacatcaaccttggtgatacaacaatcgatagccctattacatgcagtaagatttgctgcatcgattgacagatcatcatgacggcacaactac

SEQ ID NO: 24269 - DNA, 471 bp, Zea mays
  unsure (1)..(471): unsure at all n locations
  Clone ID: MRT4577_122139C.1
gttgcaacaaagttcaatcttgtttactttgtttactttgaaggggcgaaaacaggaaccgaaaattgataggggcgacgggggcacacgacaaacagccgacagacgggcacagccgaacagggacaaaagacccaaattggaacgagcccccgggaggaaacaacccgccccgacgggtgctcagggaaaaacatacccagagcaccccccggaaaaaaccgggggcccgaaaattccggcccggatccggggggagggccagggtacaatttttggagaaagataaaggtccggagaacctttggccccagctcgggccccaggcccaattggccccgcacaaacangcccaaaaacataagggcgcggattagaaagggcaaatacggggggcaccaacgggggggcgaacaaccaaaaaatggcaagcacctaggggccggtgaccatctgggaaaaacggaacgc

SEQ ID NO: 24270 - DNA, 1051 bp, Zea mays
  Clone ID: MRT4577_12213C.1
ccgggcatcaacctcgtctcgcttcgtcgatgcatctttgtgcctcgtgtgattttttccagcccacacccccaacccaacccagagcccgaactcttcacgtcgcgtcggccggcaattggcattcccactgcgccgccgtcggatcgactgggtcctcgccgccgatgggcttcttccgccggatcgccggcttcctaggcatctcgcgggacgacgccgaccacccggactccccgacctccgtcggcggcgccgcggcggcggcggaactccctcatgacagggcggcggcgcacggggtgaggcaggggttcagcgtcaaggttcctgtccatgtcgagcggcaggtgcccgtgcccgtgctggtgccctgcccgcagggggacggcggcgtgcagggttttaggtggtacacaaggaggcttaggatcgatgaagacggcgacgtggctgacgagttcttggatgaaattatcccggaaggctcaatcagcaacgacaaaagcgcaaggttccaagtgaaatataacaataaacctgctgctgtagcgctgaggaagcaggtcatcgctgtcgacggtgacatccgccatagcttggaacaccaggggcaactgcggtgggtgtgactgagtcggagcagataagtgaatcctgagctctgctccatcagtgtgcgttgagcagagggcgggcgcacacaggagcggagcgaatgacccaagttcttcatctctgaagtggatctagaggtagttcgttgctgatgtatccattgttcttcgttcagtgtgttggtatgcttgatctcatggcgattgagacgccttgtaccactagcagttgtacattattgaaacagctcccgctgtacatgttgaatgtgcttgcttggcaatggatctgccagactggtgaaaaattggaatgtgacacttcagccttcagcctttaagcatggctacaaatttagagctagaatttgtcatgctaaggaatagtttttttttactctgtaatatataaaggccatatctggtagtgctct

SEQ ID NO: 24271 - DNA, 824 bp, Zea mays
  Clone ID: MRT4577_122140C.1
gggtacacactcgcggtccgtgccgggctgtccaccaccaccactagtccacgacggccgccagccatttcgccgcggcttccacttcgtgttcgttcccccaattgcgtctcctccttccaactccacgcgcttcaatcccacaaccgcgtcgccgttccgatcccctcccttactcttccatataaaaaaccctcgccaggtccatagattgaaacccaatccagaccccatccatcgattggaacccagatccgcaggccgcagcacaagagggtgggatcggatcggatcggagcagagcagaggggacaaccgaccagaatccgccggcgaccaccatgggctccgcgagccgtgccgtctcgtgcctgtgctgcccctgcaagtgcctggcgtgcgggctcctgagctgcctgtgcagcatcctcgtctcgctcgccgtcgtcctgggcgtcgtcgccctcatcctctacttcatcttcaagccgcacatgatcgcggccaccgtggactcggcctcgctctcccagttcgcgctgtcggcgtcctccacgctctcctacgacctcaacgtcaccatgacggtgcgcaaccccaacacgcgggtggggctctactacgacgacgtccaggcgctggccctgttcagcgaccagcgcttcggctacgccccgctcgacgccttctaccagggcacccaggcgtccacccagctcagccccgggttccgcggcacgcagctcctccagggcgacgtcaccgccgccgagttcaggcaggagcagtccgcgggcaacttcgccgtcgacgtcgacctcacg

SEQ ID NO: 24272 - DNA, 724 bp, Zea mays
  Clone ID: MRT4577_122141C.1
ccggccgggaggggtgcagtccgtccgtcgtgagcgtgtagaggtagagatgacctgcatttgcaaacggtcaaaccaatcaggccacccacccaaggcgcaacggctacaactcccctacaagtgtccggcgccccttggtctgtctctgtccaccaccgccactagtccacgacggccgccagccatttcgccgcggcttccacttcgtgttcgttcccccaattgcgtctcctccttccaattccacgcgcttcaatcccacaaccgcgtcgccgttccgatcccctcccctcccctccctttctcttccatataaaaaaccctcgccaggtccatcgattgaaacccaatccagaccccatccgtcgattggaagccagatccgcaggccgcagcacaagagggcgggatcggatcggatcggtgcagagggggacaaccgaccagaatccgccggcgaccaccatgggctccgcgagccgtgccgtctcgtgcctgtgctgcccctgcaagtgcctggcgtgcgggctcctgagctgcctgtgcagcatcctcgtctcgctcgccgtcgttctgggcgtcgtcgccctcatcctctacttcatcttcaagccgcacatgatcgccgccaccgtggactcggcctcgctctccagttcgcgctgtcggggtcctccacgctctcctacgacctcaaagtcaccatggacgggcgcaaccc

SEQ ID NO: 24273 - DNA, 379 bp, Zea mays
  Clone ID: MRT4577_122142C.1
ggcatacactcttcggagagtttatctggaaacaaggtgtcaaacaactattttggttcagatgcagtgagtggtaatggggatgcaacttatcctgccaaaagtaatgcacagcagcctagcagttgtgctcctgacgtgagaaaacaatcaaaagcaagcatcacagtttatcagcctgacatgagtgtctatttaacttctgacatggtcagttcttgtgagggatcatatgtttctgccggtgagccactgcaaaggagcttgtcatctggaagaactattgggaaagtaactgtggtgaataaaaggccttcttacccatcaagtaaggtggtctcagcacaaaagtcacaggattaggtgtctacatcatatc

SEQ ID NO: 24274 - DNA, 1632 bp, Zea mays
  Clone ID: MRT4577_122143C.1
aaccctacccctgtgcggcgctcggccgggcgggctcgccagccatttcgccgcggcttccacttcgtgttcgttcccccaattgcgtctcctccttccaactccacgcgcttcaatcccacaaccgcgtcgccgtcccgatcccctccccgcccctccccttcccttccatatcaggtacactcaaccgaccccggcgggggaaccgaatccagaccccatccgtcgattggaacccagatccgcaggccgcagcacaagagggtgggatcggatcggatcggatcggagcagagcaaagggggacaaccgaccagaatccgccggcgaccaccatgggctccgcgagccgtgccgtctcgtgcctgtgctgcccctgcaagtgcctggcgtgcgggctcctgagctgcctgtgcagcatcctcgtctcgctcgccgtcgtcctgggcgtcgtcgccctcatcctctacttcatcttcaagccgcacatgatcgcggccaccgtggactcggcctcgctctcccagttcgcgctgtcggcgtcctccacgctctcctacgacctcaacgtcaccatgacggtgcgcaaccccaacacgcgggtggggctctactacgacgacgtccaggcgctggccctgttcagcgaccagcgcttcggctacgccccgctcgacgccttctaccagggcacccaggcgtccacccagctcagccccgggttccgcggcacgcagctcctccagggcgacgtcaccgccgccgagttcaggcaggagcagtccgcgggcaacttcgccgtcgacgtcgacctcaacgccaagctcagggtgaaggtctgggcgttcaaggtccgcgggcccaaggctaaggtcacctgcaagctctccgtccccgcacccggcgccgccaacgcctcgcccttccagcccaccgtttgcaaagtctggttctgattttccatgttgtgggatttagatttacctggtaggcattctactagtagtagtagataatgttaccagctgatgctgatgtcgattattgttttctttcgttcattcgttggtcgtcagtcccgctctggattttgctttatgtatatatatactgctctccttcattcgtaccagcactctgctctgctgtatacacttttgtttgctctcagtttttattactactgtagacaaatttactagttgtcccggctaatctcgtgattctttggacttgagatgattgctttgctgaaatattaatcgaaagttcgattgcaaagctccagctaaaagaacccaaaaaagagggaccactgccccctgggcgtaatcccggtaatagcggcttcctgggccgcagtgttatccgcccacaaagccgctcaacatgcgagctggaagtataaagggaaaagcctggggcgtctaaagagtgagtttactcccataatccgcggggggctaacgggcgggttaactggcggaaaacctggcgggccaactgcatgaatgaaccgcccaaaacccggcgagacagcgtgtccgtattgcgggctctaccccttccacgccccctgagtaaatgagctcggcacctcggctgcagagagggttatcctttcactcgaag

SEQ ID NO: 24275 - DNA, 444 bp, Zea mays
  Clone ID: MRT4577_122144C.1
ggattcttccacactcggagtggtgattgtcaagcattgtggatatacagcaactgtgaaggtttctggacgtgcaaaggacagtaatgatgttaaacaaacacatgacatctctgataattttgatggaatgctgaacattgatgtgcctgaccatccagatggaggttctaatgccttgaatgtcaacagtctaaggataccactccaaagtgttacgcatccagaaactgttgttggtaagcagaaccctagcccaaagtctcatgctaataaccccgcaaggaaactggcacgtaaaatacttgaggacagcttggtaaagctggatagcatgcctagcataaattctagaattatcagatgggaacttgggtcctcctggctacaacagttacagaaaaaggattctccagcatctgagaatgttaagcggaatgcaac

SEQ ID NO: 24276 - DNA, 565 bp, Zea mays
  Clone ID: MRT4577_122145C.1
atttctcctttgactctctgtactctctccctaccatactccctagcactgccctggagccctttctcaccccccaccaaagcggcaagttcctagaaccattaagacccactcgaaaaacaaggaacgcaatgaatcacctctccacaacttgactctgtactgcaatcgtagggatagactgctagtgcaggtgaagttccggacttgccgcaagaagtcgatgtatgtgggactgaacacatctgctttcctgagaatcgtcaagcatcacgaaaaaaatcatgatggacctgactgtcagaactgcatccactactccctccacgcgattaacaagggccagaatgtttacatcgctgctgatgaaattcgacatggaatgtctctcctataagatactcagccgccatctcgatgtgtgatagtacgatagatactgtgactactactgttctaaagactcgccaaacttctacgatactatcatgtctgagatgatgtcctggtgagaatcagagtccgatgtctgacatttgcctgacttgagggtagtctttaggct

SEQ ID NO: 24277 - DNA, 481 bp, Zea mays
  Clone ID: MRT4577_122146C.1
aaaccaaataactgggccaggggcccatggtttggtttaattgtttacaaaatagggggggacggaaaacagctaagggctccaaagggaattttcccataaaaaaacattgggggccccctttggcaggggattgaaaaaaacacacagttggggccaaggtacaaaaacatcgcccctaagttttgaaacatggttggctttttaataagcttgttttgcaaaatttggaaaatggaaaaacccattttttcaaccatattggaaggcaatttcagcgatagaggctttaaaatctaaagttttaaaaaatttaagtctcccagggatcaccattttaaagaaatttttccttggggaacagaagttcctggggggtctaaggggcaaactaaaagttgggcccctaaacaatagcatggacggggcaagccttttgacaaaacccacagaaaatgcattggggcatgtaaatttaatg

SEQ ID NO: 24278 - DNA, 1353 bp, Zea mays
  Clone ID: MRT4577_122147C.1
caggccggccggggagatcggcgttcgtctagcttggctcgtccctgtccggtacccttctctcaatgccgcgcagttgtcgaagtcgaaactatccgctgctgtagtagagatgctctcgatgcggccacccagcaccaccttgtcgcgcccctcgatttggccgagacggggtcgcctcgggggagccgccgcgccgcaatatgttagcgccgcggcaccggcgcccgctctggagccagctgcgcctccggagagcgtctcctttccgattctggtgaatggctgcactggtaacatggggttatctgtcgctgaggctgctgctctgaggggccttcacctagtccctgtttcattcagtagtagagagaaggttgaaaaaacaatgcaagttggacaaacagacattcaaatatatggtccttctaaaagagaagatgttctttcatctattgctgatgaattcccagatgtcattgttgtggactacacaggacccggttctgtgaactctaatgctgagctctattgcaagcttggattgccatttgtgatgggcaactggtgggaacaagcatttgctctacaagtcagtgcaagattcaaaaaattatgcactaatatctccacagatgggcaaacaagtggttgcatttgttgctgctatgaaaatcatggctgagcagtttccaggggccttttcaggctatcatttagaggttttagaatcccatcaagctggcaagctggatacatctggtacagctaaagacgtgattgcttgttttgagaaactaggtgtgtcatatgatatgaaccggatggttaagattagagatccagaacagcagcttgagatggtgggtgtccctgaagaacacatccaagggcatgcattccatctgtatcatctcacttctcctgatgacagtgtttcatttgagttccagcacaatgtttgtggccgttcaatctatgccgaaggaactattgacgcggcaatgtttctgcataggaaggtgcaatcaaaggattctaagagaatatataatatggatgatgtcctgcaagaagaaacttgccataaagcctactgattagctgctgataaataatactccctccgttcttttttatttttcgctgtttagttcaaaaatgaactagcggacgacaaatattcgagaacggatgtagtattaagcacagcgctgttgttttttgcgttttttgttagaataatgcactgcgcaccttcacccatttcagacttttgtgtaattgggttgaatatgagaggttcataggaaaaaaatgacatgcttctagtgatggcaatcataatttaat

SEQ ID NO: 24279 - DNA, 472 bp, Zea mays
  Clone ID: MRT4577_122148C.1
gccggccgggttcgggactactcaacactgcaaacacatatacatatacacctcacttactcttcttcaccagcaaacaaaacacgttcaaaatggcccagttcaacatcaccctcaagaaggacgctcccaaggaggagcttgaggccgcaaagaagaaggtcaccgaccagggcggcaagatcatcaacgagtttactctcatcaagggtttcaccgccgagatcccagacgacgtcgtgtcgactctcgagtccaacgagcatgttactgtagaaaaggacgccgaggtccgtacgcaatagagcgtgtcgtacacggggcgccgctgataaccatggcaaagatacaaatgtaatgcgaacaaccaagcgatacctcatggcatgctgcatgaccgtcatgactgcacagagtacatagtaataatgaccgccatctacgacaaaaaaaaaaaaaaaaaaggccccta

SEQ ID NO: 24280 - DNA, 1805 bp, Zea mays
  Clone ID: MRT4577_122149C.1
cctcgaggggccggccgggaaaaaacttacaaaaaaaaggaaaaaaaaaaaaaaaaaatttaaaaaaaaaaaaaaaaaaaaaaaaaagtgtgcctcgctcgtggcgggccggcgcgcattactcggccacgacttgccgactacgatgccagcgccaagcctccgccgcccagctaaaaatcccccaggcgttcctgagcacccgtttatcatcacatgaccggagtcggccagaatttgccgtagctctcgcccccgctcgccgtgcgcttctcgtcccattcccccgggatcgtagattctcgagctgagctgagctgagctgagctgagcgatggatcgcgagctcagccccaggggcaatgctccagggagagggagcggcggcgcgtcgtcatcgaagcacaagaacggcggcggcggcaagaagccgatcaaggtgctttacatcgccaaccccatgcgcgtccagaccagcgccgagggtttccgcgccctcgtgcaggagctcaccggccaacacgccgatccctccaagtacagccccggcgaccttgactccggcgctgccgcacagggtctgagccccagggccagggtcgcggacgtttcgtcggaaaccatcgtcgcaagccacagccctggcagtaaggccgcgccgcacggaggggactactacgacgtcgaggaagacgaagatgacgtcttcaggtcgcctcacatgctgctggagaacaattatacggtgttctcgccgccgacgctactatatgaccatcacccgcacagcaaggctacttctgaatcggaggctgggttcgcagcggagcatgacaatttctggtccaaatgaagctgaacaagttaatacgactatagctacgaatggtttcagtgaggagcatagcacaagacaacactggtacaagagactataagcatgaatacgaagatggctacgtacggcaatggtggtgaaggctacgatgaaaggattgcggcgatattacggttgatgaatggcatgatgtataattttcttgatggacaaaaggatatatacacctccgatctgttttgtccattgagcagcaatctatgtaatcttatgcctaatgaacaggctaaggatgttttagacacaactactctagttggcacaatgttggattcggaagggaaacattgtaaaacgttggttgcttccttgtgtacatgttgcgcgcagcattaaaaaaaaaaaaaataaaaaaaaaaaaaaaaaaaaaaaaaaaaaaaaaaaaaaaaaaaaaaaaaaaaaaaaaaaaaaaaaaaaaaaaacccctgaaaacccgaaaaaacgggcggttttcgaccttcccctatcttccgcaaccaaagggggccccccttctccaattcttctttaatttttaaccaccgccgccgttaccccttttgaacaacaccatgagggagggcatttggacccacatgggccagcccggtatccaggccgaaaacccgtgctggaagctgacctgcctcaaccatggaattaaggctgagggccaaatccccggggacaaaaccatggggggaggggatgatgctttaaacacctttttaagggaaactggccctggaaagcacgtcccccgtgctgtttttgttgaccttgaccccactgtcatcaatgaggggaggactggcacctatcgccagtttttccatcctgagcagttaataaggggcaaggaggatgcacccaacaacttcgttgggggccactacaccattggcaaggaaattgttgacctgtccct

SEQ ID NO: 24281 - DNA, 330 bp, Zea mays
  Clone ID: MRT4577_12214C.1
aagcagtggtaacaacgcagagggcgttttttttttttttttttttttttttttttttttttttttttttttttttttttttttgtttttaggaaaccattaccgatttggccgtggccatatggggggtgccgaaacccttttaccagaaaagtccaacctacgcctggggggggggggcgcccctctcataccataaacaaaaaccatgcacgcgctccaaaacacttctaatggggaccctccgaacaaagaggacccaaacacctttttccttacttaactggcccaaacacgaacactcccggcccagattctctgtccccaaac

SEQ ID NO: 24282 - DNA, 513 bp, Zea mays
  Clone ID: MRT4577_122150C.1
aagggcaaacaggggtaatgttcacctaatacctaatgtgcctacttcaaacgcctacaaatacaaccccgatacatagggggcgaaacattatttgcatataaggagctggtatcaaaaaccggggataactatggggatggatgttcactccccaaaattgatttacaatcaaacagccacaatatataacatcttcctacataccgacaaaaaaaaactgtacgttataaaacttaaaacccacataaaacgatggtgccttatgtgtcacttgtctacgcctgaaacacatgcaggacatctccattaattaatcaccaaagcaatacccttatgaatgcttgcctttaactccgactttagcgcctcaagttgcctagggctaatactaacacattacttggatgtaccgacaaatgacggactaaacaccattcttgcccaactttacttttgatccgaagaatagaatgctatttatttgagactgaacaaatgttctctcataaa

SEQ ID NO: 24283 - DNA, 256 bp, Zea mays
  Clone ID: MRT4577_122151C.1
atataagaaggggtttttaaccggtgttttttttttatacagggtgttttttttggggggggccaagggccagtgaatttttttgaaccacccccacggggaacgaacgcaagccttttttttttttacaagggacgggggctttctttggttttatgtgtgagcacttagccccgttggtttcggatcattcttatgccttccaccatgggtccttgccgggcctgaagtcggttttcacccccgggaccaaaag

SEQ ID NO: 24284 - DNA, 667 bp, Zea mays
  unsure (1)..(667): unsure at all n locations
  Clone ID: MRT4577_122152C.1
ccggccgggatgcatcgttggcatcatattttgcgctgaactttatacgataaggacaaaattagtattatctctgtaatgcgcttctagatgctccaacgacgaggaggcgcaccaatcactcactagaagggagtggctcaggtgtccttgactacattggtaaccacaggcgtcaggatggtatgagccttccttgtttcagctccgctgtctattcgaaggacgagcagagcaagtttgatcaactgcaacgtccagtaccgtcagcacaatacaggctctggccactattagaccgacaaggccatcgagcgcctcctctctcaattacgtaaggagagtctcaagatcatccccgtgaatgcctccagcgaagtcgacgctctgtactctttcaagaccgaattttcagtcaacgaagatctccacctgatcggagctctacagcgagaaaggtatctccaaggaccgcatactgatcaagattgctgctacctgngaggatatcaaggctagacgagatcctccagctgtgaccacggcatcaacaccaaccttactcttatggtctctctcatacaggccattggtgctgctgaggctgcagcttacctcatttctcccttcgtcggcgtatacttgactggttcaagcctctaccaag

SEQ ID NO: 24285 - DNA, 444 bp, Zea mays
  Clone ID: MRT4577_122153C.1
aaaaaaaacaacaggcttttatttagctgataccaaataaaaaaaaccgttagtttagccatcgtttaagggaatgggtgacaaatgaaaccattaaattggcctaaaaaaaacaacatttactaaacattttccgaataaccccccccggttttgaactcccaacagctggacttgacaatggggggtagctgataacaacgggcaaaacgcctttttttacaatgcaaccccccttgggataagctgccccatttttaacaaaacaggaattgctttctgtttgacaaaaatgtgggggggggtggttaacatttaaactggccccacttgttgattacgccccacccaagcccggaatgggatcctgggggttcctttttaacccacccgttttttggaagacagggggcccccccccaaaacaaagaaaccccccccgga

SEQ ID NO: 24286 - DNA, 1991 bp, Zea mays
  Clone ID: MRT4577_122154C.1
ccacgccacgccaccttccgtccacgcccacaagtccactcgccacctaccatggctgccggcctgctaacgcgtttcacccaaactcctcccctcttctctctctgcccctggtatgttaagcaattgatgattactaatccactctaacataaactaatcccacgataattacgtcccggcggatatcacccacatctcctgttgctactggagctcgactcatctcgtcctccgtcgcgagacaagaaagtagtaggaagggaggaagatagaggggttgcgtcccagccccacctgctatctcctctcttcttccccttcctcggcggctttccaccattcaggttcagactggaggggccttcctgccaatctccagtgcgtgttcttcagtggaggcgccggccggactcgcgatggagcgggacggccagcagacccgccgcgacaagctcatcatcgatacggatcccggcatcgatgatagcatggctatcctaatggcgttcagagcacatactctggaaatcattgggctcacgaccatattcggcaacgtcgacacagaaggcgcaacatgtaatgcactattgctgtgtgagagagcaggacatcctgaggttccagtagcagagggcagccacgagcccctaaagggaggaaagccccgtattgctgattttgttcatgggtcagatggcattgggaatctgtttcttcctgcaccctctgctaagaaggttgaggaaagtgctgctgatttcatggttaataaggtctctgagtttccaggagaggtctctgtgcttgctttgggacccctgacaaatgtagcattggccatcaaacgagacccttcctttgcaagcaaggtgaataaaatagttgtactgggtggagctttcttcgtggctggaaatgtcaaccctgctgctgaagcaaatgtatgataacatactgcattatacttgaggaggctaatactttaacataagtattgaaccttgagtgcattacactgcagatccatggagacccagaagcagctgacatagtttttacttcaggggcagatatcgttgtggttggcattaacataacaacacaagtctgtctgacagatgaggatctcttggagctaagaaactcgaaagggaagcatgcaccgttcttatatgagatgtgcaagttctacagagattggcatgtcaagtctgatggctttcatggaattttccttcatgatcctgtgagcttcattgccgtgcttcatccagagtacttcacattcaagaagggtgtggtgagagtagagacccagggcatttgcactggccacactttgatggatcagggattgaaaaagtatgtttttttctttctgagtaactcataaaagattgacccgtctgatgttactttataactcttggagtaagcaaaccaaggcaaaagttaccccacatgatctatatgtttcagcagatttcacacttgtttcttcttgttcttcctatgctgcaggtggaattcagagaacccatggtcagggtataaaccgatttcagttgcatggacggttgatgtgccaaaggtcatcagctttataaagaagctgctcatggcaccatgagcaaagtacaaccatttaacgatatgtcgacatcagcgttctctgatgtccaagaaaatttgacgagtacagatgctctttctcagctgcactgtaattagttctggacctaggatggttcctattcctccaatagtaagaggaacctttcattgtgaaaggtcatgcagcagtctcgaataccatgaagcaaattctggcatacgatatcatgtctcacatttgtatcaatacatttcgaatcaataaagtttccctcactctttactgtgcacttttctcaaagatcacaatcttgttgtaatgtgcctctcatgtaaagcaaagtgccaacaaggcatatgatagttttgat

SEQ ID NO: 24287 - DNA, 824 bp, Zea mays
  Clone ID: MRT4577_122155C.1
gggaacgcccacaagtccactcgccacgtaccatggctgccggcctgctaatgcgtttcacccaaactcctcccctcttctctctctgcccctggtatgttaagcaattgatgattactaatccactctaattacgtcccggcggatatcacccacatctcctgttgctactggagctcgactcatctcgtcctccgtcgcgagacaagaaagtagtaggaagggaggaagatagaggggttgcgtcccagccccacctgctatctcctctcttcttccccttcctcggcggctttccaccattcaggttcagactggaggggccttcctgccaatctccagtgcgtgttcttcagtggaggcgccggccggactcgcgatggagcgggacggccagcagacccgccgcgacaagctcatcatcgacacggatcccggcatcgatgatagcatggctatcctaatggcgttcagagcacatactctggaaatcattgggctcacgaccatattcggcaacgtcgacacggaaggcgcaacatgtaatgcactattgctgtgtgagagagcaggacatcctgaggttccagtagcagagggcagccacgagcccctaaagggaggaaagccccgtattgctgattttgttcatgggtcagatggcattgggaatctgtttcttcctgcaccctctgctaagaaggttgaggaaagtgctgctgatttcatggttaataaggtctctgagtttcaggagaggtctctgtgcttgctttgggaccctgacaatgtagcattggcatcaaacagaccttctttgcagc

SEQ ID NO: 24288 - DNA, 932 bp, Zea mays
  Clone ID: MRT4577_122156C.1
aaatagttgtactgggtggagctttcttcgtggctgtaaatgtcaaccctgctgctgaagcaaatattcttggagacccagaagcagctgacatagtttttacttcaggagcagatgtcattgtggttggcattaacataacaacacaagtctgtttgacagatgagggtctcttggagctaagaaactcaaaagggaagcatgcaccgttcttatctgagacgtgcaagttctacagagattggcatgtcaagtctgatggcttccatggaattttccttcatgatcctgtgagcttcactgccgtgcttcatcccgagtacttcacattcaagaagggtgtggtgagagtggagacccagggcatttgcactggccacactttgatggatcagggattgaaaaagtggaattcagagaacccttggtcagggtataaaccgatttcagttgcatggacggttgatgtgccaaaggttattggctttgtaaagaagctgctcatggcaccatgagcaaggtaccgccatttagcgacatcaatgctctctgatgcccaagaaaatttggcaagtacagagccactctcccagctgcattatacttatttcctggacctggaaagcttcctgttcctccaatagtaagaggatcaccatggttcttttagttgaggtcttaatgatttagatcgacttctatactgcgactaaaaatatcgatatcacaagagtggataaccgtgtctaagccatttcgtccttcaaatctgggagtcaaattgtgaaagcttatgcagcagtctcaaataccatgatgtaaattctggcgtatgacagcatgtctcacacatttgtatcaatacatttcgaatcaatgagatttcccataccctcagtgcaaaaaaaaaaaaaaaaaaggcccctagggcc

SEQ ID NO: 24289 - DNA, 605 bp, Zea mays
  Clone ID: MRT4577_122157C.1
gtagggacttcttgaagaacatgtgcaatagagaatcctgccggtttttacaccctgggacacatacagcggctgcgagcgccaatgttgaagtatgccgtgattttaaacgaggagaatgcaatcgacctgcctgtcgctttttgcatccatatacaagttgaagttttctgttagctaaacttgagtgctctgcccaccgccgccgctactgctgtgctgctgctgctgctgctgccgccgctgctgcgccaccaccacccattctgcttctgccaccaaagagctgctgcgctggctgttgcgtcgctaaggtgccatagagcaaggaagccatagaaggccctatgtatgcatcgaataaaagatactaatatcctgtgatattcagatggttgcttgaacttgctttactcaatgcttgtatttgttgtcataaaagatataggggctgtgtgtggttttgtatttgttgtcataaaagatattttttttactctagctaatttgatgtctgcgctattgccttccccttagcatcacactttattgtttgtataagttattgagcaaatgtttcgccacggcaggcctgccgctgtttc

SEQ ID NO: 24290 - DNA, 2032 bp, Zea mays
  Clone ID: MRT4577_122158C.1
tacgaggatacatttattcaattcactgataggcctaagtatacgttatttgcaaatgctacaatatgtaacattaaaagccaaaaggctataactgtacaacttaatataaggctgttaagattactattgtagtacaatttaagggtatcatttgctacccatttgcaatatctgaattcttaattgaaagtccttttcctagaaggcatttcaagtagtgaggaattgcttatagtactgacttcgttgcacggaccattgggtcctcgaggccggccgggacagcccacaagcgtgcccggcgagttggaaaagcgcagaatctgcgagacaagaaagcactagtaagggagaaacagggagagaggttgcgtcccagccccacctgccatcgcctcttcttccgctccctcggcggctttccaggattcagattcagattgggggccttttgctgctgcgcggcaattctcgtcgctccagtccccacttcgctgttcctgagcgggaggcgccggccggactcgcgatggggcaggacggccagcagatccgccgcgacaagctcatcatcgacacggatcccggcatcgatgatagcatgacgatcctaatggcgttcagagcacctagtgtggaaatcattgggctcacgaccatattcggcaacgtcgacacaaagggcgcaacacgtaacgcgctattgctgtgtgagagagcaggatgccctgaagttccagtagcagagggcagccatgagcccctaaagggaggaaagccccgtgttgctgatttcgttcatgggtcagatggcattgggaatctgtttcttcctgcaccctctgctaagaaggttgaggaaagtgctgctgatttcctgattaataaggtctctgagtttccaggagaggtctctgtgcttgcgttgggacccctgacaaatgtagcattggccatcaaaagagacccttcctttgcaagcaaggttaagaaaatagttgtactgggtggagctttctttgcggctggaaatgtcaaccctgctgctgaagcaaatatccatggagacccagaagcagctgacatagtttttacttcaggagcagatgtcattgtggttggcattaacataacaacacaagtctgtttgacagatgaggatctcttggagctaagaaactcgaaagggaagcatgcaccgttcttatatgagatgtgcaagttctacagagattggcatgccaagtctgatggctttcatggaattttccgatctgagcttgaaaactgcacttcagagaatccttggtcagagtataaaccgattgcagttgcatggacggttgatgtggcaaaggtcatcagctttataaagagctgcttattcagggattaaaaaagtggaattcagaaaacccatgttcacggtataaaccgatttcagttgcatggatggttgatgtgccaatcgtcattagctttataaagaagctgctcatggcaccatgagcaaggtacaaccatttaacgacatcaacgctctctgatgtccaagaaaatttgacgagtacagatcctctttctcagttgcactataattagttcctggacctaggatggttcctattcctccaatagtaagaggaacctttcattgtgaaaggtcatgcagcagtctcgaataccatgaagcaaattctggcatacgacatcatgtctcacacatttgtatcaatacatttcgaatcaataaagtttccctcactctttactgtgcacttttctcaaaaaacacaatcttgttgtaatgtgcctcatgtaaagcaaactgcgaacaaggcatatgatagttttgatacaacaaaaaaaaaaaaaaaaaaaaaaaaaaaaaaaaaaaaaaaaaaaaaaaaaaaaaaaaaaaaaaaacaaaaaatttttaaaaaaaacaaaccaatttcccccctaaactacaaaacccctctcattttttccaccctacccaaccccccaacaaaaaaaaggggggccc

SEQ ID NO: 24291 - DNA, 3614 bp, Zea mays
  Clone ID: MRT4577_122159C.1
ttgggaccctcgagggcgggcgggggacctcccaactaccattcccaggccgggacggcacgatggcctccgccgaaatccccaactccagccccgacgccaccaaccccgcccccgccgccgccgccgccgccgccaccggccccgacctctcctcttcgccgccgccgctcccgccgcgcaagcgccgcctttcgccttccccaccaccaacgcggtccgcgtcacgctctcggtccccccgctcccgctccccgcacggccgacgctcgcgcagccggagccgcagcccgcagcagtacccgaccgatggcaagcggcaacggcacaatggccttaccgtggatgcgtgccgcgatttcctgcgcgacaggtgcacccgctccgacctcgagtgcagatacgcgcaccctcacaactccgtttccatcgacctggacaataaggtgactgcgtgtgcggattctctgaggaacaattgcttccgggggatgacatgccgttactaccatccgcctccacatatccaggagcaattactgagatcagttggtgtggaagacccaaaggtgaagacgatctgcagagattttacacgtgggaagtgttcaagatcagcaaatgagtgccgattcttgcaccattcatctgttgaagatgctgcaattgtttgccaagattttttgcgtggacaatgcaatcgcatagcatgtaggtactctcatgtagtagcacatccggtgccaccaatgagccatgttcctatgccataccctgagatgctttacatgccaccaccaccaccaccaccccttggagtaccaatgatggggcctctgccttcacctcctaatttgctgataataagaacagagttgaagtttgtagggacttcttgaagaacatgtgcaatagagaatcctgccggtttgtgcaccctgagacacatacaacggcggtgaacgccaatgttgaagtatgccgtgattttaaacgaggagaatgcaatcgatctgcctgtcgctttttccatccacatacaagctgaagttttctgttgcctaaagtaaagtaaattatactttgtttccccccttttaatacaaatgactgccaaatacatatagatgaaagaatactcccctaggaacacctagttacagagttaactttgacttcaatttgtggatcttttgtctattcaaaccagctagagcaaaatagagtttaagtttggtaacttttgtcatttgtgtgaattaagctatttccaatgaaatgcaacttttatccgatctgaacaggcatgcgaatgaacatgttggttctctaagatttccaattggctaagatagcatgcacttgttcaagtgatccactgtttgaccaccttcattgtcttttactccacatcaattctgttccttctgggaaagctcttctgctaagtttgatcttagatttatgaaccacaagtccacttcaatggcaaatgaccccttataggaacaaaaccgttactgctgcctgggtcacatcccccgccggtgccatgccattataataaatgccgttcttacgaacgacgagaaaacctccaaactgttgttccacccaggtacaatagagcaaggaagccatagaaggcgctatatgtatgcatcgaataaaagatactaatatcctgtgatattcagatggttgcttgaacttgctttactcaatgcttgagcagtgcccccttcactataggggctgtgtgtggttttgtatttgttgtcataaaagatattttttgactctagctaatttgatgtctacgctattgccttatggtgggctattgataaaatattaaaatttgtatggtctgatctgctcctgtgtatttctctcgcacgaactaatttcctgaagttagttgataaactaatgagagtatctttcaagtgactactattattttgctaaccgggttatctgacatgtgtcaatgtgtcatacctaatgttgggtcttataagatgtaagactaacagtagctgttgctatatgttttttcatttgagaaatcatcagtggcaaaatgtagaatctgctttttattttttccctttactgaaccagaaactgcaggcaagtccccatatttagttttcagtcttattaacaatgctgttagctgtctttaacatatgggtactgcttgtttcctcagcttgagtgctctgcccaccgccgccgctactgctgtgctgctgctgctgccgccgccgccgccgccgccgctgctgcgccaccaccacccattctgcttctgccaccaaagagctgctgcgctggctgttgcgtcgctaaggtgccatagagcaaggaagccatagaaggcgctatatgtatgcatcgaataaaagatactaatatcctgtgatattcagatggttgcttgaacttgctttactcaatgcttgagcagtacccccttcactatgggggctgtgtgtggttttgtatttgttgtcataaaagatattttttgactctagctaatttgatgtctgcgctattgacttccccttagcatcacactttattgtttgtataagttattgagcaaatgtttcgccacggcaggcctgccgctgtttcaaacaggcaccgccagagaacattctgatgtgctttgtgttactaaactatcatatacagtaccagctaccgagttgattgaaacggcaaggtatctgaaaggctggttggttgatgggctcctatgcaaagcgtgaggcagagctgctgttcggatgcggacacaaattctacaggagtacgggtaagcgattttaagcatgagctctggggacacagattcagacattgcaacggttttatgggtagcctgcctgaagggtcgccacctaatccctgccgatcggggcaatgctattctgggaaatgctatgcttgcacttgtaataactgccgcttctctgactgagcttcgtttgcagctgctggacttcaatcatgccgcttctctgtgattgagcttcgcttcctttttgctgcagctacttttcgtcgtacaagtggttaccaacagctgcagtagatttggtgtgccgctggctgctttttctgaccccctctacgaacagtaggtgtacattacaagcggaaggtggcgtcacaggacaggagaaagcaagcacggtccaaggccgttctagctgtcgacgccgctttggataaaaaaaaagaggtgacgcgagagcgggagaaaaagccagattcatctgcagtgtcactgatccggcgtcgacgccgcctcgtagagcggggaaatgacatgggctacgacttatacgtcactgcttaagtaagtaacagtaacgtgacggcctgactggtgaactcgcaaccaccgcttttgttttagatttatctcttttccaagttcgataggtttgcgttattttgcctccaattgtttttttgggggttcattaatgtatgtgatttgatgcgctgaggcatcgacatcacgggtgtaagcagctagctgctgaggtctgccttgccttatcgtcgcgattaataaagctgtttctttc

SEQ ID NO: 24292 - DNA, 451 bp, Zea mays
  Clone ID: MRT4577_12215C.1
gggggggaccggggggggctttcaattcttcatcaaagggccccaaaaaagtaaacccaacagggggggggggaaaccaattaaaagcttgtttacccggggggctaccaaaagaaacagagagggtggttttttcgaaactttccaaacttattttaagcaaacgggggggttttgaccagggcttgcaaacggggaccacttttagccgccgggggtccaaacaacggggccctgggggaggaaggggaaaatgggccccgggccgggtttcaccctgagcccctgaaacgcaacgggcttggggttccacccggacgtgtcgggggggcacaccggaaaagggtccacgggcgggccgtccttgcccagatttgaccccgagtccccccgggtttggtgggtaaaggggcccccaaacacggggtacccgtacggttccgggggggag

SEQ ID NO: 24293 - DNA, 327 bp, Zea mays
  Clone ID: MRT4577_122160C.1
tttcatcaccaccaatctcaacatcagccagcttgggtcaatattgaatagccggagcgtggcttcatgtgccgctctctaggtgctagccgtcgagctcatggcggccaccgacccacaggtagcggtagccaataagaagagagcggctgacagcggcaaggcgacggacgcgaacaagatccacgacgactattgctcgacactgtgcgagggcaagaaggggaccgacctcgtcgagtacaaggagtgctgaacgctctcccagcagaccaacctgccgctggacgggaggatccagagcaagggcacatgcaccgagcagaa

SEQ ID NO: 24294 - DNA, 547 bp, Zea mays
  Clone ID: MRT4577_122161C.1
aaggggaaggcaatagcgcagacatcaaattagctagagtaaaaaaaaatcttttatgacaacaaatacaaaaccacacacagcccctatatcttttatgacaacaaatacaagcattgagtaaagcaagttcaagcaaccatctgaatatcacaggatattagtatcttttattcgatgcatacatagggccttctatggcttccttgctctatggcaccttagcgacgcaacagccagcgcagcagctctttggtggcagaagcagaatgggtggtggtggcgcagcagcggcggcagcagcagcagcagcagcacagcagtagcggcggcggtgggcagagcactcaagctgaggaaacaagcagtacccatatgttaaagacagctaacagcattgtaaattagactgaaaactaaatacggggacttgcctgcagtttctggttcaataaagggaaaaaataaaaagcagattctacatttttccactgatgatttctcaaatgaaaaaacatatagcaacagctactgttagtcttacatc

SEQ ID NO: 24295 - DNA, 666 bp, Zea mays
  Clone ID: MRT4577_122162C.1
ggccgcttttttttttttttttttatttttttttttttttttttttttttttttttttttttttttttttttttttttttttttttttttttttttttggaaaaaagcccggaccgccccaaggttattcccggggaaaaaaaaagtcctggaacaaagcccttgggggaaccccaaagccgggggacagggaaacccacggaacaaaaaccccgcaggggaggggtgggtcttcaaaacggaaataaaccccccccgggggcaggggaaatcccataattctaaaagcaactggccagcccggcaaaaacccgacccaaggcaaacccaacccccagctttttcaaaatcccccggccggcccggggggcccccaatcccccccaaagggggggggataacccccccccacgggccggggtttaacaacggggggacgggaaaaacccggggggaccccaactaaaaggcctgggaaaaaaaccccctttcccccgggggggtaaaagcaaaaaggccccccccaaacccccttccaaaaaggggcccaccccggaggggaaagggaaattgtaaccccaaaaatttgggaaaaacccgggccaaattttggcaaaacaagcccactttttaaaccaaagggccgaaacgggaaaaaccccttat

SEQ ID NO: 24296 - DNA, 365 bp, Zea mays
  Clone ID: MRT4577_122163C.1
aaaaaaaaaaaaaaaaaaaaaaaaaaaaattataaaaaaaaaaaaaaaaaaaaaaaaaaaagagcaaaaaaaaaaaaaaaaaaaaaaaaaaaaaaaacaaaaaaaaaaaaaaaaaaaaaataaaaaaaaaacacataaataaaatataaaaaaacaaaaataaaaaaaaggatagactgtaaaaaccctcacaatacctaactcaattaatcttgaataaaataccctttatgctatctaccataataacaaaaaggtccttactttaaaaccctttccaacatttaaatcattctgaattactaattaaactcactttgaaacaaatcattatatccaacagtttcatatattacaaacaattt

SEQ ID NO: 24297 - DNA, 340 bp, Zea mays
  Clone ID: MRT4577_122164C.1
ggggccgggcgggggggctctggggtcatcaactcacacatggcagggtggacaaggacacgggaaggaacctgaggcttgacttcgagaagaccccggacacacttgaaggaccgctcgagcagcctgtgaccaaggctaatcgaacccttaaggacgcgattggtgggggcgggaaattgcctatcaggtagaccggggaggggtgggtcgccccagacaagctgggggttgacaatgcagtggacgggagcgttggcctgaggcgtgggtgaggggcatagtaggagtgctgaggaatgctgagagtaacgctgatgtgaaagggttgggcgtgggc

SEQ ID NO: 24298 - DNA, 115 bp, Zea mays
  Clone ID: MRT4577_122165C.1
gcctgtgtcggcactggtcagacccgcacatgtgacgattctcctcctccgaccgcgtagatctcggtttcggtgatgtcgaggtgcggctaggggggcaaggggctgggtaagg

SEQ ID NO: 24299 - DNA, 157 bp, Zea mays
  Clone ID: MRT4577_122166C.1
ctcactctccctgtatacactcattaatcgcttcagatcctcgattttactctcaacgtgactcatactacttccatctctctatctcccgctccttttgctttcttaccttactttctatccacattatactactttttcacttataactctaaat

SEQ ID NO: 24300 - DNA, 297 bp, Zea mays
  Clone ID: MRT4577_122167C.1
ctaacggcaaactggatatacaaaatctgaggggctatctaaggcaagagaagcaacctgttgcagaaatgctgccttgtttgagactagcgtccatataaaaccctgataaactgcagactatactgtctactaaaagagatacacgtacaggcagaacatgtacagagcgagctagcactaagagcaacttggaggcaacctggaagcttcaaacgagtggatattcaacatgattggatgaaaaggaaggtatcgtgcaagatggaatggcgtgaccaaagacggaagtggcta

SEQ ID NO: 24301 - DNA, 468 bp, Zea mays
  Clone ID: MRT4577_122168C.1
tttatttgtagcaaagagcgaagagcgaagctgcggggtgtagttacgcttgttcgctcgagacctagggtacgagcaacaataatagagagtgactgagtgagcgagcactgagtagcaagggcccggcacaaacaggacgcagccggcaacgtgtacgtcgaaccaaacagagaacagctagctaatcgatcggtcgccatgaccaaggacgacgccgtcccggtggccgtggcgccggcgaagcgcccgcccatcaacaagtacgccttcggctgcgctctcctcgcctccatgaactccgtccttcttggctatgatatctcggtgatgagcggcgcgcagatattcatgaaggaggatttgaagaacaccgacacgcagatcgagatccctcgcggcgtcatccacatctactcgctgttcggctcgctggcggcgggcatgacgatcgactggctgggccgc

SEQ ID NO: 24302 - DNA, 297 bp, Zea mays
  Clone ID: MRT4577_122169C.1
ccccgcctgccgctgtccttcggctctggctcggctcattcgttcgctcgggctaattgtctccaccactttattttttttttctccccggccactgccagtccaccacaaccacgtcccgccgtcgtcgtcgcgcttcccccacgcgcgccccgtcgcgtcccggtgctgctgttgagtgcgcccgcgcccgcgcgttgccgtgaggggggtgccgcgcgccgccgccgccgcctgcctgcgtgggttgcaagccaagcggcaggtggggccggagacgttcgccggaggtagcgg

SEQ ID NO: 24303 - DNA, 418 bp, Zea mays
  Clone ID: MRT4577_12216C.1
acatgccttcttttttttatttttggtttgtgtttttaacacagaaccttttttgttattgaatacatacatgcatacggtcccccagacaaaccatactttaatgcgggtaacacttccaaaacatactggctgggcaccttgcataaatccccttcttttcaaatgaaaaattgtcccattttccgacaaataccgactacgggttttactaaggccaacaagcttcctaagctttaacccctggcataatatggtcccatttgttagggacccacaagcacttaaaattggcagcttaaaacccgtgaatattgaagctcacttttttaacaatgccggcctggactagaaaagtagcgacattttaaccctgttcaccttgcagttgaatgacctggcctaattctgtatcctg

SEQ ID NO: 24304 - DNA, 1928 bp, Zea mays
  Clone ID: MRT4577_122170C.1
aaaagtacagacttagagctcccaagattattcctttcttctagcgacaccgctcgataccttgcgatcccaagatggcatcgccgccgatacccacacagtaatcctctcctcgctcccctgtcccctctttccccgccgccgacgccgagcctactctgtccatttccggactcgccgtccctcgcgggccggttcggtccgagcctgcgccccagccgcgccgggatccgcgagagaaccgcttgccctccgtgctttgcgggcggtccggtgactggctttgggattcctgtgccggggggctcgtgagcgcaatggggctgtttgggtgaactagggcttgcttctgtgaattctgtgagggtgagcggagctgtgggagggaggatgcaggggaaggcacagctctctgattccaaccggcggatcatggagctcgacgcgccgccacggcgggtgtaccaggcgtggaagggcagcaacttatttttccttggtgggagacttatctttggcccagatgtgaggtcactcgtgctcacagtatgtttgattgtagtcccagagatcttctttgctgccaccgtttgtccacaacttggtcatgagttccacagccaaattggaggttgggtggcatctgtggctgtcatctttacaggatatattcttattgttctacttatcacatctggccgtgatcctggaattgttcctcgaaacactcatcccccagagcctgaagacatcgatgaatcctccaacttaccagattgcccgggtggtcaacaaggttcgacaggtttaccacctacccgggatgttcttgtcaatggtgtttcagtcaaggtcaaatattgccatacatgcatgctttatcgtccgccaaggtgctcccattgctcaatctgcaacaactgtgtagaacgttttgatcaccactgtccttgggtaggccagtgcattggcaagaggaattaccgattcttcttcatgtttgtgtcttcaactactgtactatgcatatacgtgtttgcattctgctgggtcaatctcaggagaattatggacacgcatcaatgcaaaattggtagagctcttttgaagtctcctatctccggtcttctcatcctatacacatttattgctgtgtggtttgtaggaggattgacctcattccacctctatttgatttctacaaatcagactacttatgagaacttcagataccgctatgaccggagaacaaatccttacaaccttggagtgggtcagaatttcatcgacgtcttgttttcaaggatacccagctcaaaacacgatttcagagcaaaagttaaggccgattcttcgaccttcgcgtcatccctcagtatgggacgggttctaagcccgcccaagacgagcgtggaccttgagatgggcatgaaaaggcaagcggtggccgcagaggacttggaagacttgcacagccagatcggcagtgctatggggctggagagatgtggcaccgagccgccgcattttgtcggccggaagggctgctctgagatgtcacctgacatagaggtgttcgcagaagagtttggcatggaaggtgggcacagtgagaggaaaaagattgagcggcggacaaatgatgattcgtaggaagtttcccacgtcacaaaccacctcttcggccttcctccaggccccaaacttggtaaaagcttgcaaagaagaaagtgaagtaggacaaaacggacggtagagtgaatcaggcattggttagtttgttttggttgtcatttctagccaagacttgagttagaagtgaaagatgttccttgacgatatagaaatgatgaatccacatctggtttggacttcttagtctatgtgatatattggatgtgtggtgtggcagtgttgcttctgatttt

SEQ ID NO: 24305 - DNA, 483 bp, Zea mays
  Clone ID: MRT4577_122171C.1
tttccaactgatacaatggctgaggggcgtggggggggtgaatgtaccactgcaggcggtgaccaaagggcattacaactatgccgatgacagaagacatggtgattggtgggggccaactacaatgcactattattcttttgctaaggcaccttctagggacatatgccatgaatgaggagcggggcggtggccatctacaaataaggaggatgctacagacaactcttaacaggcattatacaaattcaacagcagaatcaaaaactatctcactcctaggatcttatgaggagatatagagactaagcagaaaggctgagcaaaaggcatatatagaatgccaaaggctctgacagaaggaacgagagaggcattacatcaagcggacccgtgatatcacgcttggatctcgtgtatctgctaaggagaaaaagaacaaattgcagcttccttacattaaatggactgaacaccatataa

SEQ ID NO: 24306 - DNA, 248 bp, Zea mays
  Clone ID: MRT4577_122172C.1
actttaatcgtaggtactatttagcatttgatggttaagaggcgaacagaaagcgttgattatttttgctatcgagccgattgtcacaggtagccaccatgcatacatgcggggtaccagaatctcaatgcataatgtttatcgtggactaacatccctcacagaagccgccgggccacgacactctgagatggcttggatacttgccgctggccagtgatgggcctacataatatgcttgagaccat

SEQ ID NO: 24307 - DNA, 365 bp, Zea mays
  Clone ID: MRT4577_122173C.1
acggacgcgtaggtgcctccactgagctggccccctcagagcaacgtatttcctctacagtgtcgccccctcccggtctccgcctaccacatgctgtttgcgagggcttcttacagcgctcaaaaccgtactttcatcttactgcacatctttaatgaagatctagacttctcatcggacacttcgttcacctctccaacactcacgtctctaatatcatgactcctgaaccggtaatcgagcagtaggctccgctaccccggagggccagacaacgtcccgacccacccttacttctcagctctaacatgggacatgatcacgtctgtgtgcacaccaccttaaagttctccttatggtgatca

SEQ ID NO: 24308 - DNA, 172 bp, Zea mays
  Clone ID: MRT4577_122174C.1
ttgttatagatgcgtaagcctctctgggcccgagaacgatgcgcacctgctccccggtggcgtggccctgggcaaggcatccacttaccagtttgcgccatggacgccgtgcctgaatgggttcatctaaccccactgtacgatcggataccgagagacctcctatgcaatg

SEQ ID NO: 24309 - DNA, 357 bp, Zea mays
  Clone ID: MRT4577_122175C.1
ccagccttaataagatcattgctaattcgttgtgacaggcatgcggctggccttgcctgaatcacgaccgaagcaactctacaagttccttgactacacccatgcatataactttccacaggaaacaactggcggcagcaggggtagtagttacgtttgctgatacaccaacttgtagtggaacatgaagctggtgagcacgtggttggagacggggtcgaccaggtggtcgaacaggttcaggaacgggacgaccccggagacgaacccctggatgatgtcacccatggtggccatcctggtcagcctccccttcatgatctccttaaacttgagcttataaatctccctataggc

SEQ ID NO: 24310 - DNA, 377 bp, Zea mays
  Clone ID: MRT4577_122176C.1
caactgggtaccgggccccccctcgaggagcgcacccaatttccttatccgtctcctttctcgccgtagccgtctccgtctaacgcgtcctaggtgcacgcttactgtttcagctacatcaacagagtccctcaactctcactttctttttaatcccctgcatccgatcaccagcgtgccacaccatgtcagacccatccttagacaccagctcctaaatcaccaccaaagacttaaagcagaagaaggaagttgtggaagacgcagaaaatggaagagaccccactgctaacgggaatgctaatgatgaaaattgggagcaagaagctcacaatgaggtagactaaaaatatgaagaaggtggtgaggaagaacat

SEQ ID NO: 24311 - DNA, 257 bp, Zea mays
  Clone ID: MRT4577_122177C.1
tagctctggcggaatgctgtgatgtaggccaatgcagtcctggattgggtctactgcatcatgcgatctggagtagacagccaaaggggactatcctctggaggctgcacggcatgagcagctgattgcgcgtgaggcagatgctgccatctaccacttgcaattatgtgatgaactccgccgcctggcctcgttaccagctaccccacagaagccaccgccgtgggttccgttgatgcctccttcaagttctgcag

SEQ ID NO: 24312 - DNA, 122 bp, Zea mays
  Clone ID: MRT4577_122178C.1
gtggggaccaattatacagctgactaccaacgggggtgagaaaatacatcttccatttaatttccacaaccaaaacgcaccttattatgggaaaaccaggatacaaatctaaatagtacgga

SEQ ID NO: 24313 - DNA, 408 bp, Zea mays
  Clone ID: MRT4577_122179C.1
gtggagcacttttatgttgaacctcatgcttgatgagtctgggaaggggttcaacttaactggtgctacaggtacatgtttagctcctccagcgcggtgtcgcctccattgaagattttttaaaaggcggctttcaatgaaatgtttatccatcggacgtgggaacaaaacatgcctttatggtaggcttttttccaggaggaattccttttctcgattcttttttgaggcttttggaataaaattaaaatattctaaggtttaacaagtttttaatttattgtgtagagtcaatggtatagaaattaaagatatttacccggaaagggcaaatttgaatgaaattgccctttcttcttaataacttgcccttttcaacaacaaatttttttgaggtaccctttaagt

SEQ ID NO: 24314 - DNA, 203 bp, Zea mays
  Clone ID: MRT4577_12217C.1
tggcgctgaggtccgccggatcgcgcgcgcgcgcggatgttgcttggccgcgcgcccggcggggcgggcgtgatctttcgaccggtccgggcatgccgtgcgctctatggagcggatagggtggccgcgcgcgtggtgcctaccgcagtggcccactggggctccacgggcggcgggctcaggcgtccctgggcggctggtcg

SEQ ID NO: 24315 - DNA, 400 bp, Zea mays
  Clone ID: MRT4577_122180C.1
ttttgttacacttcgtcggttgccaactcgcgcgcaacatgggccgttcgaccggcccccttcacacttccgccctgtcttcttctcccttcgcagaggccgaggttggacctttactggatcaaaagggcttttctgctgctgccccttaataccatgcgcccgcgcccgggcccgggccgtaaaagtggaagcttgaggaagcagggtttcacaccttcgaatactacaagatcctggccgctgtccccgatttgtgtattcggttcaggcatggtcaccaagctactgatttgctgaacacttgatcttcaccttagaatttgagaggtatattaatgaaaccctattatgatctggtaggatgacaattgtttttcaattgaatggattccagcca

SEQ ID NO: 24316 - DNA, 279 bp, Zea mays
  unsure (1)..(279): unsure at all n locations
  Clone ID: MRT4577_122181C.1
gtgaaccacctggatccacttcatccggcgcaggaatgaaaacatgcctgttttcgagttggaagaaacgaacgagccctaaaggatccgaaccataggtttttaatggcacacggtttatgcgatgaagacttaagatattttcacaatattgataaaaaatacagtggattgtaaacataggctcttctaatctcttggatgagaagacgaaagatctcatncaagaggaagaagaaatgctacactttcgaacacgagatacttacattttatatt

SEQ ID NO: 24317 - DNA, 611 bp, Zea mays
  Clone ID: MRT4577_122182C.1
cggatttcgcccacgcccgcctctgccgaagaccagccgccgctgtcgacggcgaactcccgcggcgagtcgaccgccgtctcagaccctaaggcctaagccctagttccagcccacccagttccttaaccatggaggatgccctcgcgccgccgtctgtggccccgactccctcccccctcgccgccgctgccgtcctcacccgtcgtcggtcacacctcgacagtgcctccttccgcacgggcgcccgcctcttctctcactgtctccacatcaacccgtcgccctgtggcatctcgccgcccgtgcccgagcccgtcgccgcggacttcgtcggtggggaccccgacgattccccagaaaggcctaatggcgctgatttcgatcggctaaaggatgtgcaaatcgaggcggcggatgcgggaggcccttcgcttcacgggactgtccatcaaccggccgcggcgaactctaccctcgacctggttgaggctgaggctgaggctctgcagctcgagggtgcggacgcggtaggggtcgtagaaagcacctcgtgtatgaccagagccgaggctggggaatcagcggtacttgtggtagaaagcacctca

SEQ ID NO: 24318 - DNA, 296 bp, Zea mays
  Clone ID: MRT4577_122183C.1
cccacgcgtccgccgactcgtgcgtggatttcaagaccaccaacatccaaaccacctggggagaggtctcttacgcatgactcccaaagtgctgcacacggctgtagctataccgcatgcttcgatcgacacagatacactgcgcagattatagcttacctgataccactgcgccacatctatgcatgcaaggatcccaattccgctcatcgccagcacttctcccatgtggagatcgctgccttctaggccccaggaacaaaacgtactagctcaggacgactacgactactagg

SEQ ID NO: 24319 - DNA, 535 bp, Zea mays
  Clone ID: MRT4577_122184C.1
gacacctaccactgcccctgcccggctgtcctcctcaagctcgtaagctcctggctacggcggcatccatcgttccgccgcatgggccgtatcaagactctgcgcgacgctgcacccagaccgacgagataatgggtgcccaccgaatcagatatggaaagcgccacgaagcatttactgaaagcggtggtatgaagatacagaaaaccggacgatgatacataatagcacctgggccggagaacactgtgcatcggtacctgaggacatctagaaaaattgccagtgtcattgtaaagagaggagaaatagcaaagcaagggaggactgaaacccaaactaagatcaggatgggacacagtgtaccagcatgagaggagagagtggccaccatagtgaacacaagcaggaaaactaatacatctgatggtgctgaacatgaagcatgccctactcaggataccctgtttagagtgcataagaggctcgccatagaggacgtgataggcaacgaataaggaaagaaatggcaact

SEQ ID NO: 24320 - DNA, 715 bp, Zea mays
  Clone ID: MRT4577_122185C.1
gacccgccgcctcgacggcggcggcggcggcggcggcctcgtcgaggagtaggagggccacgcggtctctgtccccgttcagggtcaggggcggcggcggaggaggaggaggcgtggacgacgacgaggagtcccctccgtctccccgaacctccatgatgcggggctgcggcagcggcagcaagaagtggcggctcaaggacctgttcctgttccgcagcgcgtcggagggccgcgccaccaccggcggcggcagcaaggacccgctgttcaagtacaccatgctgtcgtcgtcgtcccagcagacgctgcggaccggcggcgacggcagcgcgtccatgcgcaaggggagaggctccgcggcgtccgccagcgacatgccgatgccgtacgccgtgccccggggggcggcggcggccgaggacgcgcggcgccggacgacggccaccacgccgctgccgttccaccgcaacagcctcttcggctacctgcgctccaacccggcgatccacagcatcagccggaagctcgggggcggcggcggcggcggcggcagcagcagcagcaaccatcccgtaccccccgccgcctccaactccagtagtcgtggcaggccgacatgatccgtccgtataccgcaagcagtcccgaaaccttgacggcgatgcagctcgacgcagaagtggccgccggcggccgtttttatctccccacc

SEQ ID NO: 24321 - DNA, 363 bp, Zea mays
  Clone ID: MRT4577_122186C.1
cccacgaatccgaacgcgagcgatgcatgttgctgttagcgcatcactactctccgagttggttaccaagaccaagcagatcactgagtccgttgatgtcctcgcgcgacttgcccgcttcagggggcctgaaaccactcagactcataagggtggggctatcgatgtactgagctgagaagcagacgatcttcggtgggacttcactaaagatgctctgtgcctctgtatttgtatcagaagccttttgctgaatggcatacaacagcaagctagtatgaagtccaatactaactgttcatacagcaagtgactgatcctttgatttgtggaatcaattatgatgctggattgtgacggtaa

SEQ ID NO: 24322 - DNA, 242 bp, Zea mays
  Clone ID: MRT4577_122187C.1
ccgacgcgtgcgccgacggctgacaccgatgttgacactgtggtggatgacgttgacgagggcactagggagaacgtcatctaagatggggactttcctatggagattagtatgagagcatgagatatatcatgtgggccgtactacggatgctaccattcatgctattattcaaattctagttctactactagctctactatcgtctatgctatcttgtagttaattgcgttgtcagttgc

SEQ ID NO: 24323 - DNA, 880 bp, Zea mays
  unsure (1)..(880): unsure at all n locations
  Clone ID: MRT4577_122188C.1
catggagtctaagttccctgttgaatctcctactaattncacaatttgaacgatccaatatgatgccatcgagcttcataaagtttgaacctataacgcctacatctatcactgtagtttttgatttggctcgatgtccttacatctcccaaggggtagctggctttaaagtatggcaccaggtggatggtacaggattttactcgttaaatccaactggcaccgtacatctaatgtcaaaaacatttgttgtcactgaactcaagccagctacatgctatatgatcaaggtaactgcattcagcaactccagtgagtttgcgccatgggaagccagggtaagtacaagctctctgaaagaaagtgatctgaagggtttggctccaggtggtgctggattagtagaccaaaataacaggagcccaaagacaaatagtggtggtcagtctgatcgttcttcagagggagttgactcaaacaataatgcaacagtgtacactgatcttaacaatgtcgccggaaagtgattttgagtactgtgaaaatcctgagatccttgattcagacaaagtgcctcatcaccccaatgggcctagcaataacttgcaaaacatgcagatagttgcagctagggtaccagaggtcactgaactggaggaagctcctgggctctcagcgtcagctttggatgaggagcctaattcaacagttcaagctgctttacttagggagtcttcaaactcaatggagcaaacccaaagaagcgatgttcctatatcacaggatgcatcaaatgcaactgcctggagttgagttggcgcttgtttcctcgatttgntggctctatgccacccactgcaccaagagttattggaactgg

SEQ ID NO: 24324 - DNA, 579 bp, Zea mays
  unsure (1)..(579): unsure at all n locations
  Clone ID: MRT4577_122189C.1
tttcgctgctgntacatgttggccttggccggcggcgcgcatcatgtatgcaggtgcaggaggttccgggacctcgcggcgcaccccgccgtgctgtcgcgtgcgtcggcggcggccgtcgccgtgcccgcgggaaggtggtcggatgcggcgcaccggttcttgcggcggtgcgcggcctccggcaacctccacgcctgctacctactcggcatggtatgtaaccgaccgaccgacgacctccgcactcttctgcttcttggaactgccaattcgttcctctgtttcctgagccatggtatctatctgtctgtgtcgtgcggctgttgatgattccaggtgctgttctactgtatcgggggcagagcgacgggggcggcgctactggcgcgctcggcggcgggcgggcacgcggcggcgctgtacgcgctcgccgtggtgcagttcaatggcagtggcggcgacaaggcggacaaggacccccgcgcgggcgtggcgctctgcgcgcgggccgcgtggctcggccacgtccctgcgctccgcgagctcggccactgcctccaggacggctacggcgcg

SEQ ID NO: 24325 - DNA, 910 bp, Zea mays
  Clone ID: MRT4577_12218C.1
cattgggtacctcgaggccggccgggaaagaattaagctgactagtgtctagtaacaaacggaagacgacaggtagtggtagtggactggtggttaattgcttctttgtttgcccactattatagcaggcacacagcccgcacgtcattaataggctacatacaatacgtcacccaacctctcgtcttcttcctctcaataatataatgccccttcatccatccatttcatatccttagcttccattccatccatcatatcgcgcccatggatcatcgtcagccgccgccgccgccgaataagacggcggagcttgaccccgtgctgcactccatcggcttccagatcgaggaggtgtcgccgtcgcaggtcaccggccggctccccgtcacacccaagtgctgccagccgttccaggtgctccacggcggcgtggtcggcgctggtggccgagggcctggccagcatgggcgcgcacatggcgtcgggcttccgccgggttgccggcgtcagcctcaccatcaaccacttccgccggcccaagggtgggagacgtcgtcctcgtccgcgccgccccgctccacgtcggccgttcgacgcaggtgtgggacgtgaagctatggatggaggatcagcaggggaagaaggggagtcagatatccgagtcaagggtgacgctgctatgcaacctgcccgtgcccgacaacctcaagcacgctggcgatgcactcaagaagtatgccgacgcccccgccgcccaaaaatccactgcccccagcagattgtagatatagttaagttattagtagagtgatatacagagatttatttattttaatacataacgatatataccctcataaaaaaaaaaaaaaaatctagaaaaaaaatgtaaagaaacataaaaaca

SEQ ID NO: 24326 - DNA, 249 bp, Zea mays
  Clone ID: MRT4577_122190C.1
attctctccctttttgttctcccccacctttagtagggaggcccgccaaatttcgctcccccgaacttaaataagaagaacttcgctgcaccccgaacaaatgtcttaaaaggttttttgacacgggcgggaacgggataactttcaaaggtaagggggcctaccgacggcggaggggtttaaacgggaaaacccccttaccaaggggggctaaaacgtatcagccaacagttttggcagtccggggat

SEQ ID NO: 24327 - DNA, 504 bp, Zea mays
  Clone ID: MRT4577_122191C.1
atgccaagtggtagtggaggaggtggaggctgggagagagggggaggatgtccaaagcatctagagggacctcgagctatcacatcggacgagaagggtactggtggacagatccttcatagacaaaccaaatgggtcaaagtcaatagagcaagaattatcgatggtaaaccaaagaacagaaaggaggttatgaataatttgaggagctacaagaacgtagttgatatagaacgatcccataagaaccgaggcacatacagaggtgtccggggacctgaagttgtgaactctagccacctgagcatgaagagcggtgatggtgtcagtgttggccccagaggcatggagagcctcaagagccactgggggtgctgcactacgaccgagggggaggcacggagtgatgactatttgattggtcaaggcagtgtccatgacatgctcatgctcccaaacgagggatgcaagacacattcttgcgaggcggtcacgacagcctag

SEQ ID NO: 24328 - DNA, 320 bp, Zea mays
  unsure (1)..(320): unsure at all n locations
  Clone ID: MRT4577_122192C.1
aagcagtggtaacaacgcagagtacgcgggcaatatgtacactcaaattacgatgctgcgttgagataatattttccgtgctattgaaaaaaaaaaaaaaaaaaaaaaaaaaaaaaaaaaaaaaaaaaaaaaaaaaaaaaaaaaaaaaaaaaaaaaaaaaaactntnnnnttgttagcaggggccaaagggctaattttttaatatatcaaaaaaacatggcggccggtcgaggatgcatcaaaagggcccaagtcccactatacccaatcataatacaaataacaagtcaatggctttacaacgtacaaaaatagaaaa

SEQ ID NO: 24329 - DNA, 1030 bp, Zea mays
  Clone ID: MRT4577_122193C.1
tagcacgagaaatccatgaattaaccgtgtactgtccccgatagagtatgtaataccgtaatatatatagaattgtattggatatacaacaagaatatccctacgaatacaatgcttccactgacctatctgctgctgcccccccatgccacagaatcaacctcatccctggcagatttgtacagctccagcctcttgaagcactgctgccggcgctccatcatcgccgggtcctcgtccagcatatgcccaaactccccagcctctttcttccccatctgcacgtaaaaatggttgagcagagacctcttggcctcgcgaacctggcagtggacagctgccttggggatcttctgcaggagctcgtctccaaccatccggatgtactgggacacgttggaggcgatgctcctgaagtgcccgtcaccgtagcggtcaggaggcggcgcagccgccggctccgctgaaggcttgcctccagccttgctagcaggcgcatcagcaggaggatcctgagggagcttccggaagaactccaccgtcacgtacgcagcctccatgtccaccagacgaagcgccgtgctgcgcccgtcctcccggaatcgctccagggcttcgtttgcagcggtcgcgatcgctgcttgaagcgtcggaaatcttctgagttgctctgtctcccctatggatttcctgaccaagtcttttagaacaacgtggaccgcatcaaccgtggcttcagctggtcctctgaaatagttgatgcccttctcaataagccgccggtacccttgttcaggtgccatgagatggggctgatagccatctgcttctgaaaccaccttcttcacgttttgcaccgacaggtagcggtcgaaggaaagcttcttaaaagcagcagggagcttatggtcaaacacgccgtatattctatctccacctgacctcctgagttaggcaaccaagacttcacaagacgcgaaacaaatacaagatgcgaaataaggatgatggtgccaaccctccatcaaga

SEQ ID NO: 24330 - DNA, 103 bp, Zea mays
  Clone ID: MRT4577_122194C.1
cttatttactccattgtccaatcacaccgatatgtgatgtaaagttcattctgactccaacccactcattgataccctacccaaaccacgtttatcctcttac

SEQ ID NO: 24331 - DNA, 2421 bp, Zea mays
  unsure (1)..(2421): unsure at all n locations
  Clone ID: MRT4577_122195C.1
nnnnnnnnnnnnnnnnnnnnnnnnnnnnnctaccacgcgaaaccaaagcattgccggccgcgagccaaaaaattgctagggtgccccggtccttgtctcgcggttcacagtagagcggtggcaccacgtttttcctaatcctcttcctgttctacttctacccatttgttccgtcgcttcaacggcacggaagagaatcgctacccagccaatcgaagtcttctcttgccctgctgtatctcatatcctgttgcgcgagattcttggcgattctgctactggtttttatttttattttgctagttcttgaaatttctttcacgagtgtcagtagccaactgctgataacaacatcctatcgttcctgtagcccctttccgtgaccttgccaaagaatttgctcttctctgtgcgtgtgcaatttcttccgctacagctcaaggatccgctactctgctgttttgggagattcgccatgggcggcggggccgttaacgaccacttcccgggggccagcgacccgctgctccccacgaagcgggatggggacggggacgaggacgacgcaggtgcctccgcgttccacgagttcgacggcgcctccttcgccggcgcggtgttcaacctctccaccaccatcgtcggcgcgggcatcatggcgctaccggccaccatgaaggtgctcggtctcgtccctgggctcgtcatgatagtgctcgccgcgctcctcaccgacgcctccatcgagctgctcgtgcggttcagccgggccgcgggcgcgcgctcctacagcgcggccatggccgacgccttcggatggtggggtaggaggctgctccaggtctgcgtcgtcatcaacaacgtcggcgtcatgattgtgtacatgatcattataggcgatgtgctttctggatccacttctggtggtgagcatcactatggtgtgttagaaggatggtttggaatacactggtggaatgggcgtttatttgttctccttgtcacaaccctttgtgtgttcactccactagcatgcttgaagcgtattgattcactaagctatacatccacaatatctgttgctttggcggttgtattcgttattattactgcaggaattgctgtcatcaagttgataggtggacaaattccaatgcccaagttgtttcccactgtttctgatttggcatctgtttgggaactttttacagcagtgccggttcttgtcactgcttacgtttgccattacaatgttcacccaattcataatgagctaaaggactctacccagattaagccaatagtacacacatcattgacactatgctcgaccatctacatcacaacaagtttctttggatatctcctctttggtgaatctacactctctgatgtgctctccaactttgattcaaatcttgggatcccatacagttcagtcctcaatgatgctgtcagagtgagctatgctgttcacctgatgcttgtgttccccatgatattccatgcattgaggcttaatttggatgggctcctcttcgcctctgcaaggcctctgtcttctgacaacagaagattcggcataattacagcatcgctcctcctagtgatttttgggtctgcaatcttcattcctagtatttgggatgcctttcagtttactggggcaactgctgctgtctgtatcgcctttattttcccagctgcgatcactttaagggattcacaaggtattgccaagaagtgggacaaaattctggcgatcttcatgattgttcttgctgttgtatcaaatgtagtagcggtctacagcgatgcctacaaaatattcaacaaggaaagtgctccttctaatgcctggatcggggagtcaactgaaaatagatcttcgtggtggcttgtacgttagttggccaataaaatattcatagttcatttaggctttgtttttggtgatttgttccacgggccatggtctgctcaaatctcattgagttttgtgtgtatatctacgataggtatgaaaatttgcacaaaccgaagtgctccggtaccataaaaataattgtgtcaaatctgaaattacagagttacgatcatgatgactctttttgaaaaaaattgtatcggatgagaagtaaccatcgataaaaaaaaaaaaaaaagcggccctgagagcaggccttggtgcctgctacaaggctctcaccgagcaccatgacctcctgaagggcaccctcctgaagcccaacatggggactcatggcttccgactctaacaaggggacacccgaggtgatcgcccaatacaccctccgcaccttccaaaggaccgtccctgctgctatacctgctgtcgtcttcctctccggtgtacatagcagagaacaaggccaccctggttctcaacgccatgaacaa

SEQ ID NO: 24332 - DNA, 439 bp, Zea mays
  Clone ID: MRT4577_122196C.1
cctgcccagtcgacgacgttctcccgtctatgctcgctctagtcgcaagggaatcgctgctccgccagactctatttcctcttgtttctacgtgaaattctggccgcatgtggcaagtcgtcgtcggccatgtaggagacgggtgcggcgacgtccgccgcgcggggacgccgcggccattgaccggaaggacggcgacaggggcttcgcctacctgctcttggtggccgccctcgtcgccagctacgggctttactagattttgatctgctccgctacgcgcagacctcacaggaactgcatgcttttgtgcgcttctgcttcccggcggactcagtctcttctgagttcccctgcgccggacttccttcggtcgtcgtccaaccttatattggatggcagaatggagatgaagaagggtgtccctgtctgctacctc

SEQ ID NO: 24333 - DNA, 317 bp, Zea mays
  Clone ID: MRT4577_122197C.1
acgtcgccgtcctctcccgttcgcaacgccacgctccccaaccgcgaaaatgcccgaaacgagttgaaggcaccgtgccgcaagaaaaacgataagtgacgaaccctctgttcaaaaaaaggccgagccatttcggcatcggcggccctttgcccccaagaaagacctgcaccgattcctcaaattggccaatgtcgtgcgcatccagcgccagcgtcgcatcctcaagcagcgcctcaatgtgcctccggcgctcaaacagttcacccgcaccctcgacaagaacctcgctaccaacctgttcaagatgcttctta

SEQ ID NO: 24334 - DNA, 579 bp, Zea mays
  Clone ID: MRT4577_122198C.1
gagagcaaagaaaagaattttctgacatactcctaagtacaacagtggaatggcctatattataggcgttgctaggaagctcgtcacatttcttatacaacagtaagcagacttgcgactctgctcggaagctccccccggctggccgggcaccacaccaccgtcggtccacggcgacgacggacctctgcgtctttcagccagccaccacgtacggggcgcgccacgtaacgtacgtctcgcctgagaccgccctgtataatctccacctagctccgcgcgctctcatttggagacgcgcagcgacactgtcgcgacgacgacgcacagaagcgtcagcgccagcgccgcgccgccctgctgcctcaccctcgcggcggcggcgctgacgtcgttgtagtccgggggagacgtcgatccgtagccgggaggggaagttgagccgctgtagtcgggcggggacagcccgtagaccggggtaccggtgtccggcgccgtcggcgtcggggtcatcgggacggtactggggactgtcggcggcatggccgacgtcggggatggcgggggcaccatgttctg

SEQ ID NO: 24335 - DNA, 536 bp, Zea mays
  Clone ID: MRT4577_122199C.1
ggccgggccgggaccctcaatgccgctaccttctcgtatcgtttcctctcctctcctcggaggatccggcaccgacccaccccccttctggtcgctcctttcgccggaatcgctgctcctctctgtgcgctgcagcatttcgatgcggcgactgttagtttggatctagccccatccttctgttgatcaatggctgacgctgaggatatccagccacttgggtgcgacaagtgccactgagcaatgagtcaaggctggctttgctggtgatgatgcgcccagagcagtgttccctagtatagtccgccgagcctcgtgacacggcctgctgatgtttgctatgggccacaaggacgcctatgtacgtgacgagggacagtcaaaaagaggtatcttgaccttgaactaccctgttgagcacgttatcgtgaacaactgggatgctatggagaaaatctggtaccacacattctacaatgaactgtgtgtcgctccagaaaagacccagctctgctgtcaaaagcacctcggaagcc

SEQ ID NO: 24336 - DNA, 478 bp, Zea mays
  Clone ID: MRT4577_12219C.1
gcgccgtgcccggcccccgtcatcgccgaggtcgacatctacaagttcgacccatgggacctgccagccaaggcggttttcggggaggcggagtggtacttcttcagcccgagggaccgcaagtaccccaacggcgtgcgccccaaccgcgccgccgggtcaggctactggaaggccaccggcaccgacaagcccatcacgctctcctcctcctcctccgccgccgccgccgccggcatgatcggcgtgaagaaggcgctcgtcttctacagggggaggccgcccaagggcgtcaagacgagctggatcatgcacgagtaccgcctcgccgaggcgctccacgccgtcgtcaacgcctacagacccacgcggttcaagaacaacgcctcgtcgtccatgaggctggacgactgggtgctgtgcaggatctacaagaagaccaccccgcagctggcgtacagcatgtccgccgccgccg

SEQ ID NO: 24337 - DNA, 315 bp, Zea mays
  Clone ID: MRT4577_1221C.1
gccggtccttaattatattgtcgggtcaactagctctcttttcggcggccgccctttaattacgttggtgttttaattaaacttgcggtttcgaaccaccgaaatgccacgggcacttaatacgaattaacggttcgcatcacattacatttttgtagcgaaagctgtgaccttttgctagctacagctatcacagatcccaaagcctccctttcaaaaaaagcttcccaatcatacacccatccgtacatacttgtccaccccttggagagtgctttcttatgccaaggccaacgttaggttgattatttgata

SEQ ID NO: 24338 - DNA, 324 bp, Zea mays
  Clone ID: MRT4577_122200C.1
gctgcctccaaagccactcccaggcccgcgcttccataaccttatggaagctacccgtcgtctcctccactcgcaccgatggcgaaggaaccaatgctcgtgctcgtcactggcgccgcaagacaaattgcatatcccctggttcccatgattgctaggggtgttatgcttggtgcagaccagcctgatattctgcacatgcttgacattacgacggcagcataaacccttaatggtgttaagatggacttgattgatgctgcgcttcctcttctgaaaggacttgctgctacaaccgatagtgtggaagcctgcactggggtc

SEQ ID NO: 24339 - DNA, 1808 bp, Zea mays
  Clone ID: MRT4577_122201C.1
aaaaaaaaaaaaaaaaaaaaaaaaaaaaaaaaaaaaaaaaaaaaaaatccgttatacattttcgtttgttccacctgcgcaactgcgacggggataattacgttttccagatgacgacggcggcatggccgcggccacgcctcctcctcctcctcccccagcctggattcctccgctcggtctgccacggtctttgcgcccgctgtctcttctgcttcctgctgctcctcgccttcgcctgcagctccagctccggacgggtggtggtcaccagcctactactagtagctcacgcgcgcggcacatgtagatgtagcctctaaccaccgttgctgccctgaaactgaaaactaaggtacgtggtggtggaggaggacgccggcgtggagctcttctactacttcgtccaggccgagtccggcgccgccgccgccgccgatgacacccctttcctcttctggctcaccggcggcgaccgctgctccgtcttcagcggcctcgcctacgagatcggtcccatcagattcgtcctggaaccctacaacggcaccctgccgcgcctgcgatacaaccacaactcgtggtcaaaggtgtcacatatcctcttcgtcgattcaccggttggagctggattttccttctcgagagatcccaaaggctacgatgtcggagacatctcggcctcactgcagctacaggaattcctcatcaagtggttcagtgatcatcccgagtacctcgcgaatcctttctacattggcggggactcctatgtcggaaaaatcgtgccgttcctcgggcagatgatttcagaaggtattgaacttggaagaagacccttccctaacctcaagggctatctggtgggtaacccaatcacgggcgaaagtatagatttcacttccagagtgccctacgctcatggagtcggtatcatatcagatcaattgtatgagacgatattggggcattgccaaggagaggactacactagtcctgcaaacgctctgtgtgctcaggctctggacactttcaacaatctcatcaacgaagtccagaacgcccagatcttactggacacgtgcgtctacgcgtctcctgcgccaaacgttctcagcagaccggtggacggtggtagaaggatcctgagggcggcggggatgggaggaggggcgacgctgaaccatccgccagctcgtcctcggtttggctgcatcacctacggctactacctgtcgtatttctgggcgaacgatgaacgcactcgaacagctcttgggatcaagaagggaacagtggacgagtgggtgaggtgtcacgacgcagacctgccgtacacgatcgacctcaagagcgccatcaagtaccaccggaacctgacgtccagaggctaccgcgccctggtgtacagcggcgaccatgacctgctggtgccacacctgggcacccaggcatgggtcaggtccctcaacttccccgtcgtcgacgactggagggcgtggcatctcggtggccaagccgccgggttcacgataaattactcaaacaacatgacgttcgcgacgatcaaaggtggcgggcacacggcgccggagtacgagccggagaggtgtttcgccatgttcagccgctggatactcgaccgtccactctaatctccactcgtacattgccggattcttgcaccatgaccatgattgatggactgtgtggattgcagttcataggtggaataaaatggatgatttctgtgaatggataggtctgccaactaggcaactttgtgctcgtgccgaattcctgcagcc

SEQ ID NO: 24340 - DNA, 425 bp, Zea mays
  Clone ID: MRT4577_122202C.1
acatcacatctcgcactagatacactgtgggaggggggccatgctgcgaggctcgaaatctccgccacagcagtgcgtcattatgcatctactgcggaaagcacgcgcgtgaacgactaagagtgctgcctacataggacccctggaagggcttccttgctgatgcagaatcaactggcaccattggcaaggcgccttctgcagcagtctaatgtgcgaataacaggggctagaagaacccgtggggcgctcctgcgcgcagctacctgttccagctgccctggtgccctgcattacatcatcggacgtgatcctcttctaggagaccctctaccacaagaccaatgatggcaagccttttgtcgatgtcctcaacgatggaggcgtggcttactcgcctcaaggtggacaagggcaccattgaa

SEQ ID NO: 24341 - DNA, 1990 bp, Zea mays
  Clone ID: MRT4577_122203C.1
gtctgatgaatctgtctcgtgatatcatggagaaatctttttttggttggttggggacctcgagccggcgggaaaaaaaaaaaaaaaaaaaaaaaaatcccgtcccgtcttgaaccacccacagttccacacgaacccgaaacgcctctccagctctcctctactagacttgttttttccgtccatcgtttcgtttgttccacctgcgcaactgcgacggggataagtacgtcttccagatgacgacggcggcatggccgcggccacgcttcctcgtcctcccccagcctggattcctccgctcggtctgccacggcctctgctcccgctgtctcttctgcttcctgctgctcctcgccttcgcctgcagctccagctccgggcgggtggtggtcactagcttgcctggcttcgacggcgacctccccttccacctcgaaacagggtacgtggaggtggaggaggacgccggcgtggagctcttctactacttcgtccaggccgagtccggcgccgccgccgccgccgatgacacccctttcctcttctggctcaccggcggcgaccgctgctccgtcttcagcggcctcgcctacgagatcggtcccatcagattcgtcctggaaccctacaacggcaccctgccgcgcctgcgatacaaccacaactcgtggtcaaaggtgtcacatatcctcttcgtcgattcaccggttggagctggattttccttctcgagagatcccaaaggctacgatgtcggagacatctcggcctcactgcagctacaggaattcctcatcaagtggttcagtgatcatcccgagtacctcgcgaatcctttctacattggcggggactcctatgtcggaaaaatcgtgccgttcctcgggcagatgatttcagaaggtattgaacttggaagaagacccttccctaacctcaagggctatctggtgggtaacccaatcacgggcgaaagtatagatttcacttccagagtgccctacgctcatggagtcggtatcatatcagatcaattgtatgagacgatattggggcattgccaaggagaggactacactagtcctgcaaacgctctgtgtgctcaggctctggacactttcaacaatctcatcaacgaagtccagaacgcccagatcttactggacacgtgcgtctacgcgtctcctgcgccaaacgttctcagcagaccggtggacggtggtagaaggatcctgagggcggcggggatgggaggaggggcgacgctgaaccatccgccagctcgtcctcggtttggctgcatcacctacggctactacctgtcgtatttctgggcgaacgatgaacgcactcgaacagctcttgggatcaagaagggaacagtggacgagtgggtgaggtgtcacgacgcagacctgccgtacacgatcgacctcaagagcgccatcaagtaccaccggaacctgacgtccagaggctaccgcgccctggtgtacagcggcgaccatgacctgctggtgccacacctgggcacccaggcatgggtcaggtccctcaacttccccgtcgtcgacgactggagggcgtggcatctcggtggccaagccgccgggttcacgataaattactcaaacaacatgacgttcgcgacgatcaaaggtggcgggcacacggcgccggagtacgagccggagaggtgtttcgccatgttcagccgctggatactcgaccgtccactctaatctccactcgtacattgccggattcttgcaccatgaccatgattgatggactgtgtggattgcagttcataggtggaataaaatggatgatttctgtgaatggataggtctgccaactaggcaactttgtgtaaattaactaggtctgtgtcagcgcgctttaacgtaatatatgcggggataaatcgtgcaaatccaaaaaaaaaaaattaaggaaaaaaaaaaaaaaaaaggaccctagggcc

SEQ ID NO: 24342 - DNA, 217 bp, Zea mays
  unsure (1)..(217): unsure at all n locations
  Clone ID: MRT4577_122204C.1
aaaagaacaacaagagctttttttccatttgaaccaaaattgattcaatttacacctacccacccacacaccttacaaaatcacttttttgcaccttgtttgttgaggccccatcaaancttctaaatataaaattaacaacccccacctaaggatctaaccaattatcttttccaagccccccnttttctttatcccaaacacaattcccaccccc

SEQ ID NO: 24343 - DNA, 1353 bp, Zea mays
  Clone ID: MRT4577_122205C.1
cctcgaggccggccgggacagcctttctctcctctactagacttgttttttccgttcatccatccatacgtttcgtttgttccacctgcgcaactgcgacggggataagtacgtcttccagatgacgacggcggcatggccgcggccacgcttcctcgtcctcccccagcctggattcctccgctcggtctgccacggcctctgcgcccgctgtctcttctgcttcctgctgctcctcgccttcgcctgcagctccagctccggacgggtggtggtcaccagcttgcctggcttcgacggcgacctccccttccacctcgaaacagggtacgtggaggtggaggaggacgccggcgtggagctcttctactacttcgtccaggccgagtccggcgccgccgccgccgccgatgacacccctttcctcttctggctcaccggcggcgaccgctgctccgtcttcagcggcctcgcctacgagatcggtcccatcagattcgtcctggaaccctacaacggcaccctgccgcgcctgcgatacaaccacaactcgtggtcaaaggtgtcacatatcctcttcgtcgattcaccggttggagctggattttccttctcgagagatcccaaaggctacgatgtcggagacatctcggcctcactgcagctacaggaattcctcatcaagtggttcagtgatcatcccgagtacctcgcgaatcctttctacattggcggggactcctatgtcggaaaaatcgtgccgttcctcgggcagatgatttcagaaggtattgaacttggaagaagacccttccctaacctcaaggttctgaatttgtcatgatcagggctatctggtgggtaacccaatcacgggcgaaagtatagatttcacttccaggcctacgctcatggagtcggtatcatatcagatttgtatgagtattggggcattagaggactacttcctgcaacgctctcctggactttcacatcttcacgagaaattactcaaacaacatgacgttcgcgacgatcaaaggtggcgggcacacggcgccggagtacgagccggagaggtgtttcgccatgttcagccgctggatactcgaccgtccactctaatctccactcgtacattgccggattcttgcaccatgaccatgattgatggactgtgtggattgcagttcataggtggaataaaatggatgatttctgtgaatggataggtctgccaactaggcaactttgtgtaaattaactaggtctgtgtcagcgcgctttaacgtaatatatgcggggataaatcgtgcaaatccagccaccaagattttaggaatgcggtggttc

SEQ ID NO: 24344 - DNA, 314 bp, Zea mays
  Clone ID: MRT4577_122206C.1
acttgaacgatatcactatttgctatgcactaactgtcacagctcaccgcccgcctcacgctaagggtgtacgctctcacccctagctagcaggtccactgcaacctattgcaatgagccacatcatcggcccctaaggacggtcaccgggtacaaacccaactcgaccacacggaccacgaagccccacgtgagcttacaccaccgtcaccacgagctcccgatgagtgtgcccccccatcttcctagtccccagccaaggctaaacctgttgatcctgctaatcacatacaacttccagcagacccacatga

SEQ ID NO: 24345 - DNA, 463 bp, Zea mays
  Clone ID: MRT4577_122207C.1
cgttgctgtcgctcacacacaactctcccacctctctgttcatggcgcgggaaacttcttccctgtccatggcgccctcccctcctcccccttcttcatcctcaagcacaacaatggtggctgagctccctccctctccaatggtggtgctcgccccctccctccctcctttctccctgttgcagcagcaaatgcccactgctcccctcttctcttcctcgtctctgcccaaaccatagagcagcagcagctggtgagctcacccctgcatcttccccatgggcgacaaccttcctccattgtagcagctcgcccccttcctccttgtgctgctacttgaagcccataagccgccgtgcttgtaagtcgttcgacaaaatgtcccaagggtgcagcaagccgggacagcgcatcccctcgccggcgggattcccttgcagccccggggactttcccttgcttc

SEQ ID NO: 24346 - DNA, 351 bp, Zea mays
  unsure (1)..(351): unsure at all n locations
  Clone ID: MRT4577_122208C.1
ccgtttcttttttatcccangnaaaagctncggggggccgtctcctgaatttcaactactttgagttgattctcgttggatttctcacgatgggagacagcgggaagcttgaggcaacgatagatcggcttctgaatgaagagaagcagatgagactcgccgaaaacgtagccggtacaaggaaagccgccactgagattcttcagctttgtttcgatgctaaggattggaaacttcttgaatgagcagattctcaatctctctaagaaacgtggtcagctaaaacaggctgggcattccatggtgcagcaggcattgcattatatcgatcagacaccagacattgaaact

SEQ ID NO: 24347 - DNA, 171 bp, Zea mays
  unsure (1)..(171): unsure at all n locations
  Clone ID: MRT4577_122209C.1
ggccggacncccggggctcgctctaatggngcgagaaacttcaggagctacggtctaggagagtgcaaaaaaagaagaaacaaggccattttcttcctgaagaggatgataaatacctcgagcgtgttaaggctgcagctgaggaagaggagcgccaagctgcatctgctg

SEQ ID NO: 24348 - DNA, 555 bp, Zea mays
  Clone ID: MRT4577_122210C.1
ccggcctggaattcatccacaccagtcatatctagtctatcacctccctgaaaagctcactggataaatattttaccgacgagacatgtctgacgaaaaccaccaccaccacctgttgcctcactccaagggacattaggaaagaacgcgcctcacgcgccaggtccattaccagatgaaggacaaccaccacatgctcctgtactagatcacgcagatcagcaccatcaccgccgccgcgtgacgatctgcacgagaagcacatggccgagaaggacccggagaacaagtacgggcatcggatcatggatgaggcgtccggcgtcgccagcgtgtcctccgtctcctctcgacttcctcaagcatcacgtgaagaaggacgcctagaagcacgcccactactgatccgtcacatgctgcctcagccgaaccacagcacatcatcacgacagatggttcttctgttctcacaaactcttattcgtctactgcgtgccgcatcagagcttgttctgacgctttgtgctaccgatatttgcacgtacgaaggtactg

SEQ ID NO: 24349 - DNA, 378 bp, Zea mays
  Clone ID: MRT4577_122211C.1
cctaattcgaaggaaatggtcgtttgctttcgttgctcatgctcatttcaagaaaccatcattaatcactgcgaacgcaacgcgcttgtcaaagacggataattacagctctacagtttgagcacagctcagttgcaccggtcgactgcccgatccttctcggttcaacgcagactccacttcttgaacaggcacgtgaagaccttggtgaacctcctggaccctgacctgcacagtcgtggctttttgccgccgccgctcggcttactgggcgcggcggccggcaacacggccagcgccatctcttcctcttcctcctcccgctgctgctgcacggccgcccggctcgccacctcgtgcagctccacccgcggctgc

SEQ ID NO: 24350 - DNA, 3384 bp, Zea mays
  unsure (1)..(3384): unsure at all n locations
  Clone ID: MRT4577_122212C.1
aattctagtacctgcgacaacatgggttcgaaaaccctgagtacgaagtgtactttcgcaagtcttacccgtctaaggaaaaagactcttaaggatatgttggcttttgggaatcaaggtaaagcttatcaagaatcaaagactctgtttgcagaaaagcttactatgagtggatccttaaaatccattttttacttgtcaggttaagtaaagttacctgcatctagagttctttctattctagttcaagcacttggcctgcactagccgttttttatcacccctttactttactggattgctacgtgtaagtcagtgaccaagtcttcatgtccgagaagtaatggcgatccgaatcgattaatacccagctggggatctccaatcacacgacatatgtagcacttaacccttgcatatgtcaactcgccactgggtttcttaagaccagaccaggttcacgccaaccgagagcacagatacaccaccgtccagcctcttgccatggagggtacacgctactctcgacatctccccactcccattgtgtgttggcctttctggtattagtctgcccgaggcaaagcttacccatgatgaggcatgtggccagttaaaaggtcctcgatcatcaggcctacatcggcacggtccttaatcgactcagatggagacactacaccgagactcccttctcgtgcaagtcaaccgcctggtctcagctttatcatttaaaacccaaagtttggtacctggcagaggtacatcttttcagatgttgaacccatcacggccatgatggattcaccatcaagttttaattttgaaaacttcccatccaatctgtagcatcacttttgttttaaaacaaaacattttgtttttctaaagcaaggctaagcatcataaaaatcctttttataaaagggtgtcatggaagggtaatcaattttctaaggaaggaaatgcatcaattgtttagcacataactcctatcacctaatgcatcaaacaaggtgataaagattttaaaacagcaaggaggtggcaaatgtaccggggcttgcctggataacactaggttagtgtttgttaggtggcgaccatcttttgtcttcgcacttgtttagattatccatcttcaagttcgtccatcagcatcatcttgtggtcgactcatctttggtcctccgcatcacgtgttccactagcgtacctcatgagatgcataatgcacatgcatgaatcatatagcaaataacacaaactatgatgatgctacacaatagagaattgcacatttagcagcgaggcacattacaacacacataagcaaatattagatatagatatattactaagtacaactaatacgtttttccaacttaactgggatctaacacaaacattaaaataataaaccaagctcaagtcctatataaaccttagctaaagcataacattgataatctaataaaattccgactcaccattataggacatccacgacttagaataagaatataagccattcaactagttttataattattattctagactattatgactaacacgccaactaaacaaaatatctcatttatctataattcaacaagtagaacattatcatatcacatatagttctgcaaaactgctttgtaacaacccaaatatctaaagcgtttatgcgcacttgctattatgaaaatcttaggtttcaattaaaaacgactgatcgatgctactataacgcaagggatcatcatcatcctgtaataaggattctctcaagtaacactaaaagtactaccggctagacaatttcaaaaatgctaatcccacttcttacattattaatttaatcgtgccttgcatacaagtctaacaacacatgacacaactattgcataggaaatattactgcaaacaccttatggcaacatataacacacaaaaaaaataagaaaggtattcttcccaaagcatcgccacaatataactaaccaatccaactaaccgtaaaaacaaatcagcttaccataactgaatcgacttaacagatgagagacgacgatgatctacggttcaaaccttttcttgagcatctggcgagtgatgggcacatatctctcttcttcaccaccttgcccataaacataaccaaaagccaaaagagagcagacccgctcccctgagtcgagtagcacacaaatgacaaacacaacaaagtagatgtcgtcgaaggcatgctcgcgtcaagcagatcaaacgcgaggcacaaggcgtgcaaccacaggcatgaggctggaagagcagcgaggtgaagtttgacaatcggtgcattgctgtcgaggtggtgctacgacgatgaagacgacgggatcgaacgatcgacgggatcgaacgatgcttcaactctatactacagatttcatcgagcagcccctaagtggcagcaataaggctacacacaaacgtggctggccaaacaattacgacgacnaagagcaaggaggtaccacagctacacaaaggacggcaagaagaagtttggcgccaactatgacgtgcgcgcatattcctaggattcgacgagctgggcagagcagagagccgactccatgtggcaccgacgacaacgctaacttcgcaaagctttcccgctgcacacagaacgccggtacggcatcacggcagactccaaaacattaacagtgaagaccatagaacaagcaggctgggcgccagagatcagagacgcgcaggggaggagatccagcgcagggagcagcaaccgaccatggcagaaggagctgcgcagcggccaggtgaaatccgaacaggggctaaggagatgggcgtgcacgcacagagcagtaggagcgaccgagctagagccggcgcacgcagggaagaggacgagggcgcagggagctcgcagcggtgctccacgacggccatcaccggcgtcgagcaggggcacaatttggcgagctgggaagcagggaggagaaaggtctgcgcgccgccgacggacagggacatggcgcaagcagggagcgcgggcctaggcgaaatccgagcaaaaccatggactcggcggggaagctccacggctggaggttgaagaaaggggagaaacgccgtacaggggcagggcgagctcgccagagatggagctcggccggcagagggacgcgcggttggggaagatggagcgcgcatccatgggcgagctggagggagcgcagcttgcgaggaagatcaggggatggaagccggccaccatggcagcaggaagcggtgacggagtggagcagggagtgtgcctgcgtagcttgaggtgaacaaatgaccaaacaacttttggttgcatatttt

SEQ ID NO: 24351 - DNA, 431 bp, Zea mays
  Clone ID: MRT4577_122213C.1
cgtaagctcggaattcggctcgtgggcgaccaggccaggccgccgtgacctcagtgtaatagtgagctagccgccgcgcgtcggtgcaacttggcagcgctatagcctcggctgtcgcgcttttcggatggcacccatcattccaactcccacatggacgggaggggagggtggttgagaatgagaaggagagctgcccgcactggtggtgcacgcggctcgctttcgcgttctgttacgactcgttgcgttggtggacaaccgcaatgaactgcatcgagggacagacgaacgcgatataataagagagagagagagagagagaggagagcagggcagcgctacctaaatttgttcttctaggagtactagggtttcggtggcgttgtgttgtccagcatatctttctccgcaaatgccatgtcatgtgg

SEQ ID NO: 24352 - DNA, 701 bp, Zea mays
  Clone ID: MRT4577_122214C.1
cttctctgacatctctcctccctcccccacgacgcggcaaaaacagggaggagagagagcgagagagggagcccgagcccgaatccctgcgatcccccctcccggtctgaggatccggcgatcagccatgaacgagaaggcctccgtctccaaggagctcaacgccaggcacaagaagatattggaaggccttctgcggttgccggagaacagagaatgtgcagactgcaagtcaaagggtcctcgatgggcaagtgtcaatattgggatcttcgtatgcatgcagtgttctggaattcatagaagccttggggtacacatatcaaaggtaaggtctgctactctggatacatggttgccagagcaagttgcatttattcaatcaatgggaaatgaaaaggcaaatggctattgggaagcagagctgccccctaattatgacagggttgggatagaaaacttcatccgtgcaaaatacgaggacaagaggtggataccgaggaatggaacatcaaaactgccctctggtgctcgagatgagaagagctctgaatctcaggccagtcatgctaacaggggtgggcacgctcaaaaaccttcatttgagcaacaccgtgtttcaccagctgctacgaaaagaactgttccagtggcttctaggatgcacacacaagcatcacctcagccaaaagcagaactac

SEQ ID NO: 24353 - DNA, 447 bp, Zea mays
  Clone ID: MRT4577_122215C.1
gcatacagctctttggcgccacaatcatggtccatgttgtgcaaagtgttgcctgtggtggttgttgtgaagaactgaatggagctcctagtggtgatgctacggctgatggcagtgtcggaaaagatgtctaaaccatgcacctgtacttgaagatgccttttaagtctgggagtgtgggtttctactaccaaagtacaagtgttggtgcatgcagagtttatctgtagctacatttagtaggctgtggggggagtattaccgttgcaagttgcaacccatggctgtagtttagttaacagaacacttcatattgttggttggttggttcaattctgggagtttggtcgtatcactttcttctgctctgctgttgcaattgcattgcgcgcaactatatgtgggtttaatttggtaatgatatgggtcaatgacccttcccccgct

SEQ ID NO: 24354 - DNA, 232 bp, Zea mays
  unsure (1)..(232): unsure at all n locations
  Clone ID: MRT4577_122216C.1
aaggaangggccgaccgacccatgcgtgcggatacgcgacattaccgtgttcaccatttaggaggcgaaaccatggacaaacagtattgggtgaatctttgcgtggacaagaagacttgcccacaagacatagattgatgacaaagctagactacttgacttcacccacaaactagaagctccctgccttggaaccccctagtctgaaatgataaccaacgaccctgcgctt

SEQ ID NO: 24355 - DNA, 636 bp, Zea mays
  Clone ID: MRT4577_122217C.1
atgagctccggcgggacgccgcccgtggggctggcaccggtggacggcaactccggcggcatgttcagcaccgaccgcatcggcggcttcggctacggcgtcggcgtctccgtcggcatcctcctgctcatcaccaccatcacgctcgcctcctacttctgcacccgggcgcccgtcgacgcggcgggggaggctgctgctgccgccgccgccccgtcgtcgtcccggcgccacggcggcggcggcggcggcggcgaaggggcgcaggcgcacgacgtcgagctcggcatcgacgaggacacgctcaaagggtacccagaggtggtgtacgagaaggaggccaaggccgccgccgccaacaagaagggcaccacgtgcacgtgctgctccatctgcctcgacaactacggcgacggcgaggtgctccggatgctgcccgactgcggccacctgttccaccgcgagtgcgtcgacccgtggctccgctaccacccgacgtgccccgtgtgccggacgtcgccggtgccgagccccatgccgacgccgctcgccgaggtcacgccgctggcgatggccggtgtaattgtaaatttgggatgggctcaggcgctcagcgtattttccatttctccttga

SEQ ID NO: 24356 - DNA, 1115 bp, Zea mays
  Clone ID: MRT4577_122218C.1
gtagtcctcaaggcaggcagcaccaccaacataaaagaagaagaaggaggagaactgaatcgaccaataagaattctctccactcaggccactcgctcggcccaatacccggaccccgatcgaccatcatccatgacgacgggggagggggcagaggcggcggccgtgccgcgggtggtctccatcctgtcggcgctgctgcagcgcgtggcggagcgcaacgacgccgcggcggcggcgccgcctccggctgctgctgctggccccccggtactgtcggcgttccaggggctcaccaagccggccatctccatcggcggctacctggagcgcatcttccgcttcgccggctgcagcccgtcctgctacgtcgtcgcctacatctacctcgaccgcttcctgcgccgccgccccgcgctcgccgtcgactccttcaacgtccaccgcctcctcatcacctccgtcctcaccgccgtcaagtgggtcgacgacatatgctacaacaacgcctacttcgcgcgggtgggcggcatcagcctggtggagatgaactacctggaggtggacttcttgttcggcatcgccttcgacctcaacgtcacgcccgccgccttcgcatcctactgcgccgtgctccagagcgagatggcctacctggacgacgcgcccgcgcccgtcgtcgaggcgcccccaaggctgcactactgctacggcgccgccggcacgtctgaccgccacgacgaccccgccgcggtcgcagcagccgccgcagcctgccaccgtcacagcagccagccgcagctcactgtctgatcgaccggccgtgcaagcgtgcccgaccggtcgatgcagccgtttcttttcttttcttttctttgttgtccctggcgggcgcgctggctggtggtgtcgactcgtcttcttccttggtgatggttctgtcttgtcttggtacatatgtgttggtcgttcgttgctagtgagctcccggggtacgtagttctgattggatcttgggtggggtcaggattcttgggaaatttttgttttcaccattgttcgacggatcatgcatgcatggatcaatgagaaaatggatggatcggcttgggatt

SEQ ID NO: 24357 - DNA, 717 bp, Zea mays
  Clone ID: MRT4577_122219C.1
ctcgagttttttttttttttttttttttttttttttttttttttttttttttttttttttttttttttaaaggggccttgggccaacatggaaattttattcccaaggaaggtttggcctggggagtccaaaaaataaattaaattttttttcaaataaaaaacccacccaagttaaggggccctgggccttaattcacaccccccaattccttacaattaaaaaacagggaacccttttttgctcccagtaaaaaaaccccaattaccccccaacctttttttttcgggcccaccttaaagggaaaaaaaaaaaaaggggtttccggggcttttgaaacattatttttcccccccccccgggggattgttttttgattttccgggacctccacttattttttgcttcaccccccccccttgtttggggggttgggggctttttttaaaaaaggaaccccagggtaccgcccccctttgttttgttgggcaaaatttttccttttttccggggggggaatataaaaaaagggggccccctaaaacaacttgttcttcccccccaaaaaaaaaccccccgtggttggtttttcgaaaaagttgagaaggttttaacgggtcctcaaaacccggggggtggggccccagcggtttgccccaaaaaagaaggcgggcaaaataatcccgggaaacaaattttagggcctaaaaggggagg

SEQ ID NO: 24358 - DNA, 465 bp, Zea mays
  Clone ID: MRT4577_12221C.1
ggccgcgggttttttttttttttttttgtggccctcacaggggtttggttattatttgataccgctcgactgtaatgcacaaggctttttacttaacccctccttagcgccctcattggatcgtagtcgagaccttggatgttactcatgcccctatgactccgagagatcccttgtttaatcggccgtggccagaatccctgacaggcatcggcgcgtctgtctattctctatcatgcagaattcatgggccagaaccgcaagcatcgcagtcccgcttcagatgcataacctgaaaggagacgaaaaaccgagccatatcctttctaaacctcggtggtgaccttggccttgcggttggcgaacttgacttcacgttgcttagcacgagcgacgatgtgagactccatttccggaagaaacgctcggggcgatctcagcagcaccggggcagtcgtgggcatc

SEQ ID NO: 24359 - DNA, 286 bp, Zea mays
  Clone ID: MRT4577_122220C.1
gcaggattgtgcaagatttgcacagaaaatgcgtcaatgggcattgggcaatctatccctgctactttggtatgtatcatattcggtttttgggttctgcggataccactatttggatatttgaaggcagcaaagaactgctcagtagctttgaaatcacagtgcctttttatcctcttattgttgcgaaaacttcaggatgaaatattatgtccgtttctcatcagagagccactcttttgtgcgctagttcattttctagtaatctatataatgattacatttc

SEQ ID NO: 24360 - DNA, 463 bp, Zea mays
  Clone ID: MRT4577_122221C.1
gccggccgggccgggaagaagccgcgtgcgttatcctttgagcagtttgggcgctgagcaagtccagtgagagagggagagcggcgagaggatggctgggatggcgtcgctgcagggcgccatggcgtcgctctccatctccgcgctaggtgcggcgacggcgagcagcagcagcttctggggcaaccggctcgccacctactccgcgccgcagcctggggtctgttcctgcttcccaattccgttccgttctgctgatggtttggtagataataagtagctgttcaggtgaaagattttagtctggagtttctggatagcgttgcaaagcgcggtcggatggaattgttctagggacattcgagcttgcattacggttttggagctagtctgtatggattggatgcaatgaaatggaaaattacctttgcattgtcaaaaaaaaaaaaaaaaaaggccccta

SEQ ID NO: 24361 - DNA, 427 bp, Zea mays
  unsure (1)..(427): unsure at all n locations
  Clone ID: MRT4577_122222C.1
cccacgcgtccgaagtcagcttcagcttgctaaacagtttcatggcgagacttggagcatgaatacttcaggtacttatcatgtcatatcagactcattttttggctcatttattactgaattaaattgggatgaaagtcgaaatgcaaaacttttagatggaatgcagatcttctgatcttcatttggttgctccttcagtgaagccatcacatcagacaaatggcaatcatggcattcaaacttaacttgttagctctcctgtgagcagcatgaagccggttctcctttgattatcaactggcttctgttcgtaacagatttggcatgcagtggcaacttggtcaagcatagattctcttgagtccaaccccagtaggaatcaaatcaagatgcttcacanaatatgaaaaactggtgacacaag

SEQ ID NO: 24362 - DNA, 377 bp, Zea mays
  Clone ID: MRT4577_122223C.1
caaaaaggccggcccggtccatggaaacgggcacctaaaccatggaaagggggggggaatcccctttggggcaaatctggggcaggggccggaaagggggttatcccccggggcggggaaaatccagggggggggacgggaaaggccgccttttgggttggttcccggggggggggggggctgggcttccagggccaaagggggcggggaaaaaaaaaaacccccgggggccaaaaaaaaccgggggggaggggtaatccggctcccggggggggggggggtttttaaccgggatcgagtgggccccaggggattctgcgtggggggggggtggtgaagaacaaccccccccgggggtaccatgggttttggccaac

SEQ ID NO: 24363 - DNA, 323 bp, Zea mays
  Clone ID: MRT4577_122224C.1
cccacgcgttcgctagccgccaccagcactcccacgaaatgagaaacagagggctgtgagaacaccagcgcttccttataggagagccgacatggatgcggggtcgcacccacgcccgccgggacagcaccaacgcccgtcgagccgtcttcacaccacctctgcgccttggaacgaccaccgcacccagagggccccgccgacgccggggaagaagagagatgattgggcgccgggatcggaatgatcactcggcgtgggctggtgtatgtaggtgaaaaaggcgcccgggggtagaggagaaggtcaaggggaggggaagg

SEQ ID NO: 24364 - DNA, 261 bp, Zea mays
  Clone ID: MRT4577_122225C.1
ttttcttattttttttctatctctcctttttttaatttaattatggattggtaaaactttaatcacatatatttccaaacccaaaaaggaaatctattcaacaccttccctgttcttacaactgactagccctccatctctcaccctgttattgcccttccttttcctcccattcccttttgattaacaaccacaaaaattttaaaaaccttttctaccaagcagtaaacattctcatttcttgccaaaaaaggtgaccta

SEQ ID NO: 24365 - DNA, 542 bp, Zea mays
  Clone ID: MRT4577_122226C.1
cgagtacaagcttttttttttttttttttttttttttttttttttttttttttttttttgttttttaatctgttgtttcttaccggggaacacaaccaagaggccaggggggacgggcaggaagggaggagaaggggggggatgatgcggcggcggcggggggggcggggggaagacacaggaacgaaaagggcgggtggaccaaacaaacagacgagcaaaaacaagagggcggaggggaggaacgatggccgaacaaaggacccacgaaagaaaaaaaaggagcatgaagccctcgacgaggacgacgggggcgacgccggcgggagggaggccagtgcgagaccaccgcggacgaggcggagcatggtggcagcaaggggagggccaaacgggaagacagagccacaacggcgctcagaacccaggggggggattatacaacaacaacaaggaccattcaggggcagccccacagccatggcgatcgcacccatgtggttacagcagccctttgggggtgctgcatgctagaaataagc

SEQ ID NO: 24366 - DNA, 184 bp, Zea mays
  Clone ID: MRT4577_122227C.1
acacccttccgaaaacagttgaaggagggccgtaccttactttattacaccatccaaaaggggggcaccctcgaccttttgctccgtttccgggggggtaagtaagcaatgggtcgtttaacttgccattttgccggcgtcgcttggggccctttcctaatggaggttgctgaatatattgttt

SEQ ID NO: 24367 - DNA, 333 bp, Zea mays
  Clone ID: MRT4577_122228C.1
ctgatacagcttcaataacatttacatattttgaaggccacagcgttagccaaatccaaattggtagacctccacctgcacaagtatatggttatgggctaaacactaacacggactttacacgtacaggagttggaatatggatatgggaaactactaaaaatcttggtcacaatgacacccaagcccgcattggtatagccttacacgcaacggctaaataaccataaccgcaggaaacactaacccgatccaattaaaatatcactttcattgctttagcattatggttgtggcatagacttatacagccgacctagatcgactgaactt

SEQ ID NO: 24368 - DNA, 188 bp, Zea mays
  Clone ID: MRT4577_122229C.1
cgcaccgcatccacctccaccgcgccgtcgttagagggggaggagggtttccgatggggggcggctaggatacgttcgcctcccccactgccaccgccgccgcggacttcgagatcttcatcaactgcagcgacagcacgcccaagcttcacaatttggcggacgagatggatgccctccgcgcggca

SEQ ID NO: 24369 - DNA, 1158 bp, Zea mays
  unsure (1)..(1158): unsure at all n locations
  Clone ID: MRT4577_12222C.1
agaggcgcgagagaggtggttggttggggtggaggaccgtcgccttccccgtttcgtcttccggtcctcgttttatcccctcgcccttgcactcctccgccgcacccctttcctccttccgccctccgccgcgcctggctttctcccttcccgagaggccacgctccatccccgcccgcgctgcctcccctggcgatcggcggcgaccgcggcccaacgaaagcgtcgtggtcggccgacgctgggcggactgggaacaagcgccaatggggatcgcggtggtggctctacacaccatgccgggggcgttcaccacccactccccggcatccattctgtcccttcggccagactttacgaggataaacagccgcaccaattcggtgccaaacgccaggacactgcaaggcgtcctaaggatcccgaggctgaggtcggtcaggcggctgtgccagcggatcgatgaccgggttacagaggggaacggtccttgggtcaaggatgccatgaataacgctagccaggttcttggcgacatcagcgtgcttggtcaagctgtaagtggcaatggtggtctaaatgggagtgctgccaagactccacctcagaggcggaagtcctcttcggttgaggatgaggcctgggaacttctgcaggagtcaatggtttactattgtggcagtcctgttgggacgattgctgccaacgatccaaatgacagtgatccggtgaactacgatcaggtgtttattcgggacttctaccatccggcattgcttttctacttaagggggaatatgaaattgtgcgtaatttcattctacacacacttcagcttcaggcactcttctattcagccctcttgtgtgcgcgtgagatgttgactcaagaagatggatcagctgacttaatccgtgccctgaacaatagacttattgcactgtcctttcatatcagagagtactattggcttgacatgcaaaaattgaatgagatatatcgatataaaacagaagaatattcttatgatgctgtcaacaagttcaacatttaccctgatcagatttctccatggcttgttgagtggatacctcnctaaggtggttactttattggaaacctccagccagctcatatggacttccgattcttttcact

SEQ ID NO: 24370 - DNA, 2316 bp, Zea mays
  Clone ID: MRT4577_122230C.1
tatttggattgctggcatgccattgaagtccttcacaagtatgttgttgcagctgtcatcatggcaatggctgttcctggtttggcacttcttccaacaaaacttcggtttcttctggaacttggtcttattggtcatacattgttgctatgctacattgagaaccgattgtttaactatgcctccatgtattattatggatttgaagaggatatcatctatcctaattatatggtttttattacaacctttttgggcttggctcttgtaaggagattatatgttgatcagagactagggcccaaagctgcttggatcttaacttgtctatattcatcaaagttagcaatgctgtttatgacatcaagatcagttatatggttctcagctgttttgctacttgctgttaccccacctttacttctttacagagacaagtccaaaggagcttctaagatgaaggtctggcaagcttattttcatgcatctgtcatagcattttctgcctggctctgccgggaaacaatttttgaagctttacagtggtggaatggaagacctccttcagatggtctgttactgggttcatatattcttttgacaggagttgcatgcattccaatagtcgctctccatttccctcatgctcagtcagcgaagagattcctggtccttattgtggcaacaggccttctcttcgttgttatgcagcctcctattaagctatcatgggtataccggtcggattttatcacagcggcacatttatctgatgatgacatttcaatatatgggtttgtagcatctaagccctcatggccgtcatggctgctcattgcaactgtggtacttacactagcagcagttacatccatcatcccagtgaagtatgtcgttgagttaaggacttcatatgcagtggctgtggggattacactaggcatctacatctctgttcagtacttcttccaggcagttgttctgtatcctcttcttgttgcaacaattgtctctgcagcagtctttgtcgtattcacacatcttccttctgaatcaagcacaagggttttgccatgggtgttctctttcttggtagctttgttcccagtcacctatctgctcgaaggacacttaagagccaaaagttttgcagatgaggatgaagcagagaagttcaccaacatgttggctatagaaggggctagaatgtcacttttgggtctctatgctgccatcttcatgattattgcattagaaatcaagtttgagctgactttgctattgcgtgaaaaggctgcagacagaggtatgcatggtccatctagtcggagtgctgccttcccacccaaagcaaggctgctccagcaacgaagagctcatgctgcaccaacattcaccatcaagcggttggcagcagaggcagcatggatgcctgctataggcaatgtttctactgtgctgtgttttggcatctgcctggttctaaatctaacactcactggtggctcgaaccgtgctattttcttcctggcgccaatccttctgcttctgaaccaggattcagatatcttcgcagggtttggtgataggcagcgctatttcccagtaacagtttctatttctggctatttattgttgacagcgttgtataggatatgggaggagacttggcctggcaatggaggatgggctcttgatatcgggggcccgggctggctgtttgctgtgaagaactttgctcttcttgtgctcactttgccgaatcacatactcttcaaccgcttcatgtgggattatgtcagacagacagatgccaagctactgctgacgctacctctcaacttgccttcgattataatgacagacatacttactattcgggtgttaggattgctaggagctatgtactctcttgcccagtacatgatatcaaggcgcataagaattgctgggatgagatacatttgaaataggtcatgtaactttctgaggctgtcactatacatcaagttctttcaaagctcaggaacagatacttcattgcctgatcctctcgcagcaaaattgtgctatgtagcagagagaaacaagtgtcgatcaactttgctttttttgtactgaatgattgcatactgagtgtaggctaaaggtgttgtcgcatatatagatgtattttaacagcacagatgatgccatcaccttgggtcgtttatgtcgaacttttgacgacgcaaagttttgcattcgattgagcagaagactttgatgtcgtactgaatgattgcatactgagtgtaggctaaaggtgttgtcttc

SEQ ID NO: 24371 - DNA, 730 bp, Zea mays
  Clone ID: MRT4577_122231C.1
tataggcctaatattcctgtgctcgagtatcacacttgctgtagcatcctacgcgcgcgagatcaccgccgggtgcgaacaataaatccctacgtgcgctcgccgccctactcctggagacggacatatgccttcattattgcgcagtggtcactagctcctagagccaccataccacaaacacctacgaccagatacttcaactgggctacgaacacctacggtgtgcctgcctacagactcaacaagcgctggaggctagcgacttacaacaaccagtaaccgttgccacgcaagccttggcacatctaaccatacataccatcggagcacaacaggaacagcactacctaccaacgactgagccaacgtagatgtggggaaccctgactaactacttgaaacaagaggcgcttgcatgctacccacttgcatctggatacgtagctgtataccatcaacaacaacaaaggcgacagatattgccagcgctcacgcaactagtcatggagaaccctgccgcctacctacaccagcaacggctgcattcatctctccctcacgctgtgggtgacgcacctacatacctgacacacctatcgctgcaacagattgaaccagctgtgactgagctagatgaggcacagcctgctgcatactcccagcacgtgcttgcattcaaccagctgactgagtcaaactctgctgcgtacctaccacagcgacaaca

SEQ ID NO: 24372 - DNA, 243 bp, Zea mays
  Clone ID: MRT4577_122232C.1
aagccctaagtcctgcttgtggtcttattttccgcgtaacttaaggtgtcgtggccgaggtgtctccggccgagggcggtggcgcgaccgataaccatcgtcagcgtgagtgtgacaagcgacatgactcgcgtcaaccagcgtgaccgcgatcgtgagcgcgcggcgtcgcgtaagcccaacggctaggggccataggacggactcaccccagagcagcgccgtgagagggacatgaaagcg

SEQ ID NO: 24373 - DNA, 306 bp, Zea mays
  Clone ID: MRT4577_122233C.1
caggtgcctaggagcccgtcgctgacgaaccggccgtcgaggcggaggctgctgctcctgcatggtcccgaggagactcctgaggtcgagcaggatgcagccgccgaggaggaggctgctgcttttcctactgctggtgcctaggagccagactcggccgagcctgcctatgaggcagaagctgctgctcccgacgagcacgccgcggacgagccggaagctcctgctcctgctactgctggtccccaggagccgtgcgcccatgcggacgctgctgctcctgaagagccctagaagggcaaccag

SEQ ID NO: 24374 - DNA, 688 bp, Zea mays
  Clone ID: MRT4577_122234C.1
gccggccgggttgggaaatctctaccgtcgggtgctatcaccaccgcgaaatcgagatttagagaggggagatccgtcgttggcgagcttgcaaatcgcggttacctaggtcttggcgtggtgttctggtgcggtggcatggtgcctaggagcctcgactgccatcaattccgccgctggaccgttgaagcttgggcgattgctcgccggacttgggaattgtcgttgtgccgtgctgcgtcggggaccgagctcatctcaatcaaatcaccggtgggcggtcaacctgtttgcgatggttggagcatcatttgtgcgtagtcggatttgggccgttttctccgtcatcgtcgacgacgccgtcggggtgatgcctcgcaccgccgtgctagtagctgaggaggaagagggagtcctgaccatggatcatcttgtggagggcagggattaatgggtggcgtggtgcattgcgggccgttgatccccctctgggtggctcagattagaaggataggtacccctcgccacattcagtcaacaccggtgatctcgatccaacaggttgaaatagatctagggtagatattatccccaccgatgatctctgtaacaccctgaaatcctattctaggatttagtataacttttcaaatgatctaaagaaaaaaaaaaaaaaaaaaggccccta

SEQ ID NO: 24375 - DNA, 477 bp, Zea mays
  Clone ID: MRT4577_122235C.1
aattcggcacgaggcagaggtaaactttacctgccgtggctcttggtggtgaggactggctctgccaaaagtcccaaagtgattcgcttagttaggactggaaaaacgggaggacagcgtgaggatgggtgacgtactatgttaacaacttggcttttgttggatggcaaacggtcaccatcacaaatccttgaggtagtggcgcacatgagaatcgaaaccagttcgtgtgcaaacagcctgcttaaggaagcgcttaatgcatataatacatatcatatgtgttatgatgagatagaaccaaaaggtacacactgttttttccattccagctcatatgattgtggataaaagtgtaaccggacaaggcccagccttaaaattttgctagctgatggatggtggccggggctaggcatctgacactcttttatgttgttctaagctgagtttatagtcgaggaccattctgctcgt

SEQ ID NO: 24376 - DNA, 449 bp, Zea mays
  unsure (1)..(449): unsure at all n locations
  Clone ID: MRT4577_122236C.1
ccactcgtccgtcgactcttggtcggacgcgtgggcaactagaagatggacaggaatgggtactggaagtggaatgctagcgacatgtactttgttgatgctactggtgcttgctattacgaccaacgtgtactccctgcattatgatatgacatggtcatcaaatgatgcctaagctgccaaatgaagaagcgatctacaattcaatagaagcggggatttataacgaacgacactcagatcagatggcattgctaccctataaagcgcatcgaacatatctggaactacaattattgcacaatcgnggactgaatgtaagactgtacgatcctatcagagcaccacgctctcactgagagtcctacatagacaactgctttgcgagttatgatctggaacgactcatcactaaccaagctcgtctcgaatgtcagccaatcgatact

SEQ ID NO: 24377 - DNA, 2847 bp, Zea mays
  Clone ID: MRT4577_122237C.1
ctattttgcaatgttcttctcaggagcaaccgacgaagaggggtgacttgaggaatcaggagcagcgttcacatcagcccttatgtcatcgggaacaaccacaccaggtctcctcatcagaatccaccccacgcgaatggctttatccataactttatcgcgctgggccctcagagtagcagaagtctcttcagcaaccttgacagccaactgagcggtctctagctcctgggcgacggatttcttggaagcacacagatccttgatgacagcatctttggtcgacaccaactgcctgaggcgaatcacgtcatccaaggattcctgcagcttataacgatgattgtctaactcctccctagtgaagcgatgactcctctccaagatggtcaacgagttgctggcatcgcgatatagcctgtcaaggttgtcacgagaagtaacgagggcacgtttttcttccttttcagagttgagctgagcgcggagagtagagttcagcgtgttagcatcatttagagaagcagaaacccgggccagtttagtctgaccttgagaatacttttcctcgagatcagagcaccgtcgggccaattcagcttgacctcgagaatgtttttcttcaagactagaaagctgccgagccatatcggcatttgccgcctctaagtcagaaacacgccgttgaagcagcaccggattccaacgcgctagagacaaagctccttctaggacagaagcaccctgcaacttcagccgactagacatctcatcgaccaatgcctggaggttggagaagaatgagggaacccccaagtcgtgagaggtcaattgatggctcggcgaagggtcaccaaccggaacaactcgcaacgaatcagcaacaaccaattcagtgtcatcagcagaagtcaaaactctatcatcaggtgcgctggcctctaaagcgactccttgatccaaggctggagctatcgccatgcaaccagagtgtggaggagaagaccctatgtgaacatccatggaagtatgggagggagaacccactcggacaccctcgggggctgggtcacagcttgcgctacccatccgagccggatcatctccggcaacaccctcaggggctgggtaagcgccagcaccatccttgagggtcgagttctctgtagcagccacctctaaggctgaaggtccctcagtcacttccatgggatcagggcaatccaaaccagcttcctgaccctcaagaccacgctccaaggttgatgaggcgcagcacgctgcccgggatgaccccaacccggcatcgagcacaccagcacaaacatccatcgcgccaccatctgccggttctgataacagatcttctggaaccatgtcttcaagagtttgatcaaagttcgccagagataattcttgcaggccaatgagggcagacaaggcaggagaaggaacaccactactttccccactagctatataacgccggctgttcttccgaatcagagggatttcgtcctcttcttcatcatcctcatcaacaacacggacaacacacccattggggtcagcgtaagacgggtcacgcccattgggatcagcttcagtaaattcaggcactggcacttcctcagcaacaggagcagaaagatcggcaccctgatccaagctagacacccgacgaagacgtctcttcttctttttctccccctcagcaggaaaagaggcttgatcggctcggcgagaacgtttcagacgaacattgacagacttctgagcgtccaaagctttgtcagcctcagggatgggcgccaccaccaatgtttcagcaggagcgacatcagaggaatccttggctaacatatcaagcatggcacttatctctgcatcacttggattcaaaggcacctcaaaatgaacctgcctctcatcgtcaggaatttctccgagcgaggcaaccaaagcactaacttcttcaggagagggtcgcactctaagacccaaaccgctatcaccagcaggaggatttgacacgaaactattaaaagccttgcctctgagtatcatctcaagccggctcactaagtccacaacaagaattcttctgttggttacccgggttgagtcagccaagcctcggtacagataagccagatatgctctgtctttcagtggctgaatgttcttgaaaacaaagtcagcgaccacagcttctgcagtcggacccctctccttcaacaatccaacttcagctagcagagcccctgccgcagccacctcctcgtctatgggggattcggtccagctcggagtgcgaacatccggctgtctccctgcaaaaggcaactggatgttgggattgatggggggaatgacagcgatggacgaactcgaggctttccgcttgggcgccatctcaacctcgccggcgagcgggagcggaagtagaatcgcaaaagggcagagagggctggccttgttgctgcccttgctgccaccgccattgccgcccttgctgccgccgtcaccacccctgccgctgtcgccgccaccatcaccgtcgcctccgtcgtcatcgtcatcaccaccatcgccgccgctgccctcctcggatgagtccgaggagtcctcctcgtccgaggagtactccgactcatccgagccctcgagcccggagcgctcgacggcccggatgtaggtgggagcaggagacccctcgaactcggaggagaactcctcctccgagtactccgagttaccgaagtcctccgagggaggagtcggctcacgtttgcgcttgtcaccagagcgaggcgaagaaccgctacctttcttactcttgctcat

SEQ ID NO: 24378 - DNA, 117 bp, Zea mays
  Clone ID: MRT4577_122238C.1
gagcccgttcttcggccatgatgcgttgttgacggaaatatgattcgcatttgttgaggaagagcattggatcggacttgccatcgaagcggggaaagtccaatttctggaatcgtg

SEQ ID NO: 24379 - DNA, 456 bp, Zea mays
  Clone ID: MRT4577_122239C.1
atgggcaagagtaagaaaggtagcggttcttcgcctcgctctggtgacaagcgcaaacgtgagccgactcctctctcggaggacttcggcaactcggagtactcggaggaggagttctccttcgagtccgaggggtctcctgctcccgtctctaccccggcgtcgtctgatgattcagacgactcccaggggcttgctgcggaggtctggacctacatccgggccatcaagcgctccaggctcgagggctcggatgagtcggagtactcctcggacgaggactcctcggactcgtccgaggagggcagcggcgacgatggtggtgatgacgatgacgacggaggcgacggtgatggcggcggcgacagcggcaggggtggtgacggcggcagcaagggcggcaatggcggcggcagcaagggcagcagcaagggcagcaacaaggccagtggctag

SEQ ID NO: 24380 - DNA, 2290 bp, Zea mays
  Clone ID: MRT4577_12223C.1
tggttggttggggtggaggaccgtttccttccccgtttcgtcttccggtcctcgttttatcccctcgcccttgcactcctccgccgcacccctttcctccttccgccctccgccgcgcctggctttctcccttcccgagaggccacgctccatccccgcccgcgctgcctcccctggcgatcggcggcgaccgcggcccaacgaaagcgtcgtggtcggccgctgtcacgcttcttgcagacgctgggcggactgggaacaagcgccaatggggatcgcggtggtggctctacacaccatgccgggggcgttcaccacccactccccggcatccattctgtcccttcggccagactttacgaggataaacagccgcaccaattcggtgccaaacgccaggacactgcaaggcgtcctaaggatcccgaggctgaggtcggtcaggcggctgtgccagcggatcgatgaccgggttacagaggggaacggtccttgggtcaaggatgccatgaataacgctagccaggttcttggcgacatcagcgtgcttggtcaagctgtaagtggcaatggtggtctaaatgggagtgctgccaagactccacctcagaggcggaagtcctcttcggttgaggatgaggcctgggaacttctgcaggagtcaatggtttactattgtggcagtcctgttgggacgattgctgccaacgatccaaatgacagtgatccggtgaactacgatcaggtgtttattcgggacttcataccatccggcattgcttttctacttaagggggaatatgaaattgtgcgtaatttcattctacacacacttcagcttcagagctgggaaaaaacaatggactgccatagtccaggtcaaggtttaatgcccgccagcttcaaagtgcggacaattccacttgatggtgatgaggatgcaactgaggaggtcttggatcctgattttggggaagccgcaataggccgtgtggcacctgttgattcaggtctatggtggatcatattgctgagggcatacggaaaatgttcaggggatctgtcagtacaagagagaattgatgtccagaccggaatgaaaatgattctgaagctttgcttagctgatggtttcgacatgttccctacattgctcgtaacagatggttcatgcatgattgatcgtcgaatgggaatccatgggcacccacttgaaattcaggcactcttctattcagccctcttgtgtgcgcgtgagatgttgactcaagaagatggatcagctgacttaatccgtgccctgaacaatagacttattgcactgtcctttcatatcagagagtactattggcttgacatgcaaaaattgaatgagatatatcgatataaaacagaagaatattcttatgatgctgtcaacaagttcaacatttaccctgatcagatttctccatggcttgttgagtggatacctcctaagggtggttactttattggaaacctccagccagctcatatggacttccgattcttttcactgggaaatttatggtcaatagtaagcagcttggcaacaactcatcagtcgcatgccattttagaccttattgagtctaaatggtctgatttagttgcagagatgccactaaagatatgctatcctgctcttgaaaaccaggaatggaaaatcatcactgggagtgaccctaaaaacacgccttggtcataccacaatggaggatcctggccaacattactgtggcagctcacagtggcatgcatcaagatgaacagaccagaacttgctgccaaagctatagaagtagctgagaggcgaatcgctactgacaaatggccggagtactacgacaccaagagagcacgattcattgggaaacagtcgcggctgtaccaaacgtggtctattgctgggttcctagtagccaagctactaatagaaaagccagacgctgctaggattctgtggaacgatgaggatgctgaaatccttaatgcttcgagcacaaacagaaaacgtggcaagaaagtgttgaagaaaacatacatcgtgtgagttctcgcagcaagttcgattaaattcctcagttagcatttttaagttgtaatataggaagtgttgtccctgtatataaacttaaatgaggttgcatttttgctgggaaaaaaaaaaactgttggaattggatgctgttattgtcgatgcatctggctttgcaacgaatcatagacctgcctggtagcttccctatacactttatccggcatgaca

SEQ ID NO: 24381 - DNA, 698 bp, Zea mays
  Clone ID: MRT4577_122240C.1
attgggtacctcgaggccggccggaaaaaaaattacaaaaaagaaaaaaaaaaaaaaaaaaaaattaaaaaaaaaaaaaaaaaaaaaaaaaaaaaaaaaaaaaaaaaaaaaaaaaaaaaaaaaaaaaaaaaaaaaaaaaaacctttccgtttccccccccccaagggaaaaggggaaaaggcaaaagggtttccccgcgggaacaaaatgggaaccttctttcaaagcggggccccccttgttgaaccggccaaaaatggggggcggggccccttttgcttctttgccgccccccccgttttcaaaattcccttgagggggtttggggtcaaaccccggccccccaagaataacggtttccttgaagaactcccccaaaggggggttaaaccccgaaaatttcccggttttcggtttcccaccttggggtttctttttttgggggggaaggggggggggccccccaaaaaggttgccctccaagaaatcccaaaaaaaaccttatttgggggtaagggccagggccccggaaaacaagggcccaacattcaaggggggggggaatttttcccctttaagggcgggaaataccaaaataaaaaatttgggctggaacccaacttctttccccgaaaggggggggggtttcccaaaaaaccccccccccaatttcaaaaaaacaaattttttacccccct

SEQ ID NO: 24382 - DNA, 1182 bp, Zea mays
  Clone ID: MRT4577_122241C.1
atggcgcccaagcgaaaagcctcgagttcgtccgtcgctgtcattccccccatcgatcccaacagccagttgcctttcgcaggcttttcttggcatcctgccacactttggactgtggaaatatttgtatcactgtcgccctgggatggccggaggacagcatcagctggtgggggtgcgagcttggagatgcgccacggaaggaagactgattacctcgacatccccctcaaggacagcatcaagggatggcgcatggagtggtttatcgttgagaatcacaaaaattctctccccccacggtcagggagacagccggatgttcgcactccgagctggactgaatcccccatagaccaggaggtggctgagacaggggctctgctagctgaagttggattgttgaaggagaggggtctgactgcagaggctgtggttgctaactttgtcttcaagaatattcagccactgaaggacagggcatacccggcatatctgtaccgaggcctagctgactcaccccgggtaactaacagaagaattcctgctgtggacttggtgagccggctcgaaatgatacttagaggtaaggtatcaaatgttggcgcccctgttgcatactcggcctggatcctgcctccttccaaggcctttacccattttgtgtcaaatcctcctgctggtgatggcggtttgggccttagagtgcgaccctctgccgaagaagttagtgctttggttgcttcgcttgaagaaattcatgatgatgaacggcagattcactttgaggtgcctttggatcccagtgatgcagagataagtgtcatgcttgatatgttagctgaggattcttctgatgtcgctcgtgctgaaacattggtggtggtacccatccctgaggctgacaaagctttggacgctcagaagtctgtcaatgttcgtccaaaacgttctcgccgagccgatcaagcctcttttcctgctgagggggagaaaaagaagaagagacgtcttcgtcgggtgtctagcttagatccgggtgccggtccttctgctcctgttgttgaggaagtgctcgtgcctgaatttactgaagctgatcccaatgggtgtgacccgtctgacgctgaccccaatgggtgtgatgtccgtgttgttgatgaggatgatgaagaagtgtaa

SEQ ID NO: 24383 - DNA, 383 bp, Zea mays
  Clone ID: MRT4577_122242C.1
acccccatctacatctctcccttcattatcttcttcttcctctacaagatccttcttgtatgggacctgaccaacccgattcactcctccccataattctacaccacctccgactatctctttccctttctccgccttaacttccacttccacttatttcaaataattcgtccttaattccaacagccaattctcccttttcagctcctagtattaataacttcacctcttttaccttttcaccaatctttacaccctttctttttttttccaccataataatattctttcctttccttcttcttgacaaccatcaaatatttttcccttcttttactaaaccatattttttttaacaccctttttttttctattacaccttt

SEQ ID NO: 24384 - DNA, 479 bp, Zea mays
  Clone ID: MRT4577_122243C.1
cccgggctcgacccacgcgtccggggagccaggcctcggggcctcggagcaaccacccgagcagacggagtacacggagcagcggccccggccccgccaacgctgccgccgggatgctccagaccttgtatgattacttctggtgggaacgtctgtggctgcctgtgaacttgacctgggccgatctagaagaccgagatggacgtgtctacgccaaagcctcagatctctatatcacgctgcccctggccttgctcttcctcatcgttcgatacttctttgagctgtacgtggctacaccactggctgccctcttgaacataaaggagaaaactcggctgggggcacctcccaacgccaccttggaacatttctacctgaccagtggcaagcagcccaagcaggtggaagtagagccttttggcccgggcagagcgggctctctggcccgcaggtagcgcgttgggttcctcgccggc

SEQ ID NO: 24385 - DNA, 256 bp, Zea mays
  Clone ID: MRT4577_122244C.1
ggaagaccgaggctgagaaggacgcagacatgcccaagatgcctccgagggcgttcttcgtatttatggaggagttcaggaaggactacaacgagcagtaccccagtgtggagcaagtatcgctgattggcaacgctggtcgtgacgagtggaagtccctgtctgatgccgagaaggctcactacgtgtctaaggcagtgaagctcaaggatgagtacacgaagaagatcgacgtttacagcaacaagcagtctgg

SEQ ID NO: 24386 - DNA, 325 bp, Zea mays
  Clone ID: MRT4577_122245C.1
acttgggcccaaaggactacagtaacatatattaatacatcgcaagtagaatacatgctccgggcacaacaacgcccacaaagggggcaacccccgtacttataattcatgaagggggcggaaccaaacttttcttgactacaagcacaaggggactaccggggggctctagcttcccattcatacccatgggggcatactgacccggaaaccaactaagaggggaccttgccagcgaaggaggggacaggggccaggggaacttatagggggcgagcagaaccggtaacagccatggaacccgcggttggcagacccccaccgg

SEQ ID NO: 24387 - DNA, 842 bp, Zea mays
  Clone ID: MRT4577_122246C.1
tggcccaagctgcctaggacccattaacaaccacgggcggctgggcagccaggtaccagctggcgatagcgatggtagatgggcaagctgtgctgcagcaacgacgcgcatgccttcaaagccaaggatcataacgaaattcccagtgagtgcagcagcagtcacgtacagccaagcagccaggtaccagctgcctgagggttgggtagatgggcaagctgtgctgcagcaacgaggcggaggaggaggccgggttcaacctcctggggctgctggtcgccgccatcatcgcgctggtgttcatgctcctctgcgcgccgcccaggaggcgctgcgtcgccgtctacccgtgctgctgacccctcagtcagcgctcgcgcctcctcgctgtgccgctgccgctgcctggccctcctcgtgcgggacaggagcttctggatccaaccaacaggtttcggatcagcttcagcatgtgtgcaggggagcttcaagttcttgtgggggaggggagcagagcaggacaggcattggttcctcacatcatctttcgatccaccaataatttctactcaactgtaatatccatcctgctccaactcatgtaatccttttgttctggcgaaccagggcgttccttcgtctatagcctgaattcgtttcctttggtagcctgaaaaaaaggtgtttggctgcattgcctgctactatctcttacgacctcccttctacttgcctgatcctaaaacgttttcgtcggtgtctgatctgaatagagtaagcaatgagccggatctgtcggttcacgctgattaatgtggttctcttgctatcttttttctctc

SEQ ID NO: 24388 - DNA, 291 bp, Zea mays
  Clone ID: MRT4577_122247C.1
tcttcctcttcacatcacgtacccatattgttcattcactaaatactcgagataatgctacctctacagtcggatcacaaaaccacgtggtaccaacctatcactcctactacatccaattctgaacattccatatagactgctcatcatctttactcctcagatatctctacctgatctacaagtcttctctctctctagaatctctcattccagtttccaccaacatcttaacaaatatagaatatagaatctcaatatatatgaaattctgtcctttaatatcatcaa

SEQ ID NO: 24389 - DNA, 484 bp, Zea mays
  Clone ID: MRT4577_122248C.1
gcgttcggatatctcaaaactaatggaacagggctacgcatacctgccatcaggtgtgtgcatgtcaggaatgggtcgccatgtttctttcgaccaagctgtggcgtggaaggtgctcggtgaggacagcaacgtgcactgcctggcattctgcttcgtcaactggtccttcgtgtgaccccgacctgtcggatgggatggcgagctggtggtcggtctgtgtgatgagcaggcccatttttgtatgatgatcctgataaggaaaatcatcagctgtggcaaaatgcttatgttgcaatcactagttgtaggtcttgattccagtgtatttatgaagaaactggagattatgcaaagtcttgtcccacttccgtttgactacccggccaaatgctgtttgtcaatctcgattggcaaggcaaccgaggtgatgctgggttgctggcagttttggttcgtcattccattcagatgttaattgctg

SEQ ID NO: 24390 - DNA, 128 bp, Zea mays
  Clone ID: MRT4577_12224C.1
taccactcgttctcccactctttccatctatcacaacatgatgtcgtgctcaaacaaggcgaggagagccttgttccttctgttccctttatgcatcatgcttggtgttaaagaagagtcaatgggca

SEQ ID NO: 24391 - DNA, 628 bp, Zea mays
  Clone ID: MRT4577_122250C.1
ttttttttttttttttaacccattcagcgtgctttattgattaagaatggttacgacattgtttaactaaaatttaaaaataaaactagaggactcaccatctcaaatgaaatttatcttagactaacaacataggcctggtgtccacagaagtgacataacagtagatatggcaaccactaaagaaggacatctccgacactttgctactatcgaaggcatgcatatgcagatggcttcacgatcaagataatattagggatagggtcgtttggtcttagctaacgggatctatggtttggctaacatgtaaactctcttgtctcttgttccataaaaggagaagcagagtaataattgagagagattggacacaaacacatcaaagcacaaaagttcaaattcgatcctaccaaactaaagaggtcacctcacatcatccaaggagtacaataataaagacatgcataaagggcgaatacaagccctcgcccatccggtccatggcctagggcatgggtgatacacctctaattatctttattgacgtaagaccaaaatgcattaaaggtccaatagatctaacggctagtttgaaaaactcattttccaaaggatttttttttta

SEQ ID NO: 24392 - DNA, 348 bp, Zea mays
  Clone ID: MRT4577_122251C.1
caaaaacaatcccaggtggcataaaattaacgggaaacaaaccaaaggggtacttttaaacaactttccaacaaaaaaagggcagatggatccataaaaaatcacatgttttcaaaaggacggcttcgatgttttcattgttaaaaaaaagttggcctataccggctaattggactctcctccaaaggccaagtttccttttaaagctttaaaagggaaactcaggccctgaaaagccggcggaggtatattatggctcaggacatccttattcacgggcctgatcgggcctaccagggtctgagaggtctaaactgaggacagggttggagttttgccctctagggg

SEQ ID NO: 24393 - DNA, 323 bp, Zea mays
  Clone ID: MRT4577_122252C.1
ttcggggcggccgccctgcattttcacaacatttcgtgcctgcctgccctgttctcggccacctccctcgtcttccctcctacgccgccccgcctaggctccagcgcttcgcgggcacgagcgacgaaccgactttgctccgcctttttcctgccaccgggtcggcaatattggaaggagctcggagggctggggcgctgacctgagtgggatggagagaggatgccggaactgcaaagcattactcgcctagcatgcctaaagtctaataagcttgaagatctcgcccttttgagagccttctgcgaaaccggtgtcacctg

SEQ ID NO: 24394 - DNA, 318 bp, Zea mays
  Clone ID: MRT4577_122253C.1
ggatctgcctccacatctagcgagccactgagggggcggatcctaaacagagggcggtgacgcggcacaagatcacaacggtcaacgggagcaagcatagacaagccaagaggtccgagggcctgcgtctaccacatacaaggtaatgccactctgtccatacaggtccaaggacatcagatatgatggatgcagtcgtccacctgaatggatgcaaactccaaaggaagatatccaagatcttgattgacaactacttacgcgatttgagccaggagactgaaatgaacttgtgggagcaccgctacagcataaaaa

SEQ ID NO: 24395 - DNA, 419 bp, Zea mays
  unsure (1)..(419): unsure at all n locations
  Clone ID: MRT4577_122254C.1
acactcccgcagcactttccgttgccgccgccgccgcagcccaaccggaaggacaggaggaagangccggcggcgcacgggccncggccgcggacccgcgaccagaccgcgcggccgcaccgcaagaagggcgacagcccgcacaccacgaaccngcgcaccnacaagaacggcgactacgtcgacgtcaaggtgaacggcgccgtgcacaagggcatgccgcacaagttctaccacggccgctaccgtcgcgtctggaacgtcaccaagcgctccatctgcgttgagatcaacaagcatgttaatggccgcatcatcaggaagcgtatccatgtccgtgtggagcatgtgcaacccttcccttgcacatgagagttccgtttgatgaaagccaagaacgatcagttcaaggttgatgc

SEQ ID NO: 24396 - DNA, 314 bp, Zea mays
  Clone ID: MRT4577_122256C.1
aaaggggggaacgagcttttttcaaaagttgcccgcaagctggggggcaaacgttgtattacgtaacatttactgggattggagtaacaaacagcatggaacagggttgcaaacaagtttttcatgcccaacagttgcattcaaaattacacgacacaacccccttccccctttccccggttaaccgttactttccaaccaacaggaattaacaccggcattaggaataacttccttttgcgatcaccaagaataattagcgccgggctttacaacaagacggcccaaaagagccaaacttcccatggtttttt

SEQ ID NO: 24397 - DNA, 1000 bp, Zea mays
  Clone ID: MRT4577_122257C.1
cgggagcctaaaaatgggtcagcaggtcaggcctcaacttcaacttcacaagctcaagtcttccccagtccattccatctcgatcccccacgagctccaataaactaatcacagatttcaagctcgcttcaaattcttaaatccaaccccattttcacctgagcacacgcattgctcgagaactcgcgtagcaagaaaccatcaacaagggaagggagcttaggcaaagaatccaagaaggcaagaaccatgctggaagatgacgccgccatggacgcggatagcctcgtcggccaggacccgaggtcgggggtgcggccaagcggtggtgagcgcgactgggcggcggccgtgctggagccagtgcggtggatgcggatgctgtgccgggagctgggcgcgacgttcgtggctggggtggtgctggtgtacggcctcagccagggcttcgccggctccttcttccgagtggcgtcggactactactggaaggacgtgcagcaggtgcaaccagccactgtgcagttcctctccgtcttcttcttcattccatgggtgctcaaaccgctctgggggatcatgaccgacgtctttcccgtctgcgggtaccgccgccgcccgtacttcctcttctcaggaatacttggaacggtttcagctgctatcgttgcagtgactattggattgccaatgagttctgctgtactttgcttgatgggaatctcaacagcagtcgccattgctgatgtaacaatagatgcttcaatcgcaaagaatagtattgataagccggcgctggctccagacatgcagagcctctgtgcattctcatcatctctaggtgcacttgttgggtatggtacaagtggattatttgaccatcatcttggagcacaggtcagtttctgtctaaatgctctattttgctaggtttcatccatgtctgttggttcagtgagaagttgtatgctggatgacttttggctcaatgtagggtgcg

SEQ ID NO: 24398 - DNA, 243 bp, Zea mays
  unsure (1)..(243): unsure at all n locations
  Clone ID: MRT4577_122258C.1
caagagtacactttgatagaatacacaatggtaggcacaaaattactagctcttggttgtgttgtcctggtgagcattggattggccaatgctgcaagggtggctcggtactcgagtgcctctggagtagggacgggaggaggagagggtggggggtctcagggtggtgctggctccggttctgggagtggaactgggtcgggtgtgagctctagtagtggnacacatgcaagcggtggagga

SEQ ID NO: 24399 - DNA, 565 bp, Zea mays
  Clone ID: MRT4577_122259C.1
tgctgtttagtacataattctagatttacagacttacttgataacctgatataaaggtcacggccaagcttacttttttggatcaacttgtatgtgttgtgctacttattgtcgtattagccgcattgggcctgcagttcaggggttctacctggcaagcgttgactgtaggtgtagcaccgagatgtttatggggttcgcggtggtttgtttaccaaatccagaatcactctgatactgaaggtattatccagcataacctgttagtccaaacattatcagcacatatgtgttgcattgacatgtgcggagcagccacacaggtagacatatctatctaatagtaaatatgacatataacaaaataatataacttttcaacaaacacaccacactactcataagtctcatacatattgattgaagttcattgtttatatattagtacatcataaattttaaaaaacattacaataatacaagggtttgggtaattcgggaaaatcgggtacctagactcagaacccgaatatctaaacttaaatcgggttttcaaacttgctat

SEQ ID NO: 24400 - DNA, 225 bp, Zea mays
  Clone ID: MRT4577_12225C.1
cgtccgcgaacccttggccccgtttccgccccgtattaactgccccacaacgtggcttccactcggcggcctttctaaggggttcggggcttccccaccccggggaaaattaaaccaaacggcttccccgttaacttttctttttgactggcgtgggatcaaagaatcaaaaccattcttctcctccccgcccggccagcgtgcccgcgggggcctctttttttg

SEQ ID NO: 24401 - DNA, 560 bp, Zea mays
  Clone ID: MRT4577_122260C.1
tttttcttttttttttttttttttttattttttctttttttttttttttttttttttttttttttttttttttttttttttttttttttttttttttgggggaaaaaccccaaccaaaatttgggttttttttgggaaaccccggccggggggggggccccctggggggggcccccccatggggaatcaaaaagggggccccccccacgaggggttgctgcaggggggggttcaggggaaaccggggggtgaagggaaaaaattgttgttcctgaaaaaagggaaaaagggttccccaacccccttgggtgaacaaggggaaaaaggggtgccccgggtacctggggcgggacccccctaggggggaattcccgcccccgggggggcggtactagggggcccgggccggggcccaagctgggggaaatcaggggaaaagggggtcccggggggaaaatggtatccggtaaaaattccacccaacaaacgaaccggaagcaaaaaggggaaagccgggggggcctaaggggggggctcacccaaattaatgggggggggcc

SEQ ID NO: 24402 - DNA, 258 bp, Zea mays
  Clone ID: MRT4577_122261C.1
ctgacacatgggctcaccggaccctaaacctgagccacctgcctagcccggaggtccgttgatgcgtgtgcgactctaggcgtagcctgagcccactacaagggctagcggtggatggagctgtgaaccgattacccatacgatccccttaccggtggagggagaaactagcctacgaggccaataaagccagaatggggcacgatgaggatcatgatcaagggatgcgtgtggaagaacacctacgactagaaactt

SEQ ID NO: 24403 - DNA, 272 bp, Zea mays
  Clone ID: MRT4577_122262C.1
ccgacgcgtgagcggacgcgtgtgccatcttccttcgacaccatgctcatcgacattggtgactaccctcttcctctccttctccttctccctctctctctccactgcgatgactaccaggtcattgctgaatgtccaacgacctcatgccggcctatacatgcaaggctggatccacagacactgcatccacggaatctagaactctttcatcaccactagattcatgtttgaaaagctcctgcctctgacgctagatctcatcaccaatg

SEQ ID NO: 24404 - DNA, 1514 bp, Zea mays
  Clone ID: MRT4577_122263C.1
ttttttttttttttttttacgagaagttgccagcattgttcaatgcattaaaagcaaaaaactcatgcatgcattacgagtacatccctaaacctaacaaatggaggaatgacagagagatgttctttcgtgctttctggtgtttcttgcagtgcgtagagaccttcagacattgtcgtctcgggctctctattaatgatacttttctgttttctaagtataaaggcacattgttagttgtaatttcatgtgacacaagcaacacattggttcctttggcatttgctttggtggagagagagaacggagatagttggtcttggttcttgggagatagttggtcttggttcttgggacttgttcgaatccatgtcgtggacgttcttgcgatttgttcggatccatgtcgtgggccctggtcggtatttgaactgcaggattacgtttgtgtggcacgaatagcatctttccttccacagcacgccgagtctggcattgcgcattgcaacccatatgatcctctctgcagcacacgatcacaacgttttcctattgtcacctctatataaacacagcataagaataaggaactaggtaattcagaaggtacagcggtagtaactagtaagactccataggactgttggtacgacacacacagttatggcttttggaagcaattatacccgacgggatttaaggagctaaaatccccttatattcaaaattgaatagcaaggggtttcagctcctctccggcggtatccttacttccaaacaagccctttaagttgctaattggcgcttcttattgctcaagttgcatccttctgccaagtttttccacaggatgcactgagtggagccagtgaacttcaatgcatggctctagtggtgttaacctcgaaagacagcccgttatcctggaggcgctgctggagatcagtagggccaaagacggtgccaggcgtgtataccccgcccttgggcaggttggcacgctggctcagcaggacgagggcgcactgcaccagcacgatcggagttgtgacgtaaccgacctcgggtcccgaaaccttggtgatcacctccttgtccggcttgcttcttccgagctccaacgagctatccacgttgctgtagccgtgaccgacaaaccacatcttgaacgaggcgctcttcacctcttcctcggtcgggccggctctgctgaacagcccagcggagaaaaactcagggtacttcagcaggagggacctgccgaaggagaagttggcgagcaggccgatgaagattccggtgaagatgaagcgcacaaggatcagcagggatctggaggcgatcttcacgccaaaatgggcaggtttgacagaagactagaatttcttcctatgatcagagtactctggggtttcttctgcgccaggaagggggtcaggatgctcagtcaaggttgatagagttctcttcacgaccactggtcagcggaaggcagtttcatagcccacattccc

SEQ ID NO: 24405 - DNA, 2276 bp, Zea mays
  Clone ID: MRT4577_122264C.1
ggtccactgtgatatactcagtttattgcattggcacgtcgttgtaacttgcttacatagtcattatagacacacatgtacaagctgaaacctgcagctaattccgtgatacctttcagtgattcctgattgctcattttagagagaacaagcttctacaaagtttatggaacccaacaaatgaacccctagggtcttcaatatctcatcacccagcagccacctgatattgttcttatcttgatttggtcagttttgtcagaggatatggtgagggatggttatgaggacgttgtaaacatatacatttcatctgtgctcatcgagcggatgagagagaaacaaaaggagattacacaactaacatgtagcgtttgcagatctaggtaaatacaatcacctcttctttgtactcacatacaagcacttatgacttatccatgtattttatgaactgaattgtgatcaattatactactgtgcttttaggacatgttatttttgcttaaaagtgccagactttcagttagtgcttttggcttgttggaaatggatgaggccgagatgctaactccccatgcttctctctcctattatggtcaattcagaacatagtcttcaataaaaggaatgatcaatctggcgtggcaaattatgcatgctgttagcagtagactgttagactcaagtagtacaaaatcttttagaccagctgatatagagacaagagcccttggagctgcatatgctgctgggttagctgcaagagtttggaccaaggagcaggtatttgtaggtttgcataagagaacatgacagtcttccgcctgaaactgcatgaagcgcacatgaagaagagggcagattcatggtacaaggcaatccctagatcatttgatttggctgactgatctttctctgtaagtttatcttgtcagtgctccatctatttctggaagctgcaaatgattacattcgtatttgttgggattattcttagctacttgttatttatatataacatcacgatcttttacaaacaaacgcgagtacatgtataatttggttgcagaagatcattagattgagcactaccatgtgaggcaatctatatggtttgctttctgtgtgtatgtctgcaagcaaagtgacttgtactctatgacatgtattcattttcattttgcaattataaactattcgaatttatatacatactttctagaaaaaagctgtagttattattcattgtgcattaatattttatcaaattgattgtgtattgttgcaacacaagggtacctaatttgcttattaaaacaagatttatttacacaatatatatagatcgtaacaatgtaccatcacctaactatagttctctatatattacttcatccgtttcaatatataaatcgtttgacttttttaccccaattttttactagcttatcttattaaaaaaataataattactattattttttactatgatatcatctagtatatctgacgcaaaacctgaggttcgaactgtggcagaacctccaagttattgggcccacatgtacctgtctttcttccaaagacctcagacggccatgcatgtgcaccagatagcttaacaggatctgtccgattgccccaaggacatcggataaaccactttcaaccagaaccacggattaagtaatacaaatcacacacaccataatttacagcggaatttttttattacaaaattttatcagtttacaacaagtttacattgtacatgatcggagtggttacaaaagtgaattagaaggattacattttgaatgatgtaaaattttcataagtttgaaatacatgctagcttgagtgataatcctcatccagaagataaagacgggatatacttatatagaaggtcgagcccaccggcacttagcaccatccatgaaagaacaaaactataacctgaaaaacaatagggaataaaaccctgagtatgcaattactcagcaagacttacccgactaaagaaaagactctcaaggatatgctgacttaaagggattcaaggtaaagctcatcaagtttcaaagactctttttgcagaaaagcttactagaagtgggtccttaagccaagttttatttcacaagttagtttattacctgaatcttctagcctgaatctagcgtttgcctaatctagatcattcacttgaccaacaccaggttgcttttaatcaaaacattgttatactttgttaactatgctgcaggtcg

SEQ ID NO: 24406 - DNA, 238 bp, Zea mays
  Clone ID: MRT4577_122265C.1
ttaccaacaatggcaaccataataggggaagtttatattctacttgatctttctaataatattgctacctcaaccattttcccacaattctcacaatctcctatatctttcctttcttcccccatacctcttaccatctgtatcttcaatctgttaaaccccaatttttcaaccctatcttatccaacattcaatttcaacaaacatcttaacattttcacccttttatccttcaaca

SEQ ID NO: 24407 - DNA, 500 bp, Zea mays
  Clone ID: MRT4577_122266C.1
gggcccaaaacccaggcaattccggactaattttattccggcccacccaggaaaaaaatggttttttttcctgggaattttaacgggccgggtccaggccaaaaaaaatggtttttccctaaaagggttttttacggggggaaaaaacccttgggggccgttgaaaagtgggggggggacccttttggggcttccccacaacgatgggtgggggagccagcccctttccacccccggggggggggttttggggggcccccctagtcatttgggggggggggaacaccccaccccccaccaggtttttgggcttgccccccagggggttgaaaccaaacccccactggttttccgggattttatccaaaataacctaactttccaccccaaatttaggggctataaggggggggggggcccccaaagccttttgaaggatataaacccctaggccctcctaaggatcatccaacgtttccttgatagccggaacaaagggc

SEQ ID NO: 24408 - DNA, 540 bp, Zea mays
  Clone ID: MRT4577_122267C.1
ggcagcaaaagtttcacatggaaattttatacaaaatcgactgtaacaagtttggggttaaccaccccctcaaaacaaacaaacaaaagcttactggggggtattgggttcaacaggggcccacaaaagctgacccatatttccacgtacatcactgaaaccccaagcatatttttgggtcctatttataaaacattaagggcaaacagggacaatccatgaaaatccgatagcaacaggggttcaatttatgctaggctacggcccaccattttttgaaaaaggttactttaaaacaggggggccccggggccatgttcactggaagttcaagttgcctccttgaccctggaacccagggctgcccccagggtacccaggattgcccccccccaaatatgggggcccgttggggctgcctcctcggaagggaggggggggccctgggggcctccctcctcggaagggaggggggggccctggggggctgcctccctggaaaggagggggggggttccttccctggaagggagggggggg

SEQ ID NO: 24409 - DNA, 137 bp, Zea mays
  unsure (1)..(137): unsure at all n locations
  Clone ID: MRT4577_122268C.1
tgaccngccagggcgtaaccagctttccntataagtggagtccgttantaagangctttgggcgtaanngcatgggtcnatagnctgtntncctgtgntgaaaatttgttaatnccgcctcaacaatnaccacannc

SEQ ID NO: 24410 - DNA, 685 bp, Zea mays
  unsure (1)..(685): unsure at all n locations
  Clone ID: MRT4577_122269C.1
ccggggctctctgtcgccgacgactacgccaggtcttcttcggggcccaggtcgctgccgcctacatcaggggccccaagttttcctaggacccctcgccggcgacgagcaccaccagcttggttcactcccaacaaaatgtcagccaatgtgggtgaatcaactagcggtgtcagcagcagcgatgcagctggggggagctttgagtgcaacatatgcttcgagctgcctcaggagccaatagtgactctctgtggccacctcttctgctggccgtgcctttaccggtggctgcacattcacgcacactcgccagagtgcccagtgtacaaggccctcgtggaggaggacaagctcgtccccctttatgggcgtggcaaggatcgcgtcgacccgaggtcgaagaacatgcccgagggcgagattcctcaccgcccaacgggccagaggcctgccacagcggggaactcgcattctcagctgctttcgggggactgttccctatgcttagcttccaagttcatggggtttccagatgccgccgcttacgcgcagcctgctgggttccactatggatacgggcatgggcatgggcatgggggtccaccatggcgggcatatggggacagcacaagcccatgggcgtncaccgacaggcaccggttggggcaacaacagcagcagg

SEQ ID NO: 24411 - DNA, 258 bp, Zea mays
  Clone ID: MRT4577_12226C.1
ctaatgctgagaacgaccttgctggtctccttacattaagggcagcccaacaacagattcgcgcttcaaagttcggtatcaaccggaatattatacagaacactggagggtcacttttacgcacggcacagcacgaccgggagctctaaacgtgacaaacggtctttaaactgcggtgagtgatcctcctttgctccgtgaaactgctatttttcagcatccatattgcgcccaccaagggaggaagacgccgggcgg

SEQ ID NO: 24412 - DNA, 367 bp, Zea mays
  Clone ID: MRT4577_122270C.1
gacaaaccatttttttttggtggatcacaatgatctcaaaaagttggcgataaaaaactaatcatcacggttaatattcatacatgatcttaattaaaatcaatttacagtttattcatcgttacaacatgtctactagttttattcctacctaaacatgcctactgcccgcgtagaaggatcttttgctagccttggtgggtggtgctcgctggtgcacggctggaggcagttgcccccttgcaggtgatgatgtgcgtggaaacccagaacgacctgattcatgcgctgcttgcattttgagtgggccgtattttcactggttgagctggacctagacacgtgagaaccacgtcgtgaagagatg

SEQ ID NO: 24413 - DNA, 397 bp, Zea mays
  unsure (1)..(397): unsure at all n locations
  Clone ID: MRT4577_122272C.1
ccgggnncgacccacgcgttcggnctgtttcacctgggcaaaggatgtgcacgcgctacgaaccttgatccccctggtaatttctcatcgggggcgccactaccttgagcccgcgccgcatcgcaattcgcgcgtccgtcgccccaactccaacgagcaagtgattgaggaccctggtgttcaacaggtagaagttgctgaggaggagctcattgaaggtggtccaagaggagccttacaacgaggagttcgagcttatctaggtggcgtctcccagtcagcttgatggcgccaaggaataatacttagttcgttttattattcttattcatttttgtaagacttccgctatgtaataatgatatttgtgacatttatctctatacactttatcgtt

SEQ ID NO: 24414 - DNA, 121 bp, Zea mays
  unsure (1)..(121): unsure at all n locations
  Clone ID: MRT4577_122273C.1
gnnctcaggtacggtgtcgccagacaccacgatttcaagcaacgtgggtcccgggaggcagttcgcaaccccgccaacggcgaggtcggagttgttcgataccgatgacagtgctggcgct

SEQ ID NO: 24415 - DNA, 320 bp, Zea mays
  unsure (1)..(320): unsure at all n locations
  Clone ID: MRT4577_122274C.1
acccacacgtccggagcattcanaaacacaccacaccaagctgcctatcatctacttaacaacaatggctaccgggatattagccctccttgcgcttcttgcccttttccttatcgcaacacataccatcattattccacaatgcacacttgctcctagtgccattataccacaactcctccgaccacttactttaatgttctttgaacacctaactttgcaagcctacaggctacaacaaacactagccgttagcgtcttacatcaaccaattcaccaattgcaacatcaatccttggctcttttaaccttacaaacca

SEQ ID NO: 24416 - DNA, 2657 bp, Zea mays
  Clone ID: MRT4577_122275C.1
tttgaaagggggattggtgggggcctttttgtttttaacccacttgggaaaaagggaattttttccaaagcatttaaattggggaacccccgggtttttcccatccccccgttttaaaaaccgggcccatgaatttaattttggggccccaaaaaaaaaataaaaactttccaacccccgggagtaaaatttggttccttaaaaagggcccccccttttttttttttttttttttttttttttttttttttttttttttttgggttttttttttttttttttttttttttttttttttttttttttttttttttttttttttttttttttttttttttttttaacacggaaaaccgtattcgttttttactctaaccaggatagaagtacacctttcactatcctatcattaccataaccgggctgcttgtactaaggacgcactgaatttaactacactctgggctagtttgaaaacttaaatcccctccggtttccctgaagattgagtgggaaaatagcttattttcccactcaatccctggaaataccggagacgatttaagtttccaaactaagcctccaagagaatgcaaatcataataagcagaatgttgcttattattacatacagccaagcagcccaagctaatgcataatggggacggtccagaaaaacataagccgaatgctactcataataaactaacctataacaagagagctatattttgggattgcccactgccacaatactcatccgtggctgcaatcagcttgcaaatggctgatctgatcacatccatagcatcaccaacggagaaatcaagcttccgtcagcagggatgaaaaatcagtaaggccttgttcgtttccgtcggattgcacccggaatcgttccagctaatcaaagtttatataaattagagaagcaatccggataggaatcgttccggcctaccaatccgatagaaacgaacaaggcctaagctgtcatcacatcagtcctcatcagaatcgccaaatgtgatcttcgtggatttaggagcatctgctgtaagttccttgaaatgagatccgtatatcttagattcctttttcttgacatgtgtgccaaatttcataagggctggaggaacaacctgatcagcctcccgcagaacattcacaagttcaccagcaagtgccttgttcgcttgagtgaaaaaggtatgtgcaacacctttcttgccagcacgaccagtccttcctatcctgtggacgtagtcctcagtggtcaaaggataactatagttaatcactacttcaacatcaggaatatcaagtccacgtgaagcgacatctgtagcaatcattaatgggcatttcccttctttaaataaagataaagcttttgttctatcatgctgagccttgtcgccatggactgaaacagccttccatccccttctctgaagcattgtttccactcgtgcagcttctttcttgtacagcacaaaaaccaaaaccctgttgctttgtgcttgatggtatttgtcaagcaaggcaagtaatcttgaatcccttgttctatcatccaatacttcaacaatttgcatcacgtcatggttagcagcaaggtcttctgatccaataacaacctttatcggatttggatccataaactcctgggctaatttgtggacagcaagaggccatgttgcactgaacataaccatctggcgtacagatgatgtttggctcaaaattgccctgacttcaggttcaaaacccaaatccagcatcctatctgcttcatctagaaccacaaacgaaacctcattaagacagcaaacacccatttcaataaggtctttcatacgaccaggagttcctatgactatatccactccagatttaagggcagatatttggggttcctttttagttccaccataaagacagactgattttatcccacatggtgcaccagcctcactaagtacatctgcaatctgctgagcgagctccctcgttggtgatagcacgaggcaccgtggcacagccttcttccctgctttcccccctaccttcttcctgatgtgcatcagcgccggcacgccaaaggcgattgtctttccggatccggtggcggcgatgccgatgaagtcccggccgtcgaggaggaacggccaggcgtgtgcctggataggtgacggccgcgcgaacgcgctgcagcattcgagcacctgagacggcagctcggcagcggagaacgaccgtagcggcgcgtacttagggtcctccgaacccttcccggtcaccgccacggtcttctcagcgccgttctccgcctccactgctcctgcgccgggttcattctccacccgcttcttcttgctgctcttcacggtctccactgtcgccgtcaccgccgcctcctcctcggcctcggctgccagcttccgcttcttgtccttctttctcttcttgtccatcttgctgctcctgggtgcttccacttgctcggctggaagattgcggcccatgtcgccggggaaaatggtggcggtggggagggccggagaatggggggcgagcgaggacggcgggaaccgggaggtgggagttagtttctagggttttagaggagaaccgaagcggcggctcggtaacct

SEQ ID NO: 24417 - DNA, 350 bp, Zea mays
  Clone ID: MRT4577_122276C.1
aaaaaaaaaaccacgtggtatgtatgcccaaaaaaaaaagtaccggggtttgcgaaaaagggaaacggccaaaaaaagggggggggcacccaacgggacaaaaaaaaatttattttccggggcacttggagagggaggggtaaaaaaaaaaaacgttgaaacacgccgggggcctgaaaaaggggcccctccaaaaaaccattaaacgctcttttccaaccccgagggaaaagtttttaaagcccctctttgttagcccggcaaaagggcctgagcaaaaggggtggggggaaaaaaaagcgacccccaaaaaactcccctggctcatcagcgggcggctcaaccgcagc

SEQ ID NO: 24418 - DNA, 295 bp, Zea mays
  unsure (1)..(295): unsure at all n locations
  Clone ID: MRT4577_122277C.1
tgacggttccagccacctgggccctcccgggtccattcagctttcgtcctcgctccagtcattttgtggaggcctccaggcagtgccgggccgaataccaacggccttcaccatctctgtggccagtgcgaccccgctggggggcgtggctgctgctctgtccgggtgtgtggttcccaggcgtgncgctgtgggcccttcagccngcgccctccgttcgggctgtgcccgctggcttcaggcggntccctccgcctccgcgtcgcctgtgttcctggcctggtgctggccggtc

SEQ ID NO: 24419 - DNA, 357 bp, Zea mays
  Clone ID: MRT4577_122278C.1
ctttgattctacattccatgtaattagataatataacactcatttaccttgcctctagcgtactctttaaaagttaggtttccataaaaccattcaataccatatttacactcttatataaccacaccacaatttcacctttaaagctgcaatagaatacccaatatctatcattatcatcactttactacatatttttcctactatcttacattttcattcccacatatcatttcccaagcaacttttcatacaacctcatgatccaccatatgtactacagtttccttaccacaatcactccgaacataaatgctctttccccgatacttatcaacattatttaatgccttcaca

SEQ ID NO: 24420 - DNA, 103 bp, Zea mays
  Clone ID: MRT4577_122279C.1
gccgacgtagacgagcagcgacgaggacaggcttcgagagcgacgctatacttcgaggagttggacatagcgcatagtccgtagattcccatataggtgcgcc

SEQ ID NO: 24421 - DNA, 2610 bp, Zea mays
  Clone ID: MRT4577_12227C.1
cattgggtacctcgaggccggccgggctgggccctggcccctgtgctccccttgccaccgaacgagagccaaaagcctcccgccccacgacgcgcccgccccggcggcgacgccccggaggacgtttcccgcagcgaccggcgaccaagccttgattgcctccgccccatggctacccgggcgcgggcgtagccgccgcctcggccgcagcaggctcggtccgcccccctcggcgatttctgttccagtcgcatcgcgcgacagctcgtcgtccgattcggatccccgccaccgcggcggaacgaggcgtctccggtccccgagggtattcagggaatttgagactgatacgtcgggatcctgtcgataatgcggggctacgagtacgagaccaatggttaccaccaggaagtggaagatgagtacggagatgagtactatgatcaagatgagtatgaggaggaaggttcgggtgctggggatgggtatgctgaggaggaagagcctacagagggacaaaaggagatccttgaattgagagaacgattaaaagagcagattaggcgaaaggcaaaggctgctgctgcctgcacagctggccgatcatcttcttcacaaatacctcaagccagggacaaatttggctctttctttgggccatccaagccggtgatttctcgtcgagtgatagaagaaagaaaatcattgaaagaactgcatagcacggttgcaagggagccaaggccttctggagtacataaggatattccatcgtcctctaaagtgcaaagtagagtaaatggacatcagcataaacaaaagattgttaatcaggtaaagaagaaggctgaggcacttaaggataaccgggattattcatttctactctcggatgatgctgacctgtcatcctctccaaaggagaaacctgctgctagatcttccttgactcaaagggctgatcgtgaggtgacgcaatcaacagtaaagaggaaggcaccaacaagtcaacctgcacgcttgtcaaatggatatggacctaagaacacaatgtcaactcaaaggcatgctgaaggtaaggtaaattccatgagaagggaggatttctcgaatacagaaagggttgtttcacgtgacaatgagaggatgtatgaaagggttgtttcacgtgacaatgagaggatgcatagtattgcaagaaatggatccaaccaggcaagtactagcaaaaccacaatccaaaagcatccaagcaggggtcccattgctaataagcaaccttccaaggattcgaatgatgcaactctgaggaagagcagtgtagcctcaaagcaccatcccttagagattgacagaccaaaatcctcgcaaagtcagaggatgcagtcagctggtcagagaccacagcattcttcccatggtcagacgccacatcaatccatgcagcataggacgcagcagtcattgcagagtcggaggccacagcaaatgacacagggtcagaagccacaacagtctttgcagagtcaaaggactcaacagtccttgcagaatcgaaggccacagcagtcctcacatattcagaaatcgcaatcctcacaagcacacagaccacagtcattaagtaacaggtctcaggctttacaaggacaaaggcctctttcttcacagggtcaatatccggagcaaagaagagtacatgcaagtgacagagtcaaacaagctgaaaggcagattcggcctccttccaagtccatgccatcacggccagtctcttccaatggaattcgtgatgatcatgcaaaaaggaagcaagtggcaaaaagaagatttgatgaagatgatgaagaccccttagcaatgatcagaaatatgtttgggtatgatcctagtagatatgcaggcagagatgaagatgtcagtgacatggaagccgattttgctactatagaaatggaagagaaaaggagcgcgaggattgctaggcaggaggatgaagaacaacttcgcttgattgaggaagaagagagacgcgagcaggagagaaagaggcgaaagatggcacgaggccgatagtcgaatacactcctatttggatgttataatatactaccttcgttctcgaatatttgtcgtccgctggttcatttttgaactaaaccgtgacaaataaaaaagaacgcaggagtatctggcaggcctgattgcctgaatacgaagccccatggcggatcagacaggcacttctcttgcagtcctgtttacccttaccacgatgattatctggaggcaaatcaagggaaaacgacaggtgaccaacactgggcacgtgtaacagcagactgtagttgtagtggtttagttctcgaagctgacatggactatatttaagttctcgtcagattgtttggatagcagaaggtttccattgttgcagcgcctcaccagattgtttcttcatatgatatactgattctttcagtcaagcctatataaggatgcgtaatacaagtgcccctcttgtatatctttttcgggtgtaatagtgttgtaataaacgatgttcgaattttcggataatgattttgagctttgtcaggcgatccctgc

SEQ ID NO: 24422 - DNA, 191 bp, Zea mays
  Clone ID: MRT4577_122280C.1
aatttgcacccacgcgtcctaacccttgtcccaccgccttctttttttacctctcaaagtcttccttgggggactccgggttccgggccgcaacgcgaaccaaaccgtcttccctggtggtggccaccggcccatgcggcgccggtccgaggcccatctgcgcgaccatgtccatgctctcctataacccg

SEQ ID NO: 24423 - DNA, 177 bp, Zea mays
  Clone ID: MRT4577_122281C.1
acgcgtcccatgactgtcctaataagcggtacacgtttctaaatacttattgacactactaaggcaccgagaaaattattactgcttttactgcatatgtaatgcttatgaaactatgaatgaatctacatgctctacacctcatcttataagtatactaaataaactacaggccct

SEQ ID NO: 24424 - DNA, 927 bp, Zea mays
  Clone ID: MRT4577_122282C.1
ctgagctcgagtactgtagggttgtgatggcgaggcggttgctgctcctgccggcgctgctggtcgccgccgcgctcgcgggcggcgcgggcgcgcagctctcggcggggttctactcgtcgacctgccccaccgtggaaagcgtcgtgcgccaggccatgtcgcaggccgtcacgaacaacacccgcaccggcgccgccatgctccgcctcttcttccacgactgcttcgtcaatggctgcgacgcctcgctgctgctggacgacacgcccacgacgcccggcgagaagggcgccggcgccaacgccggcgcctccacctccggcttcgacctcatcgacaccatcaagacgcaggtcgaggccgcctgccccgccaccgtctcctgcgccgacatcctcgccctcgccgcccgcgacgccgtcaacctgctcggcggcccgagctgggcggtgccgctgggccggcgggacgcgacgttcccgaacagcacgggcgacgacgcgctcgcgccgctcgactcgctcactccggacgagttcgacaacggctactaccggagcctgatgaccggcgccggcctgctgcactcggaccaggagctcttcaacaacggggcgctcgactcgctggtcaggctctacggcaccaacgccgacgccttctcgtcggacttccccgcgtccatggtcaggctcggcaacatcgccccgctcacgggtgccgccggggagatcaggctcaactgcaggacagtcaattcgtgacttcagtttcagaatcacaagggatgcgaatctgtttgactcgttcattgattcgattccatgcgacgaatgaagcatgacaggaatgaaaagtagaaaaataggattcgaatgattccattccattgcatcattgaattgatactgttcttttccccgc

SEQ ID NO: 24425 - DNA, 267 bp, Zea mays
  unsure (1)..(267): unsure at all n locations
  Clone ID: MRT4577_122283C.1
cgccgaacgacgacggggcccgctgncgctgccgccgccgccctactncgccaccngcgccggcgacgggcaccaccagcgcggaccgcngcgggggacgangacganganggagnggacccacaaagggaggagggggacggacattttttttttgnnggggaagagaaaccagnnngggncagnagctgtgccgttccngntgggcggggacgatagcgaggcatattttgtcagaagggctggtgtcttgtgtggatttgtggg

SEQ ID NO: 24426 - DNA, 989 bp, Zea mays
  Clone ID: MRT4577_122284C.1
tgtgcagtgtgctttttattcgcaagcaggttcgaccactggtcgcacgccgcgcacgcgggccctggaacggacgggtcgcgctacagattccgtccaccccggccggcccacgcgccgccgacgcaacgcacggctactatcattcgcacgtttaccgccactatggacgtacgtacctgcggcgttggcctgatgctaggctagctagtcaggccggccctggtcttagcagtgggcggtggcagtgcgcaatcgccccccactcagactcagccactgctgcagtccgccggctagtacacgctaacacgcacgagtcacgacaggctgcactgagggtcagttcagtagtgtacgtaggttctgatggcgaggcggctgctggcggcgctcgccatagtcgtcgtggccgccgcgctcgcgtgcggcgcggaagcgcagctctcggcggggttctactcgtcgagctgccccgccgtgcacagcatcgtgcgccaggccatgtcgcaggccgtcacgaacaacacgcgcagcgccgccgccgtgctccgcgtcttcttccacgactgcttcgtcaatgtgagcaagagcgaccatgcctcgctgctgctggacgacacgcccacgacgcccggcgagaagggcgccggccccaacgccggcggctccaccgtcggcttcgacctcatcgacaccatcaaggcgcaggtcgaggccgcctgccccgccaccgtctcctgcgccgacatcctggcgctcaccgcgcgcgacggcgtcaacctggtctctgttcgttccgtgccttctctccccaatcgatgacgtagtgtagtattctctatctgctctgctttcctcctcctctggggcgtcaacctggacttgtggcagctcggcggcccgagctgggcagtgccgctgggccggcgcgacgcgacgtttccccaacagcaccgggcgccggggacgggaccctcccggggccc

SEQ ID NO: 24427 - DNA, 147 bp, Zea mays
  Clone ID: MRT4577_122285C.1
ataacactgacgcagaaggaaggctaacactttctgatgctttggtctaagcctgccacccaggggtttgaaagattattggttttgccacccctacccgcccttgccttggcgcactccggccttacctttgcggaatttttacgc

SEQ ID NO: 24428 - DNA, 1518 bp, Zea mays
  Clone ID: MRT4577_122286C.1
gtgcagtgtgctttttattcgcaagcaggttcgaccactggtcgcacgccgcgcacgcgggccctggaacggacgggtcgcgctacagattccgtccaccccggccggcccacgcgccgccgacgcaacgcacgggtactatcattcgcacgtttaccgccactatggacgtacgtacctgcggcgttggcctgatgctatgctagctagtcagcccggccctggtcttagcagtgggcggtgtcagtgtgcgccatgcgccccccactcagactcagccactgctgcagtccgccggctagtacacgtacgacaggctgtaccgaggttcagttcagtagtgtagttgtaggttgcgatggcgaggcggctgctggcggcgctcgccatagtcgtcgtggccgccgcgctcgcgtgcggcgcgggcgcgcagctctcggcggggttctactcgtcgagctgccccgccgtgcacagcatcgtgcgccaggccatgtcgcaggccgtcacgaacaacacgcgcagcgccgccgccgtgctccgcgtcttcttccacgactgcttcgtcaatggctgcgacgcgtcgctgctgctggacgacacgcccacgacgcccggcgagaagggcgccggccccaacgccggcggctccaccgtcggcttcgacctcatcgacaccatcaaggcgcaggtcgaggccgcctgccccgccaccgtctcctgcgccgacatcctggcgctcaccgcgcgcgacggcgtcaacctgctcggcggcccgagctgggcagtgccgctgggccggcgcgacgcgacgttccccaacagcacgggcgcggcgacggacctcccgggcccggactccgacctggccggcctggtggccgggttcgccgccaagggcctgagcccgcgcgacctcgcggcgctgtcgggcgcgcacacggtggggatggcgcgctgcgccagcttccgcacccgcgtctactgcgacgacaacgtgagcccggcgttcgccgcgcagcagcgccaggcctgcccgtcgtcctcgggggccgacgccgacgacgcgctcgcgccgctcgactcgctcacccccgaccagttcgacaacggctactaccggagcctcatggccggcgccggcctgctgcactcggaccaggagctcttcagcaacggcgcactcgactcgctcgtgcgcctctacggcaccaacgccgacgccttctcgtcggacttcgccgcgtccatggtcaggctcggcaacatcggcccgctcacgggttccgcgggggaggtcaggctcaactgcaggacggtgaattcgaattcgtgacttcaggacggtgaatgccaccattttgaattgatactgctctttttcccccacaaggagttgtagattttgcattccttcaacgatttcgaatttcgaatatgctgtgagtcagctgaagtgatatcgcctcttgtccaaaaaaaaaaaaaaaagggggccgctcgcgatctagaactagt

SEQ ID NO: 24429 - DNA, 337 bp, Zea mays
  Clone ID: MRT4577_122287C.1
cccacgcgtccgcggacgcgtgggcggacgcgtgggcggacgcgtgggcggacgcatgggcgtccggaaccgccgcggccggcacgcacccacccgctggcctgacccgctccggcgcatgcggcgagacccctatatcgaatccacttatatacatacatcacgtgtactacgacatcgaacaataataatgaacagttatcagacgtaccggcggacgattcacaagtgtacagaaaacgatcgactccactccaactatacatatcctactatggctgttgatacaccccgatggatcacaaggcatgcatgcatgtacatgcacgcatggtca

SEQ ID NO: 24430 - DNA, 542 bp, Zea mays
  Clone ID: MRT4577_122288C.1
atcatgctcttttccgtacagagcgtaatccaaagatatatggtgcgggctggttgggacaaggagccaggcttattgataacaacagcagacgcacccatgagaatggccagttaatctgatgactatggggggtacatccgtgcgcaacactttgttgtcccggagacggtcgtgcagcatctggacacgggcggagacacactcacgatgggcgaatctatgcggatccagcggtttagttcagaagatggggcctgcggacaggatctagtcggcaggctgctggggtcacggatcttgcgcatggcgaacacctgggaggtcttgtcgaacagcccgaaccgcctcaggagatcgtacttggactccggcttgtccgggcaggcgatgagcggctcaaggatttccgacagggctaccgtgatctcagtggggatctccaggacagacacctacagggttttcgcaggtggcggctaggagctcgtcggcactggatggcgacccagacacctctggcgaacggaagcctgagcatc

SEQ ID NO: 24431 - DNA, 612 bp, Zea mays
  unsure (1)..(612): unsure at all n locations
  Clone ID: MRT4577_122289C.1
gtcgactggtggaccctgggggtgttcatgtacgagatggtgtacgggcggacgccgttcaagggcgcggacaacgagaagacgctggtcaacatcatcaagcagccgctggccttcccgcgggtggtggcgggcagcggcagggagtgggacgagcacctgcgcgcgcaggacctcatgacccagctcctggccaagaaccccaagaagcggctgggcggctgcacggggtcggcggaggtgaagcggcacgacttcttcaagggcgtcaactgggcgctcgtcaggtccgtccggccccccgaggtgcccaagccgccggtggtgccggcgccggcgctggcgctggcgccgcagaagaaggtgctgatgatgagcaggaaggagcggcaggagccgtacaactacaacccccgccccgacgacgaacgcttcgagtacttctaggccgtacgtcgatattggcgtagatctcggtcgtttgcgcgtacggcagcgtgtgtttgggggtgacggaagtgtacatagagatcgtggctacgtatcttcagctggccaataaagaagctcgcatttgccgccaaaaaaaaaaaaaaaaannnnnnnnnnnnn

SEQ ID NO: 24432 - DNA, 264 bp, Zea mays
  Clone ID: MRT4577_12228C.1
tcgatactcacgatgcgaataatgaccccgagcacgcgcacaggtcgaagatcgatgatgatctcgccgccacggcgccgtttgcgccgggggttacgctatccacgagcaccacgagatagagaaggaccacaatgcgccgatgaggcccccggcggcgagaagaagcaccaccacctcttcggctgatgacctggccggcgagagcagcggtccgtcaccgaccgatcgaccgtcgcgccgcgccgcctgttttcgttgagt

SEQ ID NO: 24433 - DNA, 247 bp, Zea mays
  Clone ID: MRT4577_122290C.1
agtcgccgtgccgtcccctccccttctctctctcctcgctccccacggcacgcatcgcctcgtcggaacggaaggcgggaacgcctcgaaccaaggaaggaaggaacggggattaagaagccttccaaagcgttctcgaatgttggcttcttccttccggggttgttcctcctccgcggcggcccccacggtcgcccttctctttcaactatgagggggaagcggtccttgctgccaaccgtgcgga

SEQ ID NO: 24434 - DNA, 290 bp, Zea mays
  Clone ID: MRT4577_122291C.1
ccgcatcaactaacccacaccagctctccggtcagcagcagccctgccgcccaagttggagccctcgcaggtggccgaggtcttcgtccgcgtgacgggcggctaggtcggcgcggcgttgtcgctggcgcccaagatcggcccgctcggcctctcccccaagaagatcgacgaggacatcgccaaggagaccgccagggactggaagggcctgcgcgttaccgtaaaactcactttgcataaccggcaagccaaggtctctctcttcccctcctcatgcgccctggtaa

SEQ ID NO: 24435 - DNA, 2293 bp, Zea mays
  Clone ID: MRT4577_122292C.1
gcaacttctcgctcgatccattcttcacctgctctctttttttttttccctttccctttcatacgctttgtacgtcccatctatacttgctgcttgggtttactctcgtgcagtgcagctagcagcttgaggcttgaggacactgagccaggcagtttccaactagcccttgtggggggtccaatgatgcaatgattctgccctgtaatcatccatgcaagtggagaaaaaggtgaatcaaaccctgttagatccttgggaatagttatatacatagcaatagatactctcctgcagtgtaaagctggcttacgcggctttaaacatttttaaacctgctatccacacgaccacacattagctcatctcatggcagccacagtcgtcccgtccaccccctcccctgcttatatagcaacacacgacggttagctgcctgggtgccagggacgaaatcctactagcttccctttgggtcggtctcgcgtctgtctgtctgtctgtcttggtctcttggagcctcatcaatggctaccatcagagaggagtccgactacgacagcagccggtcctcgctgacggcgccgggcggctcccgccggagctggatcagcgacattggcagcgccagctcggtctcggcgcgctccgtggcggggcgaggctgggacgcgccggcgtgccgccaccgccacaagcctcacaaggcgaaccaggccgagtgggaggccatcgggcgcgtccgcgccgccgcgggccgcgtcggcctggagcacttccgcctggtgcggcgcctgggcagcggcgacctcgggaacgtctacctctgccagctgcgcgagccctggtccaccacggggtgcctgtacgccatgaaggtggtggacaaggacgcgctggcgttccgcaagaagctgcggcgcgcggaggtggagcgcgagatcctccgcgcgctcgaccaccccttcctccccacattgtacgccgacttcgaggcgtcgcactacgcctgcctcgtcatggagttctgccccggcggggacttgcatgttgcccgccagcggcagcccggcaggcgattcagcatctcctcagcgaggttctatgtggccgagacggtgctagccctggagtacctgcacatgatgggggtggtgtacagggacctgaagccggagaacgtgctggtgcgcggcgacggccacatcatgctctcggacttcgacctctccctcaagtgcgacgtcgtcccgaggctgctccgtcacaacagcctcccggcgcagaatggcagcagcgccggtggcgggcgagcggacagcgggaagccgtcctgcgtgccgccgatccagccggtgctgtcgtgcctgttcaacggcgtgcacaagtgccatcaggcgaaggagggcgcggcggcggcggcgagggacggcggcgaggcggacgacagcaccgagccctgcgacaggaacccggagctggtggtggagcccgtgtcggcgcggtccaggtcgttcgtgggcacgcacgagtacctggcgccggaggtgatctccgggcagggccacggcagcgccgtcgactggtggaccctgggggtgttcatgtacgagatggtgtacgggcggacgccgttcaagggcgcggacaacgagaagacgctggtcaacatcatcaagcagccgctggccttcccgcgggtcgtggcggccagcggtagggagtgggacgagcacctgcgcgcgcaggacctcatgacccagctcctggccaagaaccccaagaagcggctgggcggctgcacggggtcggcggaggtgaagcggcacgacttcttcaagggcgtcaactgggcgctcgtcaggtccgtccggcctcccgaggtgcccaagccgccggtggtgccggcgccggcgccggcgctggcgccgcagaagaaggtgctgatgatgagcaggaaggagcggcaggagccgtacaactacaacccccgccccgacgacgaacgcttcgagtacttctaggccgtacgtcgatattggcgtagctagatctcggtcgtttgcgcgtacggcagcgtgtgtttggggtgacggaagtgtacatagagtggtagcacgacgtacgtgcgtacgctccttgaagaccggagatcagtctcgctgcatgcatgctgtagagatcgtggctacgtatcttcagctggccaataaagaagctcgcatttgccgcaaaaaaaaaaaaaaaaaaaactcgacagcacgacgagagagaagagagaactagtctcgag

SEQ ID NO: 24436 - DNA, 383 bp, Zea mays
  Clone ID: MRT4577_122293C.1
ccagtagccaccactcacttagtgtcaccgagcgccatggccttcctgcaccgcggactcgccgctcacctgccaccacctcgggagcgtcggtgcccgccctcggctaccgtccctctccatctccctccgccgacggtcgtcctcttgctctaagcccacctgccataaacactccactgacctccaagtacaggactacataaatagggggtaagaactcactttgccgctataggcgcgcccatgtgccctccgagaacgcagctgaaggagcgcacctaacacaccggtttatgccacaatctggcaacgcagtacggattcagagatcagactgctgcttctatcatgcaagagatcgcccttgactgcgactgcta

SEQ ID NO: 24437 - DNA, 554 bp, Zea mays
  Clone ID: MRT4577_122294C.1
ttttttttttttttttttttttttttttttttttttttttttttttttttttttttttttttttttttttttttttttttttttttttttttttttttttttttttttttttttttttcggggccaaaaaaaaaaaaaccttggggggggtgagggggggaaggctgcccttccttaaataaggaccgaggaaacccttaagggtccttaaaaaaccgcgggctttaagttttccaaaaaaaaaaacggggggggggggggggaaaaaaaatttttctgatcccccccttttaagggaaacttgggggggggaaaccctttttttttaacggggccggcaaggggtgcaaaaaggttttgaaacgggccccccccgggaacaaccccctaaaaaaaaaacccaaggaggggaaaaatgggaaccctcccttttttgaactcctggggctggagctaaataatttctttttgggttttcccaaaccccaccgggtaaaaaagggccccccacggaaggagggggcccccgaccccgcaaggaaattttcggagcc

SEQ ID NO: 24438 - DNA, 335 bp, Zea mays
  unsure (1)..(335): unsure at all n locations
  Clone ID: MRT4577_122295C.1
tcttttttgtatgattcatctttatttgggtntggtttctatggtttgttgttttttttttttttttacaacccaacgatttttttaaaaaagcatccaattacattttgcatgcccttaaatccatggccatccatgaatactgtaaagcacacccaccctttttatttatttatgacatgggcattccaaaacccgcaacccatatgcatacatatgtatgtaaatatatatttcacggattgactttgaaggcaacacaccgaggtccaaattcctttaagatcttgtattccctgaaccctgttttggtgaaaagctgaccccattttttt

SEQ ID NO: 24439 - DNA, 443 bp, Zea mays
  Clone ID: MRT4577_122296C.1
gaacaatcttaggacaccttctgacacaatgctggtagcactgtgagtgagaaggcaattctttgctgatggtaaaaaaaaaaaaaaaaaaaaagaaaaaaaaaaaaaaaaaaaaaaaaaaaaaaaaaaaaaaaaaaaaaaaaaaaaaaaaaaaaaaaaaaaaaaaaaggacgaccattaaaaaaagaacaaaaaaaacaaacacatgaatccaaaaaaaaaaacaattataaatggaaacccaaaaaaaaatacacaacccaaagggtctccaccttttataactgaaaaaaccctgtggctaccaaacaaaaataccctttcataatatcccctttcaacaaaaatagcttactgcccaataaacccaacccgctctcatttaacaccatatgcccaccctaataggtagatgggaccccccctatttcgtcacattaaaa

SEQ ID NO: 24440 - DNA, 320 bp, Zea mays
  unsure (1)..(320): unsure at all n locations
  Clone ID: MRT4577_122297C.1
caaggnccggaangaccggggcgtcccaagcgtccgatcgctcgtccgtgttcagcttaaatactccaattccgcaacaagggcgaggcattaaccgaccaaggacgactaacgggtcgatggccactctttcctcctgcagccgcctgagtagcggtaccggtgccgcggtcattcaccggcagccggtccgtgctggagccgctctcgtcgacacctgcaggcagagcttctacgctaccgtccgcgccttagccattgccactgaggaggcgccagctgccgtaaagctgcaaaacaagggggtttctttgccgact

SEQ ID NO: 24441 - DNA, 1140 bp, Zea mays
  Clone ID: MRT4577_122298C.1
ggaccctcgaggccggccgggccgggaccgcacagcatacaggtcccgccatcccgagatcgtgacacaaaaaccctagttctcgccgtcacctccgccgcccgctgcccgccgccagtccaccacttgtccacctcgtcgcgtagatatctccaccgcccgccgcagcaggtgagttccctggcccgttgcgtcgctgcgtgttgtgattgtgaggccaatacaccatactgcatacatcctgtgagggcgtgaggccaatacaacattcaatcctgtggatccgtggtccgtggcccatggcccgtggcgtcgctgcgtggagatcggagtggtcaagtctagtaaatggcatgacaggcctaccgtcccaacaaatggctctcccttggacagctcagagcgcatggcacgagagcccgcccgccctcagtcaagtccagtaaatggcgcgacagagtgctgcttcgattcccattaagtgtgtgttgcttcgattttcagttagtcaattctataaaaccgaccctctcttcgttaggctgctagagactttgatttggtgacccctgtgagtagatatggtgagaagacgtcatgtcatggcgtcgaagtccagagccagggctagtgaagccaaccgtaatcctagtagtagtagcattggtgaactagcacaaactgccgctaatgtgggtgtggctgctggtgaactaggtgtggatgctggtgaactggatttgggtgtgggttgtgtggctgctggtgaatcaacaacaataccatttgtcgtctatgggggtgaattgggtgatgcggttgctgctgaatgtgcaccaccgtcggcatcatcaagcagtgcaaagtgtagttcgagggcagactgttggaaacatatggtgaagaaggaagtcattgaggatggtgtagtacatttttttgctgtatgtaattattgcaaaactgaattgagtacaggttcagctgctggcacgggacatttaaaccgacactacaaagcttgtttagcaaagctaggaaagactcaaggaggaggtacacaaacccatcttaactttgctgctggtggtacaataagtacatgggtttacaacccacaagtagcacatgatgaaatag

SEQ ID NO: 24442 - DNA, 431 bp, Zea mays
  Clone ID: MRT4577_122299C.1
ggggccaatgtttacctgtttcgatttaaattttgaaacaaaggggtgtacaaagctcaggctaaggtttaaaaaaggacttccggttttacattaaacaagccacgcttttaaaagggtaaaaaaagcttttcttacaaaagggggggaaacggaaaatatttttgtccaaaattaagctcaggaccaaaactggtgtccttctaagggggagggccttaggcgagccccgtccggttccccaaacccctttaaaaatgaaaactttggtacataaacaggtggggggttcaattctttttaaggggttaggtaaaaaaggtgggttttttttttagccgctttttttcttaaaaaaatgcccccccggatgggagccttgatttttagccaccccaaaacggtttttccgggggcgggggtgggggggg

SEQ ID NO: 24443 - DNA, 228 bp, Zea mays
  Clone ID: MRT4577_12229C.1
gtacaaaacactgaaaaacctttcttaaaaaaatttaaaacggggtgggggggggaggaaacttttaaattggcttcggagaaccgccatacggggtgggttttttcctccaaactgcagggcaaacaccgcaggtaccaatttagggcatccgttggccaaccttcttggggggattttttttccgggccttggtttcggcctatcaattgattcccagtatgcccc

SEQ ID NO: 24444 - DNA, 387 bp, Zea mays
  Clone ID: MRT4577_1222C.1
cgcgtaacgcggtacgccctggtgccggacacgtagcgctgctgttctgtgagcttcaacacccaacgaaggcagttctatccgttgcgttctatcctttgcgacgcaccaccgctcgttgcccttgtacatatgacggacgtcgccagttcactgaggtgcggctagtaggtcgtcatgtgcagagacttacattccaagcccatttccatgtacaccacccaatgtgacgcctacaccttggccaccaccgtgggccgtttccgcgtcaactacctctacgggccctttgttgtctccttcacagacatggacctactcagttgtcgcgttgactgtcccattcagtaaacgacggtggagcggttcgccttatccgtcgaggca

SEQ ID NO: 24445 - DNA, 545 bp, Zea mays
  unsure (1)..(545): unsure at all n locations
  Clone ID: MRT4577_122300C.1
cgattctttcacaacaccaccaggcaccatcggacgggcagcaagcaatcgcggtgaagcactctcccccgttacaaatccgagatattcccaaatatcttctcttgccctcccccaccgcctgcgcctcggattccatcggcgcccttttccttccttccccccttgcccgcccgcccgcccgtccaggactgtccttggcgtttcttacgcagctcgtccttcgcgcttctttgccggccgtcggagagacggaaagagagagagtgagacaggatcgctcgggagtcgggatcgcgcggcgccaccgtaccccgctcggacatgtgcgtggaggggctagacgacgcgggggggacgctccccttctgagaccacnagaacgacaggcgcgacggtgccgcgatggagagggttcgtgagaacaacttcgtcccgttcatccggtcaggggagtggtctgatattggaggtcgcgattacatggaatatgcccatatatgcatgggggatctgcccaacaatctcttttttaactcaaccat

SEQ ID NO: 24446 - DNA, 215 bp, Zea mays
  Clone ID: MRT4577_122301C.1
ctccaaaccatacccaagcgggccaggcctatgatgcacacactttttatcacagaaacacgtccctctataaactactgatgggacaggttcaaactcagactgcggtcaacgccttctggccaggagcttccaatccacgtggcgtgacttgaactacattgaacctgacagcttttgatacgggcctgcactgcccaattattacatgggct

SEQ ID NO: 24447 - DNA, 521 bp, Zea mays
  Clone ID: MRT4577_122302C.1
aacaacaattaatcaaatagggggttttggccataaacgatgtaccaagcctttttagggcaaaccaataccataaaccaaaatttttttcacaagtaataggtgttaaaaaactttttgggttttcgaacaaacccctaaaaggaactggttttcctcccttgaaccggactgggaaaggataggaacccaccgttttagtgggggtttttggacttatcgggtgcccttggagcgagcccaatcgcatttgagcctttaatgatcctgaccctgggggaggagccggcaaacatcctacaatgggagcaaaaaacaatggggcacctaaacatgtttttagtggaaaaaaaaaaggggccacgaaacctaggggcttgtacaacctaaacactgggggaggggcctccaagtttaaaacacccctaaaacacaacataatacaggggacgggtctaaaacagggggcttaccatattaatgggcccaatcagagctttcaataaattaaagggaccaat

SEQ ID NO: 24448 - DNA, 401 bp, Zea mays
  Clone ID: MRT4577_122303C.1
attcggctcgaggctagaggttccacctatactccggtggtcaatcagcagttgttgacagaataattaccatgtatattcgctggctagccggaggccatgctaaatgatggctgatatggtgaccatcggcagaattaagctctaatacatcatatgaatctgaactgaaatggaatgcattcaaggttgactacggacaggacgctcctgcgatggcctcctatcaagcaggggactagtcaaaggcggctgccattgactccaccttgcacgacagggatgaatttactgcagaaatcaaagaccgactaaggcctgcccaagtagctctgcagagatgtaaggattcacgacctcgggaggtgctattcgacataggtgattgggcaatgctacaa

SEQ ID NO: 24449 - DNA, 692 bp, Zea mays
  unsure (1)..(692): unsure at all n locations
  Clone ID: MRT4577_122304C.1
ctcttactctctcctcgctccgcccggccgccctactttgaccgcctccacgtctccgctcccacgcccgcgcgagagaggtgaccggcggcggagcgcgaggagggcctacccatcccacccagcactgcgccggtctggatgatcggtccaccttgcctccagattctctgaccaagttctagctcgcagacttctgcccttctgtaacatcctatgagacgacctctcgacacgactatgcgtcacagtgactccatacacctatgccactccgagtacgcatgatgacctcttctccattgggtgctgtgcacacctagtaaagaatgagtgaagatctttgcaattgaattcctcatgagtatgagtgaccatgttctctttccaagactgctgcagctcctattgagcgtgttaagctgcttatccagaaccaggatgagatgatcaaggctggcaggctctctgagccatacaagggtattggtgactgctttggccgcaccatcaaggatgaaggctttggctcattgtggagaggaaacactgctaacgtcatccgttacttcccaactcaggctttgaactttgcattcaaggattacttcaagaggatgttcaacttcaagaaggacaaggatggttactggaagtgnttcggtggcaaccttgcttctggtggtgctgct

SEQ ID NO: 24450 - DNA, 453 bp, Zea mays
  Clone ID: MRT4577_122305C.1
gggacacacacgcgtccgggctggctgtgttgttaatgcgctcatacaccacgctaaccggttttctcttcacggtcaccgtgatcgtcggggggatcttcaactgcacctgctactccgtctgctagcacgtcccgctctgggagctggtctggttgtctctcggggtcaacacctccatcaacgggatgaacctcaggctgatgctcaacttcgtgggcttctaccaggtacgttcaccctgatctgctctgacatctgctgcggcagcgcctacgccggccattttcggcctgagttgcttgcgtgcgcgcgtggctgaagccgggaacctgcctatctacaaactgagcatgaatccgggggtctgcctcatggaatgggtgctgaacagcatgctctacaccaccaacgtcatctccgtggtggttgtcgtggccgctggtgtcggca

SEQ ID NO: 24451 - DNA, 297 bp, Zea mays
  unsure (1)..(297): unsure at all n locations
  Clone ID: MRT4577_122306C.1
tttgtttttttaataatttttttttttttttttggggaatgggcactactaccccccccaaatcttctatacaaccatcacatatcatgtattcatgttacaaaaaccaaaaaaattaaacgaaatcattctacaattctcttacaaatttgtggccancccccaaaaatccttaaataataaaaatngncanncccaccccatcaccaccttncataaatttnnngaaaaggcacccttaaaaaaaactncaangcacctnactnnccttaaaatcttcctaaanncctattttct

SEQ ID NO: 24452 - DNA, 425 bp, Zea mays
  Clone ID: MRT4577_122307C.1
gcccgacgggcacctgatcatacgtatgctcaggtggtctacccggctagatctaaatgtatactgctgcagacttgcattctatggagaaaaatagtcattataacctcgaatgctcataatatatgactctatcgatcttattcattatttatcttaggaatgaacacactattacaatttggctggcgttatagttaaaacttcctcgaaaactcacagctaactagcctatacatacgcttgtagaagatcaattaccttgttcgtactaccctctataggcgagttctagcacattaccttcacacaggctatgcgatcaagcttgcttctagaggatcctatataatccttagagacacgatttactgagatctggacgtggatatacaacagaaagactgttcatcacactgaacatg

SEQ ID NO: 24453 - DNA, 419 bp, Zea mays
  Clone ID: MRT4577_122308C.1
atcgattggatgtgggcagatagctgggatcatcacacctctgtagcttattatgtactcaagcttaccggttgtcatggcggggatgagagtcgtgaagctgccgctggctgcagagctcatgtgcgcggaggtggtcatggccactgcgcatcaggcctcctgtgtgcgcgccacctacagcttgtacaacccgcagcagaacacctgggacctcaacgatcgtgagcacctactgcgccacctgtgacgccagcatgctgttgtattgacccatgaagtacggctggacggccttatgccggcccgactgcccggaccgggcagtccatgtgcggtcagcgactattgctgaccaacacatagacgggggcgtacattacggagaggatcatggaccagcgcatgaactgaggtac

SEQ ID NO: 24454 - DNA, 625 bp, Zea mays
  unsure (1)..(625): unsure at all n locations
  Clone ID: MRT4577_122309C.1
tggtacgcctgttgtacggtccgnattccgggtttttttttttccctggtaatcgccgtgcttgtgcctctgctatctctcctggcgtgtgcggcaggcgtgctggcaaggcgaaactcaggggaagaagaagaagaagaccgccaaacggtagcagcgacgacgacaacgattaccaagaacaggacaacggcagcagggcggagctcgagagaggagtggctgccaccggcccccggcggtacgcgtaccgcgacctggccgccgccaccgacaacttcgccgaggacggcaagctcggtcgcggtggcttcgggagcgtctacaggggcaaactcaccgtcgccggcgaagagcggcccgtggcgatcaaggtgttgtcgtcggagtcgtcggcgcagggcaggaaggagttcgaggcggaggtgaggatcatcagccggctcaagcatcgcaacctcgtgcagctcctgggctggtgcgacagccggcacggcctcctgctcgtctacgagctggtggcccagggcagcctcgacaggcatctccacggcagcgagcgcttcttggcgtggccggacaggcaccagatcatcctcggcctgnggtcggcgctgcggtacct

SEQ ID NO: 24455 - DNA, 303 bp, Zea mays
  unsure (1)..(303): unsure at all n locations
  Clone ID: MRT4577_12230C.1
agcctccaaaacctcgcaacaaccctttgtttcccacacccatccgccctgcccctggtggggctccccaccaaccccgacgagcggctatgaccggcacggtgtccaagctggcggcgccccggcctgcggcgccaccgctccggccggcgtccctccgcgccgccgcaatcgccttcgccccctccccgcgccgggttcgcgtcttcgtcgccgggcgggccaggatcccctgggtanntttttgncttttgccaaggaaggaaatggtgcaccgaccaagaaaacctcgcttcacgatct

SEQ ID NO: 24456 - DNA, 336 bp, Zea mays
  unsure (1)..(336): unsure at all n locations
  Clone ID: MRT4577_122310C.1
gggccgacccacgcgaaggttgnggaggctgaaaaaggaaaaagctgcgttgcctgccatgccagctgggcacgggttacgttctcgaacaagggatttgttcgccagaccctttagaaagaagggttacattcccttgtctacttacctcaggacctacaagatcggcgactacgtcgacgtcaaggtaaacggtgccgttcacaagggtatgccccacaagttctaccatggtcgtactggtcgagtttggaatgtcacaaaacgtgccatcggtgtcgaagtcaacaagcaggtggggaaacaggaattatcaggaaagaggattcatgtacg

SEQ ID NO: 24457 - DNA, 805 bp, Zea mays
  Clone ID: MRT4577_122311C.1
gatttgcccattgcccgtgtgactgtgacttctgagagtcgggagagccaacaaccaaaagaggcaatgccgccgccgccgccgccgtcgcagggagcaatggccaccggcgccgccaaccaccccctcccctgctccgtcggccgtccgaaggggacgaatcagcggcgcagacccgcctccctctccgtgcgcgcgtccagcgacgccaacaccgtgacgctcctggactacggcgcgggcaacgtccgcagcgtgcgcaacgcaatccgtcacctcggcttcaacatccgcgacgtgcggagccccgaggacatcctcgccgccgaccgcctcgtattccccggagtcggagctttcggctccgccatggacgtcatcaaccgtacaggcatggccgacgcgcttcgcgagtacatccgcagggaccgccccttcctgggtatctgcctcggccttcagctgctattcgattccagcgaggagaatggcccggtaagcggccttggtgtgatacctggagttgtcaggcggttcgactcttcagagggtctcatagtgcctcacattggatggaacgcgctccagatcaccaaggacacgcagctgctgcaaggagctgatggccaccatgtgtacttcgttcactcctatcacgctctaccttcagatgcgaacagagactggatttcgtcaacatgtaactacggtgagagtttcatatcatctatctcgatgggcaacattgaggcagtttattttctcccagaaaagacgcggagctccggtacctttccattttttg

SEQ ID NO: 24458 - DNA, 6209 bp, Zea mays
  Clone ID: MRT4577_122312C.1
tcttcatctggtgtagatgatgttagtcttaacccaaccttttcaactgttagtggtgtagcagacactagttatgttccttcatattctcaggtctcatcacaaggcactgctgtggcactggcaggaatccagaaggattttgtgacagttaagttggatacattgttaccagatagtggtaagggtgctcctcctgttaatgagggagataaaggtgctactgttacaacacctgtggcaaaagatatatgtgctgggactgtgacaacatcagacaacactgtcaccctgacaccaaatactcttaaggaaaacattggattagttcaagtggcatctgcaccttctatgctcgtggcttctgaagaactaatgaaaatagcacatgttgcggtggccgataagcctgttgagaagcaaactgcttcacgtcgccgcagaaagaaaacatctagtagcgaggatactggagtcagcactagacaaagatcagctatgaaaagatcttactacaacacctctgttgccgttgatgatattggttctgctgtgatcccaaatgaaaaatcaggaataacgaaggaaagagatgtcagttcaattcaaagtacatccaatgaactaccaaatattaactcaccattgtatgagaagtctggatatgattctcaaccaagcacacctatagctgtccccatcaatgaagacactcttcctagtggttttgacacctgtactaattctatgataactcttgccacatctgccaactctgctgaagatgataaaccagttgatttgcaccttaatgcacctgtttctgttgattcccaaaaccaagaacaacacatgacagggaaggaccatttggcagtgtgttctagaatctttgctactcagttacagacggacactgcaaatcctgctattgatcataaaccaggaactgcccagtttgaaccatctgcttccttgccccagaattcaggcaaggatgctactgcactaccttctgaggttgacagtgctgctccaaatagggcatcaagcaggaggaggaaagggtcaactcgagaaccacgcaccagaagtaattctgcatcagctgcaagtgaacgtcgtgcccgacttactggattgaagcaggcagaggacataaagaagttagagatgtcagcaacgccgaccacaacagtgtgtatttcatcggtagagcaacagggagctgcttctttaagtgcgaagattaccaatgcttctgtttctgaaggacagaagaatcctggaaattatatgccttctgccatttcaattcccgtggggagccatgttctgggcctgggcgcaacaagtattgaagaaacaactgccactatgataactcaggctcctgcagtttcaaaatcagaacgaagaaaacttccaggaggcagtcaacaaggtattcagtttgagagttcagcatcaaaaacaaagatggtatcagctgtggaaccagcacctgcaaatgttgaatgcatgcaaggtactgaagttaatagttcagaacagacaatagtttctgctactgaaccagcacctgcaaatgatgaacacatgcaagagcaaccaacaaatatcgtttcatctgtggaatcagaaccttcaaatgatgaagagcacacaaagcatgaagtgtttcttgcgactactggtgataatatgcttgcttctagtgcaggaactgaaatattgcgggatacagttgagcatgctgcttgccagccagaagcagtatgcacagatggaactgcaaggcagtctgaattgtcgcaacttgatagaaaagcctttcatgatgcctcatataaatacactcatgggtccactaaagatgatggtatcttgcccagtgaaggtacttctgttgatgttactggttctaagcaggatgatgtgaacattgttggcacacaaactgatgatgtttctcggggttctagtcattttccagttattttacagtcaactgagtcagatcggcctccaggtcaagtgaagaatttggagagtaggatggagcaggtgaaaacagaagaagctttggttaacagttctggtggcaatcaaactcacagtctgggcgatgaaccttctcataatacatcattagcaagaaattctccctcagaacactcgaatgagcgttgctctgatcaagtaattggtgaaaatttcaaaagtaaagaaaatattgttgaagtccattctggcattaatactgatggccccgatgaagctctgaatgcattgcacacccaatctaaggaggccagcatgacagatattggtgtacctactgatggtgatagatgtgaaggtaaagggactagtgtcgaggtctgtgctgacatgaatactgatgggcctgtggctacccaggatgcttcgtccacgaaatctgataaagagtcctgcatgatggaatgtggtgtgtctaccgatggctgtcccacagtttgcaaaacacacaatgatctccagggtcatgtatcttgtgaagaaacctttgttaggactggtggtgatgacacaacccatatcaccaatgcaaattatggttctaataatgaaagtgaggccaccattgctagtcctgttgaaaccacacaaaaactgatggaagggagcactgttattgtgtcggagaattctgatttaaataagcaatgccacacattgcatactagaaatgatcctcctgcaaataccctgttgatagttgagtctaacaaagttacttgtgatgctgaaattgtttgtgctagcaggttagaatcttctggcattgaggctgaaacagtgggtatccaagagtcagctcttactgattttgagggaacaaaaggaactggggatttgggtgacagaactaacagtcaactgcatgatgatgttcatgggacatcatgttccacgatagctcttgtatctgagaaagaaccttccgaagatcttaccaccggtagccattcagaagcatctaatttacttgctgctgtagaacaaactcaagaaactactgttgagaaccaagagatcatagatgcagtagtgtttatggatgcctgcaaggcagaacctgttggtgattttactattgctaaaggagctgaacagactgtagaaatggttcattatgttgataagcaatctgctgtattagactatgttgagacacagacaaaacgaacttcggtttgtggttctacggtaaatgaatcccctcaggctgcagggttggaagaagactgctctgtactgaagcatggtgatcctacttcatctgagcttcttactgtagcacctaatccaatcggtgaaacttctgttattcaagtggaaccagaggcaagaaactcagatggatactgcacaacagaggctggcagtgctttatctgaaactgtcatgggattggagccaaataaagaaactgcggttccaatgcaagagaatattggagaagctaatgataattttaataattgcgaagcacacaataattcggagattcatgcatttgaagtgtcgatggaaacacagtcatcagaagtcaaggaagtatcttctattcagtctggtgcagcaaatttgagcacacagacaactgcactgcctgatgtaacaggacaaaccagtatggcatcgactggagaactagtatctacaaatgaacacatacacatgcaaggcactgaaatcaattcagagcaacaaacaaagatggtttcacctgctgaatcagcacctgctaatgatgaacacgtgcaagacattgtgattcttagttcagaacagcaaacaaagatggttttagctgcagagattgacgcattatgcgtccaggagactgcaattattgatcttgggggagcaagaggaacagttgacctgaatgacataagaacacaggttcctgcattacctggaagggatgtgctagatgtggaggcacatattttggagcaaaaaaaaacatcttcaccaggtgatgaaattaagggttcagaacaagcaaaaatcgaatcgattgcagagatcgaaacagtgggcgtcaaggagaatgtcattgctgatcataaggaaacaggtaacaacagtggcgtaagtatacatgcgcctctattagttgaatctggacaaaaggcatcacctggagttgaattgcgtggtattgaggttgatgctcatgttttggaacaagcaaagatggtttcagctctagaaccagactctactccagaagtttgtgctgacaagttagaaccttctggtgctgatgatgttggaatgattgttgtccaggaggctgcttctgttgatgatcacaatagagcacaaggtggtgaggctcattgttcagaacaaataaagatggcttcaattgcacaagcggtgtctagcatggctttagtaggatattcttcttcagaagactcaatggtggatgctgctgcccgagtaactgatgctgattttgtggatagtaaagcagctggtgtttatcgccaagaaactatgcctactcaaaccacctctaccctcccagagaacatggattctcctgcaactgctgctaccatggttgaatcgaagtttgctgcctcgtctgagcacgttgcaggacccgagccaattgatgaaacttctgttatgcaagtggaactggcaacaagcacaggggatggatgtgcagcagatggtcacaatcttgtttcatctgaaactgttgttgaagtgaagcttgctcaagaaattgttgttcctagtccaggtggtagcatagaagctaataatacttctaccatcagcgaagtatacaaagatacccagtctcgtgcatctggtgaagcatgcaatgatggtcagtctcatggtgatgaaaatatgaaacttggtgaagcttacactgaactgcagctggcaccttcctctggtgaggaggccatgacatgtatgtgtagtgagctgcccagccaggaggtggaggctccaagcagtgaccctttggagaataatgaagaaacgaaaaatgaagctgctgctcaaggatcagtaaatgaggattctgctcctcgtgctgaaaatgcaaagattgatgaagctgacacagaacaggaactgcttccatctggtgaggccacggtagacgaatccagcgagctactcagccaagacgaaaaggtggctcgtaaagatgcaaagatggaagagtctgctgctgctgctgctgcacagagacagctaactactgaagttgctcatgcaagtgaaaacgcgaaacttggtgaagatggcacggagctgcaactgccaccaccttcaatggtagacatatctagggagcaactcagccaggaagtggaggttgcaagctctgggccttcaggaactgatgaaactgctgagatgaaacggctaaacactgaacattcacctggtgatgaaacttcaaaacttgttggaactgatctaggactgcaattgtcaccttctggtgatgccatggtagatatatctaataagccacccagctgccaagacgtaaaggaggccccgagcagtgacattttgggaaatgatgaaaattcagacaccgagaagactcctgctgccttgcatggacggctgaacaccgaacttgctcctagtggcagaaatacagaatttagtgaagctgacactggaaaacaagagacacccgtgtctgctgaggctatggtagaatcatcgagcgagcctcgcagccatgaggcaaaggaagctccaacccctgacctgtctggggatgatgaaaaagcgaagtcagcaagggctgctgttgttgcggaactttttggagatgcaacagaaggtggttcggatcagccattgccgtctcctagagaacaaggcaaggaagcagaggccgatggaggcttttagagtaaagttgcaaatattgtatcaagagatactagaatccgtgtaagtaagaactgctaatagtgcttttagttgtaactggtgtaagcttctactcagaatcaaaagcgacgtgctgagattacagcaacagtggcctacggcagtttactactgttttgtgcaatattgctgctgagttttgttgagacaggcaattgaaaaatccccaaaaaaaaggatatagagaagataatacc

SEQ ID NO: 24459 - DNA, 765 bp, Zea mays
  unsure (1)..(765): unsure at all n locations
  Clone ID: MRT4577_122313C.1
nnnnttttnttttatcgaaattaaacaaccaacatggaagctaagctagtatagaaggattacatcatctcgaaatcagtatattcaaacctaacatttacattgttactccgcaatacaaatctacactcctctgatcagttaccatatatgcaaagcgaacacacaaatatttattgaaccgagcatgtctcgcccaaaaaatatatataatgccttgcctcagatctcaacggtttctgcaatacaaaattgtagggagtcacatctacgccaccttggcttaaacctttgtcaagtcgtccaggttggtaaaccacaatgcactgtgtccataacacaggatgatcatcagattatcttgttaatctgtgactcccttggactgtgactagtctaacaaagaataaagaaattcatggatctgtacatgcatctggccaaagcaataatttacatgattcacatagcatctgcaaaacttagttcggaacatcttcaggttctctgcaataaacacagccagaagtagtgattctaacttagagctttatccattgaaatgtcatcacgatcttatcattgaactcctaggtcatttgataactgcaatatcccacgcatctgaaggtatgggttctccagaagtttctcattgttacactgttgagcttttgagatgaggctttgaagcatccgttggtatatctctggttcctctgtcatcattctcttcaaaagaaaagcggcagaatagtatgctac

SEQ ID NO: 24460 - DNA, 378 bp, Zea mays
  Clone ID: MRT4577_122314C.1
tgcgcgggaaaaaaaaaaaaaaaaaaaaaaaaaaaaaaaaaaaaaaatgataaaaaaaaaacaagagactagagttccgtatccaataaaaaactcgaaggttaatgcgtgcttgagcaataagttgacctgggccgcggtgacgctcctgggtagtgccgcgttccgcgttcgcggtttgattaatatagcatgtcccccgtggcagctggaagcttaaaaaaaaatgaacggacgtcgaacttaaacctcaggctctcctgccgttgaataatggttaattttgcgctaggcgtaatcaaggtcttggctggttactgtgggaatttgttctccgttcgcaattacacacggcttccgatgcctaaagcataaaaa

SEQ ID NO: 24461 - DNA, 189 bp, Zea mays
  Clone ID: MRT4577_122315C.1
actccacgttcccccctcccatctcgcccgccgctctcgtccttgtagatctcctcgcacctcggccattcgcttcgacaagggtttaagaccggaggcgatggcggcgaagctggcgcacgtgcgcactcaggtaacgcgaggcggggagctcagcttcgacccgagagtgctcctagcacaaagagg

SEQ ID NO: 24462 - DNA, 322 bp, Zea mays
  unsure (1)..(322): unsure at all n locations
  Clone ID: MRT4577_122316C.1
ggaccggaaacaccggcacgacccacacatccgcacattagataggaaacacaccaaaccaaanagcgaccggagagaacaacaaaagggggcgggacagcacccgcaccaaggaggctgcccaaactaagggagaccaaactcaatcggaaccgacgcaagagacaccaatcgagagggggacctagcagcaacatagtgcccccgccgaccgagaagagaaacacacacaacctaagcgacccgccgaaagaaggaagggttgaaagacacccaggcccaacgaccacctaaacaccgaggccgcatgcaaaaacccaac

SEQ ID NO: 24463 - DNA, 284 bp, Zea mays
  Clone ID: MRT4577_122317C.1
aagggctggtactcctgggtgctcagcatgctctacggcttcctgctgacgttcggcttcatcaccatgacgccccagctcttcatcaactacaagctcaagtctgtggcccaccttccctggcgcatgctcacctacaaggccctcaacacattcatcgacgacctgttcgcctttgtcatcaagatgcccgttatgtaccggatcggctgcctgcgggacgatgtggttttcttcatctacctctaccaacggtggatctaccgcgtcgaccccacccgagt

SEQ ID NO: 24464 - DNA, 202 bp, Zea mays
  Clone ID: MRT4577_122318C.1
tacggtcatgcattccgggtccgaccacgcgtccgaggacgcgtgggcgcgcacgccgcctgcctgtccattgagatctctttcacgcccctttctgccatcgcacaactgagccgcaggtactactatccacttggcaggtcagtatctcctgcgaggacaaccattgattatttgaaggtggaggtggtacactcatcat

SEQ ID NO: 24465 - DNA, 636 bp, Zea mays
  Clone ID: MRT4577_122319C.1
ccgccgtcggcggtggtttcgcgagcgtggcggactccgggaagttgaggttagcgcggctgccgcggaacctgagcgccgccacgtcgtacgcccgggcggcggcctccgcggtgtcgaaggtgcctagccacacgcgcgccgccttgtgaggatcccggatctccgccgcccacttaccccacggccgctgccgcacaccgcggtaccgcctccgcggcgtgccggagccggtggaggacggcgagggggcctgcgagctagagctgggtgacgccgtcgtcgcgggaatccgtgccgctccgtgctcgtgagcggccggtgcagaaagagagggcggcggcggcggcggcgttacatctccggcgtagtagtcgctccaccactggccctcaggcgacacctgatgctgacgggcaccggccgttgccccgccagcgacgaccgtggccagcgcgtcgaccatcatgaacgcctcccggctccgctcgtaccccgatagcattcgccacgccgctgccgggtgttggcggtcctagtcgtcctcctcacccccggcgccccaacgacagggccctcgtccaaccgcgaaaaccaccttgggcgcgcagcacatgaatgtagtatgtatgggcc

SEQ ID NO: 24466 - DNA, 371 bp, Zea mays
  Clone ID: MRT4577_12231C.1
cgtcgaacaggagtcaaagtcagaagttcttcgcagccagttgcaagtcgctcgttcagaggctgaacatgccattcaacttaggcaacgatttgatggtgccgttgtctcaaatggcacaggatctaattctagcctgctaatgattaccccaacagaacacacagctgctatgatacagggttctggagtaaggctgacgtctcctcagttgcaatcactgaatccagcaacctcgcttgcccctacagtcagtgcagtgggagatgagccgaagagaacggcagcagcaatggcagacaagctggcatctttgtcggcacctgtgcaggttctgagctccattttctcatcttttgttgccgagcatg

SEQ ID NO: 24467 - DNA, 703 bp, Zea mays
  Clone ID: MRT4577_122320C.1
caactgacaactggcttggctgtttccgtccaaaaactcgaacctccgtggggggcggcccccggcaatctcgaaatcaacgagatcggcgaccaacacggagatctcgaaccccgggaaagatccaacacaaccgaggtggagggggtctcgaggcagcggtgttgaattgacgatgtgtgacatttgggaggaattccgggcggcgctttgcatatccgggggaaaccgtcgcccgcccccaaccctccctcccccgaatctcgccggcggcggtgacgaagatggcggtggtgtcgaaagtggcggcggccaggaggagggggacatcatcagtgcgctacccgacgacgtcctcctcttcatcctcagccgcctcccgtccgccgccgccgcgcggaccagcgtcctctccaaccgctggcgcctcctctgggcgcagctcccggtgctgtggttcccgctccccgccgaaccggcccgcgcgctgccctcgcccgctaccgccgcgcggaccagggaccgctcccaccgttggcgccgccgcctcttggcgcatctcccagcgctgcggttcccgctccccgtcggaccggcccgcgcgctgccctcgcttgcctccgctcgcgccgcactcacccaacactcggcaccctcgctctggatcctgaggatagacgctaacgacgcggacccggtggac

SEQ ID NO: 24468 - DNA, 415 bp, Zea mays
  Clone ID: MRT4577_122321C.1
tgtccagctgcagtttctgcccccgcgcctacgcccggccgatctggtcagcaatggcaggaggcttcttctccatggttcacccggccgtcaccttctcacggattgcatgaaacatcctctcctttctggcgttccttgcaccagtgtcgacgttactgcatgcggaccggaagaagtcgacggacgcattcagatcggtgccatacgttgaggcgctcttcatatcggtgctgcggatcttttacgcgctggagaagaccaactcgaggccgctgctgaccatgaacgcctttggctgcggtgtggaggcggactacatagtcctttacctgctgtacgcgccgccgtggggcgcacctgcggactctggcctacttctttctgctgggacgtgcggcctatgcgctcgtac

SEQ ID NO: 24469 - DNA, 207 bp, Zea mays
  unsure (1)..(207): unsure at all n locations
  Clone ID: MRT4577_122322C.1
gacccacgnncgtccgcatcaaggtggttggaattatgactataatcccttctttacggtaaatgtctgagggtatgattgcttcgtacttgtataaactgtatctgtatgagagcgtggcagttcgtaaacaaacatgacgagtgtaagtgttgaccatacatgttagaccatacaaactgtaggctctgaagttgaacaaactat

SEQ ID NO: 24470 - DNA, 1897 bp, Zea mays
  Clone ID: MRT4577_122323C.1
atataaccgggccatcttggaaatcgtatctgattcccaattcccatcagggtccgtcacgaaccggtgggcggagtcttccagaggccaatattctgacacagcggaccccgtgggccgtggccgtctcgtttcccgtctcccgcatagagaggttcccaaaccattctctttcgctttcgtctccgcaccctagggtttctgtgcctcgccagcgaagcgatgcagccgccgcaccaaccgccgatgaacgggcaacactcccagcctccgccgcaaggacccggggtgcccatgcctccgcagcagcaggcgcccccgctgccgtactaccagcagcagcaggcgccgcagtactaccaacaggccctcccgcagccgtgggggcagcagcagcagtacgctgcaccgccgccgcagtacccgcctccgcctcagacgcagcagtacgcgacaccaccgcagcagtacgcccctctgccgcagcagcagtacgctcctccaccgcagcagcagtacgctccttcgccatatggtaccacgccgggaagcggtgaagtcaggacgctgtggatcggagatcttcagcactggatggacgagaactacctccactacaacgcctttgcggccgtggcccagcagattgcttctgtgaaaattatacggaacaagcaaactgggcactcagaaggctatggttttattgagttttactctcgagctgctgcagaacatactctgatgaacttcaatgggcagatgatgccgaatgttgagatgacttttaagctgaattgggcttctgctagcactggtgataagcgtggagatagtggttctgatcacgcaatatttgttggtgatttggctcatgatgttactgactccatgttggaagatgtgttcagagctaagtacccttcagttagaggagctaaagttgttgttgataggatgactggatggcctaaaggatatgggttcgtgcattttggagatctgaatgagcaggcacgtgctatgaccgagatgaatggaatgatgttatctacaaggaaaatgaggattggggctgcagctagcaagaagaatacagatgctcagcagacatatgcaactaatggtgcataccagagttctcaaggcaattgttcagagaatgatcccaacaatacaacagtctttgtgggtgggttagattccaatgtagacgaggagtatctaaggcaaatttttactccgtatggagaaatttcctatgtgaagattcctgtaggcaagcattgtggatttgttcaatttaccagcaggtcatgtgctgaggaagccatccgaatgctgaatgggagtcaggttggtgggcagaaagttcggctttcatggggccgtagtcctcaaaacagacaggcttctcagcatgatgccaacaaccagtataatgggaacagctattatggataccaacagccgggttatgaaggttatggctatggtgcttccagtgcacaagacccaagcatgcaaaactactacggatactctggttgtggtaactatgagcagcagcagccaacacaggaacagcagctgcagcagcctccaccaccacagcagcagctgacgattgcttgcacacctctggagtgctatcggattagagtgacggtggagtcacggggcgctgcaatgagacatcctatatagatatgaaggtcatatagtcgcataggagtggttagactttcttggggaccagtgttaatcgatgatggcactccggatgtttcttctgtttgtcgttgagatcttgactgttgaagtgtgctctgttgatattaatgtcttcgtcagattgttaatttgcttgtttcagaaaaaaaaaatttcagacccc

SEQ ID NO: 24471 - DNA, 582 bp, Zea mays
  Clone ID: MRT4577_122324C.1
ccggccggatcccgcccgcccatgcatcaaactacccattaccgcggatacatcgcctacggccgtcacctgaggccaccgacggtgcgttcgctagcggcaaacaccaacacctccaaagactgacgcatctgcatgcaacgctacggaataatgtaagcagaacgtacaaactccgctctgcatgtgtccggcttgcgcgtcatcctatgaaagacaccgagaccgccgccatgactcctatactacgtaaaggagtgaccccagtctgcactggtgccgaatccatccgactctatgcaatgcgggtgcgggccctcgtgtgacctcggtgacctgctacaggatgccatcgacatctccactgtacataatgtggccagtccggtcgtattgaagccgtgggaccctgcaacatgttgacgggaaatctacatagtgctaaacttactctaagccgtggatcgtagagagtacgtcatcccatttgtagaagaacatgtgcaccaaatgaaaacacttatccacgacatcgactagcatctacgcggctgctcccacctgactgtctgacgccaacga

SEQ ID NO: 24472 - DNA, 1920 bp, Zea mays
  Clone ID: MRT4577_122325C.1
cgccccagcgctccggcctccgcggcctccgcctcgtttctaccgcataaaaattcgaaagccctcctctctcgcttttgtctccacgcctagggtttctctgcctcgccggggaagcgatgcagccgctgcaccaaccgccgatgaacgggcaacacggcccgcctcctccgcagggatccggggttcccacgccttcgcagcagcaggcgccaccgccgtcgtactaccagcagcagcagcagcagcagcaggcgccaccgcctcagtactaccagcagggtcccccacagccgtgggcgcagcagcaacagtacgctccaccgccgccgcagtacccgcctcagatgcagcagtacgctccaccaccgcagcagtacgcccctccgccgcagcagcagtacgcccctccgccgccgcagcagtacgctactccgccgccgcagtacgctactccgccgcagcagtacgcgcctccgccgcagcagtacgcgcagccgccgcagtacgcgcagccaccgcagtatgggacaacgccgggaagcggtgaggtcaggaccctgtggattggagatcttcagtactggatggacgagaactatctccactacaacgccttcgcgcctgtggcccagcagattgcctctgtgaaaattatacggaacaagcagactgggcactcagaaggttatggttttattgagttttactctcaagccgctgcagaacatactctgatgaacttcaatgggcagatgatgccgaatattgagatggcttttaagctgaattgggcttctgctagcactggggataagcgtggagataatggttctgaccatgcaatatttgttggtgatttggcccctgatgttacggactccatgttggaagatgtgttcagagctaactatccttcagttagaggagctaaagttgttgttgataggatcactggacggcctaaaggatatgggttcgtgcattttggagatctgaatgagcaggcacgtgctatgaccgagatgaatggaatgatgttatctacaaggaaaatgaggattggggctgcagctagcaagaagaatacagatgctcagcagacatatgcaactaatggtgcataccagagttctcaaggcaattgttcagagaatgatcccaacaatacaacagtctttgtgggtgggttagattccaatgtagacgaggagtatctaaggcaaatttttactccgtacggagaaatttcctatgtgaagattcctgtaggcaagcattgtggatttgttcaatttaccagcaggtcatgtgctgaggaagccatccaaatgctgaatgggagtcagattggtggacagaaagctcggctttcatggggccgtagtactcaaaacagacaggcttctcagcatgatgccaacagccagtataatgggaacaactattatcgataccaacagccgggtaatgaaggttatagctatggtgcacccaatgcacaagacccaagcattcaaaactactatggataccctggttatggtaactatgagcagcagtcaacacaggaacagcagcagcagcagcctccaccagcacaggagcagcctccaccggcaccacagtaacaatcatcgtggtgacgattgcttgggcacttctggaatgctatcagattagagggactacagtcagagcagtgccgtgccgaatgagacgtcctgaagatatggagggcatatagtctcatgggtgttcttgggccggtgttaatctacgatgacactcctgatgtctcttttgtttgtcattgagatcttgacggctgaagtatgcaccgttgaaattgatgtattcgtcgtcgtcggattgtttatttgctcggaaccattttttgcactttacatctgggacgcc

SEQ ID NO: 24473 - DNA, 306 bp, Zea mays
  Clone ID: MRT4577_122326C.1
cggacgcgtggggtgagcgaggaccccatgctccgcatctggccgccgtgcttgcccccgatgcagtccatcgggttttgagaatctgagccttagccggcgggagagagccaatttctgtcgaacggccgctgcatatttctgattggcttatctattcatgaatcatacttgctatggcttgctcttgttgacagggatataaatatgcttattgttagtgttataaatttggccataggaaaggatgtgcttgcagttggaatatcttggttggggatagaatatcttatcttgcttatgaaa

SEQ ID NO: 24474 - DNA, 351 bp, Zea mays
  Clone ID: MRT4577_122327C.1
gggaaagcaagaactggtgcctccatacccaggcaagcaaggaaaaacccccgagttcagttttcacacaccactggcactaccagggggcactatacttggataagcccatactggtacagcacccccggttaaaaaattttgcaaagggggggggcaagacccacctttaagggggcaatcccgaccgcacgaatttaccggtactggcccactgggccttgactcctggggccatttttatggggaggcccagccaggggaggctccaaagaggccggaaagttggccccacctgacagtaaaatgggctggagccacgtaaccacaatggggctccccacgttgggc

SEQ ID NO: 24475 - DNA, 403 bp, Zea mays
  Clone ID: MRT4577_122328C.1
cttgcccacccggcgaccagaaactccctaaccggctgctgatggagtcttgacaagtgattcttgtggatcggccagctacggcggcggtggccacgaaacgatggaattaggtgcttctgtttccatgtctatcctggaaaagctcgtccagagctgttcctttccagattcatggcgggggccgccagacgctgaggtccaggctctcataggatatctcgaagagctacggtcctccgtcctggatctttccaaggaggatgaggacgaggatgactctgctacgtcgtcgtccacgctgaagatgagcctgacgagccagttgcaggaactttgttatgatgctgaggactatctggagatggcgcagcactcccgtggtggctgctcctggcagatc

SEQ ID NO: 24476 - DNA, 118 bp, Zea mays
  Clone ID: MRT4577_122329C.1
aaaaagcgtttttaatttttaaggttgcgccaaggcgatacagacatggggagccctgttgatcactgttaacgcagttttaaacgagatgccgacatttggcgcattggatggatat

SEQ ID NO: 24477 - DNA, 531 bp, Zea mays
  unsure (1)..(531): unsure at all n locations
  Clone ID: MRT4577_12232C.1
gcgtccgggngggaaaccccgacgtantgtggcctacatctacctcacttatttcgaggatgacgacgagnagctacaaaagatctacgacgactacaagagtggcactctcctcactggagagttgaagaagatggcaattgaagctctgcagtctgttgtagagaccttccaagaccgaaggaaagccgtcaccgacgaggtcctcaggtcgtacatgaagcctcgaaagcttcagtgggctggaaacccaaacccaaagcctaaagagtcgaagccaaaggggaaaagaagaaagagaacgacgagaagaagaccgagttgcctgaccgtactgcagagaagtcggcctaggcattactggtatgccaacggcaggtgattgtccgttgtagaagaaacaaagctagcattgtcaaggataaaatggagttacgtttatctctgtgtatatgtatcaaggcctcctttttgctgtgaaaactcttgttagtcatttcttcaaaaaaaaaaaaaaaannnaaaaagggc

SEQ ID NO: 24478 - DNA, 455 bp, Zea mays
  Clone ID: MRT4577_122330C.1
ggactctcgaggccggccaggacctctgtcgtcgcctggccactttccccgggcttctccgccgtcgagggcgagacccagtgtgaagagactcctactcacatggccagccgctgggtccggcccgaggtggacccgctgatcgcggcgacgaacatggccgtcggcatctgcgggtttcatctcttccggaacatcactgacagcccggaagtcggggaaaacgaggcaggaacgccagctgacgtgcttgataaccatgaggaggtgagacgatacgccatgcatggtctaaaaagctttgcgcacgacaagactcctgagatcatgcctgcagttaacaaggtcttcactgaccctaagtgaaacatgttgattgacatactactactactacttgctactgaggatgatacactttgctggcaactcaatatgttggggcacatccatga

SEQ ID NO: 24479 - DNA, 487 bp, Zea mays
  Clone ID: MRT4577_122331C.1
aaagaaaaactagtttgttttaaaaagcccaccccattttaagggaccttgttttatggaaaaccatattgggggttttcttttttcaggcccccaaaggactaaacagggggcgaccaactaggcgggaatttcggggaaaagtaatcctgggccgaaggtttaaaaaaacccaaagccgtttttttgttggctaaaaaaaaaacggggggcccggttaagccggggggaatgcaaaaattttgcccacttcctaaaagaactttggaagggggggccggccctttgaaaaaaaaaagttttttaggggggaaaaaaaaattggaaacccctcgaggaagggcacaaacccagggccccccaaactgaactgaccaagggaaaagggccccttgttgaatttcccgggggcgtttttttttttatcaaaaggagggaaggtttcctaaaaaaattttttttggaaaaaaacaaaagataaggcttt

SEQ ID NO: 24480 - DNA, 368 bp, Zea mays
  Clone ID: MRT4577_122332C.1
cggaaccggccatcccgggtccaatgtcacttgctctccctccaacaagctaattaaggccggtcatccctcttctagctcgatacattatccatggcggaggaggaacaccaccaccaccacctgttccaccacaacaaggacgaggagcagctcgccgacggcgggtacggtaagtccgccaagtacacggaggccacggtgacggaggtggtgggcacgggcgagaacgagtgcgacgagtacaaccaaggaggagaaggagcacaagcacaaacaacacctagacgaggacagcaccatcaacaacaaaacctgaagactctacaaaaagcgcaaggcaaagaatgaccaaagacacacacacc

SEQ ID NO: 24481 - DNA, 306 bp, Zea mays
  Clone ID: MRT4577_122333C.1
caaaaattaaccccatttgaaaaaccccacttaacttaccacagaacaacaaagataggtctcataattcgggcatataaaaccaaaaacccaatcgcaacaatactaataaacactaaaaaagcccaaaaaaatctcaggctacaaaaagggttccaaaaaccattaaaaggcgaaccctaaaacggaaggcccacataaaacatttcccccaaaagtgtacaaagcaacccccctttattcttccaacttaaaccccatctccatggtggggcccctctccaaaaatcctgtaccaaaggctta

SEQ ID NO: 24482 - DNA, 174 bp, Zea mays
  Clone ID: MRT4577_122334C.1
ttatgtagtgttccttgatgcaccataactcttcttaactcgatcaaccttgactttgcaagtcttcttcttcacccctagctttgggttcttggtctccttgaccttctcctgtgcactcggtacctcgaggctcttcttgcctccatccttggcttgatcgattgtctccat

SEQ ID NO: 24483 - DNA, 245 bp, Zea mays
  Clone ID: MRT4577_122335C.1
acgagttttgtcccggccccctcgcggacgcgggctcggattttttttcttgtgagcttgtcgagctttttttttagttagggcccggcacctgcttgcggtgccaattacggcgcgatagggagcacttatgatccgggacgttgtcaaaggttaacgccggttgcttcgtgggacaatgaggagaaaaaggcgaattttacatgaacagttcttccccttatagcataaaatgtgagagcttg

SEQ ID NO: 24484 - DNA, 305 bp, Zea mays
  Clone ID: MRT4577_122336C.1
tgacaatttcgatccacaataaaatatgggcgggcaatacagatgttggggtgccactatttcaaccctacatgccccctacatacacccgcctgctgctagaagaaactactaacgctgcctaaattgaactatcataccgtatcaatcttccccacctattgtaatacgacatagaatcaactcaaggcttttcatccttgcatcacttgttgcacacttttgttcaaaatatcaatcttattatttaccactacacactgcaccatttatatctcacgtatcacaactcactcacctaactt

SEQ ID NO: 24485 - DNA, 413 bp, Zea mays
  Clone ID: MRT4577_122337C.1
aataaaaaaagttcaaatatttactgagggagagggatatatggtcagtagagtgggtgaatattgagacggaaataataaacagccaaatgagttatgaaaggtattattgtttttctagtgatttaatgcagacggaaataataaacaaccaaatgagttatgaaaggtattattgtttttctagtgatttaatgcatattttgtgtgtctttttatcatgatccatatgacgtttaatctgagtaacatgttacttgcacgattttttctgatgattgatacttatatgactgactattcaccctttaaaatattgcagtttaccaggatacatatttttgtaattgtttgggacatgttagtctttttgtttacctatgttcatccatagggttctgcaaacatctttt

SEQ ID NO: 24486 - DNA, 216 bp, Zea mays
  Clone ID: MRT4577_122338C.1
ctatctttctctttattgggggtgttcttcattttcagctggaccctctatatcgcgttttctttggaggccaaaaaccgtcccctgccttagagaaggtttttttatttttgcgcgcaaacaaaactgccgggggatgaaaaccccgcttcccgtcaaaatcccctttttttttcacaccagccggcagggaaacttattctctcccatgccaat

SEQ ID NO: 24487 - DNA, 458 bp, Zea mays
  Clone ID: MRT4577_122339C.1
tcggctcgagcggctcgagaatggattgtattcaagttgttcttctctgttgatgaatacattttaccaaatattcattaaaataaattaaacaagaaataaaaaagattcaaatatattatgctatttttgatattatcataacaaataatgccgtagagtctaacatatggaccccacatctttgaattgttgtccattttcaattttgaaatgatgacatctgaaatgagatatatgatttaatatctctactatatttaaatcaccagttccaacggtcgtccaacgtcatatttttacaaataccccctcacatctatctcaaattaactctgcatccctccatgcacacaacctccacatccggccagtgaagtcgtctaaccagtagaacatcatggtcaattgttttaaatattgaatataaattatacatatgtatatacgagttttgt

SEQ ID NO: 24488 - DNA, 270 bp, Zea mays
  unsure (1)..(270): unsure at all n locations
  Clone ID: MRT4577_12233C.1
nntatctgccctgctcgatctcgcgtcccctcccccacccccaaacccnttccccgaatggccgccgcgcgccgccgcgtctccgccgtggccctcgccccgngccccgtgggctgctgcctccgccgccaggacctcgtgcgcctcctctccacgcaggaccaggcctccaccgcccccaccatcagaacccgccaagctcgtccgcatcaagaactccctccccagtgacggcacgacgcccgacaagatcgccgccctcttcctgaa

SEQ ID NO: 24489 - DNA, 268 bp, Zea mays
  Clone ID: MRT4577_122340C.1
gcgttagaccagcttttccggctgcacgctacttttatggcacctaataacacgccgcgttaccgcggactgaaaccctgcgtcccactaatcgctgctaatccctttcccgtgggtatacaaaggccgaccgtgccttcaacagtgcacctgaatggcgaggacccccgtgcgccattacgcgggtgggggtaccccggacgtcactgcaggctagcccgtcttcgttctactttttccccgttgcggttccgtagttaatcgggct

SEQ ID NO: 24490 - DNA, 349 bp, Zea mays
  Clone ID: MRT4577_122341C.1
gcccaaaaaaagagggggcttttatcatggattgcttttattattacaacacaattcctgaacagtcggaaaaaaaaaaatgtacaacggttgcaatggaccccccacttttggggggaggcaaaaaaaagggcatttgggctagggttgcccattgggtccccagcaaggaagggggattcacccttttttttttgctttttgggggccttggctttaaaaaatgaggtcaggggggggcctagcccttgtttatggacactgtctttgaggcctccccgtaatttagcccccaggtccctaggaggaatcccgggagttttttatttgtgtttccctgccccaaaaa

SEQ ID NO: 24491 - DNA, 260 bp, Zea mays
  Clone ID: MRT4577_122342C.1
gaaaaggccgatattctccacgctgggattgaaaacaccttcaccctagggtacacggactcctcgggctccgattccaagaggcatgccagggactcccatgtccctatccttgacccactgacaattgggatcgcggagataatggtccaccttgccaccatacacattactggcactggcaccacccatctagaagccttgtcgctgccatgatcctacaacagttaatcacgcctggaacaaccattggatcttat

SEQ ID NO: 24492 - DNA, 359 bp, Zea mays
  Clone ID: MRT4577_122343C.1
gaccacccacgcatttcccatcgacacgacacaagacctctcgcccaccaccccacgggggcgagcgactgaactttgagacacccccgctcccccgagacggcatgaccaatcaagcacggacacatggccaagagcaacctcccaccgacgaatcatcaagcaaacgcaacgcccccccaccgaaccaccaccgagcaagcagggcgtcgccgccagaagacaacatgcgacaattcaatgagatgatccttgcccccgcacaggcaccctatgaaggcgcacctttcaggcttgacacattcgtgactgaacaatatccaatggctgccccgaaagatgagactcctcaccacaaa

SEQ ID NO: 24493 - DNA, 229 bp, Zea mays
  Clone ID: MRT4577_122344C.1
taatacacacagcaccgcgcggtcggcactggcgcgagtttaacgcgctgctatgaggctgggataagagttgcctgcaatacgcctgtgaaaagggaggatcggaagctacctacacgctgtttgctcactgacttcctgtaaacagtgggggcccgactggagctggcggtcaccctacatggcgggaacttctaccaggacacagagaatgacccggggcgaaggc

SEQ ID NO: 24494 - DNA, 199 bp, Zea mays
  Clone ID: MRT4577_122345C.1
acaggaagaaataaaaaacggtcttcctcattagtgtttgcaaccaaaggcagtctggcctaatgctgtattttgttagggcaaacttattgctcatgtaagttcacttatgctattattttttactttatggggattaacaacagattatgacactgataggatggtaaattacaaacgatttatgtatacttttaac

SEQ ID NO: 24495 - DNA, 174 bp, Zea mays
  Clone ID: MRT4577_122346C.1
gtgcagcccgacggctacaccctgactgatcgcctcagcgccagtgggcggggcagcagcgttgccagcatgtcacgcagggggagccgcagcaccggtaccaggcgatcttcgggttggccctccactccatcctgtagcaggagtcgcaaagcggtcaggtcgcggggctgt

SEQ ID NO: 24496 - DNA, 275 bp, Zea mays
  Clone ID: MRT4577_122347C.1
ccggccgggaccgtgcagtaggtgagccctcaaccttcgctctcctggtccggcccgcgtcccttccgatcggccggtgggtttcgattgcgctctcggtaccgcgtaccggtacgatccagactcttgatggcttcccgctggtgtgggtgactgaacccgcgcggcctttggtgggagcgcgcgggggcctggatctggcattcctgcctgtgggtgctagaggggaagaacggcaagaaccaactatggctgctgatgttgggcttcggttc

SEQ ID NO: 24497 - DNA, 413 bp, Zea mays
  Clone ID: MRT4577_122348C.1
aacggacgccagggccccgggagccttactggcggaaggcaccgcttcttcaaacggactgcgggctaccccgcccctgaacccgactgcctattgcccatgcgggggagggaaacttgcacacaattatcctgcttgatgcacgccaagaggaccaaccaaaggaagcggagagactaaacccatatgacggtccgatacaggtgctgcctatggaaggtacaagcacaggagagcatggcgccggcacagggaaaatgaagaaccctggagaaggagcggggcaccgaatcactcaggacgatgacaagaaaaaaggcggcgctggatcccaacaccatcatgaatccgggaaagctgaacccgcataagtctgatatgaccgtgacctgactggaggaacgaacccccca

SEQ ID NO: 24498 - DNA, 660 bp, Zea mays
  Clone ID: MRT4577_122349C.1
cgcagcacgcggtgcaggtgtcctccaacatgatggtcggccacctccccggcgtcctcccgctctcctccgctgccatcgccacctccctcgcttccgtctccggcttcagcctgctcaccggcatggcaagcgcactggaaacgctctgcggccaggcctacggcgcaaggcagtaccacactctggggctccacatgtacacagccatcgtcactctcctggtggcgtgcgtcccgctgtcgctcctgtgggcgttcatgggcaatctcctggtgctgatcgggcaggaccccctgatcgcgcacggcgccgggaggtacatcgtgtggctcatcccggggctcttcgccaacgccgtgatccagcccatcaccaagttcctgcagtcgcagagcctcatcatgccgctgctcctgtcgtccgtggtcacgctggcgctccacgtccccctgtgctgggtcatggtgttcagggccgggatggggtacaccggcgccgccctggccatcagtgtctcatactggctcaacgtggccatgctcgtggcctacattgcgatgtcgagctcctgcaaggagacgcgcacgccgccgaccatcaaggccttcagggggggtgggtgggttcctgcgcctagctctgccctctgcgctcatg

SEQ ID NO: 24499 - DNA, 366 bp, Zea mays
  Clone ID: MRT4577_12234C.1
cttatttttctttcatatttctttttttaaataagctttgtgggatgtcaaaacccaaaacggcgtttgattacatccttaaaacctaaaaaaatcctttatgggcagaaggacctcttttcatggaaaacgcctccttcatacattatttatactcataactgatataccagaattttgtacaaattggacctctaaattgacaggccccttaggttaacataatttcagcaaatcctgatgacgatgaccttctaaagcttgcaatcattgccttttccttgaacctctaatttaggcattcaaattgggcgccaatctggtgctaaaatttattaccggctgctaatctcctccaaaaaataa

SEQ ID NO: 24500 - DNA, 1501 bp, Zea mays
  Clone ID: MRT4577_122350C.1
cttccgaaaggaccgagtctacttgacccaaaaccaaacacctagaagacaagccttttacatctcgacttatcttattattccgaatctgatttttttaccccataagataaggcggacacgcacgtgtgcagccacctggatcccatggacgccatctgcacgaaaggggagcacatggatgggcacctggaataggtcgcaacaataaccagcggaggcgccctcgtggcggccggtagcgagaaatttactccttcggctgaagacctgccaggtgccttcgagcatatcgaaggtgaaattgatgactgaaagggaattaggcttacacctagttcctaattaattttggtggttgaattgcccaacacaaacaattggactaactaagtttgcccaagtttatagattacacaggtgtaaaaggttcacactcagccaataaaaagaccaagttttggattcaacaaaggagcatagtgggaaccgaaggccctctagtctgagagcaccggactgtccggtgtacaccggacagtgtccggtgcaccagaggactccagctccaacggtacaccttcgggaatttggccgggcgaaacaaaaaaaaaaaaaaaaaaaaaaaaaaaaaaaccggacagtgtccggtacgccctgagccccattgcttgagagagagaagcgcagaacaagcgtcgcggaaggggatcaaagggccaccatcgtcgaccgaaggattgagcgaccctccgtcctcggcaggccatttgggcgaaccaccgtgaagtaccaagtgtgtttgtggcctctcggtgatcgaaaccggtgcatatggcaggaccacgtctctcacccggggatggcctcgggcgagtcgtgactgcgtctccttccgggcttggcctcgggcgagccgtgactgcgtgtcccgcccgaggttggcctcggatgagtcttgactgcttcttccgctcgaggttggcctcgggcgagtcgtgactgcgtctcccgctcgaggttggccgtggtcgagtcatgactgccaaaccgggggaggtgaaagggaattaggcttacacctatttttctaattgattttggtggttgaattgcacaacacaaataattggactaactagtttgctctagtgtataagttatacaggtgtaaaaggttcacacttagccataaaaagatcaagtattgggttcaacaaaagagcaaagggacaaccgaaggcacctctggtctagcgcaccggacagtgtccggtgcaccagaggactccaactcaaactcgtcaccttcgggaaaatccagaggcgactccgctataattcaccggactgtccggtgtacatcggacagtctccggtgctccaaggaacggcgcctcaggaactcgccagcttcgggaattcgcaacggctagtccgctataattcaccggacatgtccagtgtacaccggactgtccggtgtgacatcgaagcaacg

SEQ ID NO: 24501 - DNA, 2294 bp, Zea mays
  Clone ID: MRT4577_122351C.1
ccccctcgggtcgacccagcgtccgggcccggcccgtcaaatcctgtactgtactcgttgtcgcgaggaacgcgcccctgccacctccgcgcggcgagggcacgtcgtagtaaaaccctagaaaaacagtagcccaccgcgccggcgagccgaagcgagcgcggagctaaggatgccgcggaccaccgtggtagagagctccggctgcccgccgctccgcgccctcaccaccgacatcctcggcctcgtcaaagtcgtcgaggcccacgcgaggccggcgggcgccgccaaggtcgtcgagacgtggggcgcgcctgacgcttcccgtgccatcgttgctgcctccctcgccgatcgtgccgccgaccccgtcttggctgtggcgaggaggaacggcgtggttgagctgctgaatcccttgaatggaagtgctctggctgctgtcaagaccgcggggtcagcgccaaatgacagtggcgctgaaggtgatcccctcgccgcactgcatcttttcgcaagacagacttcggactcgatcttaggcacatttcttgcctgcacggagaaggggaaagcttctatcaggtccatcacgaaagaaaatgcagattcgggttcggatgttgggccatcagccacatgggatgtgtgcaatggggccaatgtgcaattttgctcagtagatcatggcgaaagctatgtgatatttggagggaaaggcatagaagtgaacttgtgggatatcacatctagtagtaagacatggtctgctaaatctccccgagcaaatagtcttggcatattcactcgaccttggttcactgctggaaccttcttgtgcaagaatgatcatcgtaaaattgttgcctgcacaaataatcatcaggtccgcttatatgatactgcattgcaaagaagacctgccgtctctgttgattttagggagtcaccaatcaaggcagttgctgctgatccaaatgggcatgatgtctatattggcacaggaacaggggaccttgcttctttcgacatgagaacagggaaattgctgggatgctatattggcaaatgcagtggaagtattagatctattgttaggcatccagagctacctttgatagcatcttgcggactggatagctacttacgtatctgggacacaaacacaagacagttgctatctgctgtctttctgaagcagcaccttacaacggtggtccttgattcacatttttctgttgaagagcctggagagatgaaattcaagcaattggagtctttagtggaggcggaggctgaagtccgaaaagaaaagaagaaaaagaagagcagaccaactgaagaggacgaagaacaagttggagtggtcgaccatagtgataataatggtgaaatgtatgctagaaaagaaaaaaagaaaaaaaagaaaaagaagagtagaactattgaacgggacgaggagccagacaacgatggtgaaatgtgcagtcccaagagaagaaaatctgtagaaagaagcaaatgcctgaagaagagcaagaaacagcaggtcgcatagaacatagaacaagtaccatttatctcagtatttgcattcgcttgattttgcagaattacacaattttgtgctgtagttgttttgaacagtatattccttttgaaactatgcaaaaaaaactcgacatccattctattctaaaagaaaagaaaattcaataattgatttatataattaaatagagggcatgataaactgtagtctaattgagttaatgagattcacccttagcaatcacctttcaatggtgaccatcacttttagttcttatactgtgtactcaatgatatatatgtatttttacaattttagattgcaatgaaggagctgagagcgcgcaagatacccttcacgatcagacggtacttacctgatggaagctatgaagactggggagtagacgagctcattgtggaggactcctggaaacgccaggttggtggagactgaagacgcggatctacttggcatggaaagggtatgtggtgcagtgggtctttcctgtagttacaagtcttcgttgccactatgagtggatactgtagcgaatgaaccaagacgaaatgatgctatgttaacttaacgtctgtggttgccttgaactctggaaccgtaatgctagcatggttgttggttgcgcaatgcttgtttttgtttgtttcagtttcagccaaaaaaaaaaaaaaaaaaaaaaaaaaaagggcgagcgcgcccgcggaacagagcccacgcacgc

SEQ ID NO: 24502 - DNA, 923 bp, Zea mays
  unsure (1)..(923): unsure at all n locations
  Clone ID: MRT4577_122352C.1
aatttcaaaaaaaaaaaaaaaaaaaaaaaaaaaaataaaaaaaaaaaaaaaaaaaaaaaaaaatcgaggccggccgggggaagcccaccatttggtttggttgtttgtttggtggacgccttgcttttcacttcaccggaaaccaaaatggcagccagcaggatccctccttgccatcttcacccttcttcttcttcctcctcctcctcctccatggccacgatctgcccaaggccaggcacaaggcagtcgtcggccttcaggttcagggcctctgctcatgggagcggttcctcaccacacctctcctccttcactgctgtgacaggcaagaaggttaaggtgttcgaggaccagctgagagggatcgtgtgctacagagacgaggacggggagatggtctgcgaggggtacgacgaaggccccaggctcggaatgcggctgccggagaaggcctccttcccatggcctgtgggggttcggatcacggacttcatccagctggcgacgctccaggtcttcgacgacgacgtcgatgttcttcagctcacgggtgaccagaactaaagcatgtaagcatagtggtgtcgtagtacagtacagtgatgggtatatgcaagaataatgcgtggtgttgctcttatttgctcaggcttacttgtttgtacataatcacttactgcaaggatgagattgttgtttaaagcacaacctttatgtatgcatatatatactatatgaattgagaaaattgagatctgaatacaaggatgagatcgcttgtactcaaaaaaaaaaaaagaaaagaaaaaatgcagacgcggccaataagtaaataaacctataaaataccagnttaactggttaaggagatttgcctcattatggatatgcatgcaaaaaaaaaaaaaaaaaggccccta

SEQ ID NO: 24503 - DNA, 212 bp, Zea mays
  Clone ID: MRT4577_122353C.1
tcggtttgaacaaccaggtggggcaggcttttaggttccaccaggcattgggggggggggtttaccacaaccaattttccaggtggaacaacaattcttggcacatttaacaatacaaaccattggaacgcaacaagaacaacaattcctaccaggactgggccaacttggcatgggggaccctggcggcttcttggaacaagaggtggttg

SEQ ID NO: 24504 - DNA, 329 bp, Zea mays
  Clone ID: MRT4577_122354C.1
gggggaacccataactttattgcattaaaaactaaattacaagggactagctgacaggaaaacccaccaaagtcggaactcgaacagggttttttatgacgcttaaccgaaacattaactggtggaactggaacaccgccgccaccgaacgggacgttctttggttggagtccattattactgggtaaaccggcgccgacattcattttcccagttgggaccgccaccaagaccctggaccctttgcctggggccccccaatgcttgcccaacaccttaattcattcccccttgccgtcccaattgggcaagggcccgggggagcaccc

SEQ ID NO: 24505 - DNA, 718 bp, Zea mays
  Clone ID: MRT4577_122355C.1
acctttggtttggttgtttgtttggtggacgccttgcttttcacttcaccggaaaccaaatggcagccagcaggatccctccttgccatcttcacccttcttcttcttcctcctcctcctcctccatggccacgatctgcccaaggccaggcacaaggcagtcgtcggccttcaggttcagggcctctgctcatgggagcggttcctcaccaaacctctcctccttcactgctgtgacaggcaagaaggttaaggtgttcgaggaccagctgagagggatcgtgtgctacagagacgaggacggggagatggtctgcgaggggtacgacgaaggccccaggctcggaatgcggctgccggagaaggcctccttcccatggtgagcacctgtgaatgtcttggatccatcgatcgtctttgtttgttcttgttgggttaattggctcctcctcctccttgtgctatgatctttcgaaatcgtaggcctgtgggggttcggatcacggacttcatccagctggcgacgctccaggtcttcgacgacgacgtcgatgttcttcagctcacgggtgaccagaactaaagcatgtaagcatagtggtgtcgtagtacagtacagtgatgggtatatgcaagaataatgcgtggtgttgctcttatttgctcaggcttacttgtttgtacataatcacttactgcaaggatgagattgttgttt

SEQ ID NO: 24506 - DNA, 421 bp, Zea mays
  Clone ID: MRT4577_122356C.1
aaaacaaagcccgggaaggcatctgggttctgtttcaaaactaaaacaaaaacggggacggaattgttgcaaaaatctcccctgggggaccccaccctcccagaaattgcaaaagtttatcatccaaaatgttttacaagggaaaaaaaaacataaagctccctcccaactggttgaaaaaaaaaaaaaacaaatgggtctggggccttcaactgaggttcaacttttaccctcgagcagctacaaaaaacttggggcccgcgttttcctcccggggtcctaaagggaggggaagaacctgctcaagccataaggaaaacgggggaacccctcgctcctgccataatacttggaggacttgaacttttcccaccaaaaccagcccctgtcctttttaaaactagccccccaaaacaggggg

SEQ ID NO: 24507 - DNA, 919 bp, Zea mays
  Clone ID: MRT4577_122357C.1
gctcgaggccggccgggccgggaatgcttccatccgcctcgcgtcttccttcctttccgctgcaggaaagcgcaaacccccacggcactcaactaaaaaaagccgcaaggcaaagagaaaaagcaacgcgaagcaaaccaccatttcggcctccccacccccatcccttcccctccgaggctccagggacggcgtgatgaggccagcggcgacggctgaggcggcggacgcgcaccagtcgcggctgctctacgagctctgcgcgctcctgctgaccgtcctccgagcatcgccggacgacggggcgggggcgcggccgctgctgccgcggcaggtgacacctgccggggtggcgtccatgctgctgggcgcgtccatggcgctgatgctctgcggctcggtcaccttcatgctcggattcttcctcatgccctgggtcgtcgggctcggcttcctcttcctcttcgtcggcttcgtcaccaacctctccgggatctggagggccatcctcctctggccctccgccgcgtgctctcccaaggaggcatcctccccatggcatatacttcccaagccttcattcatgtcgatgtgaatgaaggcaatcacaaagccgggctcccacggaggtgtatagaaacaggggaattcgagcagactgttgtctttggcagcctatattttccttcctggacaaccttttctttttaccatgtaaaacgccgcagcaaagtttggaaatggttttatactgtggggctaggaggatacttgtctgtacatacggaaaagatgatctggtctaaacatcacgtggagcttgtaattgtttcagaaacgttgttccttggagacaaacgagaggtcccgtatcgctgttccaccagagcttgtgccaaaaaaaatcgctgttcccacc

SEQ ID NO: 24508 - DNA, 348 bp, Zea mays
  Clone ID: MRT4577_122358C.1
gtgtttatttgaatctcctatggtgtcattgagggtagcctaggctgccactcatgagacgtgggactgcagggcgcggaagccctggcatgggtcaccgcagccgggggtgtgacgcgtccatactcctggatgacactcgaacgctaacctgttggcggaacgcgagaaggaggggcaactccgttcgaggctacgaggtgagagcctgtacggcgacgcaggttgaagcatcctgaaagggcaccgtgagtgtgcgccgacatcgtcgccttggcgtctggtgcccgcacgggacttggtcagttagataggaatggtgtgtggtaacacaacaacaacacgacc

SEQ ID NO: 24509 - DNA, 200 bp, Zea mays
  Clone ID: MRT4577_122359C.1
cactactcatcttacctgacgcagttcactgctagccaattcacttctcgtaccaccaacctccctcgccaagatgtcgacggtgacccgcgcctacctcgaccagaggctcgccgccgccaagcgctgctccaaagaagctaccatggcagggagccaaggccgcggacgtcgccaccgtcgctgccgcagtccccaca

SEQ ID NO: 24510 - DNA, 461 bp, Zea mays
  Clone ID: MRT4577_12235C.1
ggattgtgtggggcggtttttggggcttaattaccgtaagctcgcggaagaggtcgttggtcttgcaaacacaaaaggactggcagaacgcgggcgaggacaggccaaagcgcaaaaggggaaaacgccgggaacacaaacagcacaggcactaccagacaaacccccgcccccccaaaacccaagagcaaagaggggataaccgggggcaccccccaaaaacaggccaatccaaagaaaacaaggaacgggccccgcagcgaagcactaaaggaggcgggggcgcccgagagacaaaccggaacaccacaaaatgcgacacccccgccacccccggcggcatcactccccccctggtaaaaaaccaagcgccgcaaggtgaaccccaaaattcaaaaaagggggaaccccccagggagccgactaaacggggcaccgaacccagaccccaaaaaacccca

SEQ ID NO: 24511 - DNA, 338 bp, Zea mays
  Clone ID: MRT4577_122360C.1
gatcgttttatgagtaataaaacactaaaatggcgatggcggcggtgaggagagcgctcctggcacaccttcgcgtgccggtggtccaccctgcagctgcagcagcgaccattcctgccgcaggacggctactgtcgtcgacgactgagacaaatgggtcgctactcgacaagggcgaggtcgatgaccgtgtcgtgtgcaacgcaagaactttcagaagggtgaaccctcaaaggcgacacctagagctcattttcagaaggaccttggacttgatagcttggacactggggagatcgcgaacgcgtttgaggaagaaaatttctctgagattcctg

SEQ ID NO: 24512 - DNA, 380 bp, Zea mays
  Clone ID: MRT4577_122361C.1
gactctagaggtgcgagggtagtgtaagggaatcttactaaacttcttgcgctcatggcgcttagaagttacggagggcgcgtcggagccggaggtagatggtgatgaggtgtcggtctcgtagtagaccaccttcctcatcttctttttcttgtccccactccgatgcgacttgtgggaagaggctttcttctccttcccttttccctttttgcgggacccttccgatgaagctttcccgtggcttgtagtgggcttgtcgccggtctccatcttcttcttggcgtgttctcccgacatcacttcgagcggtttggctctaatgaagcaccgggctctgataccaattgaaagtcgcctagagggggggggggtgcttt

SEQ ID NO: 24513 - DNA, 383 bp, Zea mays
  unsure (1)..(383): unsure at all n locations
  Clone ID: MRT4577_122362C.1
ggcttgngacctttgggctgatttatgtgcttgtttatgtgcttgggagcaaatcggttaccgttaacctaatgtcggagaattaatcgaggactccaaaaggatccctcgaaaactattacgaagtacacgagcttacggcgaggcttcgcagctgctctatacacgggaagcgggtagaggcggtcatcaattaatactaagaaccaaccacaagactaccgccggtcgtaagggacgtccgttccgagacaaggtcctatacgtgagagacgggtacagtagtcggcgccttaaccgagttagacctataaatatggtcatcagacgttatcacgaacacggagggcgccccatcggtcggagccctgggagtcggcggt

SEQ ID NO: 24514 - DNA, 306 bp, Zea mays
  Clone ID: MRT4577_122363C.1
cggacgtaatgggaacgccgaacgagaaccctttgggggactacacgggtgtccatggcgcgccacggcaaaacgaggcctcgcggttagagcactggtcctggcgtaccgtgatctgcaggtcacccaggagctcgaacatgacctcaaaaaagagacgctcttctacggtactcgaatttacgccggggctggcatgtccggatggcacctagacatacgttgccacaagagccaatgggacccaaggatacgctgcaacccgatgatggaaccccctggcacactgaccccagacaggctgcc

SEQ ID NO: 24515 - DNA, 427 bp, Zea mays
  unsure (1)..(427): unsure at all n locations
  Clone ID: MRT4577_122364C.1
ccggccgggattgcggtttgtcatgggtagtgctcctacaccgtggcctagtcaaacgagccgagggaagagagggtcgtcgtcgagcgagtaggagagggagaaggagacgacatacccaactcctagaagccagcgagctccatccttgcctgcacgatctgtcatggcgcagctgctctgaccgcggatccccgtggccagccgcggtcatcgcttcaatcaccggtcaagagtaggaaccataggatgaggcgcgtggaggatgctgtgatgagttcgtgagtggtctaggtcgtcgtctcccagtcaactttgggttgctggatcgtttcctcatatgatgtaattatttaattattttgtatagaactcctgttatatagtaaagatgtgacatctngaaaaaaaaaaaaaaaaagcggcc

SEQ ID NO: 24516 - DNA, 279 bp, Zea mays
  Clone ID: MRT4577_122365C.1
ccaactgctgaacgcgtcggacacactgacgacgaaaccctacacgccgcggaccgcggcatggtgcatccgccgaccgtggccgcctccgcctagccggagcactgcggccagctcgccgccatggcctacgtgtacacccctaataaccggaaggagctactgtgcgctcaaattaatcagtacccgaccgtgtgggaccttttcacgccatgtcgagcacgagcagcatcacctgtcattcgtggagttgacgcatggagcggcagatgatccaag

SEQ ID NO: 24517 - DNA, 483 bp, Zea mays
  unsure (1)..(483): unsure at all n locations
  Clone ID: MRT4577_122366C.1
gggacctcgagccggccgggccgggaccgaactaatctatcgtggcgtggnacgacgctcacgtcgcgaacgcgaccgcgggcacctgcggaagggcagggagaactgaagaacacctgcgctcggntccgccgtcacgccacatggacatcaaggagcggatcccgcgctgcgccgccgtcgtcgccgcagctgtgggggaggcggnggngtccgcgcccggacaccccggcgggaggaaggccgggtccggtgttcccctgtcagcgcctgcggggtcacgcttgcggtggnnntcgcggnngtccccgcgcggaggaggggtgcccaatctccggcgcggatcctaccactctctccggcaacgacgatcgtggcggctttgaacaggccgggccgcgcgatggagagctgaaactacggtgtcttccaaagttcaaagggcaaactaaatgggggcttgtagctcctgggtttgatgaa

SEQ ID NO: 24518 - DNA, 395 bp, Zea mays
  Clone ID: MRT4577_122367C.1
attgtaaaacccggagtccaactgtgttttaatggaaacccaaagatgtgcacccagcctcggtgaataggaacaaggctgtattttgaaaatactaggtcgccaagatataatggatggccaaattgtctaatgtaactactagatagggatgcgccaatagcaagatgcatgtaccgtgatgcttcttgaaaagtccatgcatccagagtttgatgggcaggagcatttttggaaattcaccatgaggtcatgcaataaacagcgggatcctatttcccaaggggtcctcaaaaacaagcagggtttgaccattttgggggttgtgtgtataaacaggagcatttcaaaggctgtccaaaatattaggtccagccaagcctggaataattttt

SEQ ID NO: 24519 - DNA, 1118 bp, Zea mays
  Clone ID: MRT4577_122368C.1
cgacgcgttcgcaaagacggaaagctaccaccaaagccccgtgtgtcgagacgaggcgagatgcgatgaggtctatcttttatatatagcctgtagcgcccttcaaacacttcatcccgaagtcaccgagctgagctccaaagaatctagcagctaggagcaggccgtgtatacgccatccaccacggcaacatgtgctccggctcctggtcctggagcagctcgagcagcgacgggcgcccgtctcttgtgtcctaggcgtagaggaaccacaccaatccatcccgaatttggtggttaaactctactgcggtgacgatactgtaggggaggtcctgcggcagcctggctggacgggatctccaattaagtcgccgagctctgaagaatctagctaggagcaggccgcctacgccatcggccgtccacagcaacatgtgctccggctcctggttctggagcggcagcggcggcagcagcagcagcaaggagcgcccgtctcttgtcgtcgtcaacctcgagcggcagctaaagaagacgctgaccgtcaggagaaggaggaggaggaggttgaggctgaggaggttgcgagccggaggagcagaggccatggagatggtgaacctgaagctgtacctggagaaccggtgcatcatcgcggagaatgagaggctccgggagagggccagcgcgctccgccgcgagaacctcgcgctgctccggaacctgtcgtccaggacggcggccgtgccagagccaggagcgggagctgcgtgagtctgctgcttcgatactctgcctgcctggctgcctgctgaacatgaagtagcgcgctcgcgtcaccctcgttggtgcttgtgctacttgtgtggacaggagacaggccagtggactcgtagccctaggtatcatccatctgcttggctgctccgccatgtctctggtctgtgctcaactgctcatacataaaccgccaggttcttggagctctcttggggtgctctgcgtcatggtgtctgtacattataagtgcgcggattaactagattttgttggcaagaactaactcttttggtcatataagaacacggtcaagttaattattacattcgttctcg

SEQ ID NO: 24520 - DNA, 218 bp, Zea mays
  Clone ID: MRT4577_122369C.1
aaatcccatcccctttttgatggggtttggttggactgaaattaatgttacgggcccgctttacaacaaaaaattcccaagggcgggcaagatattaagagtcaatttgggggtttgttaataataatgtgaaactttcggttggggtagcacctgccgaaccgttttgtggaagccgccgaaatcgaaaggggcggtttttttttccggtggctttg

SEQ ID NO: 24521 - DNA, 281 bp, Zea mays
  Clone ID: MRT4577_12236C.1
caccgcccggcgtccagatttggcaattcttcgctgaagtcatcatgagcgttttccaactcctgatgaaaaggaaggaactcattcccttggtggtgttcatgactgtggcggcgggtggagcctcatctttcgctgtgtattctctttggaaaaccgatgtgatccttgatcgaaaaaaaaatccagaaccttgggaaactgtggaccctactgtacctcaaaagcttataacaatcaaccaacaatggaaacccattgaagagttgcaaagtgtccaa

SEQ ID NO: 24522 - DNA, 497 bp, Zea mays
  unsure (1)..(497): unsure at all n locations
  Clone ID: MRT4577_122370C.1
tacggtccgnattcccgggagctgagctccaaagaatctagcagctaggagcaggccgtgtatacgccatccaccacggcagaggccatggagatggtgaacctgaagctctacctggagaaccggtgcatcatcgcggagaacgagaagctgcgggagagggccagcgcgctccgccgcgagaacctcgcgctgctccaggacctgtccaagacgccggccgtgccagaggcaggagcgggagctggagctgcgtgagattattgcttcctcttgctgcctgctgagcatggagtagctagcttagcttgcgttccctcgctggcgcttgtgctagttgcgtgggcaggacagcggactcctaggtatctatctgcttggctgctccgccatgtctgtgctctgctgtctgctcatacatcaccaggctcctggagctctcttgggtgctctgtgccatggtgtttgtacattatatataagtgcgcggattaact

SEQ ID NO: 24523 - DNA, 273 bp, Zea mays
  Clone ID: MRT4577_122371C.1
cggccgctgctgtgcctcgctgctgtgcctgtctctgccggctgccgccatccgggctttgtgccttgctcccctcaccccctcgtcggaggcggaacggctgtcgtctgccccttcgcccccctcttcgatccctcaccccacccagtgctagctagctagctagcttctagtggctagtagctcccctcccctgtgggctgcaacctggggtgtgtgggggggatcgatcgctagatcaatcaatacatgacacccaccagctgggagcgc

SEQ ID NO: 24524 - DNA, 843 bp, Zea mays
  Clone ID: MRT4577_122372C.1
cattgggtccctcgaggccggccgggatcccgaagtcaccgagctgagctccaaagaatctagcagctaggagcaggccgtgtatacgccatccaccacggcaacatgtgctccggctcctggtcctggagcagcagcaagaagcgcaagcgcccgtctcttgttgtcgtcaacctcaagcggcgccagctgcagaagacgccgccgccgacgccacctcgttcctcagttgctatcaggaggaagaggctgaggctgaggaggttgcgagccggagcagaggccatggagatggtgaacctgaagctctacctggagaaccggtgcatcatcgcggagaacgagaagctgcgggagagggccagcgcgctccgccgcgagaacctcgcgctgctccaggacctgtccaagacgccggccgtgccagaggcaggagcgggagctggagctgcgtgagattattgcttcctcttgctgcctgctgagcatggagtagctagcttagcttgcgttccctcgctggcgcttgtgctagttgcgtgggcaggacagcggactcctaggtatctatctgcttggctgctccgccatgtctgtgctctgctgtctgctcatacatcaccaggctcctggagctctcttgggtgctctgtgccatggtgtttgtacattatatataagtgcgcggattaactagaaatccaaagcatgcaccaaactggacaacaaagatcaacagcaagttatgctaaaacataaacctcgactacgacgaatcgatccatttgaacttctagtacgatgattaatgaaataagatatttttgtgcagagtttcaagcg

SEQ ID NO: 24525 - DNA, 1133 bp, Zea mays
  Clone ID: MRT4577_122373C.1
cttgccggaggagctaagctagctgcctgctgccctgcctccgtctctctcgggcggctcacatgcgtcatgtcaatgtgtgcatgcaccaccaaacaaaaacctaaagctaccaccaaagccccgagagacgagacgaggcgagatgcgatgagatctatcttttatatatagcctttagcgcccttcaaacgcttcatcccgaagtcaccgagctgagctccaaagaatctagcagctaggagcaggccgtgtatacgccatccaccacggcaacatgtgctccggctcctggtcctggagcagcagcaagaagcgcaagcgcccgtctcttgttgtcgtcaacctcaagcggcgccagctgcagaagacgccgccgccgacgccacctcgttcctcagttgctatcaggaggaagaggctgagactgaggaggttgcgagccggagcagaggccatggagatggtgaacctgaagctctacctggagaaccggtgcatcatcgcggagaacgagaagctgcgggagagggccagcgcgctccgccgcgagaacctcgcgctgctccaggacctgtccaagacgccggccgtgccagaggcaggagcgggagcgggagctggagctgcgtgagattattgcttcctcttgctgcctgctgagcatggagtagctagcttcgcttgcgttccctcgctggtgcttgtgctagttgcgtgggcaggacagcggactcctaggtatctatttgcttggctgctccgccatgtcggtgctctgctgtctgctcatacatcaccaggctcctggagctctcttgggtgctctgtgccatggtgtttgtacattatatataagtgcgcggattaactagattttcaaaaactgcaccaaactggaaaacaagaacaacagcaagttatgctaaaacataaactttgactacgacgaatcgatccatctgaacgtctagtgctcagattaatgaacataaacattttcggttcttggagctctcttggggtgctctgcgtcatggtgtctgtacattataagggcgcggattaactagattttgttggcaagaactaactcttttggtcaaataagaacccggtcaagtttttttttt

SEQ ID NO: 24526 - DNA, 380 bp, Zea mays
  Clone ID: MRT4577_122374C.1
ataacacttagacaaatgtgttacaacacaaaaaccaaagtactgagtctagaaacaaaccttcgcttgggttcccacctgcttctcatttgacccgctcaagattgatgcctgtctcatgaaacattagagccctctgaactggatctacactgacatttttgagctgctacatccccgaaaggtcacatagtatatcactaaacataggaacaacccaaactaaaggacgcagtgcacttagctctgttgggctggtactaggactattctggacatttgttctcttactagggaccttggtctccttataaaaaattgggcccgagccttatgacttacaccacattactatagacattgaatcaacgcctgtaaga

SEQ ID NO: 24527 - DNA, 870 bp, Zea mays
  unsure (1)..(870): unsure at all n locations
  Clone ID: MRT4577_122375C.1
cattgggtacctcgaggccggccgggacatgcgtcatgtcaatgtgtgcatgcaccaccaaacaaaaacctaaagctaccaccaaagccccgagagacgagacgaggcgagatgagatgagatctatcttttatatatagccttaagcgccctggccggccgggatcccgaagtcaccgcgctgagctccaaagaatctagcagctaggagcaggccgtgtatacgccatccaccacggcaacatgtgctccggctcctggtcctggagcagcagcaagaagcgcccgtctcttgttgtcgtcaacctcaagcggcagcagctgcagaagacgccgccgccgacgccgcctcgtgcctcagttgctatcaggaggaagaggctgaggctgaggaggttgagagccggagcagaggccatggagatggtgaacctgaagctctacctggagaaccggtgcatcatcgcggagaacgagaggctgcgggagagggccagcgcgctccgccgcgagaacctcgcgctgctccaggacctgtccaagacgccggccgtgccagaggcaggagcgggagctggagctgcgtgagattgcttcctcttgctgcctgctgagcatggagtagctagcttagcttgcgttccctcgctggcgcttgtgctagttgcgtgggcaggacagcggactcctaggtatctatctgcttggctgctccgccatgtctgtgctctgctgtctgctcatacatcaccaggctcctggagctctcttgggtgctctgtgccatggtgtttgtacattatatataagtgcgcggattaactagatttccaaaaaaaaaaaaaaaaaaaaagcagccaacttgcngcc

SEQ ID NO: 24528 - DNA, 791 bp, Zea mays
  unsure (1)..(791): unsure at all n locations
  Clone ID: MRT4577_122376C.1
cattggtacctcgagccggcggggtccccgtagcaccgcgctgagctccaaagaatctagcagctaggagcaggccgtgtatacgccatcgaccacggcaaacatgtgctccggctcctggtcctggagcagcagcagcagcagcaagaagcgcccgtctcttgttgtcgtcaacctcaagcggcagcagctgcagaagacgccgccgccgacgccgcctcgtgcctcagttgctatcaggaggaagaggctgaggctgaggaggttgcgagccggagcagaggccatggagatggtgaacctgaagctctacctggagaaccggtgcatcatcgcggagaacgagaggctgcgggagagggccagcgcgctccgccgcgagaacctcgcgctgctcaaggacctgtccaagacgccgcccgtgccagaggcaggagcgggagctggagctgcgtgagattattgcttcatcttgctgcctgctgagcatggagtagctagcttagcttgcgttccctcgctggcgcttgtgctagttgcgtgggcaggacagcggactcctaggtatctatctgcttggctgctccgccatgtcggtgctctgctctctgctcatacatcaccaggctcctggagctctcttgggtgctctggtgccatggtgtttgtacttatatataagtgcgcggattaactagatttccaaagcctgcaccaaactggacaacaagatcaacagcaagttatgctaaaacataaacctcgactaaaaaaaaaaaaaaaaagcggnc

SEQ ID NO: 24529 - DNA, 1554 bp, Zea mays
  Clone ID: MRT4577_122377C.1
cccagcgtccggaaacacatgcaggatctgcgcatcgccatggatagcgagtctgagaagagtgtgaggagggtgagtgggaagggggcacgagggaagcagcatgggaatgagtttgttgacctgcacaccatgcttatccattgcgcacaggcaatggccaccggtgatcgccgaagtgcaaccgagatgctgaaacagatcaagcagcactcctctctcaggggggatgccacacagaggttggcctattgttttgcagaaggactggaggtgcgacttgctggcacagggagccaggtgtaccagtccctcatggcaaaacgcacatccgttgtggagttcctcaaggcatacaagctatttttggcggccatcagcctcaataaggtgcatatcatcttctccaatgggaacatcgtggatgccgtggcagggaggagcaagttgcacattgtagcatatggtgtacagtatggtttacagtggccaggcttgctacatttcctggcaggtagagaaggtgggcctccagaggtgagattcaccggcattgaccttccacagccagggttccgcccagcctaccagattgaagaaacaggccgccggcttagcaactgtgcccgtgaattcggtgtgccattcaagttccatgctatagcagcaaagtgggagatggtctctgccgaggacctgaacattgatccagatgaggtgcttgttgtgaacagcgattgccacttgagcaacttgatggatgagggtgttgacgctgacaccccaagcccccgagatttggtgcttaacaacattcggaagatgcgacctgatattttcatccagattgtcaatagtggcacatatggtgctccattcttcctcacacggttccgggaggcactgttctactactcagcactatttgacatgctggatgcaaccattccccgggataatgatgaacggctgctgatcgagcgggatattgttgggcgatctgccctgaatgttattgcttgtgagggtgcagacaggttggatcgccctgagacttataagcaatggcaggtgcggaaccaccgggctgggctcaagcagctaccgttgaatccagaggttgtaaagcttgccagggataaggtcaagaaatattaccacaaagactttctcatcgatgaggatcgccaatggttgttgcagggatggaaagggcgggtcctctttgccatgtcaacttgggttgctgaggataataactccaccttttagctgcttcactttgtcttgttttggattatgagtgatattgatgtttgatggatggtctgtgtctttattttaccaccaaactacgacccagcatctgtggcccgctggacttctgtttctagagggttttagtgctgaaactttgtaagctagtagaaaaataagtagatgcttagaggtacataggatgctgatatatttctggatatgttgcagaattgtgatgtgtacatcatctgtaactgataaaagcaattttattgattacttaatcgacctttt

SEQ ID NO: 24530 - DNA, 3573 bp, Zea mays
  Clone ID: MRT4577_122378C.1
cgggtacaggttacactacaagtttaaaggtcatttgagccttcttcgttcaacatgctggtcacatggcaacctaactacatgggatttgacacctctgcaaaccaccatggttatactgatgcaaatggtgttgcgagcactcaaggctttgtcccaatgcaaaccacataccagggacagacacaagcaattgcaaactcacaagtgcacctgtcaaatagctatttgggtattgacaactccatgaactttaatcagcaacaatttctgggtgcaaatgcctcaaatttgcaattcggtcactccccacatgaaggtaggtcatcggctggacgaccaccacatgccctcgtttcttttgggtttggagggaagctcatagttatgaaagaaactacctccatgcccgcaagctttaacagtggaattcagggtaactctagtagcacagtgtcagttcttaatctgttggaggtggtctttgataaaattgattcttcaagcatcactaatggtagtgcacttagttatttccatgctctgtgccgccaaccagttcctggtcctctggttggtggaagtgctgcatcaaaggatgtaaataagtggattgatgaaatgattgcatggtacgattcttcctctagtgaactccatagaggtgatactcgcaagttgcttatttcattgctgaagatactgtctcagcactatggaaaactgcgttcaccttttgcgtctgacccatcgcaagaggagacagatggtccagaaatggcagtaactaagctattttcatcgtgtaagagaagcactgttcatatgggagattatggatccctagttccctgcatgaaaagtattccttcagaaagtcagatgcaggctgttgcacaagaggtccaaagtcttctagtttctgggagaagaaaagaggcccttcactgtgcacaggcaggtcaactttggggacctgcaatcatactggcattgcagcttggtgataagttttatgtggatacagtgaagaaaatggcccacttccattttgtatctgggtcccctctgcgaacgctatgccttctcatcgctggacaacctgcagatgtttttaatgtagagaacaatgtcaacagtgactatggtgcatcccatcaacctatggagcctggtcctaatggtatgttggatgattgggaggagaatttggctattattactgcaaacagaacgaaaggtgacgtcctagtaatcacccatcttggtgactgtctctggaaagaaaaaaatgagattgcagctgctcattcgtgctatttagttgctgaactaaatattgattcatactcggaaagcgcaaggttatgcctcattggtgcagatcacttgaagtgtcctcgaacatttgccagccctgaagccattcagaggacagaggtttatgaatatgcgaaggtgcttggtaattctcaatatatcctactaccctttcagccatataagctgatatatgcatacatgcttgtggaagtggggaaagtttctgattctttgaggtattgccaagcgtctataaaggtactgaaagcctctggtcgtgcccctgaattggaggtgtggaaacaattattttcttcgctggaggagaggatacgcactcaccagcagggtggatatggcacaaatcttgccccaggaaaaatagttgggaagatttttacctcgcttgataaatctatatcccgcatgatgggtacaccatctgcaccacttccaccgttgccacatggatcttttagtgataaagagagccactctatacctgcggcagcaaaatttgttaatagccaatcggtaatggtcatgccatcgttaataccatctgcttcaatgcagtcaatgactgagatagcagaggatagtggtggcactggcaggaaaattgcacacaacagaagtgtttctgagccggactttggtagatcatccaaacagggtgctggtggatcagatggtacacagagcagtgcatcaggatccagcagttctcgatttggttggctagtgcagaagactatgggattagtgtcaaaatcccaccgccaggcaaaattaggggatcagaacaaattttactatgatgaaaaattgaagcggtgggtggaggaaggtgctgctgttcctgccgaagagcctcctcttcctccacctccaacaaaaccatctttccagaatggtatgctagacaataagttgaatggccccatgagcgtaagccatgctcccaatggagtcacagaatggaaatcctcaaattcttcagagcaaggtctgggtatgccgccaattccacctagccaaaaccagttttctgctcgtggacggatgggtgtccggtccagatatgttgacacattcaatagatcaggtgcatctggtgcaatgccatcatataacaaaccagctgctccatctatgacaccaccagctggtgccaagttcttcatgccaactgcagcacctgttgccgcggatcagatgataccacaccaagcagcagagatacacagtgaaaccatccatcaggatgagcggtcagcctcaccgccagcagaaacatcattttcttcaaccccaccacccacgcaatttccatcaccagtgcaatcaacaatttatcggcaatctagtatggagaacatctccaccccttaccagggttccggggtatcgtcattaagcaacgacagctcattctcaaaatctcgagccgcgtcctggagtgggacatactctgagcagtttaatgcttttgcgggcactatatcgcctgacagacagacgacgcattcaccactgatgcctggcaaaccaccacacagccgttccaacagcaactcatcagggcatctcaatggattggcagaggatcttcatgaggtcgagctgtaactggcgactggtcagcatgaccgtcgcaactcgtgtcttaaaggcagcgatgacaacccctccccaagcaggtgacagaaaagaaggtgcccttaaaatgctgaccacggggatgccgcagctggaatgggcttggtgtgactttgcacgagattctggggcgcgctctaaaccaccgaggtgcgtcaggcctgtactaatagagatgcagggtttttttttgtagccatatatacatatatgttggttttgtgttttagagagaagggaaagggttgggtgggcctttgtttacaggtgggaagggaagagaagcagcatgcagatgcccttgtacagataatctgcccctacccagtttgtttaaaacgcaaacaacgccattttggttttagttccctggagaaggatagaggagaaggtgtgtgtctttgtagtgtgagaagcatggctctgtagtgttgttgttatagtgtactactactgtgctagccagccgcatacacagactgtttattctttggagacgaatcaattctttcatcttgatctagggcattattatttgttaacataatgctgcatcttgttatgtacgtaaaagtcaagagaaggtac

SEQ ID NO: 24531 - DNA, 810 bp, Zea mays
  unsure (1)..(810): unsure at all n locations
  Clone ID: MRT4577_122379C.1
ccggccgggatcccgaagtcaccgcgctgagctccaaagaatctagcagctagaagcaggccgtgtatacgccatccaccacggcaacatgtgctccggctcctggtcctggagcagcagcaagaagcgcccgtctcttgtcgtcgtcaacctcaagcggcagcagctgcagaagacgccgccgccgacgccgcctcgtgcctcagttgctatcaggaggaagaggctgaggctgaggaggttgcgagccggagcagaggccatggagatggtgaacctgaagctctacctggagaaccggtgcatcatcgcggagaacgagaggctgcgggagagggccagcgcgctccgccgcgagaacctcgctctgctccaggacctgtccaagacgccgcccgtgccagaggcaggagcgggagctgcgtgagattgcttcctcttgctgagtgctgagcatggagtagctagcttagcttgcggttccctcgctggcgcttgtgctagttgcgtgggcaggacagcggactcctaggtatctatctgcttggctgctccgccatgtctgtgctctgctgtctgctcatacatcaccaggcttctggagctctcttgggtgctctgtgccatggtgtttgtacattatatataagtgcgcggattaataaaaaaaaaaaagacagcaccaaactggacagcaagatcaacagcaagttatgctaaaacataaaccctcgactacgacgaatcgatcccatctgacttctagtacatgattaatggaataagatgaaantctgcagagtttcagct

SEQ ID NO: 24532 - DNA, 367 bp, Zea mays
  Clone ID: MRT4577_12237C.1
atattaacatttttgccgcctgagttctttttaattttttatggtaatttttttattttttcctatctcaaaaccccacctttattattcgcttttttaaaaattacaaaaaaccctctttttttgtttttcaccaccccaaaaattcacacaatttggtttttttacaaaaacacctctctttaatttcccaccacctgaaaaacatccccaattttccctccccaattttttaatgttaaaaaagggccatgcttaggaatccttttatatctttttcggaaaattcaaaaagggaaaatcctttaatttttcttgaacttacattcaaactgttttaattcttctgctcaccaaaaaaaaataa

SEQ ID NO: 24533 - DNA, 624 bp, Zea mays
  Clone ID: MRT4577_122380C.1
accgcgctgagctccaaagaatctagcagctaggagcaggccgtgtatacgccatccaccacggcaacatgtgctccggctcctggtcctggagcagcagcaagaagcgcccgtctcttgttgtcgtcaacctcaagcggcagcagctgcagaagacgccgccgccgacgccgcctcgtgcctcagttgctatcaggaggaagaggtacccagctaacccgccctgctcgagtttcccaagcttcctctgctcaagtttcagcagcatcagcgacagtttcctgcaatcacacaagtacactgtacacgtacgcaggctgaggctgaggaggttgagagccggagcagaggccatggagatggtgaacctgaagctctacctggagaaccggtgcatcatcgcggagaacgagaggctgcgggagagggccagcgcgctccgccgcgagaacctcgcgctgctccaggacctgtccaagacgccggccgtgccagaggcaggagcgggagctggagctgcgtgagattgcttcctcttgctgcctgctgagcatggagtagctagcttagcttgcgttccctcgctggcgcttgtgctagttgcgtgggcaggacagcggactc

SEQ ID NO: 24534 - DNA, 202 bp, Zea mays
  Clone ID: MRT4577_122381C.1
gggaaacaaacaggacttagtctgtaatgctacctgtttaccgtcatgggcagatatgaccctaaacttggttgaatttgctgtcataccgttttttatgtttttgtatataagttgatagatttctgactatctaaattagtcccttgcgacttttaataagtgaacctgtgtttttgagatttaccttgtaaagtggaag

SEQ ID NO: 24535 - DNA, 576 bp, Zea mays
  unsure (1)..(576): unsure at all n locations
  Clone ID: MRT4577_122382C.1
ggcggggggggcgggggggggcggncngnncgcnaaaccggggcggccggancgcccaccgccagaanccagcngggcnccncnacaaaagcgccgggaggaccngccgacnncgccgcccataggcggcgccactccggngncccgcgccngcgccgcaccaggggggactctacttctctttttttaggncaggcaaagacncnccnggaacnganncgcgaggcaccacagaccgcccccgccagngcaagagaanngcagagaaaaggagggcagcacaacnaccccccgccaaaccggccagnggccacggcccaccaggcacnccaaggacaagacgcgggaagacaccccgnggcgaaagngcaagcncncagagaaagaaggncgcnnaccggaggcccgaaacgcgggcgcganncganggcgcngcgaacgcccgccgagccggaccaaggcgcaccaagganaccnnacaggacccccacccggagaacnccnngcnnganggagaagaaaanggngcagccaccgnagccagcaaagagcaggggacngacactacagcngaaa

SEQ ID NO: 24536 - DNA, 808 bp, Zea mays
  unsure (1)..(808): unsure at all n locations
  Clone ID: MRT4577_122383C.1
cattgggtacctcgaggccggccgggtcccgaagtcaccgagctgagctccaaagaatctagcagctaggagcaggccgtgtatacgccatccaccacggcaacatgtgctccggctcctggtcctggagcagcagcagcagcaagaagcgcccgtctcttgttgtcgtcaacctcaagcggcagcagctgcagaagacgccgccgccgacgccgcctcgtgcctcagttgctatcaggaggaagaggtacccagctaacccgccctgctcgagtttcccaagcttcctctgctcaagtttcagcagcatcagcgacagtttcctgcaatcacacaagtacactgtacacgtacgtacgcaggctgaggctgaggaggttgcgagccggagcagaggccatggagatggtgaacctgaagctctacctggagaaccggtgcatcatcgcggagaacgagaggctgcgggagagggccagcgcgctccgccgcgagaacctcgcgctgctccgggacctgtccaagacgccgcccgtgccagaggcaggagcgggagctgcgtgagattgcttcctcttgctgagtgctgagcatggagtagctagcttagcttgcggttccctcgctggcgcttgtgctagttgcgtgggcaggacagcggactcctaggtatctatctgcttggctgctccgccatgtctgtgctctgctgtctgctcatacatcaccaggctcctggagctctcttgggtgctctngtgcatggtgtttgtacattatatataagtgcgcggattaactagatttc

SEQ ID NO: 24537 - DNA, 444 bp, Zea mays
  Clone ID: MRT4577_122384C.1
ggtgttgggcttttttttttttttttctttttttttgttttttgtttacacacagaggatttttttaaacacaaaaggggccctgtttaacccccaatgtggcccacaccgacctgtttttttaaaacccaccccgtttgtccccccttttttactgggggggtgccgcaaaaaaaatttgacccccccaacaaacaaattgccgaatggaacgccaacccaccccaatcgaacaggaagcccccctcggaatgactcgcccccaaaaccttaaaggggggacccctttaccttaacccagaaaactatacgcggggggtaaaggtattaccgcccccctactatgtgaagccccccggggatctcttgacccccccccggaaaaatttgaaaaacccccgggtttctttttaaaataccccccggagggcctttccccccccc

SEQ ID NO: 24538 - DNA, 355 bp, Zea mays
  Clone ID: MRT4577_122385C.1
caccttctccaatctcctcaacggcctactcaaaaaaactttctatctctccgtcctctacaactcctttttctctctcgtcgtcttctacccacacgtcaatctctactaattcgccatcggaattccccataaaacaatttaactttatagaacgtacacaaattataatgtcagcaacaatacatcacatcagtacattgagcaattaaaatcttatgcttaggtcctgtcaaataaactttaatcactttaatcttacaaaagaaaacttttgggtgagaggttataaaaattctcctttgaacaactgcaccatttttaatttaaactctaaaaaaaccttcattgcatc

SEQ ID NO: 24539 - DNA, 1356 bp, Zea mays
  unsure (1)..(1356): unsure at all n locations
  Clone ID: MRT4577_122386C.1
ggtaccctacgcggtctcgtgcccgggatgcctcatcttngacggagccttccaagctagccacttcactggtcactccattagcagatgcgctctgcatcttctcccctctggaacacactcccacacagaactagagctccaaggccatggagaaatggagaagacgcaggcacttgctgcttgctgttgcagccgtggccctggtggcagcaataacgctgccgtccgcggaggcgaagctgtccccggactactaccggtcgacgtgcccggacgtggaggcaatcgtgcaggcagtggtggccaagaaggtgaatgagaccttcgtcacagtcccggccacgctcaggctcttcttccacgactgcttcgtcgagggctgtgatgcgtcggtcatcatcgcgtcccgcgacaacgacgccgagaaggacgcgcccgacaacgtgtccctcgctggcgacggcttcgacaccgtggtgcgcgccaaggccgaggtcgagaagaagtgccccggcgtggtctcctgcgccgatatcctcgccatcgccgccagggacgtcgtcaccatgtcgtccggcccccactggaccgtccagcttggccggcttgacgggctcgtctccaaggccggcaacgtcgcgggcaagttgccgggacccaacatgcgcgtcaaggacctcgccgccctgttcgccaagcacaacctcaccacgctcgacatggtcgcgctctcgggagcgcacaccgtcgggttcgcgcactgcacccgcttcgcggaccgcctctaccaccacggcgtcggcgacagcgatggcgcgtcggtggacccgtcgtacaaccctgcgtacgcgcggcagctaatggacgcctgcccgcctggcgtcggcgcagacatcgccgtcaatatggacccaatcacaccgaccgccttcgataacgcctactacgccaacctcgccggcggcctgggattgttcacctcggaccaggcgctgtacagcgacggcgcgtcgcaaccggcggtgagggacttcgctaagaaccagacccgcttcttcgaggcgttcaaggacgccatggtcaagctgggcagtgttggggtgaagaccggccggcacggggagatcaggagtgactgcactgcattcaactagtagatcgaccacccattcttttgaagaaaaaaaaaacagccgggtacctgagcgaactcaaccacgtccacgtgacagcacagaactcaatccttagagctaggatgaaaacggacgaaatcggtctaaaaaaccgctctcccgtttttatttttatattttatttcaggacagaaacgaactgttagaaccccggtcg

SEQ ID NO: 24540 - DNA, 436 bp, Zea mays
  Clone ID: MRT4577_122387C.1
ggaaacaaaattaacggccgggaaaaaaaaaccaaggggagggggggaacaaaaaatttttttttaaaaaaaaaaggaccccaaaaagcttaaccaaaacccaaacaaggaagggaacccaagggaaaaaaaaaaaacaaaaaaaccccggccccggcccggcaaaaaaaacttttttggcctgggcaaggccaaggagggcgccaaaaagcttggcttggggcttccccccccaaaaggggggggccccccaattcgggaccaaaaagttatcctgccccgaaaggccaaacatgcccggggaaagcccgttcgggccggggaaccaaaacatccccgccgccccaaggttattggaatagggggcaggggccacaaaaagagggtggatggcccctgccaaacgacccccccccccttactttggttggggggg

SEQ ID NO: 24541 - DNA, 840 bp, Zea mays
  Clone ID: MRT4577_122388C.1
tcctcccaaccctagcgccggcgcctccacttctctgctccctcctctcctcgcgcgcagggcccggcgaaagggaagcaagatgtacaccgccaggaagaagatccagaaggacaagggcgtcgagccctccgagttcgaggacaccgtcgcgcaggctttctttgacctggagaatggcaaccaggagctcaagagcgacctcaaggacctgtacatcaacactgcaatccagatggatgttgttggcaacaggaaggccgtggtgatccatgtgccgtaccgtctgcgcaagcccttcaggaagatccatgtcaggctcgtcagggagctggagaagaagtttagcggcaaggatgtggtctttgttgcaacaagaaggattgtgaggccacccaagaagggttctgctgttcagcgccctcgcaccaggaccctgacagctgttcatgatggtatcttggaggatgtcgtgtacccagctgagattgtggggaagcgtgtcagataccgtttggatggtgccaaggtcatcaagatctacttggacccaaaggagcgcaacaacactgaatacaagctggagaccttctctgcagtctaccgcaggctttgtgggaaagacgttgtctttgagtaccctgtgactgaaaccgcctgaagatccatgccttgaatgtctccattttcatatctttctgatccaaatgttttggttgaggtcttggttagttgtgctatcaatgtattccagaaacatagttttgttaactatctgggggttaggaagtttgatgaagatggcaatgaacgtgaaccatgttaaagttttgagcattt

SEQ ID NO: 24542 - DNA, 868 bp, Zea mays
  Clone ID: MRT4577_122389C.1
cttgcgctcccgtaggcccctctcgccccagcaccgcagccgccgagccaagcgactcgcctaaagaaactgccaattcaatacgacgactaatctcgcgaccgccgccgccgccgccgccgccgccgggttcttcatccgcagggacagagttcttcatctccgcaccaatacttttctcctttgattgatttctagagtttaatccgaggcgctcgtcgtgtggtgggttgcgccctaagacctcgcccggaaggtcaggaggtttaatctagctgaagggttcttcccgccgctgctcgtcgtccccattgcggccttgccgccggcctgcaaccgacggcaggcaggccgggccttcatcctcctcccaatcaccaggaggagtcgcccctcatcgtcctctcccttatactgcacggattcgtttggctcttggtggtgccctgctaatgcaatcgagtaatctcatctagtctaggctttccatccgcggtttaggttcttcctttcaagcgcgcacaagcatccacccaggtacgggctggtgcagtttttcttccctgtcccctcatgccctacgggaggtccacccctggcccggcctctcaagcgtggctggtgggtggacgttgagtggtgcctgcagagccatggatcaggacacaccgacattgaagccgggatggatgcagcatgacaaggcagcaggcgctccaaacatctggactatagcttcctcccactcagattatcaagctgcgggtggttcgtcaagaagccattcatctgaacattaccgtaaccatggttccccagcatcatcatcaagggagagttcaggctcgaatggatctcgccagcctga

SEQ ID NO: 24543 - DNA, 1447 bp, Zea mays
  unsure (1)..(1447): unsure at all n locations
  Clone ID: MRT4577_12238C.1
agttctctctctccgtatctcgcttcgccaccgccggcgagaggtagggtttcgtgcgccaccgtcacttccgcccgccatggccgagacctccacgtatcagattctggtgcgtctcctcgacgggcgtaccagatgtctccgcttctccacgcccaccgtttccggcgccgtgctcctcgacgccgtcgcgtcgatctctcgcgttcccgccgccgctctccgcctcgtcaccggcggcatcgacgtatcgccctcttccgtcctcgccgcagcagctgatggccagttcccctactcgtcagcgctcctccgccttcgaggaagccgccgaccgccagctagaaaagctcgccgagaacttcatcaaaaagaaggccaaggaagcgggccgcggcggcggaccctcaaccgctgaggtggacaaatatctagagaagtaccgcaaggatgctgagatctgcgtcaacgcggttgaggaatccgtacgtgcatcccttggaaagaggaagaccgcacctaagctgccctctggcgcagacgctaagaagcttaagatttggttaggaaagaacaaagtagaagaagatgaaagtgatagtgacagtgatgtggatgatgaggacagtgaagatcttgagagcgcagatgcaaaatctgtagtagttgatgaagggaattactcaaatggatccagaaaaaatgaggagaagcttgatcttggttctgtttctgggtcatcacattcagaaggagagtcttcaggagaaaagtcccaactgacaacaagttcaggagctgaaggtggtgactttgaatctggtgatagtgcagagcttgaggtaggaatgttggatcatcccatttctgttgctgctgcttcagaagaagtgacagcagatgaggataacactgctttagctacttcaaaccaaaataatccagaggtaccacaagttgaagaagtgcggaaagcagacaaggataacactgcttcagctacttcaaaccaaaacaatcaagaggtgccacaagtagaacaacatgttggcatcagcaactcttattcagagccgttggaccttgcaaagtacagttcatctgcagaattggaggtgcttggtctggagaagctaaaaatagagctgcaatctcgcggattaaaatgtggtggaactttacaggagcgtgctgcccgactcttccttctgaagacaactccattggacaagttaccaaagaagctgcttgcaaagactaatgggcggaagtgagaagttgtaccaatatatataaagaagtaccaatgatgcaacgtttaagattttctttgtcaatatatggaaatctgttgtggtgttgctgcccgactcttccttctgnaagacactccatttggacagtaccaagaagctgcttgcaaggctaatggggggaagtgagaagt

SEQ ID NO: 24544 - DNA, 349 bp, Zea mays
  Clone ID: MRT4577_122390C.1
attcggctcgagctgagcttgactgggaacttttcagaagaggttgcacagcctcatggagccgggacacgaatgcattcccttgcagacaatggtaggtgcaaacgaaataaacccatggacccctgcggtgctcccgtgctaccagccttcagtccaaaccggggccagttgctagacctacgaacacaggccacttctgtgattctttgagttcagctcgggctggatgagaacctccagggcggcgacctcgtgtcatgaggcgacacctagcgcaccagcgcctcactagacgatgttagcataagcacatttcacgtgcgggggccaatcctttacgacatcc

SEQ ID NO: 24545 - DNA, 430 bp, Zea mays
  Clone ID: MRT4577_122391C.1
ggggacacaagggaatgcattgattcatcactggttgggtcattttttacaaaccacccagtcccaaggggaggttttctaattaaacggattttcctttaaaaaaggacgaactttggattcttttttttccccttattaaaaaaacagacccccccccaagggttttttccttccccagcttattaaaaatcgtgtttatttaatccaaaaaaactttccgttcaatgaacggggcgaaaaaatgggggctttaaaagaaccttccaaactttttaaaaatgttatgtggaaccggtcccttaaaggggggggcccattttttaaccggcccctttccgggggggggggcttcaccgggaaaccccggaaagggaccattgggaggggcccctgttttattttccccaggtgtaggcgcttttttttt

SEQ ID NO: 24546 - DNA, 269 bp, Zea mays
  Clone ID: MRT4577_122392C.1
agagcagcggggtccattttcctaagagggaaccaactgcaattaatcgcatgctttaacatggtgattaacacttaaagcattttaaactttcatacaaatgcggaattatcccccaattttgtttgaatttcggtgtaccaactgggaggagagaagcttatataaataaccgcttcacatttttcatgccaggtttttgctttaaaacttgtctatggggataccatttttgacgacctcataggcatcacgggtccgaatgtttt

SEQ ID NO: 24547 - DNA, 415 bp, Zea mays
  Clone ID: MRT4577_122393C.1
ggggaaacaaccccaccccttttcccaattttcccagaccccgggaaaaaccttttacggggtccccatcccatgggggggctaaaaaaacccaaaaactaccccctagaaagggaaaaagggctcccgggaaacaacaggggccagggaaccattcggggggggcccaagaggagggaaggggttctggggacaggccttttcccccggggggggggcccggaaaaaggggggcccgggagcagggaaaaacatggggccccccccttcacttttgaagaaggggggggggaccccccctcccccaaaaaaaaggctagccccaacccaaattcgttagggggaggggggggggggcataaggggcgcgccccgcgtaaaggcacccgcaaaaagggggcacacaaaacccagg

SEQ ID NO: 24548 - DNA, 371 bp, Zea mays
  Clone ID: MRT4577_122394C.1
gttgaattgaatctgaactgaactcgcgcgcgagcgaacgtgccgacaggtccggcgttgaccagtcgaatcgggacacatgctgcctggattgtattatcaggctcaggcagacgcgttaagtagctctcaggatctcaaactgacgctgacactgacactgacgcttatctttgctggctgactctgttaccggcctgatccggtcgacgcgcactgacactgcaggttcatcgacaagtacgggacgcacgtggtggtggggctgagcgtgggcgggcaggacgtggtctacgtcaagcaggacggctcgtcggcgctgccgccggcggagatcaaggagcatctggacaggctcggggaccagctct

SEQ ID NO: 24549 - DNA, 1148 bp, Zea mays
  Clone ID: MRT4577_122395C.1
gggtaccctcgaggccggccggggcaaagcgcgcgcccggacggcccggttcgttctcgacctctcgtctcgctcatccgcccgccccccgaggaaggaaccctagcctagccttgctccgaccggtcgccgcggcgactgcgacgatgatggactgcgctggaggccgagaccccgtggaggacttcctcctcggcggcgccggcgccggcgacgacggagatctcgtcgccgtcttctgcgacgacggaggacttgggattgagggtatccatggagatgcttgtggatttgagcaatctaatttggggaaaaggggtagagatgaaccatgttcatctggcccaacatccaaagcttgtcgtgaaaaaatgaggagggacaagctgaatgacaggttcctggaattaagttcagttatgagtcctggtaaggaagcaaagttagataaagcaaatatattgagtgatgcagcccgtatggtggcacaacttagaggtgaggcagaaaagcttaaggaatcaaatgagaagctgcgggagaatatcaaggatctgaaggaggagaagaacgagctccgtgaagagaaagtgagactaaaggtagaaaaggataggctggagcagcaagtcaaagctatgagtgtagctcctacaggatatgtaccccatctccctcatccagcttcataccatcctgctgcgttcactccatttgcgccgcctccagccaacaaaagtgctccaatcccagcaccgttccctgggatggcgatgtggcagtggttgcctccgaccatcgtggacacaactcaagatccaaagctctggcccccaaatgcttaggggcagctaccttggaatgttgactcattgtgccttttcatgcatttggtgggcaaatcagtgccagttaggtccctggagactggagaggaatcaagttcgcaactcgcgccatgtttatgctgtaacagctggtttccagcactagttatgaacttactttgttctactgaagggtggtgcctgtaattaatatatggatcttaaccctctagttggcatgtatatcatttgttctattcgagagctgcattttaaggaccaaaaaaaaaaaataaaaaaaaaaaaaaaaaaaggccccta

SEQ ID NO: 24550 - DNA, 304 bp, Zea mays
  Clone ID: MRT4577_122396C.1
gggaaattgaaaaacaatggtcttcaatataattttttttttaaacaaagcgcaaaacaacaaccccccgcttaatttatataaatctctccacaacattaatctattttcaataattacaatcatttcattcttcctctttgcccccctaaccttacttacataatcttttaaacttattccaacacactttacattcttctacttttaactttaaacagatatacacaaactcatttattccttcatgcttctttcattcataccaacacctgtcatacattatcctctccattgtattccc

SEQ ID NO: 24551 - DNA, 1718 bp, Zea mays
  Clone ID: MRT4577_122397C.1
aattcggcacgaggctagccttgccccgaccgcggattccccctcggccgccgcgcgcccgcacccgcgatgatgaactgcgacggaggcggagaccccgtggaggacttcctgatctccggcgccgtcgacgacgaagatctagccatcttctgcgacggagggtacggcgatgccgaccggaacagtcctttcccgtagtatatatgtagactgcgtttctgtttatggcgcggcgcacctaggtcgttttcgctgcagattgctttttgggcttgttaaaaaatttgtgggcggtggtagactaattattcgatttggctgacgtatagcgtctaaaaactattcgcatattatatttcgtttttttgtcaaaaggaaaggacgaaggcttatgcatctgacagtcgagtctgcaattctgtaacctttgatatctgcatctgaagttcagatatttgagagatttgcagtactagttggttcaggaactaatacctgtacgaaatgtttttactggttcaccaacacacacttactgctgctgtgatcatgtacaaactgtaccttgaagcaattggagtttgtatgctagctggtataaccttttccgctgatcaatcatgcattatagtataataatatatcgattcaagtgatttgcattatcatgatcatagacatttgattcttatcttctgactggaatgcaagcatgaagcagcacaatgatttattagatatttgagaagctattctgcacgtgcatttcctttcctgttgtggcatttgttcggtacttactttgcaattgtagcagacttgggattgagggtgtcaatggagatgcttgtggatttgagcagtctaatttgggcaaaaggagtagagatgaaccatgttcatctggtctaaaatccaaagcttgtcgtgaaaaaatgaggagggacaagctgaatgacaggttcctggaattaagttcggttatgaatcctggaaaacaagcaaagttggataaagccaatatcttgagcgacgcagcccgtatggtggcacaacttagaggtgaggcagaaaagcttaaagaatcaaatgagaagctgcgggagaatatcaaggacctgaaggaggagaagaatgagctccgcgaagagaaagtgaggctgaaggtagagaaagataggctggagcagcaagtcaaagccatgagtgtagctcctacaggatatgttccccatctccctcatccagcttcataccacccggctgcatttgctccatttgtgccgccacagcaagctgcaggcaacaaaagtgctccaatccctgcacctttccctgggatggcaatgtggcagtggctgcctccgaccatcgtggacacaactcaagacccaaagctctggccgcctaatgcttaggggcagctagctgccttggggtgttgactcgccaatcgccatgccgtttcatgcattgggcggcagatcagagtatcagttagtaggtccctggagaggaggaatcaagtttcgcaactcgcgtcatgtttatgctgtaacagttgcttccagcagtcgtcatcaacttgctttgttctattgaagggtgatgcatgtaattaatatgtggatcttaaccctctagctggcaaatgtgtcctttgctgcctaaaaaaaaaaaaaaaaaaaaaaaaaaaaaaaaaaaaaaaaactcga

SEQ ID NO: 24552 - DNA, 624 bp, Zea mays
  unsure (1)..(624): unsure at all n locations
  Clone ID: MRT4577_122398C.1
cgaggagactcccgcggccgagctttaggcagcgcgccgaggaggaggctgctcctcctgctgatgccgaggagcccgccgcggccgagcctgtcgccgaggcagaggctcgctgctctcgaggagctcgacgaggacgaaccggaggctcctgctcctgctggtccccaggagccggccgccgaggcggagtctgctgctccggaggagcccgagaaggccgtcgattgaacccgngcgcacgcagcggcggcggccagggcgcaggggatcaccatgcgcgcgtgacggtgaagtcgctcgcgcgcgtacatggcagcatgacacgggatttagctggtcagacgctacgggtactggcgtctctctctgtgcgcgtgtgtcgtacggagcccggtacgtatctagcagtgactgccgagtggacttgcccggtgcggcctgcgagtgacgagggctaaatacagcgcgcgtcagctggcaacggggggggggcccggggtcagtggcgcggagccccatgcctgccgcgggtgcaacttgatgtgccttgtgtgggctggctcctgcactttctgtctatctatcctcacgcatggcagtgccgcgtatggtatgtggcat

SEQ ID NO: 24553 - DNA, 333 bp, Zea mays
  Clone ID: MRT4577_122399C.1
agcattcataaacacaccaggtttatcgcactaccaacaacctaacaccaatgggtaccaagatattatccctccttgcgcttcttgcccttttagtgagcgcaacaaatgcgctcattattccacagtgctcacttgctcctaatgccattatttcacaaatactcccaccagatacttcaatgggcttcgaacatacaaccgtgcaagcctacacgataccaattagggctggcggaaagggtttaaaacaaccaaatgcccaatttgaacaacaattcctggcccaatttaaacttcaaaccattggcaccccaccaggaccacaatttt

SEQ ID NO: 24554 - DNA, 655 bp, Zea mays
  Clone ID: MRT4577_12239C.1
gttctctctctctctctctctccgtatctcgcttcgccaccgccggcgagagctagggtttcgtgcgccaccgtcacttccgcccgccatggccgagacctccacgtatcagattctggtgcgtctcctcgacgggcgtaccagatgtctccgcttctccacgcccaccgtttccggcgccgtgctcctcgacgccgtcgcgtcgatctctcgcgttcccgccgccgctctccgcctcgtcaccggcggcatcgacgtatcgccctcttccgtcctcgcctcagcagctgatggccagttcccctatgcgtcagcgctcctccgccttcgaggaggcaagggtggattcggctccctcctcagaggggctgcctccaaagcgggtcagaagaagaccagcaactttgacgcctcgaggaatggaaggccgaagccgccgaccgccagctagaaaagctcgccgagaacttcatcaagaagaaggccaaggaagcgggccgcggtggcggaccctcaaccgctgaggtggacaaatatctagagaagtaccgcaaggatgctgagatctgcgtcaacgtggttgaggaatccgtgcgtgcatcacttggaaagaggaagaccgcacctaagctgccctctggcgcagacgctaaga

SEQ ID NO: 24555 - DNA, 258 bp, Zea mays
  Clone ID: MRT4577_1223C.1
gtaagctcggaattcggctcttggggttgccgagccgcctactttacagtcgagcgcccagcttggtcgtgggggtgttttcactgatcggggcggcgtgcgccgccccggagtcttgaaacagccaagagcctgctcgcatagcacctgaccagggtcggtacaaacacgaccgtcggcgccacacgacatacaggccacgaggtgcttacccagttcggtgaagtgcaccaaattcctgggtgatgtatgataccc

SEQ ID NO: 24556 - DNA, 579 bp, Zea mays
  unsure (1)..(579): unsure at all n locations
  Clone ID: MRT4577_122400C.1
cccccttgcgagttttttttttttttttttttttttttattttttttttttttttttttctcttttttttttttttgtctttttttttttttctttttttctttttcctttttttttctttttttgtttttttctttgttttttgtttcaggctacagactattgggttcacaatactactcgctttttacatcttgcctaaattatgccgccttaaccaggttacggagacgcattacggcctgtttatttatcccgaatttcccccaagaatcgttccaactgaaaaaaaattatataattttttttaacaaaacgaccagtattcgttccacacgaccattcccgaaaaaaacgaacatgcccatggagagcaagaacataaattcatatttttttctgggactgaacatccttgggggccccatctccaggggaatacaccgaggaatctggtatcaggccttggttttggttaccatcagggccctgggggnggtagctaccaacagggggtttaagtgatgaggcattgttgaagacacagccgggtggccgatgactggtggaaaagtagca

SEQ ID NO: 24557 - DNA, 557 bp, Zea mays
  Clone ID: MRT4577_122401C.1
ggccgcttttttttttttttttttcttagtgttcaaaaggttatacagaaagaagatgatactcagtgtgcaagttgttttatacagcgcgcaatttatcgagagagacactaacgcacgtagaatttgatggaacaacgcccaccgttaacgaccagcacccctattggccgtaattacacggaacggaggcatacataggcctcatgtctgaccactgagcaccgttgattccggagcattctcatgcctttcaccatgggacctccctgatcctgaagacggactgcacccacggtacgaagaggcaccttgtcttcgccaacctgggctgaacaccactgacagggacagaagccccgtcccacggaccacgttgccttggttgaggcactggaatccgcgccattggcctacttactagttgtcacaagccggctacgggacgacccagccaaagagaccgcacactgggctgactcctggagcggccatcggcatgtgctgctccacaccaggttcggggggttacccttgatgccctgcccaaccgctct

SEQ ID NO: 24558 - DNA, 200 bp, Zea mays
  Clone ID: MRT4577_122402C.1
aaaaggaaaccccccctatggaccgggttttacaagactggggggttgtgtcacattggggggtaaaccccccaaaactaggggccccgcttggggggttttaaaaaacccccaattcttgggaaattcctcccaaagagccaattttacaggttcacttaatgcctgggagtttcccccccccaggaaaaacaaggggc

SEQ ID NO: 24559 - DNA, 366 bp, Zea mays
  unsure (1)..(366): unsure at all n locations
  Clone ID: MRT4577_122403C.1
cccacacgtacgcgcacgcgtgccgctacgcgtncgcggacgctctggtgcgctctgaaaccataacgccggagcgggtgccaagccgatagcttcaccatgggcatgctgttgacgccgatcttctcgtgtgtcttgagtcaccgctaggcatacatcctacagctcggcctgtacaatgctggcacgaccaccatactatgtatactgcaaatgggagagggcgactccacgatccgcacactagaattcatcgaaggtacggcgcgatgcagcaacgttaagttccaactatggcatctaggtggtgacacaagcatcatgccatactggcgaagctactatccaaacacccaggctatgata

SEQ ID NO: 24560 - DNA, 692 bp, Zea mays
  unsure (1)..(692): unsure at all n locations
  Clone ID: MRT4577_122404C.1
gtcccagcttcccgagctccgctacctccgcnatggtgatcaaggaaacgctccggctgcacccagcactgcccctcacccacgcgcactccccgagctgcgagtcgccgatgactggaagctcacgtcgcgtaccgatgccgcgtcttcgtcaacgtctgggccatcgacaggaaccccctggtgtggagcgagcctctcgagttcaaccccgagaggttcagcgaggacgacgacggccgcaggtgggatttcacgggcagacagttcgactacctccccttcgggtccgggaggaggatctgcgccggcatcgccatggccgacaagatgaccccacgcgtccgggccatgctgctgcaggcgttcgactggaagctgccgcagggtaccgagctggacctatccgagaagttcggagtcgtgatgaagaaggctacgccactgatggtcatacccaagtcaaggttccctaagcccgatctgtattgttcctgagcaagacctcagatatcatcgtgtcgatctttcccacaaacgctgtcaaataatcctgatatatacccagaaccgttctatattgtactccttccgtaattttcttaggtgagtacagtaaacgtgtggtacaagtacaacagaacaggtgtaaatcaatatatagtaatatattctcatgatcttgattatct

SEQ ID NO: 24561 - DNA, 417 bp, Zea mays
  Clone ID: MRT4577_122405C.1
gaccacccgtgcgggcacaaagccacctacaaaacccccccgatcagctattacattaccaagttccagccggcgctggctgggccggggcacaccctcgaggcccactcccccacctaggtataagacggcgtacgacccaccgtccaggcatccagaggtaccggcaccgcagctgtccacgtgagctgattctctcttgtggcatgcagatataaactacggatgagccagtagcgcatgatgatgctagatatgaatacatcatacaatcatttcgaaattgtatcaaagtgtgcatgtgaaagcactgatctccacgtcagctggcggaaggcaattagcctcaaaaaagacgagggggtgatcattaactcgctcttccctttcgagcgagccaccactggtggtggtgta

SEQ ID NO: 24562 - DNA, 636 bp, Zea mays
  Clone ID: MRT4577_122406C.1
gaggaaagctcctccaacattccctttccttatcgagatgagggagcggcattactgggtaacacatcggacagaaaggagcgtagatatgctactgcatggtaagaagccgctggttgaggttaggaaaagggatagcgagtttcaggttgtaattgaaagatgggcaacatatgatggcgatggactctgaacttgaaaccctgtcgtcataattgcttctatcaaagttcttaatttagtacttgatgtttctgtggacaagtgtgatctacactaccaagcctcttgttctgaggtcgtacgtggattgcatgggcgaacattcgactgacaagtgacaactatccgaagcctgttcttacactgaaggcagcccacgaagcaattttgacatttcagctactttttagcggtcgaaaattgatgtcaattctaatgtatatatattttcctgtaagagaaggaacctaatgtatgtcagtgcttctaaattgtatgagatgtgtacatatgcatatccttattgttgttaatatactcattccccccttttttttttccctttgatttttaaacattggtgaactgaggtcctctattttactatgtatgtgagtattcaatgttttctct

SEQ ID NO: 24563 - DNA, 2163 bp, Zea mays
  Clone ID: MRT4577_122407C.1
gcgcacactcccgacgcgttcgcacccaggatcccgctcgccggaggccgcctctaccagccgggcaggtgctgggaggacgtgttcgacgctatcagcaacgcgcgccacctcatctacatcaccggatggtcggtgtacactgagatcacgctgttgagggacggcagccggccgcgccccggcggcgaagccactctcggcgagctcctgaagcgcaaggcgagcgaaggagtgcgggtgctcatgctggtgtgggacgaccgcacctccgtcgagtccctcgggatgaaatgggggttcatgagcacgcacgacgccgagacggcggagtacttccgcggcagcggcgtgcactgcgtgctctgcccccgcaaccccgacgccggcagcagcgccgtcatgggcgcgcagatcgcctacatgatcacgcaccaccagaagatcgtcgtggtcgaccacgaaatgccggcgaagcgcagcgaccgccgccgcatcctcagcttcgtcggcggccttgacctctgcgacggccgctacgacacgcagttccactccctgttccggactctggatacagcgcaccacaaggatttccaccagcccaacctcgccggtgcgtccattgacaacggcgggccgagggagccatggcacgacatccactccaagatcgaaggcccagccgcatgggacgtgctctacaacttcgaacagcggtggaggaagcaagggggcggcattgatctcctcgtcaacctcaaagctatggcggacctgatcataccgccgtcgccagtgatgttcccggaagaccaagattcatggaacgtgcagctattccgctccatcgatggcggcgcgtgctttggcttccctagcaccccagaggccgcagctcaatctggccttgtcagtggcaagaataatgtcctagacaggagcatccatgatgcctacatccacgccatacgccgtgccaaacacttcatctacatcgagaaccagtacttcctcggcagctcatttgcgtggaaagccgacggcataaagccagaggagattgaagcactgcatctcgtcccaagagagctctcgctgaagattgtgagcaagattgaagctggcgagcattttgcagtctatgtcgtcctgccaatgtggccagaaggccctcctgctagtgggtcgattcagggtatactggactggcagaggaggaccatggagatgatgtacaatgacatctctgttgcgctcgatgcaaagaggatcgacagggacccgagggattaccttacattcttttgcttggggaacagggaggtgaagatggatggtgagtatgaaccttcaggtcgtccgcttgatgggacagactacgctcgggcgcagaatgcacgtcgcttcatgatctacgttcactctaagatgatgatagtcgacgacgaatacatcatcgttggatctgccaacatcaaccagcgctcaatggatgggggcagggactcggagatcgccatgggcgcgtaccagccgtgccacctgaacaccaaaggccaggtcgcccggggtcaggtccacggcttccggatgtcgctgtggtacgagcacctcggcatgctacacgacgatttcctcaacccgggaagcctggagtgtgttcggagggtaaaccagatggcagacaggtattgggacctctacgctggtgacagcctcgacgccgacctccttgggcacctactcaggtacccagtcaccgtcacgaaggagggcacggtgacagagctcccgggggccaagttcttccccgacacacaggctcttgtgcttggggcgctatcgaaactgcctcctattctcactacatagagaaaccttctgtactgttgccatgtgacgtttgcgggctgaattggttgaggtttttgctactccgtattatgctactactggtagtgttattgtatggtttcttcctaataatagtatttatagttttggacttatctaaaatagtatttatatgtgtctaaaatagtatttcagttttatttcattcatatatattttattttcttattttctaccacttatggctgatttaataaatagcaagatgatttctctccataaatccacttgggatttatgatcacc

SEQ ID NO: 24564 - DNA, 220 bp, Zea mays
  Clone ID: MRT4577_122408C.1
ggtcgctgtccatcccgctgcttgtctatgctgagaataaatgtgaatggtgcctctggacgcccgctccatgctgggtcttgaacatgtggcggatcaggtcgacaacacggttgctgtagccccactcgttgtcgtaccacgagacaagcttgatgaagttgtcgttcagggcaataccagccttggcatcgaagatgctactagttctagatcgcga

SEQ ID NO: 24565 - DNA, 249 bp, Zea mays
  Clone ID: MRT4577_122409C.1
gtggctactaagatgctgcagttcacccggttgcctcttgcctgctcatggattaggcaggcagctcaaaagggtgacctatctgggaatctgcggatctacgtttagtttcacataccagaaacatttagttacttgctacgcccattactactctttgggtgacggggtctcctccgaaggcctttcctctgttgaacacccccatgattacgcgaaaagctgttaccctttcggtcgaccctacta

SEQ ID NO: 24566 - DNA, 2302 bp, Zea mays
  unsure (1)..(2302): unsure at all n locations
  Clone ID: MRT4577_12240C.1
atctgagggcaggtgttaaccattgggctggcccactgtttatcaggaacaagtatgggctgtttgtttccccggggatctcgctggggcgtccaacgcaacaagattaaggcgacacggccagaaacaacagcatggcaaacctgaagccgacgctaattgnactgaactcaaaggccgctccagggcgtgctatttcgagggaaaaaaaaaaaaaaaaaaaccactctctccgctcgcttcgccaacgccggcgagagctagggtttcgtgcgccactgccacttccgcccgccatggccgagacccccacgtatcagatcctggtgcgtctcctcgacgggcgcaccacatgtcttcgcttctccacgcccaccgtttccggcgccgtgctcctcgacgccgtcgcgtctatatctcgcgttcccgccgccgctctccgcctcgtcaccggccgcatcgacgtatcgccctcttccgtcctcgcctcagcagctgatggccagttcccctccgcgtcagcgctcctccgccttcgaggaggcaagggcggattcggctccctcctcagaggggctgcctccaaagcgggtcagaaaaagactagcaactttgacgcctgccgcgacatcaacggtcgccgcctccgccacgtcaacgctgagcgccgcctcgaggaatggaaggccgaggccggggaccgccatctagaaaagctcgccgagaacttcatcaagaagaaggccaaggaggcgggccgccgcggcggaccctcagctgctgaggtggacaagtacctggagaagtaccgcaaggatgctgagatctgcgtcaacgcggttgaggaatccgtacgtgcatctcttggaaagaggaagaccgcccctaagccgccctctggcgcagacgctaagaagcttaagatttggttgggaaagaacaaagtagaagaagatgaaagtgatagcgatagtgacagtgacatggatgatgaggacagtgaagatcaggagagcgcagatgcaaaatctctcgtagttgatgaaggcaattgctcaaatggatccataaaaaatgagaaacttgatctgggttctgtttctggatcacattcagaaggagagtcctcaggggaaaagtcccaaccgacaacaaaatcaggagctgaaggtggtgactttgaatctgatggcagtgcagagcctgaattaggaatggtggatcatcccattcctgtgaacaatgctgttgctgctgcttcagaagaagtgctgaaatcagatgaagtgacagcagatgaggataacactacttcagcaacttcaaaccaaaacaatccagtggtaccacaagttaaagaagcgctgaaagcagacgaggataacagtgcttcagctacttcgaaccaaaacaacccagaggtgcccaaagtagaagaatatgccgatgccagcaaatcttattcagagccattggaccttgcaaagtacagttcagctgtagaattggaggtgcttggtctggagaagctaaaaatagagctgcaatctcgtggattaaaatgtggtggaactttacaggagcgagctacccgactcttccttctgaagacaactccattggataagttaccaaagaagctgcttgctaaggccgctattggggggaagtgagaagctgtataaacaagtactgatggtgcaatgcttaagttttttctttgacgatgtatggaaatctgttgtggtgtaatcacgtgttacaagcccttggtgtggcattgacgattaatgatgtgtctgtatctacgtatatgctaatcgttacctttgaagccccaagtttggactagggttccaattcgttgtgagggtggtgagacttttctgactattgtttttgaggcgattttaaaaaaaaaaaaaaaaaaaaaagcggcggattaaaatgtggtggaactttacaggagcgtgctgcccgactcttccttctgaagacaactccattggacaagttaccaaagaagctgcttgcaaagactaatgggcggaagtgagaagttgtaccaatatatataaagaagtaccaatgatgcaacgtttaagattttctttgtcaaaatatggaaatctgttgtggtgtaatcatgtgttataagctcttggcttggtttgccaattaatgagatgtctgtacgtgctatatgttaaccgttacttggaaggcgctcagtttgggctagcgtttgaattcgttttagtttttgatgttttagtgtatgtttggaacagcttcaccaacc

SEQ ID NO: 24567 - DNA, 386 bp, Zea mays
  Clone ID: MRT4577_122411C.1
ggccaaaaggccggggggaaagggaggacggggaattgggtcaatcccattccaaggggcggaaaaaaggcggcaaaattcttgggggaaacctgatcgataaaaaaaaaaccccaacaacaaagggttaaaaaaaaaaaaaaatttacaggaccccaatctcaatcacaaatatacccaaacggaaaagaggaacatcaagggattctgggtccttcctggcaaggaaggtctccactggaacccgatcgggaactgaccatttttcgaggctaagaaaagggacttttaaaaaaaccgcttgggggggaacacctctgcaagggtaaaaaaaaaaaagcccaaagtttccttgccaaggaaaaaccctgccttcggggctttac

SEQ ID NO: 24568 - DNA, 158 bp, Zea mays
  Clone ID: MRT4577_122413C.1
gaagaagacaatcttacatattcttcgcttagatatatcctagaactcactggaaagcagtggggtccggacaaccacaaatgaagaggagaatgaaaaggcgaaggatgctccagctggagatatctggctgagtgcgcgttgggagcctgggcaaa

SEQ ID NO: 24569 - DNA, 549 bp, Zea mays
  unsure (1)..(549): unsure at all n locations
  Clone ID: MRT4577_122414C.1
ggaccatttttgatacgttacaggagacctgttggcatgactgatctgcatagctttcctttggtatacaaagtgacctgacgaaagatcgtgtcgcatcgaacctgaaggtctggtattcatttttgtaactgcctaagttttggagccaagttggcaaatgacagcgagcctcagacatgtcggaagttcgtcgtgctgcatgtgaggagagcatcgagcgtgcgtatcgtttggattgagaattctctctggactttccatatccatacaatggaacggcgagtttattgcatatatgatgaggccataaaaggggagagggttggaggagggaccacaaggagtgatggtgatggttcttggctcttgcacaggtgcgagccgtttttgaggggtagttttagagccatttccgtgttgtgaatgtaacatcggaaactgtacaaaagttagcctgatagatggaaaacattgacttgaatttatgcagtgcctgttcttcatcgatcaaaaaaaaaaaaaacnaactcancccccanaaggact

SEQ ID NO: 24570 - DNA, 376 bp, Zea mays
  unsure (1)..(376): unsure at all n locations
  Clone ID: MRT4577_122415C.1
gaagcaacaagagaaagaggcgtaattattcttaataacccatggagcaatgccacaggaattaacaggtttnnnnncagatagtgtgtttggagtacacaatacttgaaaagcatcacacataacacgatcgtcagcgcaagcttgctgaataataggatatggtgcgcacaatgggctgatgctaccctattattaaacttctgtagaaattgtaacatctctaggcattctgtgccttattgaactcacggccgacctccttagagagctttttgagcgccgccaggtccttacgtgcgtgagaaaactgaccttcctgcataccctaaccgacataccattggacgaaggcacgcttagcgtacatggagta

SEQ ID NO: 24571 - DNA, 313 bp, Zea mays
  Clone ID: MRT4577_122416C.1
ggcaatctcccaggaacgcggccttagcgttttttttttctttgttctactcacataaacaccgagagtttatgaccgaccatgacatgcatgagtcgtacataccacacaggatttatgggtgtaagaacctaggccagtgaccagcctgtaggcctgagacgcgaccacgctggaggggggagggccggtacgactgggcggccgctcactgggggctcgcgggcgtgggtacataagctctggcgttaacaatggaagagtagctgtgactttgtgaggaaattgttaataggatgtttagaagtataga

SEQ ID NO: 24572 - DNA, 1410 bp, Zea mays
  Clone ID: MRT4577_122417C.1
ggaaactgctggagagggtgagagcaaggggagcagcggtcgggcagccatggggcaccactgctgcagcaagcagaaggtgaagcgtgggctgtggtcgccggaggaggacgagaagcttgtcaagtacatcaccgcccacggccacagctgctggagcgccgttcccaagcatgccgggctgcagcgctgcggcaagagctgccgcctccggtggatcaactacctccggccggacctgaagcgcggaaccttctccgaccacgaggagcgcaccatcatcgacgtccaccgcatcctcgggaaccgatgggcgcagatcgccaagcacctgcccgggcgcacggataacgaggtcaagaacttctggaactcgtgcatcaagaagaagctcatcgcgcagggcctcgaccccaagacccacaacctcctgccggcctccaggactctcctccacggcaacggggcaaaccctagcagcaacaatcctgcccacttcaactcaaacggctgcgctgctgtcgtctccgtcgccacgacgcccttcaccatcagctccccgaccaaggccgccgcctacggcaccgtcacggccacgccgccgccggagacgatggcgccggcaacgtacgacgtccctaataattaccctgacggcatgctcatgaggcatgatcaggcagccacggcggctgcgattccgggatacccgtaccaccccggaaacggcggcggcgtgctgatgagcttcagggaccagaatgctggtctccagacatctgtggacttcgtgaacggctcctcgtcctcctcctccatggatcacgccgccggcatgcctaacggcaacggctttagccaacaaggcatgggcgcggccttcatggacgtgacggcgggaatgtggagcaccgcagccgtggattctggcatgtgtgcagggatggaagtggctcagccaccgccgccgccgccgcagcagccgctgccaccacaagggctggtgcagggggaggtgctcgtcggccgacaaactgtgatgaacggtggcggtgcagttgctgacaagggcatggacatgatggacgtctcttcagtgtatggcggcgccggtgcaatggcgttcgatctggagctgatggagtcatgcgcgttgttttgcggcagcaccggcaacaccatggagcagctgcaatgggactgctaagctcactatcgtccttacccctaattagtttgttgtcttccatgcttcatccatgtctttatttttcctcttaattttgatgttcgatttactgggttcttgattcagatcgtccttttaaagcaagaaatccatgctgagcttagtgacgaactcgatctaattcagatttcaataaagttatctcaaattttattgattgc

SEQ ID NO: 24573 - DNA, 187 bp, Zea mays
  unsure (1)..(187): unsure at all n locations
  Clone ID: MRT4577_122418C.1
cacaggaggatattgagaatataagagaggagttgaggatagcactacttgcgttgaaggcataggagttgaaagttgaagccgacaaggagtagcgttctcngcagccactgntatacaagaaagaatatgatgaagttctcattaagcagggttctgacaaggataatttgatggaaaatgctga

SEQ ID NO: 24574 - DNA, 282 bp, Zea mays
  Clone ID: MRT4577_122419C.1
gaaaattgaacttatgaaaggaaagaagaaaaaaatacaaagatcgatttaaagcaaaagagttgtatcaatgatgacactagtacaaaggcaagaaaaccgatgaggtctgataaaataaatgtggttgcccgcaaaatccaatttgttccagaattgtggtagcacacttgcatgggtttgtggttaaaaatggaaaagggggggggggggcccaggaagtcgtagatgccagcgtttagggtttccaggcacctagatgagggggctgaacccctttgg

SEQ ID NO: 24575 - DNA, 436 bp, Zea mays
  Clone ID: MRT4577_12241C.1
cacagttgcagttcacagagaagagaaagagaccgaaaactactccatagctaggatcatggcagtacaaggcgctcctcgaggaaccgctcctgctcgacggcaccttgatcgacgtctgctataacgagcaagtcaaagctgtcaaagaggagaattaggcggatggcccagactggcacgacccagaactcggatacccgatccacctccacggctatcacaggaagaacgtgctctactcgcactgccagggcggctgttggaaccaggagcacattaagatttatgcgtgctgatcaaacgctgattacatatcaaaccaaccctgcatgcatggcatcttattatatctaatatcagaagcggagcatctatatgtgcctgtgcactagaagcaggactaattccccgcctgcacatcgcttaaattaca

SEQ ID NO: 24576 - DNA, 626 bp, Zea mays
  Clone ID: MRT4577_122420C.1
ggaaactttcggctcgcgcgactgtaaaccccgtctttctctcggctgggaactcccgcgcccagaattttcttctcccctagcttagctcatccgtctcgccgcccgccgtccatggagatcgccaagaacagcattgcgatcagccgcgtccgcgaccttccgccatcgaagcggttcaggcacatcggctcccacctcggatcgactcccagcgtgccgctgccggccaagaagcgcatgctgccgtcgcacacgccggaggaagcagccgtcgctctctgcctcccggtgaagaagagggtcatcgcggcgccgcgggtggaggtggccggcgccacattctgcctcccggcgaagaaacgagccatcgtgccgtcgccgccggaggacgcggcgcccgcgtgcctccccgctaagaagcgcgcctgcgcagcaccggcggatgcggccgtgccggcgtgcgttccggcccaggagcgcccgtgcgctccgctgccgccgccgccggttgtggtctcttgggcccgcgtgtcgactaagaagcgcgtccacgcgccagcgcctcggggccacgccgccggttccgttccggcgcgccgaccagccaacgggctctcttgcgc

SEQ ID NO: 24577 - DNA, 284 bp, Zea mays
  Clone ID: MRT4577_122421C.1
ggccccaatcaactttaatgggtttataaccaaaccagttcaccagtttttaatgatttagggggggtttgtttgggagattttaatccccccttattaggggggagtttaaattttttcatagccaaatgggaagcattaaaaaaaaaaccgggccgggcgatgtttttattcaaagcgatgcccgattgctgggacaaatcgagtcgatggataaataaaaaacgggttttttttagggttttttaacgattctcaaatgccccgccaccaccggttaaaaa

SEQ ID NO: 24578 - DNA, 576 bp, Zea mays
  Clone ID: MRT4577_122422C.1
ttttttttttttttttttcttagagcttaagtcattattatatagacaataacgcggcccttcccttctgcatgcacacctccgacttttgacacgccgttcatgattcgtcttacagacagatcaagatcatcatgaagcgaacagtgttgcaggttgcctgccagacgacagcgtcagctacttgtttatcatagtaggtcgccaactcggaaacctggcgacgttttctttgagctttttctataggctgaccgcctgatacgacgacggacaccgacgcggtacgctttgcagcggttttagcgttcagacggagccacggaggtcgctgaagcctctcgcttttttttttattattattcttgcacgaatggctgactatctgaagactgtctggctgttgcaagctgttagcacttcagatacacagagctttgaaatggctgcttgattctgacggagcttcttcacgccctctggtttctctatctgcaacccagttggcacatttcgtactgcaaacccagttgctgcgagctgttcactgaatcagcggcaaagtttggcgcctgg

SEQ ID NO: 24579 - DNA, 1280 bp, Zea mays
  Clone ID: MRT4577_122423C.1
ccggccggggccagccgcttccccgatccgccatgtcagtctctgctgcgacctagcgctccgctccgttgcgtcctgattcctgaaccctaccgctccacgatccctcgccgacagatgggcccacgtcgcctggggccaagcaggagacgcccgctccccacgcgccggcctagtgggtgggtgggtggagatggagaaggcgttggtggatcgacgcacgggacacccttgcggccttgcagcagcagcagcagcagcgcctcatcactcgcgtccctctcttttcctcttctccattccgtcgcgtgcacagaaattccttcctctgcctccctgttcagctctccttttcccttcctcctgtaattctgttcgtgtgcgtgtaatttccgtgcaaataatacacgcacgccgattttcgaaagcatcgaaagcaaaaaaaaaaaggcgacggcaaggaatcccccgattaggaaagattctccgctccccgccttcaaatcccccaccggccaccacgacccgtctcgattcgcatacgctctgtgctgccgaggtcgggattggtgctggaattcggtgcgccgagttgttccttgctcgattagacttccggttcggttcgcttcgttccaatcggggcttgctgcttccgccgccaccggtgcgctccgagctgctcaagctgggcgccggataccctctcgggctgcccgatctgattcggtccccaacaccacccccgctccgccgctgtggctgccgctcccctccccgctgactccggcgccatttcgacccgcgcggccggatccttggatggttccgatcgatccgggaccaagagacccaaggcttcgtcacctcacccgggccccggcgccggtggatccatggccggggagaaggcgccgcgcgcgttctccatcgaggagctcccgggccacctcatcggggaggtcctgacctcgggtgggctcgctgccgccgacctcgcgaggctcgaggccacctgccgcgcgctcaggccgctagccgagtacgccgcgtccaagctctgcgccgcgcgggcggcgttcgctgccatggggccagccgcccggggtgagctgctggagaggtgcgggggaagctggaagagggtgctcaggttcctgcagtccgtagagcagtcgtcaggcaccgtcgagacctcatcgggcagcatgcaagtagccacaggaagatatcacacacttttggtccatgactcttctgcctattcttgaggatccagc

SEQ ID NO: 24580 - DNA, 307 bp, Zea mays
  Clone ID: MRT4577_122424C.1
aaaaagaactggggggtccgtttttgtaatggagatagagtgtcccacatttggaagcaacgatcatttttcacgggtttaaatccgggcaaagcataacatgtacaaaagctcccgggggggaacggggctcagtttattttaggtaatcttacagaccaaagcttccaaaataggttgggaactgggaagcccgatgcttgggtccaatgcaacatcacgtatgacaagaacacttttgtttcacagtttgcgcgggtcaaaaactagcgaaccccttttcttttaagctttcgagggtctcctt

SEQ ID NO: 24581 - DNA, 107 bp, Zea mays
  Clone ID: MRT4577_122425C.1
caagtataaactaatcaaggaaagcaaatgattgaggtaaaggtggttccccaccttcactgaacacatgggagcagctactagctgttcaaagtgccagctttaaa

SEQ ID NO: 24582 - DNA, 435 bp, Zea mays
  Clone ID: MRT4577_122426C.1
ccggccggggctctaaaccacgtactccctccggtgcagaaaagaagcatcctgcgcgtgcacaaaaagaagtcatagcgcgcgtgggtctgggatttggacgttgttgtccctagtaattgcacaaaaaaagatgcaattaagaggaatcgaacttgagacctccagtctagaatgctttggagctgctgcaacaaccaattaagcctgattgttttggtggcattaatgcacccatatccctatttaataggggcaaacagggaaaactctatgataattaatcactccttcgtatgcacaatcatgtcctaaacgactacctttattgcactggagggagtatttaagaagttgctaaataacattgggagtaaaaaaatatgagttctccaatagttctctaaaaagaaaaaaaaaaaaaaaaaagcggcc

SEQ ID NO: 24583 - DNA, 372 bp, Zea mays
  Clone ID: MRT4577_122427C.1
gaaacaaccattcatgccccggggcatcatcgaaaaaagagggggggggggggggaaacccaacccccccctttccttagggttttacaaaaaaggcccgggggggcaattcccgccctcccgcccgggttttccaaccaaggaatcggacataaaaaatgccatgccctgccctaccggaaaaaggcattcttttttaaaccggggggcccatgcccagctaacttgttttgggcggggggcccatgcccgagggggaccccaattttcccgggccccttggaactaaaacctttaacttaggggaaaaagggcttggagaaaaacaacttggtccacgggtcccggagcccccggaggcaccaatggggg

SEQ ID NO: 24584 - DNA, 270 bp, Zea mays
  Clone ID: MRT4577_122428C.1
cagccgaagggccccggggggaaaagcagaggcgctgtggaggatcatcatagggacgagatgcaccgtcaagtgcgcccccaggggaacaaaaccaagcacaaggggcatcacaggggacacacagcaggcaagggcctcgagacgatgcagaagctgtgataggggcaggtggtgccaggaacagctacaaccgcaggcaaaggggagcaactatgaagaatcaagaaggcgcaccaggcgagaagacagaggagaatacaggaaggg

SEQ ID NO: 24585 - DNA, 134 bp, Zea mays
  Clone ID: MRT4577_122429C.1
aaataaataagtgcttgcaggaacaaaaagggggttatataggcactgggagactaaaacattgttgggggatggaaaacacctgatggcaatagttgtttatttggcacccgtatacgagatataactaactt

SEQ ID NO: 24586 - DNA, 1116 bp, Zea mays
  Clone ID: MRT4577_12242C.1
agagatcctactgaatgctgagatctgcgtatcgcggttgaggaatccgtacgtgcatcccttggaaagaggaagaccgcacctaagctgccctctggtgcagacgctaagaagcttaagatttggttaggaaagaacaaagtagaagatgaaagtgatagtgacagtgatgtggatgatgaggacagtgaagatcttgagagcgcagatgcaaaatctgtagtagttgatgaagggaattactcaaatggatccagaaaaaatgaggagaagcttgatcttggttctgtttctgggtcatcacattcagaaggagagtcttcaggataaaagtcccaactgacaacaagttcaggagctgaaggtggtgactttgaatctggtgatagtgcagagcttgaggtaggaatgttggatcatcccatttctgttgctgctgcttcagaagaagtgacagcagatgaggataacactgctttagctacttcaaaccaaaataatccagaggtactcacaagttgaagaaaagtgcggaaagctagactaaggataacactgcttcagctacttctaaaccaaaacaatcaagaggtgccacaagtagaacaacatgttggcatcagcaactcttattcagagccgttggaccttgcaaagtacagttcatctgcagaattggaggtgcttggtctggagaagctaaaaatagagctgcaatctcgcggattaaaatgtggtggaactttacaggagcgtgctgcccgactcttccttctgaagacaactccattggacaagttaccaaagaagctgcttgcaaagactaatgggcggaagtgagaagttgtaccaatatatataaagaagtaccaatgatgcaacgtttaagattttctttgtcaatatatggaaatctgttgtggtgtaatcatgtgttataagctcttggcttggtttgacaattaatgagatgtctgtacgtgctatatgttaaccgttacttggaaggcgctcagtttgggctagcgtttgaattcgttttagtttttgatgttttagtgtatgtttggaacagcttcaccaaccaaaaaaaagtagtaagatttatctggatct

SEQ ID NO: 24587 - DNA, 442 bp, Zea mays
  Clone ID: MRT4577_122430C.1
attcggctcgagccactccaccatacatttttcagctccctctctcagtcgccgcagtggacagcaccttcatcatgatcaagcctgacggcgtccagaggggcctcattggtgagatcatcatccgctttgagaagaagggcttctacctcatggccttgaggcttgctcaacgtgccgaggtcgtttgccgagaagcactacgccaatctcgcctccaagcccttcttccagggccttgttgacttactatcatctactggtcccttgtggtgagccagtggtcatggggagtggcacagacgctgtatatcacatactggatcccaagatcattggctccactaaccccttggcttctgtgcctggcaacatccgtgacaactttgctgtcgacattggcaagcatgtcattcatggaagtgacagcattgagagtgct

SEQ ID NO: 24588 - DNA, 1484 bp, Zea mays
  Clone ID: MRT4577_122431C.1
ttgggtacctcgaggccggccgggtgaaaaggaccacgcctccgatgaagcgccagaaaagagtccacatgaccacatcggtctctccgatcagagttcaactcggttctttaattgcgcaccaatctgttttatatatgcggatcgaggccgcccggggcggggcaaattctattactagctgcaaaagggcgtgtttgagactagcggaccgaccttgaagttgaagttgaaaaggtcggcctgcgcggcgatggatgtcaagtgccggcgtctggaggggaaggtggccatcgtgacggcgtccacgatggggatcggcctcgccatcgccgagcgcctcggtctggagggcgccgccgtcgtcatctcctcccgcaagcagaagaacgtgaacgaggcggtggaggggctcagggccaagggtatcaccgcggttggtgccgtctgccacgtctccgacgcacagcagcgcaagagcctcatcgagacggccgtcaagagctttgggcacatagatattcttgtctccaatgctgccgcaaatccttctgtagatagcatacttgaaatgaaagagtctgttctcgataagctgtgggatattaacgtcaaggcttctatccttcttattcaggatgctgctcctcacctacggaaggggtcatctgtgattattatttcttcaattgctggttacaatccagaacaaggattgacaatgtatggtgtcacaaagactgctctctttggtctcacgaaggctcttgctggtgagatgggacccgatactcgtgttaactgtatagcccctggttttgttcctacacggtttgctagtttcctcacagaaaatgagaccattaggaaagagcttaacgagaggaccaagcttaagagattgggtactgtggaagacatggctgcggctgcggcttttctggcgtctgacgacgcatcatacattacggctgaaaccattgttgttgctggaggggtgcagtctaggctgtaaatctggctgaagtttatatttacttggttaataatgtgtactagtgccctagagcatcaggcgtggctaataatgtgtactagtgccgctagagcatcaggctaccttctatatatgacaggcaactctaaaagattttctatatcttattcctcttcttcaataacgtcctttctatcagcatcttctataaaaaaaaaaaaaaaaaagcgtcaaaaaaaaaaaaaaaaaaaaaaaaaaaaaaaaaaaaaaaaaaaaaaaaaaaaaaaaaaaaaaaaaaaaaaaaaaaaaaaaaaaaaaaaaaaaaaaaaaaaaaaaaaaaaaaaaaaaaaaaaaaaaaaaaaaaaaggggggggggccccttttcccccccccccccccgggacccccaaattttggttggggttaaaaaccgggcccctgggccctttttatgggcccccctttggccaaaatggttttaaggggc

SEQ ID NO: 24589 - DNA, 346 bp, Zea mays
  Clone ID: MRT4577_122432C.1
cttctctcttttttttttttttttttttttttggttgatttaaattgacttaccaaaaaaacccccccacctaaaaacatattaatccacaccatacaacgcatgtgcctaatttcaaatccataccatcaaaaattcccccaaataaaacaggaacccaatactttccaaaaacacaacccccccggtgattcgtccggatccattacaatttcacaatttgaaaaacatgaccaacctaacctttgaagaaacggccgattcgaatcttttggcccacaaacaaccatctcactgggcgcgatcccttctaaaatcaaataatgcatttcacattttggcaaat

SEQ ID NO: 24590 - DNA, 316 bp, Zea mays
  unsure (1)..(316): unsure at all n locations
  Clone ID: MRT4577_122433C.1
aacttttccattttaccaatgcaacaacaaaatgctctgtccactgttttaggtttaggtgccaccaancanaccanaacnnangccacaanccaacacacaacaacaatcccaacacggcgcaatgatcctattctcaatataaaccgactacccaacctcccaccaacaatactacacaactcacacataaatcaacacccaaacaaaacaaactaccgccatagaaaatccccacacatccataaaattcgcaccaaaaaataccgatgccaccataacatctataaaacaaaactaaaaacccccaaacaac

SEQ ID NO: 24591 - DNA, 315 bp, Zea mays
  Clone ID: MRT4577_122434C.1
agctcggaattcggctcgagccggcggccacctctaagatcgaattttaggcacccacggcacgaactgaggactggggcatatgcagacatgggcgacgtgccatccacatatgatgatatatggacaatccgcttgaccctagccggctgcacatgtacacatccatagatgatcatatatgcgtaactagctgcacgcccgcgcgatgcaacggaaacatatgagtccaatatgctgcgataacttacatacaaaatgggccctatatcgatatgcgaaaaagtgtgatagtcaataaggacacatgaaacg

SEQ ID NO: 24592 - DNA, 275 bp, Zea mays
  unsure (1)..(275): unsure at all n locations
  Clone ID: MRT4577_122435C.1
gggggggtgtttttttttttttttacaccaactcacaaacgtcgggctatactcgattcgaagcgaattgaagcaaccaaacaggggggcctttcctcccgtttttccaaaccaaaaccggggggtcgttggggggatcatccccctccctannaaaggtgtcttcttatgctaactcctctgggggcgcgacgggggttccctcccccctcctggcggggggggcgtgcccctgggcgggcctggccttttccttggccccctgcggcgcccct

SEQ ID NO: 24593 - DNA, 373 bp, Zea mays
  Clone ID: MRT4577_122436C.1
gatcctctacagcgaccgcccttcctttttttttcccttctttttttttaaaagagacctcaatcatataagtaaggtttaattaaataaatccgtactaccccacatattccactttttccttccttaacctttaacccaacaatttccaaatcataaatataacatcttcacactttttccctattaaaaatcaaaaattcaccacaatacccataaaaatcccgtaatacataaatattcaaaactcacattatcaaaaaaaatccaaaacccttaaaaatccctattcttattcacctactataaactatactccttctatacttaaaaactttaaacaatacctctttataatttaaaataattccct

SEQ ID NO: 24594 - DNA, 276 bp, Zea mays
  Clone ID: MRT4577_122437C.1
aaatggaaggtttaaaggaaagagttttttaaaatatttacccgatttattagttggcacaaaattgtttgtttaacagtccaacgggcaaggggggatgttttttgcttttttaccactggagagtttacacaaagttgggaattgcataaaagttgtttgtttgtcccccgtcggaattaggaaaaaatttgtacaaccgttttttttggaggagggcccttttaatactttacttcgaagtaaaatttttgatccgttaaccgttttgggaaa

SEQ ID NO: 24595 - DNA, 352 bp, Zea mays
  Clone ID: MRT4577_122438C.1
acgactcccgggcgttgagtttcaatccacacccaaggtcaagcgtgagttcaattctatatatgatgcatgttctaggcccatgcctgcatgatctcagaggacgttccaagtgatcccccaagcggtttccttacccctcccagggacaaaaccaaaagctggagacggtccccgcctcaaactggggtccaaggcgagctgctctgcagaaccttaggaaccgcggtccctcctgccgctgctgatgtttattatagctttgcaataatcctcattatgcggaaacaaaaccatactttttgccaacaaatccctgcagatgtgaagcttcagacaaggttggctaatt

SEQ ID NO: 24596 - DNA, 300 bp, Zea mays
  Clone ID: MRT4577_122439C.1
atagacaacaacgcggcgtcacgcacaattacattaagaacaggctagcagcatagaagggagaaaacggctgagatacctgatcatcacatcagagacagatgaaagccctcaagcagaagcaggcgagatcgaatacaccaccaccaccactggatgtggcaaccaaccacatgccacaaggagaggaaaggagggtcacaacacatactacaggacgaccacaggaaacaaccatatctggatacaagagtcaacacaccgacacgccgtggacgcatgctcttcgaggagacacac

SEQ ID NO: 24597 - DNA, 818 bp, Zea mays
  unsure (1)..(818): unsure at all n locations
  Clone ID: MRT4577_12243C.1
tttttgacacgcaggntttaatctgaggggggggggtgatgtcactgttgaggaattacaagagctatttggaggaattggccaggtcggaaggatcaagcaaaagcgtggttacaaagatcagtggccttggaacataaaaatctatgctgatgactctgngaaaagccaaaggggggggggggcttgcttatgaagatccttctgctgctcattcagctggtggattttacaataattatgacatgagaggttataaaatcagtgttgtgatggctgagaaatcagcacccagagcggcaccctcatatgggcatgggtaagtagtttttatctgtttctctgctagaggcaaagtgtggactgccatatcaatttgaatcaagtagtactgatattggaattccataaaggacagacccagtgctagaggctccacatcagtggggtctggggaaggaataactggggcagaccttattcctgcattttgcagagaggatgcgttgaaccatggacctttggctcagtggaaaggcttctcaccactgtgtcaggcctgtcttccatagtctatggaatttcatctgcgtgacactttcagctacaaatgctaattcccaccagaaataaaaacacatgatcaactttatatgccgtgcactgttaccacttccattttgatttagcttttgaattagctttatttatagaaggatagatattgtccaaccaaactgagtttgcaaatggttctatcatacataagatactaacggttgatcagaaacacatagtcgaaagggcatgacttgggc

SEQ ID NO: 24598 - DNA, 301 bp, Zea mays
  Clone ID: MRT4577_122440C.1
acaacaaaccccccggggaaaacatgttaacgaaaaaagggagggcggggaaaattaaaaaccctttttaaaaaccaaaaaaggcctttccgttttttgaaaaaaaaatttgaccacgggtttaattccaaagccattaaaaaatttttgggttttaccgcacccggttgttttgttgttaccaaaaaaagggaccttggccaaaaaccattaaaaaatactttgttttaaaacaccctatttttattattggggggcccttgcccaaaaatttaaaattccgggggggccccgcccaaac

SEQ ID NO: 24599 - DNA, 1122 bp, Zea mays
  Clone ID: MRT4577_122441C.1
aaacaatctaaacaataaagatggaatcatgtatatattacacagtacttcaaatagggaatctgcaccatccttcctgctgcctacccattgtggctgctgcccgtgttagtttggcaccacctcccagtggtgtagaaattgaaaaacaaggaagaagtgaagaacgagtctactggagcatattttcatgccgtggcaatagaattttgttagtatgcaggtagttgtagctctacgccaaacttttgccccttagcactgaacctgtggatgcatatggtgctggttttcccttgttctttgaattctcaacttaagtgttggcaatgaaatgctcaatcttaagacaaaatgccctgatgattcattccactattcttgtgtttcttcatgttcctttatttaattgtcaatatctgatgcagctgcacaccattttggatgagatgatatcggggggacaggtgatcgaaacaagttcagaacagataatgaaatctgtggaagagattgaaaggctggagaaacaatcgagcacaaccagcttcatacccaagtcgattacagagcgttttacccgttgagcttccactcgtttccagaacaatgtgacatttaaggtgtgaacagaactgagatatactattcagtctcattttagttctccgataagaccttgtatgcccccgccccccggctgtattctgtaagcctgtaacctggatatgaatggggcatctgcagtccaataatactgcctgcgttatatgctaaatctgtggaagagattgaaaggttggagaaacaattgagcacaaccagcttcatacccaagtcgattacagagcgttttacccgttgagcttccacttgtttccagaacaatgtgacatttaaggtgtgaacagatcttagatatctcattcagtctcattttagttctccgataagaccttgaatgcccccgccccccggctgtattctgtaagcctgtaacctggatatgaatgcggcatctgcagtccaataatactgcctgcgttatatgcttgatcgtctgacagtgctcgataaggtttagacatgccccagtaacaaattagcaatatttttatcctg

SEQ ID NO: 24600 - DNA, 101 bp, Zea mays
  Clone ID: MRT4577_122442C.1
cggagtcaggcccacgcctaacctcagtacatcaaagcagccgaacacgcccgcggcaacgcgcgccattctaccccaggtcggacggacccttgccggag

SEQ ID NO: 24601 - DNA, 203 bp, Zea mays
  Clone ID: MRT4577_122443C.1
acacccttccgcccttgcttaaaaagtaatcgaacttttctttggcctctttacagtaatatagagcccaggtttctaaataaataagctgggtatatatatatttcccccccccccctaattttttttactaaaattgtaaaattaaaaaaaaaaataaaaaaaagggcctttcctttttaaagtatccaatttaactaacc

SEQ ID NO: 24602 - DNA, 417 bp, Zea mays
  Clone ID: MRT4577_122444C.1
gggaccacccaaaaaaaaaaaggaagggcggtttggccccaacaacatcgaattaaaaagaaaacccccccatttaggcccaagaagggataaccacacaaacccaaaaggggggggtccaaacagggaaacagggaaaataatattggccccaaccccgggggaaaaggactaaggtctttcccttttttccccccccccggaaccccaaatcctgggagggggggcccgggaccggggaaaccccggccaccagggggttaatgtaacttttggcctggggaaacccaatttaatccaaaccctggcgggggaaccagggaaaaaaagccttcctccaaaacagggccggaaactgctcgtaaacggggggaaacatttttgggagggggggggggtggccaacaaagggggggg

SEQ ID NO: 24603 - DNA, 127 bp, Zea mays
  Clone ID: MRT4577_122445C.1
actatttatcaacagataaggctgctattctcctcttttccccgtccagccgctgcctacgggttcctcgaccaccaattaagaatatgcctatttccctctgtctcaggatggatgagagagactg

SEQ ID NO: 24604 - DNA, 268 bp, Zea mays
  Clone ID: MRT4577_122446C.1
cagaacgccacaattaatgacacatcctttcgcgaccatgtgctcaatcatatagtgggggcatgatcgcgggctccatccttgatactctcatcgccgccctttcctacatgcccccgaaagtaccacccttcacaaaacatcaccaccaacaacaacggcaagtatctcaccactaagcccaccatgaaccgtcagactaaccataccgtcgctcttgacaaccaccctcacctgggtatcaagaacgggaacctgccaccctaca

SEQ ID NO: 24605 - DNA, 635 bp, Zea mays
  Clone ID: MRT4577_122447C.1
aattcggcacgaggcgcttctctctctcaccagcgccaggctgcgccgcctccgccccaccgcctacaggccgcgccgcctccgccccaccgcctgcaggccgcgccgcctccgccccaccgcctgcaggccgcgccgccgccccggctcggcaccgacagcaggccacgccgccgccgtgccaccgccccggctcgcgccaccgccctggctcggcaccaccgccccggctcggcaccgacagcgggtcgcgccgccgcccctgctcgccaaccccagcggttcaaacattagctcgttttcactgctactgcattgggttctgcatagttcttccttggttgtttgatgtaaaccacagctggggagcttagctgtatagaactgatttcacgtgtttgttgacgagtttagctgcataggtaccgatgagtttgtcctgaacagaaattttatttggattcagttcggtgagctcttaattgtgtcctacccacatccctctgcatccctctgcagggtgcaagaactgtgctaacgtgtgttctaaggtcttccaaatcgaggatgatttcggacgggcaagagtttacgaccaatcaggcagcacagaactgattcaagaactattgaca

SEQ ID NO: 24606 - DNA, 234 bp, Zea mays
  Clone ID: MRT4577_122448C.1
agccttctggaccccatgtgatcacgctagtggtctcgattgtacatcagaaacctgcatccccaggtcaccgctagagagctggagaacgaactccgcacgatcgccgatcttcgcatgtctgcctgcccgcaaaccacctgactttgcctatatcgattttgatgataagatggacgcacaggatgcaatccttgacctacatggcaagaatggatggaaagatgaggtata

SEQ ID NO: 24607 - DNA, 149 bp, Zea mays
  Clone ID: MRT4577_122449C.1
gcatcccaagagagagtcctaccaaacctacctaccatctcgcatcagtatgcatcactgctcgagccgcacagactgcaccgaaggggggacggagaccgtaaaaactgactacatgttatgattagctacatcgtctagcctaacag

SEQ ID NO: 24608 - DNA, 682 bp, Zea mays
  Clone ID: MRT4577_12244C.1
gccggccgggtctggaactccacccgcaccagacaccccccactccacgcagtgccgtgccgcactgctgccctgtaatctcccataaattcactcgcctcgcctcggctcgaccagccgcccgcctgccgtcccgacggcccggcgcgatcattgcggtgcaccacgactactccggcgctcggatcccagattcctatcggtggctggaggagccggactcggaggagacagaaagagttcgtggagcgagcaggcgcagctgccggagacggagctcgacgagtgcacccacagggagaacctgcgccgggaggctactgcggctcttcgaccacccatcgccacgcgcgcgccgttccgccgaggaaacaagtacttctacttccacaactccgggctctaatgccagagcgggatctacatgctgaatgatgtgtactggaaggcacaggttcttttggatccaaatactctaagaaaggatgcgacgtggtgctgctttcaacatattctatcagagaggatgactacattgcttatgatctaagtgaaagtgcgagtgcatcgggtctctattcatgagatgagcattactaacaagcaggctatggctgataaattatcctcgagcaagatctcatctatcagctgaacgcatgacgtgaaaggatgtttctat

SEQ ID NO: 24609 - DNA, 312 bp, Zea mays
  Clone ID: MRT4577_122450C.1
gcggcgaaacgtccggcaagcataccataacgtatgcagagattgctccaaggacctcggcatatgtgctaagtgctgcacatgtgttaatgagcttgtcggaagggatgcgaatgaggaggaaagtgaacgcaagtcactagaagaggctgtcagaggtgctagggagagggaacgacgtacacttctggcattttgctggctcaacaatgggcttgtattttccgtatctgcgtttccagtcgatttgatcccggcagcgctgacagacgccggtgatttctgacagaaggtcgaaacctgcccccggct

SEQ ID NO: 24610 - DNA, 372 bp, Zea mays
  Clone ID: MRT4577_122451C.1
cactctcctccttattcgttatagaaagccctttgatactctctgagaagaaaaaaaaactgacagagcacacggatggtgggggggggggtgatacacgaacgcgacacactaacgatattttttaaagctcaccgaccgaagggaattcattgggggggcaggaacaaacacccagattaaaaaaagatcttttttgatggcccccgcccaaataacacgctgcttgaatgctgaccgcggggaagcaaaatcaggcgtcctctacctaagcacccttggacgcacccacgagctgctaaaacagggccggcgaaaaatatggtatggtctctgtaacggggtttggcctggcaagacccttaacggcag

SEQ ID NO: 24611 - DNA, 102 bp, Zea mays
  Clone ID: MRT4577_122452C.1
aaatattacaacagatttcagatatgaacatgattacgcaaagctctaagaagaatccactaaaggaaaagctgaaacgcatgcagatacctgatcgggaat

SEQ ID NO: 24612 - DNA, 450 bp, Zea mays
  Clone ID: MRT4577_122453C.1
cccacgcgtccgaagaccagttcccttctcctgatcgtcctgttcctcacagcatcagccatggttggccttaccggataagcaggctgtccccgctgcacaggatactgcctttcacattgtttactttgactcgttttatttctctttatcttattattttctttttttattttttttttttttttttatttattatattttttttttttttttttttttttttttttttttttttttttttttttttttttttttttttttttttttttttttatgttatttttattttttttttttttatttttttttttttatttttatttttttttttttattttttttattttattttttttatttttttttttttttttttttttttttttttttttttttttttttattttttttttattttttttatttttttttcttattttttatttt

SEQ ID NO: 24613 - DNA, 391 bp, Zea mays
  Clone ID: MRT4577_122454C.1
cttcaagtcctcaaccgttcagaacaatgaaaactttattggttttggctgctgttgttgggttcattgctttctctgacgcctgcattggtctcggaggtggcggcggaggttgcggttgtggtgctcctccccctccagcttgcggacccccgccatgtgctcctccaccagccccggcctgtgcaccacctgctcctgcctgtgctcctcctccaccagctgccccagttggagggtgcggcggagcttccggattcggaggtggacaacaaatcagcggtggtggtcccatcattgtctgcggtggaacagttgaacaagtccctgctagttctctcggaagtggcgctggcggttgtggtgctccttctggaggctgcggcggtgg

SEQ ID NO: 24614 - DNA, 255 bp, Zea mays
  unsure (1)..(255): unsure at all n locations
  Clone ID: MRT4577_122455C.1
gggggncggacgcgtcttgcctacactaacagaagactaattcaatcagtattttttccaaaatatggaactggggggggcgccctattattttttttcatcaaaccaaacctttcccaagctttttaattaatagtttctcttctgatacaatttttaatcatattttttcaaataaaaatataatttacccttcctttttcaaaggtggatatcaaaaaagcaaaacctatatattcttcaatgctcccccac

SEQ ID NO: 24615 - DNA, 154 bp, Zea mays
  unsure (1)..(154): unsure at all n locations
  Clone ID: MRT4577_122456C.1
cggttccccgnaccacactcgttcctcgcgggacccagnagcagccccgcgccagnagtaatttgttcttttaacaattgtcgcgggnaggacatgtttacatggccaagttggctgtagcaggctgaaggtatgaggagatggttgagtatat

SEQ ID NO: 24616 - DNA, 684 bp, Zea mays
  Clone ID: MRT4577_122457C.1
cccgctcgccatcatctcatctcatgatttcataaaatcaaaacccccctcccgtttccccaaacccgcgctcaattccaatctccctcccgatccgcccatccgccgacgccagccatccatggaccgacgcctccgctccccggcgcgccgtcccgagcgccagcagctcgcgggcagcggcagcccgcaccgcttcctccgcccgggcgcgctcgcgcggctccgcgactccagggtcctggcccgctccctccgctgtgccgcgcgggcgtgggcgccgccctcctcctccttgcctcctcgctcgcccgcgccgcccgccgcctgggacggcgtgccatgcttcctcgggcccgcctccgccgcgagggggatgcggtacccgttgcggaagaagctcgccgccgcccgagccgtggtgctcctgtccccgccgctggaggtcgtggaggcgttcatggacgcgttcgcgccagcggcgtcgccggacgtggtcgctgcgcactgagcggtagcttttgcgctcggtgctcgtcgatattcttggcattattaccaagttattagatacatatatggtatattatgtatagtgtgtagacggatccggttatgtttctgctagcttcttgtatggatctagaaatcgtataaatctaactatctaagaactgttgttat

SEQ ID NO: 24617 - DNA, 303 bp, Zea mays
  Clone ID: MRT4577_122458C.1
gcggggtcctgcttacctgctggcggctcatgatgcagtccgacgacgaaaccactgccgtcgtctccctgcctccacttccgtccccgcggggggcctccttcgttgccgccggcgccgttgttgactctgcgcattcccgcgcggggggggcgatgttcttttttttggctgctccgtcgggatggcttgcggtcgtggcggccgcctctggccctcttcggtgggccgtctgcgtgtggcgcctggtcctgctcgtcttggccgtccgcggtcgctgggggccgtggggtgcatcggcgc

SEQ ID NO: 24618 - DNA, 504 bp, Zea mays
  Clone ID: MRT4577_122459C.1
gggtaccctcggagctcgccgggccgggaccacccaagcatttatgggcacaaaaatcacgccacaccaaccacaccagcgagggccaagcaacctggctgcctactattaaaccatccgtgcgctccatgcaatcaacgtgagggcaacaactgcgctcattattccaaacagcaacctcgaccatacagccagcaacccgcagcctaccccacaaaatactcttacagggaaccgaacgccaacatggaactgctcactcgcgcattcacaggacgctcgacgactaccattcacacaagccaatggcgagagccctgatcccttcttgacacaaccaccgatgcaggccgtcacaccagcacactgacaccagcgcctaccacctctgaggcagctacacatggtgaaccctaaccaacacgcgcaagaacacctgctagcgtccaacccactagctatggcgaacgtagtcgcaaaccaggaacaacaacagctacaaca

SEQ ID NO: 24619 - DNA, 602 bp, Zea mays
  Clone ID: MRT4577_12245C.1
gggcaacatcgccatttgtattttataacttaagcaacaccttctccttgcgtcgtcttattgttttgtcgtaacgaagcctacttgatgacagcgtgcttcgttctacttccttttcgttatgctgaagccatgtgtctacacctttcaccatgatgaagcctgatggacgaagcttgcttcgttcctcttgtgttatatcgaagcttttctggtaacgaagcttctgtaatatttaatagtatgctgaaagcaaatggttagccgtgtttttgaggacgttcggaagagtaatgccccaacacaagtgaaattcaggaaacatcgctctgttattatgattaatcaacaacttgagtacactggaagctcccgttcaacggtgggctgtctgacagtttaagtatcatcaaggaaatattctgacaaaatctgttgttgataacgaccaaggactagaaaatttttgctttctcgttctgatgggtgcagaaaatcgttttgccgatttgcaagcgcaaagtactagttaagctacgatgtgagcaatctgcaaataatttcacgacagctaaattcgtttattggaaagagggttgtcg

SEQ ID NO: 24620 - DNA, 913 bp, Zea mays
  Clone ID: MRT4577_122460C.1
cattgggtacctcgaggccggccgtcggcagggccaacagtccctacaacggcgtcgatttcccgggctccatccccaccggaaggttcagcaacggctacaacatcgccgactacgtcgcaaagagcatgggattcgcgtgcagccctcctccctacctgtcgctggcacaggcaccggcaccggcacagagctccggccctggcctggcccagacggctctcaccattggcatcaactatgcttctggaggagcaggcatccttgactccactaacgccgggaacacgatcccgttgtcggaggaggtgaagtacttcggcgccaccaaggccaagatggtcgccgcagcgggccccagcgcggtgaacccactgatctccaggtccatcttcctcatcggcatgggcaacaacgacctgtacgtcttcggggcttcggagcgggcgcggaacaggtcagacgcagagcagcgaagggacgccgccgccgcgctctacgccagcctcgtctccaactactccgccgccgtgacggagctgtactcgttgggcgccaggaagttcgccgtcatcaacgtgtggccgctaggatgcgtgccgggggagcgcgtgctcagcccgacgggcgcgtgctccggcgtcctcaacgacgtcgccggcggcttcaacgacgccctgcgctccctgctcgtcggcctcgccgagaggctgccgggcctcgtctacgccctcgccgactccttcggcttcacgctggacgtcctggcggacccgcgcgcgtcagggtacaccgacgtcgcaagcacgtgctgcggcggcgggcggcggctgggcgcggaggcctggtgcacgcgcagctccacgctctgcgtcgaccgtgaccgcatgtcttctgggaccgtgtcatccgt

SEQ ID NO: 24621 - DNA, 503 bp, Zea mays
  Clone ID: MRT4577_122461C.1
accacttgtttttttttctgtctcgagtttttcccataacacatcatcacacggggagcaacacagacccccattagctccacgctctttgtcccaagccacagagctagcggggggcgcaaaaacaaacaggggggagagtaatcctcgagccgagggccatgggctcccctgcgcctttttaaaaactagaccgaacccaccggcgcccccccagcccacaggcctctcggcttctgtatgctcgcggagcgtgccgacccattgcccaccctttttgagggagccgctctcaagagcgggaggcccggtttgcccatccgctggacctcctacggagaaagtatctttatacaagacacactgtacaaaaatccctgccgtgggacatcccccaccaaaaggacattcccccctctggaaacaaaaacaaggtgccaccctgatctaaaggggtcttccatctggcccctggggccaaacagacgccaaaccttttttcc

SEQ ID NO: 24622 - DNA, 351 bp, Zea mays
  Clone ID: MRT4577_122462C.1
acacacatatatgtacacatatatccattaattgcgggtacatggatttacggacacgtgtacaacatttttatacctgcgagaatcaaacttagactcgtattcacggatataaactcacactcaaatgaacaaatctgtaccctatatagtttttaccagcaaccacgtagacaaaatgtgcctgttgccttgtctctaggtgaggggtgatgcggaagcgagtggcgatggcgcggcggacgagccccgccgcatgggaaactactggatgggacggctttgctgctgtgcagtgcaatgtgcaagcagccgtcgactgcagcggattaattgcctgccgtacgagcg

SEQ ID NO: 24623 - DNA, 889 bp, Zea mays
  Clone ID: MRT4577_122463C.1
tgggtacctcgaggccggccggggctgcagataaggttttggattggaccaagcataggctcgacttgaaccaagaacaaggtacgtaggagcaatccaaagcacccattgcacgcttctgcattgcagaggtagtagcaaggaggatcagcaatgtcttcccctccgccgcctccgatgtccactctgcacaagtgctgctcgtcgccgtcgcagccatcacctaagctaccgcctaagctgcagcgagctccggacagcaggcacaggcctatctgcggcggagccaggctgtcggtcaccaggagagctcacgccgcctccctcctcctcctcggcctggcgggcggtgcggtgccggcgccggtcagggcggcggaggacgacgggagcagcggaggggagggcgtcctcggcgccatcaagtccatcttcgaccccaacgagacgaccaaggccgggaaggtgctgcccaaggcgtacctcaaggcggccagggaggtggtgcgcacgctccgcgagtcgctggaggaggacgacggtggcgacatggccaggttccgccgcaacgccgacgccgccaaggagtccatcagggcgttcctgggcgggtggagaggccagcaggccgtcaccgacgaggagtcgtacgtcgcgctggagaaggcgatcaggtcgctggccgagttctactccaaggcagggccgtccgcctcgcttccacaggacgtcaagaacaagatcctcgatgacctcagcgccgcagacgcctacctgtagattttgcttctcctcagggacattgtattgcattgcatgcaacgcacatctcagacgatgatatggtttcgctctagtataatgacccgcaaaagctttccttcacagg

SEQ ID NO: 24624 - DNA, 1068 bp, Zea mays
  unsure (1)..(1068): unsure at all n locations
  Clone ID: MRT4577_122464C.1
agccatcctcgcctcgaatcctcgctgcaggtttcgttccaaagttctcggcgcgagtgctcgcccttccccaccgcaccttcggtgtctccaccacaatcaccgcggtggcttcaccgtgtccccgcaatcaccgtggcggccagatccactacctcgccttcctgccgggcgacgtcctcttcatcgcgcaccacctcgccacgctcttcgtcttcctgacctgctgccacctcgtccgccacagcgcctacgctctcctcgtcctcgccgaggtcaccagcctgctgcagaacgctggacgctcgccgggaactcggcacgagggcgggaccagtcccccgccgccgcccgcatctacggcgccctctcgccgcccttctacgcgctctacacgctcgtcaggggcgtcgccggcccgctcttcctcctcaagatggccaccttctacctgtccggccaggccgtcgacgtcatcccgtggtgggtgcggatctcctagatcctggttgtcggcactgccattgcggtcagcaacctgtggatttggaacctctggacggagctcgtcagggaatggaagcagcaggcccctcccaagtcaaagaaagacacataggccgccatctcactaccgtagtgatgatatgttaaaagccaaatttcggatggcattggtggagggtgcttatctgtaagctacacctattcattctttgattggaaaatcaggtccatgtgccagaaagtctacttttacctcaaaaggtatctgaagtgtacagagaaatggaacgtgctggatgcgctccagatagaaaggctagagaaacgttacatgatgcaactgtagttctagaacaaagaggatgtctctattgaatttggaatcattgctgttgtaattggtccattgtcaatgcatgtaacttcagggagcccaccccctttttgcttacacatgcatgatgcagagcanacacagggtaggcgattagttntacaccttgatttatacattgccgcttctccagtttacctgttctgatacactacatatggattatc

SEQ ID NO: 24625 - DNA, 644 bp, Zea mays
  Clone ID: MRT4577_122465C.1
tttttttttttttttttttttttttttttttttttttttttttttttttttttttttttttttttttttttttttggggaaaaaaactaaaaaaaaagggaccttaaaatgggggttttcataaaaaacatagaatttttttaaaggggggactattccattggggccaaaaaaaagtttgaaggctgactaaaagcgggacccttcttaaaaaatgggaccttggcctctttgagaaattatgggaaaaaaaaaaggggggggaaaggggggaacccccattgattttcctaaaaaaggggcatttttaaaaattggggggtcaaaaagggtttgggggggaaacggattcattgaaaaagtggcaaaaaaaatacccatccggaaaagggggctaaaacataaccttattgccgggggattgggggctgggggaaaaaaaaaaatgcttggcctttttgaaaataaacataaccggaaccattttaaagccgtagggacaaccgggtttttaaaaaccatattgggggggctacattgggcccaaaaaaaccatgggggggaatggggaccatcccccgcatagaaggggaaatgatggggcccataaatttgggggaagggcaaaaaaggggggtttgggg

SEQ ID NO: 24626 - DNA, 316 bp, Zea mays
  Clone ID: MRT4577_122466C.1
cgaagctcggaattcggctcgagccactcgtcgcacctttctctcccactgctcgtgggccgaccccggcccaggctcttacggacgcaccccagtgctatgtgcctacctgacacggctgctggagacgcacccaccacacctggagagggggcggaccagactccccttcccgccggagggcgccaatcaccaccgggagcagatcgcggcagtgaggcgaatctggcgctcctgccgactctgcgtggacgaggagtaagctgatcttacctcctacggacttaaaagtgtcgggaagagaccactgcatcca

SEQ ID NO: 24627 - DNA, 1414 bp, Zea mays
  Clone ID: MRT4577_122467C.1
ctgcgaaccgcaacaaatcaaaacgagccgcaatcgcagcgcagaggcaaagccgtccatctctctcaacgccgccgccgccgccccgccccagaccctaccctccacctccagtccctcgtcccaacgcgaccgattctcctcgatccagcactgatccggcggcttcccgtcccggctatggatttgctggcgtccttggccgccgaggagcggtggctgttcccgttgttcctcgccatgtacgccgccatctactgcgtgggccagctcctcgtgttccggcggtgggcgccgcggcagcggctggacggcgccagctgcctgatctcgctcttccacggcacccccgcggcgctggccgccgccggggccatcctcgcgctgcccgcggggtcccggtccttcgccgcgcccaacgcgcgcctccaggaccacgtcctcgactacagcgtcgcctacttcaccatggacctgctccactacctcgccttcctgcccggggacgtgctcttcatcgcgcaccacctggccacgctcttcgtcttcctcacctgccgcccactcgtccgccacggcgcctacgcgctcctcgtcctcctgctcctcgccgaggtcaccagcctgctgcagaacgtgtggacgctcgccgggatctggcgggaccagtcccccgccgccgcccgcgtctacggcgccctctcgccgcccttctacgcgctctacacgctcgtcaggggcgtcgccggcccgctcttcctcctcaagatggccgccttctacctgtccggccaggccgtcgacgtcattccgtggtgggtgcggatctcctggatcctggttgtcggcaccgccattgcggtcagcaacctgtggatttggaacctctggaaggagctcgtcagggaatggaagcagcaggcccctcccaagtcaaagaaagacacataggccgccacctccaagccgagtgccgagaaagaaggaaagatctacatcctcatgcaattcatctgagccaactgacacggtcttcgtgaatctgtcaggaaaacttcagcacaactgtgaatgcactcactgagcctattgatctatatagtgaatggcttgatgagtgtgcgcgtgtccacactgttgaaggcgacgatgatgcgttagcttgccccgtgtgatgaacctgttacctactgtccgtatgtactgtgctgtgattctcggaatgccatagcccatagtcagccattgcttggaataacttagtggctggctgctatgccactatgcaccttatctagggcttaccgaactacaaactgtttgttcttttcatatttggacaaccttataagtggcctttggctggacctatcctaacgcttatccctgcactggggtttcaccgcctttttct

SEQ ID NO: 24628 - DNA, 284 bp, Zea mays
  Clone ID: MRT4577_122468C.1
gcaccctccccgcagcagagacagtggacgtctccaccagaccactcgttgtcgttgaagcggtcgctccgcaccctccgcgaccccaccatgcccggctccggctccccctttctccggcaccgccaaccgcgtataaatatctgccgagaacgcgccatggcctcaacctccgctccgccgcccctcttcattttttactggtaccaccgccgccggccccggtctctccagtctccacacacgtatccgcagaagcggaggagctgcactgccgctcagag

SEQ ID NO: 24629 - DNA, 447 bp, Zea mays
  Clone ID: MRT4577_122469C.1
gccacgagcacgcgtgcgctcgctcgtaatcccgctcgaggaatctgattcttaaaccttatagagtgaaatttagatcctattgtcacccctactcgcacccctccctctgtcacacccaagtgctcaatgaaatgcgtaactctaccacatgtcattctaaggtgattactcccctgcaaacaaacagaatccctatctagcctagaaacaaatacagcaagttcgcatctcctgaaccgtacttttttcaccctgaccgacgctaggctcatatgcccgagccaaaaaaaaaacatccaggcaaacaggcaggctgcatcttgctaacctacttccttataaaattcaagcagtctgcatttcgttcatattcatatgctacagcctacaatagcgatgcctgatgtttaataatcttctttacaggcagtcaaggtcctatgg

SEQ ID NO: 24630 - DNA, 257 bp, Zea mays
  unsure (1)..(257): unsure at all n locations
  Clone ID: MRT4577_12246C.1
attgcggcacgagggtctcatgcgattagcgcggcggcagggcaggcatggagaaggaggcggcggcggagctggagatccctggtgagtgccagtacacgggggatccagtgttggtgcgaccgatcagccttcgccgcgcccaccttgccctctccacctcgcgacctggggtgtgggggattctcccttttgttctcnncnaccccctctccccttctgtcacggctgggactcggcctcttgggctgtgccgc

SEQ ID NO: 24631 - DNA, 1634 bp, Zea mays
  Clone ID: MRT4577_122470C.1
cgcaccaggccgtttcctcctcccgttgtcagcttcgtttcgcctccggagtctggcatccgcgtcgcgagtcgccaaaccaaacccaccgcccttataaagacaccttcccctttcccgtcgccctcctctgccctgctcgagctccccttccgcgctccctacccacaagcctttccgcaggtgcgccgcctctgcgaggtggggtgactccgtgaatgggtgacctgggaggaggagactggcgggaggcggtggccgagaaggggttggcggaagccgacggcgggcccgaccatctggtgatcatggtccacgggatcgtcgggagcacagcagattggaagtttggagctgagcagtttggtaaactgctctcagacaaagttatagttcattgtagcaaccgcaacatgcacaagctcactttagatggtgttgatgtgatgggtgaacgattggcacaagaggttattgaagaaatcaacagaagaccgtatatcaaaaagatatcttttgttgcacactctgttggaggattggttgctagatatgctattggaagactttataaaccacctaaacgaacatcagaaaatactccacaaactctggatgacaacaatataggtaccatacatggacttgaggcagtgaactttataacagttgcgtcaccgcatcttggttccagaggaaataagcaggttcctttcctttttggagttactgcaattgaaaattttgcatgctacatcattcatttgatatttggaagaactggcaaacacctctttcttactgacaatgatgatggaaagcctccattgctacaacggatggtggacaattggggtgacctgcaattcatgtctgctttgcaagcatttaggcggcgtgttgcatactccaatgttggtcatgatcatattgttgggtggagaacatcatctatcagaaaagattctgaactacccaagtgggttgattcaaccaacaagatttacccgcatattgtatatgaggaactatccaaagcagaagctcctgatcaatgtgctgacacagataactgcacactagaagaacaccttttacaaggacttaagcgcgtttcatgggaaaaggtggatgttagtttccacaatagtaaagtaagatctgcagcacatagtgtgattcaggtaaaagatcctgtgatgcatagcgaaggtgccgacgtcatacagcatatgattgaccaatttattctatagtaaaagccctggtctttggaaacagacctggaccaggatacgtcatttgctaactgcgggctgagtcaccagcctggtgagcacgtttatggaaatcccaggtataagacttagtctctgaatggtggatcaggtatatagttatagagggtggaaacacgtgcgcatgcctgttggttcatttagtcatatgtgatcatatacatgttgtacggtgcatgtaactttagtactatccttgtcattgtaaatgttcatttatttatagtattggtcttctacaccgtaattttgtgagaatattataagaaaaaaccggttgctttaaaaaaaaaaaaaaaaaaaaaaaaaaaggtactctgcgttgttaccactgct

SEQ ID NO: 24632 - DNA, 262 bp, Zea mays
  Clone ID: MRT4577_122471C.1
aactaatctctgagcatcagggaattttctttcagggacagaactgaaacgaacagaagtgagcatctcatctcactaattatggggccagaaaccttcaaaacaccatcggtgtccaaacacctagacagtgtctgctacaaaccctacaaccaccccgcatgggtagtggtcctcatacacagccgccatattcacaaagatgaccgacacacagaaacgaaactatagcgcttaaaactaacccctccaaaggaagacc

SEQ ID NO: 24633 - DNA, 657 bp, Zea mays
  unsure (1)..(657): unsure at all n locations
  Clone ID: MRT4577_122472C.1
cagagnaaagcagccacagcccacagctccccctggccggtggccgccactccacactccacgacattcaccaccaccacggcaccaccctgtccctgcagctccaacgtgcatgagagacgtcactcgcggtacccactcggcggcagaggcgctggcggcccgtcgtccgcgccgagcaatggcgtccccactgatctgcggctgcgccctcctcctctacctacttggccacctcgcgacctgccacgccgccagggacaccatcacgccgagcagcccgctgacggccaacgagacgctggtctcgggcggcgacggcaacttcgcgctgggcttcttcaccccgccgggcgccaacagcacgtacctcggcgtgtggtacaacaaggtctccctccgcaccgtggtgtgggtgggcaaccgcgaggccccgatcgcgggcgccgtcggggacaacccgggcgccacgctgtcggtctccggcggcggcacgctcgccattgccgcggggaacgggaccgtggtgtggtccgtccggagcgcgtccagcaggcggctggcgagcccggccgcccagatcctcgacacggcaacctggtgctgaaagaggtgccggcggcggcggcgccgtggcgtgggaagggttcgactacc

SEQ ID NO: 24634 - DNA, 659 bp, Zea mays
  Clone ID: MRT4577_122473C.1
ttgtttttttttttttttttttttttttttttttttttttttttttttttttttttttttttttttttttttgggtttcttttcttttttttttctttttttttttttttaaccggcccaaccatgaaaatttagggggggaaaacaacgaagggccaaccccaaattacaaaccagggccccaaagcaatcttggaaattcaaacgggggggggggggggggaccccaaaactccccggccccccgggaaaacccaaccccatctttggggggggtgaaaaaaactgaaaagggtttaaaaaatcggacaagggggggggggcaaaaaaaaaaaagcccttgggcttttgggggagcccccgaaaaaattcccccgggggggggggggggcccagttccccctgggtgggcccccttaacccgggggggggaaacggccccgcccccaaggggccccccccctggaccggggccatgccaaaaaagtggggccccaagggggaacccacgggcccaaaacccagggggggggggggcaacggggaaaaccccgcaagggggggagcctttgggcccccccccgggggtccaggggtgaaaaaaatcccggaaggtttgccaaagagggtttgtcccctccaaaaccccccggggggat

SEQ ID NO: 24635 - DNA, 298 bp, Zea mays
  Clone ID: MRT4577_122474C.1
aacacaaaaaaaacaatttatttgtaattttagaaaattaattgcaacaattcattttttttcagggtacctttttggtcactggaagcattccgttcccacagtaaacaaaggaaccttaacctatgttttaaagaaaaaagagcataaattgaagctaattttacatgaacataccgaacaacaaataaactagttccaagccccaatacggaaaaaaatttttttgtatgggcgtaacatttgcaaaaaggcctaaactttttccgttaaaattatagcaggattcctaaaacca

SEQ ID NO: 24636 - DNA, 378 bp, Zea mays
  Clone ID: MRT4577_122475C.1
gcggattcaaagactacaaaattctacccgtcaatcgggacctatcaatcattcaatcaagtctgtccctgggatctttttgaaccaaaaacgtccttataaaactggaaaccctgaaagggtttaatagtatattaatgattttttaattggaatggtccactgaattctttaataatttgtaatgccaacctaattaattgggttttttggttaatggggcctaatatggcccattccccataatgaataaaatgtaacttgccctaattttggggtaaatgtgtgttggtaaattagtcattaggcaactttttaatgctgggattcattagaacaccatggaaccttataattggttgggtaatggcaccaagg

SEQ ID NO: 24637 - DNA, 419 bp, Zea mays
  Clone ID: MRT4577_122476C.1
cttttaataattttcacaaaatcagatgctgaaatacaggggcaatttagaagagctttcggggtaaaaggcacaaatatttcaactcaaaaaagaaatgcgccggaaatggagagcccacatccctgtgaaagctgcgaaggcaacagagacgctatgacctgtcaggtaacaacaaccgtaccaacaagcacagaaaaagaacgagggggatttcattgaatagcaaagacattctcaatgctcacgagactaatgacgcacgctattactccaccaccttccaaacactaatgcaagcaatcctaacagaagaaaccaaagtatgatgctccaggaaggtctaaccatgaacgtgagccagaatagctcccttgatagagacgcgactggaaactggcttaactatctggtaacaa

SEQ ID NO: 24638 - DNA, 271 bp, Zea mays
  Clone ID: MRT4577_122477C.1
aacatacatatctataatcattcttatttaccatacctcagcattcggggcggggtttatctaatgttactatttccccccatgacccattatacccttaatacgactattcatgtgtaattacttcacaaacttatttttatcatcaataccatcatccttctttaaacatctcattcatctttttcattccataaacattatctttcccttatcttactactatccctaacactcattttaatttctttaccccacctaacaattctat

SEQ ID NO: 24639 - DNA, 433 bp, Zea mays
  Clone ID: MRT4577_122478C.1
gctggatctcagacctgcagccttgcaagtgattaatagactgcatcaagtgctgtatcgaaattcaccaagcgggctaggggctactaaaagttcctagggctcaatggttattcctaccgttcatgaatcacttcatcaatacaatccatgatctactgtgttatgtattgctgaactaactaatgcaactgcatctcaattatttaactggacttgatttttattgtcatatgatcctgtgttggctattggtaccgtttatgttgctacttcaactcaagctcattaatttcattgtgtgttgatgaaattgcttcatgattatgttattccctattttcttgcattaaccctgattatttattaagtttccttacctctttaatacttttttgttccttgctttttattcttattatatttttttctt

SEQ ID NO: 24640 - DNA, 333 bp, Zea mays
  Clone ID: MRT4577_122479C.1
atggaacacactgttacatcgggcacatgcctgcatggtccaaattgaaagtgtgtctactaggaagcagcagtccatgggaccaaatgaggaccgaaagtactgaaaaccaaaccaaccagccaaaatgacatggccggttgtgggtttttctcccgacaactctctcacaggcacaaggactacttgctctgacagggtgaccattcagtagcaaaacaactttgagagtaagacatcaaaattgtgcggctcatgcggaagtagctagatctggacgtgacggtccaacccaagggcgcaaacatacggcagcacagaaatggggcgtct

SEQ ID NO: 24641 - DNA, 599 bp, Zea mays
  Clone ID: MRT4577_122480C.1
cgggcggagcgctctagtccccgcgcgaatcctgcggatgacacattgctcatctggcctggggactagggaccatatgacgctctcgtatagactggcttacatgacactatgggatagtccatcacattcatcacctttgtggctataggaggctgacccatgtctgcctccttactaaccagatggaatatgcctgagattagcagatgaggcgggatgatcatccgtctcattttcgacacgttcttgactatgagctcctaataccttagatgccgagtatgtgatattggaaatacatagtgaaaggagcaaaggagtcttgtacagggcatctctgcacctatcctgtgagagttgcattcacatgatgcagatgatgcactaagatcgacacgatacttagcagatacatgatagggattataagacgtaatacagtttactccactattggtatacatgtggaccaaattgctcaggactccaatactgagcgtgtgctcaaactgcacgaagtgcgccattcgagcccttatgacatcggcgacggataccgattctgtcgatgctgtctacgaagacatgaaggtcta

SEQ ID NO: 24642 - DNA, 207 bp, Zea mays
  Clone ID: MRT4577_122481C.1
gcagtggaacaacgcagagtactttgtcttgtttaacatctggtctaccatttgacaatgtaaggtattgaggtacagatgcttgggttggataccaaatttcgttactgctggaaaaaaaaatataatatagttcagttacatattattcttgctagatagcggcatgaagggtttgatagttgagaccggtgttactgcttttgc

SEQ ID NO: 24643 - DNA, 422 bp, Zea mays
  Clone ID: MRT4577_122482C.1
cagagcccttccagctccacctgcagagagcagcgcacaggcacacgccgcgagtggcgagacccaaaccagcagccatgcagatgcagctcagcgttccgccgcaggttgtcgtgtgtctcgcgttagcctttctgctcccgtgccacgccacggcgacggccccggccggcacgatacggcgcgtgaccaagcagcagatcctggcgagcatcccgccgcactgggacgagaaccccgtgctgttcctgacgtcgccgtcggggaagtacgcggcgtacttcatgcgcagccagaccgagccgggcgccggaggcctgggcgccgacttctgctacgtcgaggtgctcgacacgacggcgccgggcgccgagggccggagcgtgtgggagtcggagtgcatggccgtgagcaccgtgaac

SEQ ID NO: 24644 - DNA, 343 bp, Zea mays
  Clone ID: MRT4577_122483C.1
attgataccaacaagcaacatatatagcgttatccagtcccatcaatacagcaacagtggagaccaagatattttccctccttatgctccgttgtatgcgtacatttcatgcatacacgacaatgttgcatctgtgatcacacgctcctatagcttccatttttccccgataccttgcatcaactatagcatcaggatgtgaaaacccatctcttacaaccatataagcttcaacaagcaatcgcaccaagcaacatacctttattgcccttggtgggtcatcaatcgccagcactatctttggtgcattctttaggacataccactagggctcatcagctgc

SEQ ID NO: 24645 - DNA, 197 bp, Zea mays
  Clone ID: MRT4577_122484C.1
tttattcgtgcccagcgccgatctagcaaaagccaccgtgtgctaccacttgctgccgagaccacaagcactaggacccgcgttgtgattccaccttcagccgcgaccccaggaccatgacgatagctggcttgcacaaatggcgaaaagagcaattctacacctacgcggatggacgctacaatgactggagcatt

SEQ ID NO: 24646 - DNA, 182 bp, Zea mays
  Clone ID: MRT4577_122485C.1
tgggtggacccacgcgttcgtgcgttgttatgtattccatgtgtacattttgctaagcattgctatctgaatctgaattggaggtgttagtctctggtggaaattttgactgatgtagaggtacacttctatctgtgttatcagtaaaaaaaaaaagaaaaaataagttcaataaggataaa

SEQ ID NO: 24647 - DNA, 414 bp, Zea mays
  Clone ID: MRT4577_122486C.1
gcggatatggggacggaaagcctactgataatgcatcaagattctacaaatggttcgctgagggggaagagaaggaagtttgctaaaggatcttaaatattgcgtctttggacttgggaacacgcagtatgagcattttaataaggttgcaaagatggtgcatgagctgctacaagaacagggtgggaaacgccttgttcctgttggccttgccttggagacgatgatgagtgcatcgaggatttcaccgcatggtatgaaggctacaataatgcaatctggttgcattccttcccctggtagacattatgcaatctagcttgttgcttcaaacgccaaatccatgaatgagttctaattcttggtgtcgattggtcctttatgtggatactaaacagaggtatctttgtccta

SEQ ID NO: 24648 - DNA, 511 bp, Zea mays
  Clone ID: MRT4577_122487C.1
gtacaagcttttctttttttttttttcttttttttagcggaaaaaaacaaatgtgaaaacccaacccaacaacaaaacaaaaaaaaggccgccccccacaaggggtggggggcgggcaaaccactggttgggccaaccaaggtgggggggggggcagcaatgacttgtggcgtataagggggccggccaagggcccacccaccgggctaaacgaacccaaccgaggggggttaagaaaggaaggaggcttaccccaaaccacctggctgaatgaaagaaatgattcggggctgaattaaccaggcaggacaatgcctcccagccggttgaaggaaaaaaataactgggggggggcagaaagaacctggctaactgaagggaattgtgggcccaaccaaaaaccaacctcaatgaaaccaacctacttgatggaaaaaaacaaacgggggtggcatgaaacctgcaaggcaggttcacaaacgcagtcggtctaccagaccctgcgcctaac

SEQ ID NO: 24649 - DNA, 280 bp, Zea mays
  Clone ID: MRT4577_122488C.1
gaaaaaaaaaaaataaaaaaaaaaaaaagtgaaaaaaaaaaaaaagaaaaaagattaaagggagtgaaaatggatgaactatgtatacactgtggtgtgtttctactcgggtttttctgttagaggataatgatctggtggtactgtttgttttactgtgagctagtattcttgtactgctgggtgtatgttttgagtttgtcttggttgcgaacttgctcttactgtatgccgttgttaattttttctgcattttgattttttatgagttgctcattgt

SEQ ID NO: 24650 - DNA, 421 bp, Zea mays
  Clone ID: MRT4577_122489C.1
gagactgcgaggtcccgcggattctgctacgcaaccttctgctccgagaactccatgctcgactctaggatgaacatgaacggccaggcgctcaactgcccttacatcaccgctaaccatctcgatgccaagataatgtgtccccggcgtatcatggcataatactgtcaataaacacggcggctgtggttttcatctatcaccaaaagaacagtgttatgtcggaaatagttcatactgcatattccactgctgtttatcctcttggcacagaggcgtacgactctacagtcctcggcaccagagaggcggaggcgtctactgctgcggtccctgcggcggatggagggactgatgtgtgggcccatcctggcttcgcccgagttatcttatccatctatagtatggccttaccgttcga

SEQ ID NO: 24651 - DNA, 530 bp, Zea mays
  unsure (1)..(530): unsure at all n locations
  Clone ID: MRT4577_12248C.1
gccggccggttcgtgaaccgcgaagcactacactacaccacaccacacacacccgacgacgatcacacacacgtagaagatcgagttcgctcgatcgtgaccgtgacgcaggaagctataagctagccaagacaggaataataatggcggcgtcgacggtggaggagctcagcgccacggccagccacgcccgcgacagcctcaaggagaccaacgccaacgacccgctcgagaagtactgcaaggacaacccggactccgaggagtgccgcatctacgacaactagctagtcgtatagctatataggccatcgacatgaaggacgaaggttgtagcacactacgaaagaatgatactctcgatcggcgcgtcatacgtggaatgaacttgtttgtatcaagctatctatacctcaatgcttctctacctgccgccgccgcaccccgtatgatatgtgatacacagctgggatggtnnaaaaaaaaaaaaaaaaaaaaaaaaataaaaaaaaaaaaaaaaaaggccccta

SEQ ID NO: 24652 - DNA, 528 bp, Zea mays
  Clone ID: MRT4577_122490C.1
ggggcgtcacaggatgaagtgagcgggctttcaaagccctggaaagtccccggaccttaatgcgcagcgatgcgcccacggacacgtgtacggcccacgagctggctctccctgcttcggtggggggctgagacacgtgtggagcccaattaaaagggagccggctctgggttaaatggccaactttgtctcacagttattcacttggtccactattggactaacagaacggggcttacactcctgtgacgcaccttttgtaaaaaaaacacaagggcggccgccctttactttatccttttcaagaccttttatgacttttttttggaaattctctatttttaaacgcatcatgctttttatcataaccttatagaggaggaatggcaaactattttgtgcaccattctttcaagcaaactattcttgatgtaacggtgggcgcccaaaaaaaagcgctggtgctccaccatcgttgtatatgctgcggttagagttgcttgctgtagctgcagggaagttcattca

SEQ ID NO: 24653 - DNA, 618 bp, Zea mays
  Clone ID: MRT4577_122491C.1
tcctcataccaaccgccgtcatgctaatactcaggtacatcattatctgagttaaacgatgccgcatgtacttggaactgcagaggccggacggagactagactacaaacacgggagcccaaaaccactacatcatctccgtcgagatgattgatgtgctgctgatgcgcctcccgtccgactgggatgggcaaatgatgatgctcaccgacaacaaggagatcaccaagctccagaagaacgagatgcccaccgacatcgtccaccacctcaagacgtggagccactgcgtacacgcgctacatgaacttccaagataatcgctgtagtgatcgtgaatcccaagcgagcagatcgaaaggttacgatatcactggacctatcggacatgaacgagtacatctttgacctactattgctatggtagcaaaagctatcgaactgagagcttgctgcaatatgcccacacttctatatgatcatcctattatcacctcctaaaaggcgtattggaatcaatggcccctttatgggtgctcactcaattttggaccagatacaatgtgcgatatgcgaggagatctatatatccatggatgccgtatactttctgactac

SEQ ID NO: 24654 - DNA, 324 bp, Zea mays
  Clone ID: MRT4577_122492C.1
agatgacattatctgactcgatccagcaactatggcataggacttctcaaattctatgcgtgctgcacattaacaattctgaaacctaactgcaaggaatacaatgccatatgtgaaataatcacttagctagggcaatatggaacacatgagcttcattagatatgacctactggctattattggggagtcagcgtatagtgcaagtgctttagtgctcatgtatgatcattttgctagcttatcaactcgttgttcaagaagaaggctcgactttctgcggaaagctggtattatcatgatgatgatcgccacagatcttat

SEQ ID NO: 24655 - DNA, 368 bp, Zea mays
  Clone ID: MRT4577_122493C.1
gttgtcttcttcactgagcgacttcagtctgttttgggggggccacaacaggagcaatgggcagtactacggtatattgtcagcatgaccttggccagcgcatccttgatgtacgcgcacgacccaagggactcgtaggacacacgctgggtacgccagagcaaaaccaaaactactggatgaccattattagcacctgagctgcaaggagcgactacggggcctgctgcgccgaccaggagctctacttggagctcaggttgtaacaaggaccgggtgcagcttttggttgtgtggtgggctgccccatctgtttccttacgggtcacttggatcatgcactgctcagatgcatgcgttggccaaga

SEQ ID NO: 24656 - DNA, 281 bp, Zea mays
  Clone ID: MRT4577_122494C.1
aaacaaataaaaacaacaccacctcaatccatccgatgtcagtcgagcaacatacatttatttacaaatcggtgaagtcctcaaaacaattacggggtattggaggtggacccggaactcttatcatttaaactatggaagataaggcatacaccttacccacctatatcagactaactctcttaatccaaatgattttactgaatcaagtagctttcaattcttacaagatcaaaaaatggcatctatcttttgtcatcaagactttcagaactatttcc

SEQ ID NO: 24657 - DNA, 627 bp, Zea mays
  Clone ID: MRT4577_122495C.1
gccggccggggaagcctatagaccctcatctgtgctcgacgaacaaccgacaagccgggaatggacgcggcgccgacggggcatcactggaccgtcgtgatcgccaagaagaccaacccggactgcatcaaaggccacaaccgtcgaaggtcgctgacttcccctccgatccgtcgacgacgaggtatccgcccgagtccttctccgggaaataaccgtcggcgcactgcagtagctgcggatatgtcgatcctccagcacaatgtacccgcccgtgatggcgatggaggggaagaactgcttcacgattgccagggaccgggggttcgacgagcagcttcacaacatcgagacagacttccagagggtgctcaagatccgcgaccagctctacatcggacgtctcagggctggccatggacgcccaaactgtgcaccagcgagaggtcttcatgcaccagctgcatcaactgcgcgaggagaggggacatgaagtgtgagagctttgccagccttggatctgcgctcctctacgataagagatccgtgcacatatgtctgtcagccagtcattgctggacttgtagatgaaacggaccattcagttggagcatgcactgcctcgct

SEQ ID NO: 24658 - DNA, 328 bp, Zea mays
  Clone ID: MRT4577_122496C.1
cttaagttttctatcatgagcacaccctgacggaggaggtgtatatataggggggcgagtaaactcatacacatgtggccaacatccaagttgtcatataatgatagattggggatctggttacacctgactaaacatacatgactaacgacgcgtggatgcctatgtaccaaaagcccttcctgacaaggaatctctacattcattcaactgagcagttcccctacactatagcacgatattagtccacggctttgtagtctttacattcagcaatggctactaacatgctgacaacctttgatattcgatcatgatatgatactac

SEQ ID NO: 24659 - DNA, 237 bp, Zea mays
  unsure (1)..(237): unsure at all n locations
  Clone ID: MRT4577_122497C.1
attttactatttatgntcttgcagtgattagtagtctgtaataaatctctccattcaatatatataattcacatgccagagcgagcatatcgtcaactggtccggcagttcgcgacaccatgagcgctacggtgtgcggcggcggtggtggtggcgcctagacgtcgtggcttgatgtggtcgtgctgtgcgtggatgacgcctagtaggtgttcctctaggactagtcggacgccg

SEQ ID NO: 24660 - DNA, 338 bp, Zea mays
  Clone ID: MRT4577_122498C.1
gccacgcgttcgtcgacgcgtccgtctgcatgctaggggggacaccctttgggcccgggggggggttgacctaattgacttcgcccgtcaccaaggacgagctcaaagtgaggctcgtctgcttcaagctgggatggtgcggattgtctctcgccggggtcacgagccttgcacggaccgcttagatattaattgagcccgggttacccattgtctaggacgaagaaaaaactgctacgacccatggcggatctgttagaggagagcgaacacaggaggccactgccctgcgctacatgtaggacttcgtcgaagtaagtgagaaaggcctgacccta

SEQ ID NO: 24661 - DNA, 1904 bp, Zea mays
  Clone ID: MRT4577_122499C.1
cactccggccttgcccgccgatctccagctggcctccaatcaaattatcaacccaacggcatttcggcgctcccccatctcacagctcatcattggacctcgagccggccgggaatccctacccaaatccacctccccgccccccaccgctatggctcacccaccaacctcgcgccgcttcgccctcgctctcatcctcatcggcgccctctgcaccgccgtcgccgccgcgcggttcgccccggcggacaaccacctccttgcgtgcggcgcggcggcgcccgccgtcctccccgacggccgccgcttcgtgccggactctggctgcgcatccacccgcctccggtcatcctccccgtccctctgcctccgctcgggtcttctcctgccgcgcgtcctacgacctcgatgtccgccgccgcgggcaccacatcctccgcctccatttctaccccttcgtccccgccctcgccgcgtcccgcttccacgtcggcgccggggggctcctcctcctccacaacttcacggcctcgtcccccgtcgtcaaggagttcatcctccccgtggactccgacgtcctcgtgctcaccttcgtccccgactccggctccactgccttcgtcaacgccatcgagctcgtctctgcgcccgaagagctcgttggcgacatcggcaccctagtcacgtccggcggcgccgctcagatacacgggctgtcgtctcaggtgtttgagactctctacaggatcaacgtcgcggggcgcaaggtcacgccattcaacgacacactgtggcggacatgggttaacgatgagaaattcctcatcgacaccgactcctccaactacatggtgtggtcgtccagtggccggattgcttatcccaagggtagcaagcagatgacaagagaagtggctcctgacaatgtctacaactctgcaagatccgtgaggccaggggtgaatgtgacttggggtttccctgtgcctgctagcagccggtaccttgtgcgtatgcacttctgtgacattgctagcaaggctctgtatgagctctacttcaatatctacgtcaatggtgatcttgcagtcaaggatttcgatctctccagtgcaactggattcttggcctatccttattacattgactttatcgtcgatgtgaaggatgaggggatactgaaattggcgattggtggcttaaagaagagtcgatctgatgaagtaagtggtatccttaatgcactggagataatgaggatgaacaagaccagtggaggtatggatggagacttcccaattgatctacacatggaatatgtggtgagtaaggggattggagaatttgcccgctccctgctctgtggtttcatctttgttgggttgtttgtggctttggtcacgctgatggtgaggttgaggaccgagttgaggaataacggcacagcttggtcctggagacagatgaactccgatgaagggaaactggccagaacatatcagcttgtgcccagtaagacggactattgaatattgcaggctgggcatctttgaggagtgacaacctgcggctgttgtgtgcatctaatcacatcatactttttattaagttgtaagtattgtagttttatcacctctctaaaagtattgtagttttgtatcatcactcctttcatgcttggactttgcattctccatgctttgtcaatggtcaatggaggacatgctcatgatgctgtaaaagtactctaccctagatgtggctgtattgctattgcctcatttattcagtttgacttctgaaacatggattcacagctgaattgcatttgaatataattagttgtagtggagacatttgattataaaagaaaaaaaaaaaaaaaaaagcggcaaaaagcggcc

SEQ ID NO: 24662 - DNA, 438 bp, Zea mays
  Clone ID: MRT4577_12249C.1
aagcactacactacactacaccacacccacccgacgacgatcacacacgcagaagatcgagttcgttcgatcgtgaccgtgacgcaagaagctataagctagccaagacaggaataataatggcggcgtcgacggtggcgagcctctctgtcccggtgacgacgacgaccttcgcggcgggcgggcggccagccacgcccgcgacagcctcaaggagaccaacgccaacgacccgctcgagaagtactgcaaggacaacccggactccgaggagtgccgcatctacgacaactagctagtcgtatagctatataggccatcgacatgaaggacgaaggttgtagcacactacgaaagaatgatactctcgatcggcgcgtcatacgtggaatgaacttgtttgtatcaagctatctatacctcaatgcttctctacct

SEQ ID NO: 24663 - DNA, 187 bp, Zea mays
  Clone ID: MRT4577_1224C.1
gtggttcggcgccggcaagtcgtcgtgccccaagaccggccaggtgctgactaatctggagctggtgcccaacaaggcgctcaagaacttgatctcgcggtggtgccgggagaatggcgtcgccatggaaggcagcgagcctggcaagcccgagccggcgccgccggtggccgcaaacaaggccgcg

SEQ ID NO: 24664 - DNA, 345 bp, Zea mays
  Clone ID: MRT4577_122500C.1
agcgggaacatctgacactacctgcctggcatccgcgcggacgacggaggaggagccccatccggccctgcacctcggtaaacgggctgtgaccgagaagtagaagacccacatggccaccaagcagtgcccgctggagcaccatgacggcaaggactgctccgcactcagccactgagacgcggaacccccacttcagcacggcctccatgcacagcacccagaaaccgctgaaggacgctctgtaccgacggggacggcagtggcatcctgaggccacgtcaggaacttgtcgatgccaacgacaagagagactagaacaaccttttttttcccccccccccc

SEQ ID NO: 24665 - DNA, 632 bp, Zea mays
  Clone ID: MRT4577_122501C.1
cccacgcgtccgcaaaaccatccacactttcccctttccccttctcttcccaaatcgtaacgagcgcagaccacgcatgcgtggtggttgaccgcagcgtcgagcgcagaccacgcacgtcgtcatcctctagcggccaaatccatctccggcgtgcggcggacgtttgagtctccgacgagcgggggtggtggtctccagtgagcggtgcgggcatgtctcccaggtgcgcggcgtgggctagttctcctacgagcgcggcgctgatccccctggcgggcggcgctggcggtcccaggcgtgcgacagctatgttcctggccggcagcgctaacggatctcggccgtcgtaacaagctgcttgaccggcgctgctcacacaacttgctgccccttgacgccgtttctccaccgagcatagaagacgctgcggcacgagttggctccgacgtacgacgcgtgcgagcacagaaaacatcctgcaggtgctactgcgggtgggccaccgcgtcactgagactgtccgcaacggtgtatcctaaatttttccctctagaagttactatacaaccacgtcagcaagattctcttccctatattcacttatcccgcaacccgtttcaataaattcc

SEQ ID NO: 24666 - DNA, 776 bp, Zea mays
  Clone ID: MRT4577_122502C.1
gaagctcaacagggatccctacccaaatccacctccccgtcccccaccgctatggctcccccactaacctcgcgccgcctcgccctcgctctcatcctcatcggcgcccgccgtcctccccgacggccgccgcttcgtgccggactccggctgcgcatccacccgcctccggtcatcctccccgtccctctcctccgcggcgccgcccggctccccgccgccgccgtccccgctcctcgcctccgctcgggtcttctcctgccgcgcttcctacgacctcgatgtccgccgccgcgggcaccacatcctccgcctccacttctaccccttcgcccccgccctcgccgcgtcccgcttccacgtcggcgccggggggctcctcctcctccacaacttcacggcctcgtcccccgtcgtcaaggagttcatcctccccgtggactccgacgtcctcgtgctcaccttcgtccccgactccggctccactgccttcgtcaacgccatcgagctcgtctctgcgcccgaagagctcgttggcgacatcggcatcctagtcacgtccggcggcgccgctcagatacacgggctgtcgtctcaggtgtttgagactctctacaggatcaacgtcgccgggcgcaaggtcacgccattcaacgacacactgtggcggacatgggttaacgatgagaaattcctcatcgacaccgactcctccactacatggtgtggtcgtccagtggccggattgcttatcccaggggtagcaagcagatgac

SEQ ID NO: 24667 - DNA, 1011 bp, Zea mays
  Clone ID: MRT4577_122503C.1
aggccggccgggacgacgcataggccccggcacgccaccccgacttgtcttctccagctcgacgcgctgaagtgattcctccactccggccttgcccgccgatctccagctgtcctccaatcaaattatcaacccaacgccatttcggcgctcccccatctcacagctcaacaaatccctacccaaatccacctccccgccccccaccgctatggctcccccaccaacctcgcgccgcctcgccctcgctctcatcctcatcggcgccctctgcaccgccgtcgccgccgcgcggttcgccccggcggacaaccacctccttgcgtgcggcgcggcggcgcccgccgtcctccccgacggccgccgcttcgtgccggactctggctgcgcatccacccgcctccggtcatcctccccgtccctctcctccgcggcgccgcccggctccccgccgccgccgtcctcgctcctcgcctccgctcgggtcttctcctgccgcgcgtcctacgacctcgatgtccgccgccgcgggcaccacatcctccgcctccatttctaccccttcgtccccgccctcgccgcgtcccgcttccacgtcggcgccggggggctcctcctcctccacaacttcacggcctcgtcccccgtcgtcaaggagttcatcctccccgtggactccgacgtcctcgtgctcaccttcgtccccgactccggctccactgccttcgtcaacgccatcgagctcgtctctgcgcccgaagagctcgttggcgacatcggcaccctagtcacgtccggcggcgccgctcagatacacgggctgtcgtctcaggtgtttgagactctctacaggatcaacgtcgcggggcgcaaggtcacgccattcaacgacacactgtggcggacatgggttaacgatgagaaattcctcatcgacaccgactcctccaactacatggtgtggtcgtccagtggccggattgcttatcccaagggtagcaagcagatgac

SEQ ID NO: 24668 - DNA, 229 bp, Zea mays
  Clone ID: MRT4577_122504C.1
gctttcactacaacctttcccagtgagtcttcctatggacccagggcatgctggagaagtttgtatactactctacttactctacaccacatgagccgatgcgccatacccacatcacggataagtattcaggaacatctaatgcactttcctgctataaaaacttactctctgtctctctctctatctctatatggataaaactgtgtgtacctaaaaaaggtgataa

SEQ ID NO: 24669 - DNA, 615 bp, Zea mays
  Clone ID: MRT4577_122505C.1
ccggccaggcccccagtacgaggagttcgtctgctgcgactccctggtgtgcccgacgcggaatctgtgcttgtattccttggaggccttcaccgtctgcaacatgcaccagctcatggttccagtctgacggacaagaccaagtacatcggcatcgggtgcgccatcgagtacgccgtatgggcgctcaaggtggaggacctcgtgagaattggccacagactgctggggcggcatcagggaggtcctctgcctccgaggacgggcacctgacaacttcgacttcggtgagaactgggttaagatgggtttccctgccaagattatagtgaagaaagatcacgtatcggagacgctcgatgaccagtgctctattctagagaaggaggccgtgaacctgtccctggagaacctcaagacctaccccttcgtcaaggaagggctgtgcaacgggacgctcaagctggtcggcggccactacaacttcgtgtcaggggagttcctcccatgggacaataaagagccatcgttgatctatatatatacactacatgatgcatgatccgaattcgcatggagctacataaatatatatataccggaatcccccaatac

SEQ ID NO: 24670 - DNA, 869 bp, Zea mays
  unsure (1)..(869): unsure at all n locations
  Clone ID: MRT4577_122506C.1
cttgggtaccctncggggccttccgggcagnagtgatggtgctgaagtacattagcaagaaatgaacaaatggaaagctggagcataagctgtgttatttcaaaaacagggaacatatctgagcacagtgagattatacctggaacaataacacagaaaatgtggcacgtccatgacgcgacgtactttcaccacgctcttgcaatacctagaaaatcagaacagtaaatgcttaaaggccaagcaacaaatgatcatcacaaaacttggaaagtacagataaacatataattcccagtcatgagaacataatgaatcaggcatgattccaatcgaatatttgaattggaaacagaaaaaacatgggttggaagaactttcataatatatcaatttgattgcatcacaaatagtaaacagtgatcaaagcaacagaatggagagttggggacattggcttttgtccaaaatgtaaaatgtctttgatcggagggactagaattttgcaatcgcttaaatgaaacctagttcatgcctgaacatggcattttgaagcgtgacaagaaaacaaatttccctagtagcttcttaaatactaaatggcaagtcatattagctgagaatatttatcaggggtacatatttctgcccatatgttcgatcagtaacaaagaaacaagagtttaataaaccagtgtgcactcacgggcagtacttgcaagacaacagccgtggatgacagagccaagccactcccaacaacaattgctgctggtcctggtagcacagcaaaacgatgagctatcacaccaacagctgcagtagtagctagcacctgccaagatcccaagccgaagacatacttcttc

SEQ ID NO: 24671 - DNA, 621 bp, Zea mays
  Clone ID: MRT4577_122507C.1
cacctacatgttattattattgcaatatatatacattttatggcgaatttccatatctgacatgagtgatggaatcagtgtgtcgtatcttactatttgtaggtctctctggtgattctagcttaagaatgctgaccttttataatgaatgtagacaaccatttttccttttaccttaaaactttgtatactatatattttcattaaagctttaatttcacttgataggaaagatgaaagtgttttctccgacccaacctacaatgtgtctgttctttttgggaagagagatgagccactcctactagcttgcgcacgtcaacttattgagcacataagtggctcagcccggtcattggtgatttctctgggtctgaaagatcattctcagttttgaactttgcagggaacgctgaaggatattactgtagctgtgatgattgaatagctgatgagctgggcatggggttggctcgatggttggcatattcagccccatcgataaagatactgtttagcattgcgcaagaggagccatcgtttataccatgcactaaattctggtagttttgtagttggaccttctatctacttggattaacaaaaggtggttttaagctg

SEQ ID NO: 24672 - DNA, 909 bp, Zea mays
  Clone ID: MRT4577_122508C.1
gttaaaaatataagcgaatgttgcaatgaacagagttccttgtactgctgtgatttgtcattggtcaaagagaactaactgcagcgtttgtctacctacaatacttgtttttttgttgttgctatcttgtagtgccagcagcgatgcctccttgttggtgctcggcaagtcggctggtgtgagcaaaatccgtacgtcgtcgtctccagtggtgtcattctaaactggatctgctgctctcgagaccgaacaactgcaacaaactcaggcagggactcagcatctacacatcctgttctacggtacgatgttcatttttattaaatctgcaggtgattgtgacacaaatcggctgcatgggaaccatactagctgccaagaaagatgaaagtgttttctccgacccaacctacaatgtgtctgttctttttgggaagagagatgagccactcctactagcttgcgcacgtcaacttattgagcacataagtggctcagcccggtcattggtgatttctctgggtctgaaagatcattctcagggaacgctgaaggatattactgtagctgtgatgattgaatagctgatgagctgggcatggggttggctcgatggttggcatattcagccccatcgataaagatactgtttagcattgcgcaagaggagccatcgtttataccatgcactaaattctggtagttttgtagttggaccttctatctacttggattaacaaaaggtggttttaagctggtgtcaggcaacacatgcgcaatgctaaacagggtcgttattgtaggggctgcaagttcacacactcgagcctgccacgtgctcagcctattagcgtgtcacccaacacagcttcagtggtctccgttagcgaaccccgagactgataaaac

SEQ ID NO: 24673 - DNA, 398 bp, Zea mays
  Clone ID: MRT4577_122509C.1
gagactagttgtgacgcaaaatgtcaatgcaaataaatcagagtgttctattgtttaggacgaggagttgtaattagatagagcgctgcaccacgtatgtcttagtagtcacaaaatgggagaagatataaagtattaaatgttgaggtatgatagctgccacagtaagccataacgggtccttcaacattgtcggtataagatagactaaaatctagtttaaattagtactggtatctaaaactctataaaatggctcttacatacgtacaccactatatattacatgttgtttcttatccaacagatcaacacacaatgcatgcagacccgagtttggacaatcgacaattctttttagcttctctatactttatacgggatcagagccataaaga

SEQ ID NO: 24674 - DNA, 345 bp, Zea mays
  Clone ID: MRT4577_12250C.1
cggcgacttgcgatgctctcaaggctcgagggaaggagacagccccccaaaggcccaaaccctctactcttctccttcccttccattcgggtcgagtgcagtggatggcagacatatcttgcggtcgcagacaacctcctgtgttctccccatctgatccagtgctgtacatcctcaaggtagtcaatggcgtcttccccggcggaggcctgagcacatgcactgtcctatgctaccgacgcaatagagaagggcaagcaacgctgggtgctgtggagggtgtggctagcgctcttcggtcaccgcgaggacttcgagaagcgtctgcaatacctatccaaggag

SEQ ID NO: 24675 - DNA, 448 bp, Zea mays
  Clone ID: MRT4577_122510C.1
agccggcgcggccgacctgtacggaaaggaggtgcttcatttttattgttttcaacaaagaccagggatacattgccaccattttggcatgcaatcttgtctgacgctgtgcgatttaggccaaagataccaatccatttcttttataaaaggggatctgtaatcctcacttagtcgaaacacataagaatgtactgatcaaaaaactggaaaactatcacatgactatctcaggctataaaatgcttgacttgatctctttatgtgggacaacaacaccactgttgctttatacatctgttacacacttgaactttctcacccacaatggtcatattttgtatccgcgaccattgcccaacagtagagagccacctaataatgctgtacccatatgcatgcctgcttatagatccccacaccactcatgacagtgcaacgggaaagc

SEQ ID NO: 24676 - DNA, 1475 bp, Zea mays
  Clone ID: MRT4577_122511C.1
cccagaatccggaccggtacgtcctctgcgccgcgcctcctcggctcctgccatccgtcgccagcgcccagcgccgcccgactccgccccacgtcgcgcgtagctcaagaccaagcacgtcttgcaccgcctagctcacctctacggccgccgaacctgcctccgccgttgccgactccaagctccactcgcctgaggtcccctcgtccgaggtgctcgactggacttcctccccccgaggtcccctcctatccatcgccgctcctccccgacatgtccaagaaggtcggtaagctaccgccgccggcggcggcgcatgaggaggcgagagaggagctgtttgcttcatgctctttcgccgacctcggcctccactctaccctctgcgcccaccttcaagataagatgagtttccaagcacccactcgaattcaagctcaggcaattccagttgccatttctggacagcacatgctagtgaaggctgctactggcactgggaaaactcttgcgtaccttgctccgattgttcacgttctccagatgagggagcctcgtgtggatagaactcatggaacttttgcgttggtacttgtgccaacgcgagagctatgcttacaggtttacgggattgcacaacagctggttcatcgttttcactggattgtccctgggtatgtcatgggtggggagaacagagcaaaagagaaagcaagactgcggaaaggaatatcaattctcattgctactcctgggcgccttcttgaccatttacagcgtactgcttcatttagctattccaatctgcagtggatcgtttttgatgaggctgacagcattcttgaacttggttttggaaaagcagttgaggatattctagagcacttgggttcaaggaatggcgctactggtcaaattaaaaacaaaggggggcatatcagaagacaaaaccttcttttatctgctactcttaatgagaaggtgaatcgtttggcaaaaattagtttgaaaaacccagtgatgatcggccttgatgatcaaagcaagccatcaggaaaatccaacaatgtagggaacaatcatacttctctattatctgatgaggatgatgaaatactggaaaagcagaatgatttaatggagcatgcagttgatgatttcaagcttcctactcaattggttcaaagatatgttaaagtttcatgtggttcgaggcttgcagttcttcttatgattctgaaatctctatttgaaagacaagtctctcagaaggtcgttgttttcttttcaacctgcgactctgtagattttcaccacacagcactcagccagcttgagtggagctctggcccacagcgtgatatggataagaagcaaaaatttcttagctgtaaagtgttccgtttgcatggtaacatggagcaggatgatcgcaagaagtcatttttgggttttggttctgagaaatcagcaat

SEQ ID NO: 24677 - DNA, 443 bp, Zea mays
  Clone ID: MRT4577_122512C.1
aaaaacagatggcagaaaccgcaaaggcggggaaaaaggaaaacaatggaacttggagggaacgcaccaagcatagttatagatgaagcaaacatagatgttgctgctaaaggcaggcatgcagccaagacccgaaacagtggacagacatgggtaagcgcaaacaggaaataggggcaagaaggtaactacgaaaagttcgcatcggcatacatcaaggctgaacagagacagaaggctgggaatgggctagaagagagtacatcccagggtcctgtgagaaacgaagcagctggacaaaaggagcaaaactgggccactaatatgcaccaacgactaagtcgaccgacacgcctgccgcaaccctaaagagagcaatgacacaagcaagagtgaaacaaaaggtggcccatatacacccccccaaggggagaagggcataa

SEQ ID NO: 24678 - DNA, 503 bp, Zea mays
  Clone ID: MRT4577_122513C.1
ggtatgcacctttattaaaatactactgcccctacggtttctgttgctgtaacttgcccttacgtgggtgtggatgccagggccatgaatggtaaccctgctgtgctggcatctttgggatttctcttcatcgggttgtggttaagcttgatggttccctcccccttgctctgcatatattcggtggctgcaaactgaattcagtgaagcccccctttctacacttaagtctagccaaggttctctgcatatgtgaggtgttcctggggtcttcaagactacacagcccctccccaatatcaaagtggatctgctctagaattcgagcatcagttcccgtgtctgtggtgagttggtgacaatagccgccatcctcccacctcaccgtggccagaacatggtcgcgccgccgtggatcggcgttgaagacaatcctactgtagacccgtcaactggcactttctctagccaatttttctcgcaagcactgaagcctagaatac

SEQ ID NO: 24679 - DNA, 204 bp, Zea mays
  Clone ID: MRT4577_122514C.1
gcaggtaccggtccggaattaattcccgggtcgacgagctcactagtcggcggccgccctttttttttttttttaaaaatcatggttgtaaccttatattatttttatctcgtgcaatatatattgatacaggcaaaataacattttgctcatttcctccgctcttgctcatcacgtgtcctgacatactaaaatctggtatgc

SEQ ID NO: 24680 - DNA, 602 bp, Zea mays
  Clone ID: MRT4577_122515C.1
cattgggtacctcgagggccggccgggatcctgtattccctcgtcacgtgatgcatctagtcggagatagtgcagggcgacccttctcctcaggctcaagagctctgctcgtgccgtggtcaaggctgctccgggacaaccgcgaccacgagctcccccatgtactaaaaagacgccaggcggagctcgcatgagatgacagccactactccgttatgactctccccctacagcttcactacaacgatacctagagacaacaaaggcacactcaaagtgctctagtggcaccatttgactgaccaacctgaacatcatcctgaacgactgatcctacgccttgaaccgaaccgacacccagatgtacaccttgccggtgatgacctactcacccactccagtaccacatcattgggacgatccacacaacgaggcgggcctactccgacgcggcctgcacctcctgtatcaactgatctagacaaagacgctcagactactgttaagcaaatctttggtacgctcacaaagaacatcgtacaacggacacgagtgaagcaggccacccatagatgaatgcaatcgacgtgcctagataaaca

SEQ ID NO: 24681 - DNA, 272 bp, Zea mays
  Clone ID: MRT4577_122516C.1
aaggacgaccaccaccaccctatctgctttcccgaagactgcgtggaaacctcccaacatcacatgaactagttcatgctcctaaatccatctgcctatccatgcatgcattgcatcgcgtattcacactgtgcttgccatacgcccaaacagctgcacacaatggcctccatgcatttctaacccgcctacacatcatcaacagatccatccatccatgtatttatactctgtattcctcaatcactcaatgaaaccccctctaattctgt

SEQ ID NO: 24682 - DNA, 2142 bp, Zea mays
  Clone ID: MRT4577_122517C.1
cggacgcgtgggcggacgcgtgggctctgctttcggcagtttcacttgagagctagctgagactgagagcaaaatggttcttggagcgttggcgagtgcagtcgcctcgatgagcctcctcatcgtctacggtgtcctgggcgctctgctcctgtggaaggccgcccggctgctggatcggctgtggtgggagccgcggcggctggagcgggcgctgcgcgcgcagggcctgcggggcacgtcgtaccgcttcctcacgggcgacctcagggagtaccgccggtcaaaagaggaggcctgggccaggcccctgccgctgcggtgccacgacatcgccggccacgtcgagccgttcatccacggcgccgtcctggagcacggcaagacgtgcttcacctggttcggccccgtccccagggtgaccgtcgtcgacccggacctggcgagggatgtgatggccaacaagttcggccacttcgagaagcccaagttcccggcgctcaccaagctgttctccgacggtgtggccaaccacgaaggcgagaagtgggtcaagcacaggaggatcctcaaccctgcgttccacctcgagaagctcaagctcatgctgccggcgttctctgcgtgctgtgaagagctcgtcagccgatgggcgcagtcgcttggccctgacggctcgtgcgagctggacgtggacccggagcttcagaccctcaccggcgatgtcatctctcgcaccgcgttcggcagcagctacctcgaaggaagaaagattttccagctgcaggccgagcaagctgagcgcctcatgtccatcattgacaaattcgccgttccgggatacatgtccttgcctacgaaaaacaaccgaaggatgcgccaaatcaaaagcgagatcgactcgattcttcggggcctgatcggtaaaagaatgcaagctatgaaacaaggtgagagcgacaaagatgacctgctgggcttactgctggagtcaaacgcgagagagacaggcgatcagagcggccagcccggccaaggattgacgatggaagaagtcatggaggagtgcaagctgttctacttcgcgggaatggagacgacgtcggtgctgctcacgtggacgatggtcctgctaagcatgcacccggagtggcaggaccgtgcgagggaggaagtcctcggactgttcgggaagaagaaccaaccgggatacgacggcctgagtcgcctcaaaacagtgaccatgatcctctacgaggtcctccggctgtacccgccggccatcgcgttcagcaggaaaacgtacaaggagatggtggtcggagacgtcacgtaccctgccggcgtgaccctggagctgcccgtgctgttcatccaccacgaccccgacatctggggaagcgatgcgcacgagttcaggccggagaggttcgccgagggggtggccagggcgtccaaggataggctagcgttcttccccttcggctggggcccgcggatatgcatcggccagaacttcgcccttctggaggccaagatggcgctgagcatgatccttcagcgcttccagttcgagctcgcgccgacgtatacccatgcgccgcgccgagttataatgctgcgcccgatgcatggtgcccagatcaagctcagagcgatatgatacgatgctagctcagggattcacatgtggctgttggtccaatgggctttgggctttcaggccaagagttgtgtcgtagcattggacctttttacgtatttttttcttctatccatggatgattagtagtcagtatctttccgtgtcttttcagttatcactagatgtaaacaccctattttacagcccctcacatacactacttggacacccacaaaaacagatcaaattttgcaacttaatattttagtaatttgtttttcttttatttatatggaccaccagatagtggatctgagggactataaaagagattctttgtatgccgtatgcaaagaattttttccgtttgatttaaaaaaaaaaaaaaaaaaaaaaaagaaaaaaaaaaaaaaaaaaaaaaaaaaaaaaaaaaaaaaaaaaaaggcaaaaagtaacagttgcacaaagacgaaagagaagtcccgaatttcaatgcg

SEQ ID NO: 24683 - DNA, 348 bp, Zea mays
  Clone ID: MRT4577_122518C.1
actaccggtcactcacttatcggggctacttaaatggtccatggggcttaccacacaatgcaaccaattaatttaaccatcctcacaaaaagaccaataaccacctcgcaagatgaggaaaaactaaaccataagtgcaaaaacacaaagcttatactcattcaaaataccttaataatttcacgataaattttgaatgattccttgccacatctacatgtagttttttatatccagaaaaatgtcaatggaattctcacttacttgcacatccagcttcagtcttgatcactaaaaattttacatcattcgaatcttgtggtactatttatcctcgacaaaaaatat

SEQ ID NO: 24684 - DNA, 336 bp, Zea mays
  Clone ID: MRT4577_122519C.1
tttaaaagggccaccaagaacagacgatgctatatcagtcaagtgcaggacacatacaaatcatcaatacacgatatcagcattagttcttttagttactccatcgttcgccttataattatgtcagacatatatatatgcactaggggttaatgccagcactggaagacatattacttgctttttcaggtggaaaggattcgagcttttcacagagcatcatctgaagattcagcgaagctatccacttgggctcacaacttgacaccattgagggcattcagatacgctggagaggaacttcggcgcctgttctacttttttacaccgttttag

SEQ ID NO: 24685 - DNA, 892 bp, Zea mays
  Clone ID: MRT4577_12251C.1
gtgcggcgctcgagccggccggctctcggccaaccgcgaagcactacactacaccacaccacacacacccgacgacgatcacacacgcagaagatcgagttcgttcgatcgtgaccgtgacgcaggaagctataagctagccaagacaggaataataatggcggcgtcgacggtggcgagcctctctgtcccggtgacgacgacgaccttcgcggcggcggcggcagcgggcggcggcgacgtgctgatcgtcgtcccgaggagggcgggcgctgggcgcgtctggttccccgcggcggcgcgccgcggcggcggcagcgggcggttggtcgccgtgcggtccagcgggccggccacgccgccggagatctccgacaaggtgtcggagagcatcaagcaggcggaggagacgtgcgcggacgaccagaagggcgacgccgagtgcgcggcggcgtgggacgaggtggaggagctcagcgccacggccagccacgcccgcgacagcctcaaggagaccaacgccaacgacccgctcgagaagtactgcaaggagaacccggactccgaggagtgccgcatctacgacaactagctagtcgtagctatatagggcgtggaatgatactctcgatcggcgcgtcatacgtggaatgaacttgtatgaagctatacctcaatgcttctctacctgccgccgccgccgcagcagcaccccgtatgatatgatacacagctgggatggtatactgatattttgggttaattttgaaaaaaaaaaaaaaaagtgccaagcgtgtttaaagtttgggataatggactgacggatactttgcatttcgcaaggaatccaacagcgtcgatcgagtaatcaatctccacccagtttgccgcc

SEQ ID NO: 24686 - DNA, 444 bp, Zea mays
  Clone ID: MRT4577_122520C.1
cgcgcccgtctctacggtcggcactggcccaagaatggcgtaggattctgtagcctactggtgtggaagtccaaactatggcgtttttacctgggatgacaaacttccaggaactcacgttcttgtgagcaggttgagactgtaactaagttcagggtaccgttacgaagaaatactgaggacattccacatcctgaccgacaatgcaatgtgctcatatgctgcctatattcaattcattcaacttcactaaagggggactaatacatctcgaccatgggaggcctcattcacttcagtacgctgtcacacgcaaatttccttgcttctctatacagcgactatcatggagcgtgagacacgcctgggcggtactggggacctatcttctacaccacataagtactccccatgtttgcctggtcacagcttgtctacatcctt

SEQ ID NO: 24687 - DNA, 833 bp, Zea mays
  Clone ID: MRT4577_122521C.1
ggctcccgacagcccacgctgacgctttgtggctccaaggtcctcgcttccatccaccccgacaggccacggctccgcccccaccgctctcgctagtcgctaccatggtggtatcctacacggaggagcacgtgtaccgccacccctggcaccgggtgaccgccgcggcgatgcgcaagttcacggacccggccgcgcgcgccgcctccggggcgctctcccacatcctggacgtccacacgctgtcccgcgacgtggacgcgcggtcgggccggctgcgcgccgtgcgcgccatcgcggggcggacgccgccgctcccgttccctatccgcgccgccgtggcgggagcgggcggcgacgtggtggtgctctgcgtcgagcgcacggacgtggacgcgcccgcgcgcgacatgcgggtggcctcccgtaacgccacgctccgggggctcgtcgacgtgcgggagcggtgcagctacgagccccacccggcgcggcccgacgagtggaccctgttccggcaggagacgaccatccgctgctgcgcgccgctggcggccgtggcggccaaggtggccgagctcgtggagcggcgctgcgcggagaggttcgcgcagaacgcgggcagggggaaggaggtcgtggagcgcatctgcgaggaccttgcggcggagcaggactcgctcgccagctgaggtacaagttggaacggcgaccaagagagcgtggtgtttgtgccagtgccgaaaattgctgatgcatcacggtgctttgctgtctgtgtgcagaggcttgggccttgtgtgatgtgtgattgtgaatgctccacgtcaaat

SEQ ID NO: 24688 - DNA, 1013 bp, Zea mays
  Clone ID: MRT4577_122522C.1
gggtacctcgaggccggccggggcctggcagagtcgacccaactaatcacgcccaatcagaacagactcggtcgcttcaccactccactcgccgcaggccgccgggcgccgccgaggggatcggagcaagatgttcttccacatcgtgctggagcggaacatgcagctgcacccacgacacttcgggccgcacctccgcgacaagctcgtttccaagctcatcaaggacgtcgagggcacctgcagcgggcggcacgggttcgttgtggcgatcacgggtgtggaggacatcggcaaggggctcatccgggaaggcacgggatacgtcaccttccccgtcaagtaccagtgcgttgtctttagacccttcaagggcgagatcctcgaagctgtcgtcaccatggtgaacaagatgggcttctttgcggaggctgggccggtgcagatcttcgtgtccaaccatttgattccagacgatatggagttccaatcaggagatgtgccgaactacacaacttctgatggatcggtgaaaattcaaaaagagagtgaggtgcggctgaagattattggtactcgtgtcgatgctacagaaattttttgcattggcacaataaaggatgattttctgggtgttatcagcgatcctggtgcggcagtgtaaatggtctaagaagcgagattgtactccattgttctgacttctgagtactatcgcagacgtgtgtaatcgctggtccgttaaaactgcaatggctgtactgactgcggaacttgttgagaatgatgtgactaggaccttgtttagggcctgtttggttctttagtatggccctgattggcacaactgctgcttattgaaaaaacagcttatctgataagctggtgaaaaatagcttctgcttgttgactgcttttagtgtattttgagaagcagctgaactgataagctgctgcagaagctaactgtttggtaaaacttttgcttaaaaaaaaaaaaaagcggcccccat

SEQ ID NO: 24689 - DNA, 756 bp, Zea mays
  Clone ID: MRT4577_122523C.1
ataccgaccccacacgccgccgccgccgttgcggctcgcttccgtccccccctgtccgcgcgggctgcctgcgggagcagggtggcagggcactccggcaaccacgtgggtggggaggcgacgacaccaccctatgctctgtcctcgcccgcagggtaagaggggccggctgttgcgggctctgggctcagacctctcacctcgggcctcagagcgagagtcggtccaacggctactggttccactgtctccgcttccagactctacgttccggtctcgttcaaaaccctaaacctttcctctccatcggactctcgccgccgccccatggcggcggaaccgagagagcccacatcctcgctggatgcccagctcgcggcctcttcctcctccgcagccggcgtaggcggccccaacccgtgctgcgcgacgcagtggaagaattgccagaaattggtgaggagccggacggcgctgcgggaggcggtgaagctcctgcaggctgagaacgagaagctgcggaaggagaactcggagctcagcaaagtgtgcaaggaggaacgcctccgaggtgattcagcagaagcatctagggcaactgagtctgatgccagagatctattggaaaaggagataattgaattaaagacacagaacatgagtttgaagcaaacacaaaatacctgcaaaaataatgatgaacttttacgtatctctgaattagaggaagaaatagaaagctcatacagattttag

SEQ ID NO: 24690 - DNA, 382 bp, Zea mays
  Clone ID: MRT4577_122524C.1
attcggctcgagctgcatcagcccatatttgggatgctgaggggtaaagactggaggcaaacgaggcctaaggattagtgacaccattcaactgatgggcaaagatgatctgacagccaagtttaaaatacaaagtggcatagccttgactgctgatatgatgtgcgtaaggatggatgagtgtgagtgtggatctgggaggaaccccatcaactctgaaagggggcgctcaggattgggcgctggtcctgcacgcaggcaatgctttatcaaatatgtgttagcacattgtgattggacaatgaactctgataaaaaagagcatggctcctgagctggaatagctaatgtgcctactatcagtgggttttacttaagaatg

SEQ ID NO: 24691 - DNA, 777 bp, Zea mays
  Clone ID: MRT4577_122525C.1
ccctgggccggccggcagcacagcccgcggaactgcgatggaggaggacactgtggccagccacaatacagcacgcatatctcagcccggtcagaatggcccttatggaagtcattacctgcatcctgtctcgaaccaccattacggaggcaactcttgttttggtgggagccatcatgggtcttcaaacaactcgatcccttcttacgccaggaggtgctacccaacatggacaaaatgcacaacagggacagcaatactttcctccaccccctggacaacaaccacatgagccatcttctggtacaggctatcctgatattcaagcgcacggcggccactttggtggcccgcctgatcaacatgcccagcagtcacagggctatagtgcaccgccaacctcaggcaatcagaactttcctactcctccacctggggcgccccacggagggtacaaccccttttataacgcaggccaggggagccagccgtcctacggtggccagccgcaattcgacagtggcgctcctcctgtgcctcatggttcacaccctcagtatggaggagcttactgagagactacagtgaacctgtatggaacaaccgcagtatttatgctactcttttgagttaccgaccaccttctcgttttggtatgcgatcgcaagtatattcgaagccgaagacatgtatagctctcctgtcacatacgacacttgcatgcttgatatgaaagtgtttctcgatgcagatgtgtgttgaaatgagtatagatat

SEQ ID NO: 24692 - DNA, 382 bp, Zea mays
  Clone ID: MRT4577_122526C.1
gaaaaaacctaaaaatttcaaaccctggttaaaaaaaaaattttccccccaaaacaattacaagcccaaaaacttttaaaaatttattcgacaaaacttggcccctaaaacggatagcttgtttgcttccgggatgaccccgaaaaagggaatgaatcccgttttttattaagaggaatttttgaaaatgtcctcattttcaaaagccctaaaaaccttcccattaaaaaggcctttttaaacctgaatttttgaaaaaaatttttaagggtccactaaaaacaaccttgtttttgacccccaataagccccattgaaaatccgcacaagtccaccaatttgagggatcacggtcttaacctaattttggtcaacccttaaa

SEQ ID NO: 24693 - DNA, 224 bp, Zea mays
  Clone ID: MRT4577_122527C.1
gtacagtaagctcggattcggtctcgaggataattgaccagcattttatctaagcgggcgattttactgtatcagagcagggagttctgcacaaacggctccaatagcacgacgatcaagctgcggcaagttcatctaaagctcaacctcagaattggccaactagaaaacatggaggagaagtgtagcaaggcacaacctctaatatactttttattgtataa

SEQ ID NO: 24694 - DNA, 362 bp, Zea mays
  Clone ID: MRT4577_122528C.1
cgtccgtttcagctttcataaacacaccaagcgaagcgcactagcaacaacctaacagcaatggctacggggagattatccctgcttgcgcttttcgccctactagtgagcgcaacaaatgcgtccattattccacagcgctcactcactcgtagtacgataagtgaacaggcccttcgaccaggaacttcaatgggcttctaacatgcatccgtgcaagcctacacgctacaactagcgcttgcagctagcgtcttacaacaaccaattgcccacttgtaacatcaatccttggcacatctaatcctacaatccatcgcaacgcaacagcaataacagtttctgacatcaatgagccacct

SEQ ID NO: 24695 - DNA, 304 bp, Zea mays
  Clone ID: MRT4577_122529C.1
acccacgcgtgcggaaggagcaggctgctggcctctaggaatatatgaacattgatctgcgtctggtgggggtatctgcttctgtgacgatgctcttaagtgatatcagagtagatctgacccattggaaagcgaagcctcccactgaagcaaaacctgccattcttgatgagtttgctcatcctttccctgagaatcactgctatactaacagagctttcgtggattgtacaccagatacaagcgtcgcctctcactattatgattgactaactaaagccatacatgtcattactgcaaacca

SEQ ID NO: 24696 - DNA, 696 bp, Zea mays
  unsure (1)..(696): unsure at all n locations
  Clone ID: MRT4577_12252C.1
agatccatcacaccacagccgcgaatagagaaggaaacatttccccataccttagcttctcatctcgatggccaacccccgtgtcttcttcgacatgaccggcggcgccgccccagccgatcggatcgtgatggagctgtacgccaacgacgtgcccaagaccgaacataacttccgtgcgctgtgcacagaagagaatggcgtgggcaagtccggcaatccgctccactacaaggactctaccttccaccgtgtcatcccccatgtcatgtgccagggagttgacttcacccgcggcaacggcaccggaggcgatttcatctacgaagataacctccccgacgataagttcgtccgcaagcacaccggccccggtctgctctccatgggcaacgccgaacccaacaccaacggatctcaattcttcatctgcaccgagcacatcccctgattggatggaaagcacgttctcttcggtcagctcgtccatggcatgcaggtcgtccatgccatcgagaaggtggcctcccgcagcgacctcacctccaaggaagtgaacttcgttgactgagctcaactctacatctctgntctgttgggctgccctcgctccgtcatagtcgacttgggctgcgtccgtttcatttcatttccttcgatctgaataatatgatgctgatctgagtgctgatctta

SEQ ID NO: 24697 - DNA, 249 bp, Zea mays
  Clone ID: MRT4577_122530C.1
actagttctagatcgcgagcggccttcttttctttagattggagaactcgacggcatgatggtgctgatctgtgccctagctctactggcgctcgctgcgagcgcattcttcagtacaagctgaggctgtggatgtcagacactacctttttatttaccgactccgttctatatgccgacttcggtctatctgcctccgtatcatcatccgtagccatggtaataccccattcaaccactctagctaat

SEQ ID NO: 24698 - DNA, 487 bp, Zea mays
  Clone ID: MRT4577_122531C.1
gaaaaaccaaaatgttaaaagggggggccttgaaataaaaaggggaattctaaaaccacaacctggggggggagggaaggaaacacccaaaaattacccagggggggccggacaaaaaaaaagggtttttaaaaccacaatgtgggtcgccaggcaaaaaaatttttgaagggggacaagttttccccctccttggaaaagtaataattggccatcttttgggggaccttctagtggaccttttccaggggggggaagatcaggggggacttggaaaaaatcccctattaaatgccctcgacgatgtaccaatggaaaaaaacccccttggggcacataaagttaaacttgtttgtaatggggaaaaaaaccttcaccaggttgggggaggtggaaataaacacaccgggcgctaaaccttggagagggggggaccctgcaccattgtgggggcctgggaggtgatgacctacttgaaccccggggg

SEQ ID NO: 24699 - DNA, 532 bp, Zea mays
  Clone ID: MRT4577_122532C.1
gtccgcgacacgcaccagcaccagcagcagaaagcgcccctcggccctcgctcccacaacaagctcaagccagccttctctctttctctgctccaatggcgcgcttccagctcgcagccgtggccatggccatgctcttcgccgcggcggcggcgcaggccccgaccgccaccccgacgccggctcccaaggcgtcccccccgccggcgacgccgccgccgacccccgcgccggtgtctccgaccgtgccgcccgcgaccatgcttacaacggcgtcccgggggaaaaacccctgggccccccccaaataaacgcggggagaaaaattccctttttcgcacgggggggtaataaaaaaggggccccccccgcgccccttaccaaagggtgggccccctagaggggaaaggggccccccccttttccgggtttataagccggggggggggggggttctcccccccggggccccgttatcttcgggggccctttatgccccttttttttttgtttttcccctcttttttgcccc

SEQ ID NO: 24700 - DNA, 1908 bp, Zea mays
  Clone ID: MRT4577_122533C.1
gttcttcaatccatgtggattagatggtattgcgtcggtttaagtccatagcaagtcaaagtacatcccaaacccactcaatccactccaatccatataaaatcatgtctaaacgaacaagctcttagaccgatcatggggccgtgcggggtccagcggtcccgggctcgctgcctgccaggctgccccaccgccccaagcagatccgggggccctgcccggtccagcggtcctgccactttcgtctgcctcttgctccttcgcagctccgccccgctcctcgccgctgtggcctggtccctttatataacgcctcccccttccggtccgcgcccctcctccgctgccctcctcgcctccctcgattcagggttcagcgaattcggacagaacccggcgtgtccgtgtcgaccgacccctccccctgcgagcctgcgacgagtctcctgccgctcttcccggccgggcgaaatggacggtgtcgttgtcaggagggtcatcccttcggataacagttgcctcttcaacgctgtgggctacgtgatggagcacaaccgaaataaggcttctgagctcagacaggtcatagcagcaacagtcgctggtgatcctgagaaattcaatgaagtgtttcttggcaaaccaaatgaagcgtattgtgcttggattttggatcctgaaaagtggggaggagccattgagctctctattctatccgaatactacgggcgtgaaatcgcagcatatgacattcagaccacccgctgtgatctctatggtcaggagaagaattacagtgaaagggccatgctcatttatgatggtttgcattatgatgctctcgctatgtctccggctgaaggtgcacctgaagaatttgaccagacaatcttccccgtcaatcatgaccgttccattggtccagcagaaggccttgccctcaacttagtgagggaggcgcaaaggaagaggagctacactgacacggcaaacttcactctgcgctgcggggtgtgccagatcggcgtcatcggtcaacaggaggctgtggaacatgcgcaagccactggccacgtcaacttccaagaatacaaatgacagtacaagatcagactgttgtgctgtaaacttgaccatcatttggttccaactgacattctcctcccgttggatatggttggcgctacattgtatcacagtgtaattcttacggggcaaacagaataatggtcaccttcgttctggacaatgtctatcttgcctgccaatgtcggttgaaattgaaagagcctacaatccattgtcgttctacatgccagaagaggtttgttggcccatgggccggatctatattgggcggtgtggcccggctgtatcatatctggtttatctattaggctttattcggttatttcaattctatgtggattggagtgtattggaatgtattgagatgtattttgacttgttatgaatttaaaccgactcaataccattcaatccacatggattaacagtaaaaaaaacaagcccttaatgagtctagttgatataaaatggattaactgacatggaaatagcagaccgttctctttgcaattttcatccattaaggcgttagctttattgcagtggccataagtcctcaacctataaggatgtttatattttcatcaaattatttaaggagtcaattcttctggtggtatgcttttgttcgttgacatgtgaagacggtttaatctcaacatgtactattggttctgttttctttgaaacagctcatggaggtatggtatccatgtgtttgtaggagtaaaaatgcatgaatgtatgcgagtgttttaagtagactatttataaattcctaacattttaagacacccgaccccccagtttggttccttg

SEQ ID NO: 24701 - DNA, 240 bp, Zea mays
  Clone ID: MRT4577_122534C.1
agagcttgagccatgccctcgtactgatcttagcggcgcatgggcgaacccgcggcgcagcgagtgaagctgcgtatctgcgtgagagactggagctgatgccggacacgcggtcgcggctgtgagtctcacgccagcctgaccacgcccgccccagggagtgccgcccgcccgcggagcttcggagcgcgtggcctctcacacaccgcctctggtctccatagcagagcgacactcggt

SEQ ID NO: 24702 - DNA, 455 bp, Zea mays
  Clone ID: MRT4577_122535C.1
gattgacgggcctattcggttgttcttcaatccatgtggattagatggtattgcgtcggtttaattccataataaatcaaaatacatcccaaacccactcaatccactccaatccatatggaatcatgtctaaacgaacaagctcttagaccttgttcggttatttcaattctatgtggattggagtatattggaatggattgtgatgaattttgacttgctatagatttaaaccgactcaataccactcaatccacatggattaacagtaaaacaaacaagcccttaatgagtctagttgatataaaatggattaactgacatggaaatagcagaccgttctctttgcaattttcctccattaaggcgttagctttattgcagtggccataagtcctcaacctatacggatgtttatattttcatcaaattatttatggagtgtttggtttgag

SEQ ID NO: 24703 - DNA, 474 bp, Zea mays
  Clone ID: MRT4577_122536C.1
cccacgcgtccgctccctcgattcagggttcagcgaattcggacagaacccggcgtgtccgtgtcgaccgacccctccccctgcgagcctgcgacgagtctcctgccgctcttcccggccgggcgaaatggacggtgtcgttgtcaggagggtcatcccttcggataacagttgcctcttcaacgctgtgggctacgtgatggagcacaaccgaaataaggcttctgagctcagacaggtcatagcagcaacagtcgctggtgatcctgagaaattcaatgaagtgtttcttggcaaaccaaatgaagcgtattgtgcttggattttggatcctgaaaagtggggaggtgagtttcagcactatagacctgtacatcagctttagagctgaaaatcagcttgaagtgtttccatggtattctatatgtgaactggatttcaaatgtttgcattattaacaagactttctttccc

SEQ ID NO: 24704 - DNA, 138 bp, Zea mays
  Clone ID: MRT4577_122537C.1
gttttatgtaatttgggccttgagatgtttctgaaccaaacagctaaaagagttcacgtgcgttttggggcaaagggtataatgtgatataaaatcacctaaattcaactaacttttaccaacatttacaccgtaaaa

SEQ ID NO: 24705 - DNA, 412 bp, Zea mays
  unsure (1)..(412): unsure at all n locations
  Clone ID: MRT4577_122538C.1
cggacgcgtgggtggattttggatcctgaaaagtggggaggagccattgagctctctattggatccgaatactacgggcgtgaaatcgcagcatatgacattcagaccactcgctgtgatctctatggtcaggttagtgatctttcttccccctaactacttatgccaaatttgttaacttacttatcagctttgcaccccttgacacaggagaagaattacagtgaaagggccatgctcatttatgatggtttgcattatgatgctctcgctatgtctccggctgaaggtgcacctgaagaatttgaccagacaatcttccccgtcaatcatgacccttccattggtccagcagaaggccttgccctcaacttagtgagggaggcgcanaggaagaggagctacactgaca

SEQ ID NO: 24706 - DNA, 292 bp, Zea mays
  Clone ID: MRT4577_122539C.1
cccacgcgtccggatcttagctagcagtttgttttcatttgtatgagcgatcgaaggctgggaaagatgaaaaagaacacagaaaagggaatgagaaattgactaaagctggtcatttttcctctccacaggctcaactctgtatgagaaaaaaaagacatttttccggtcactgtgattttgcatgatcccttcatgtatactacgcttgtaaaccaaatgagcatttccccaaaaaaaaacctgagaaagactgacacaaccacagtcaccactgctagccataaagaca

SEQ ID NO: 24707 - DNA, 380 bp, Zea mays
  Clone ID: MRT4577_12253C.1
cgactggccatttgtgggaatatttccaagtttttttatggcttaaacaactttttttaaatcacaataaaattcccaaaataccaaactttcctttatattccctactttcattatatcatttatttttataacactacttttcacacacttactctttctcttcccggatataccttctttattgcttgccttcaatcttcaccttatccattcttctcatcaactcgtcgatggcatctccattggcctcagcaactttttcatgttcttccaacgtcaaatcggccaagagttcatcaatcttaaccatattttcatcctcttcttcatcattcttctcaggggcatcacccttctcttcctcttcctcctcttct

SEQ ID NO: 24708 - DNA, 705 bp, Zea mays
  unsure (1)..(705): unsure at all n locations
  Clone ID: MRT4577_122540C.1
ccggccgggatcgtgcgtcgtcaccttcgaccgggtgtagaaagccgagagggaggagagagatcgccgttggcaatgatacatggatgcgtcgctaaagcggccttcatacttggtccagggagtaacccagatcccatggaagatgtacgcatgaagctatgggcgcacttactgttcggcgggctcggaatttttctccggtgccaaccaccctccgtggacccgcgccacgacgagagcaagcacctctatggcataatcgacggtacataaaagcaaattgagcttgaaatagggcataatacaaatctatatggtaccaagtgaaaagggtaagctccggacacttagtcaattattttgggtactaatcatatttttctaagtgctagggactttacgaagtcaagccaaaaggagcaaaaaagattctaaatagaaaagagaaagttggactactatgtgtagcaccggacggtccgatgccacccaccggacagtccggtgtgcatcggacagttcgatgcacggtccgaccaaatggctgctctggagaaaaatcagcaagcgtaggctataaatcatcagaaagtccgcacggagcgcgggacaatccaatgtgccagccgaccaatgactagtagacacgtcggcctgggaccaacgatcacttggnagcaccggacatctggttttctggta

SEQ ID NO: 24709 - DNA, 517 bp, Zea mays
  Clone ID: MRT4577_122541C.1
ggccgcttttttttttttttttttgtttttttttttttttttttttttttttttttttttttttttttttttttcattgttttttttttttttttctttttattttttttatacatataatttgtcacatttttggggggaaaacacccacacaaaaacaaaaaaaagagggccccaactgtctgacacagaaaaagagaggaaacgcccaacaaccacctttaaaaaaaaaagcgccaaaaaaactactacaaaaaagcgcaccacggcacacgctcaaagctcgccgccccggatgagaaaaaaaaaaaccgcccaccattgcaaaaagatttctgacaataaaagcgcagagaaaaccaacaacctcattcagaggaagaccacaccatacaggcccccgccccacctgaaaaaaaataacaaacccccacagcagcaaaaacacatgacgagctccagccagagaaaacaacgctggtctaaatggccggaaagggtatttaaaaaagaccgg

SEQ ID NO: 24710 - DNA, 1097 bp, Zea mays
  Clone ID: MRT4577_122542C.1
ggcaggaggtggccgtaatagccctcgccgagctccagcccaccgaacgggggcgagtccagacgaaggaacggcgagaacgaacctgacgatgagcacgaggaagtggtcgttgtcgacgaggacgaggccgagtcggacaagaacggggcgcccgaccgccaccacgccgggccccgcgaccgcttgctgcgcttcgccttcaccggtatcatcgcctccgttgacagcgcacagatggtcggcgtccgcagcgggccgggcggcggcgccacggcccggtacgcaccgtcgtgcgcgaacggccgccgctgctgcgcaagcgggggccgcccagccaacgacgcaaccacagcggggggaggctgcgcctgcggcggcagctcagagagcgagtcgtccatgatacgggacacccactccaactcctcgacgtcatgcgacggcaggtcaaccatctccggcggcggcgacgggaggtcgtacgtcacgaccgacaacggctgcgagtcgtctttcgacctctcctcggccgcggcgggtaccggcggggcgtcgtcgtcctcatgctcggcgccgtccttgtcaggctcgccaaactcctcgaggtccaacaagtcctcgaccgagaacccgtctttctcgacgagcgccccggcggcgtcggcgtcctccgcggtctcctccggcggggcgcagttgttgttacacttcagcgcgtccatcctggtatcatccttcaccggccggaaaaatacccatacaggtcgtatgtcaaaatcacaaattcccaacaccagaggggaagcagggcggttcaagaaaaaaagttttttcgtctctgggtttttttttttgtttatctctcggtataaataaaggaaacaaagaaaaacatccaaagaatctctttctgtccccctcaatcgtctacggacaacacggccggcaccgttccttaccagagggctgctatggtggtgcgcgtatgacggcatggcggaggagcctcgcaggacgggtggggtgcaggaacaacacggggccggggctgtggtggcggcgttggaggcgaggaggaagagcggacgcgtggg

SEQ ID NO: 24711 - DNA, 2089 bp, Zea mays
  unsure (1)..(2089): unsure at all n locations
  Clone ID: MRT4577_122543C.1
cggttcacattctacggcatgatggccgtggggctgacatctaactaccacatcgccgcgatcgtctcctcggcattctacgccatctggaacctcttctccgggttcatcatcccccgaccgaaagtgccgatctggtggagatggtactgctggatatgccccgtggcgtggacgctgtacgggctggtggtgtcacagttcggtgacgtcatgactccgatggacgacggaagggccgtgaaggtgttcgtcgaggacttacttcgacttcaagcacagctggcttgggtgggtggccgccgtggtggtggcgttcgccgtgctatttgcgacgctgtttggctttgccatcatgaagcttaacttccagaagagataatgacgataggagttgggaaatcgtctactaggagacaaagggatggttgcattcgctgggacgcgtaagtagatttgactgcgcaagccaagatcggccgctgccaactgggggcctcaccgccacccgttcttggaaaacagcacgctacttgcttgaaagcaaagggagatacttgccgcgttgggattctccaactccaaccaagacgaacgatttcatcccacttatttttaatttcttggttcggttcttgatcacctgttcttccttatgaccttatccaggaaattagattatcaggtgcattttgtgtgaggatccagacgcaggaggatggctctcaagaagttgctgcagctcttttgtgtcggaaagaaggattccaagaagaaaggtaaattcatcgatccactctggcaagcctctgcctcccgctcctctgtgaatgtcactgcaaacaagactcatttggatccctgttcaagtgggaatgacactgtaagcgtgcaaaaccatgaagttgaatcctcaagtacggtttcctcgtgggcaaggacagagcaaggaactgagattgctcatcatacgccctttagtcaatttgatgttgtccaagatttctcggatcaccactatgcaaagacttcagcaggaaaggtcacaaaggattgggtgaaggcaatccaaagtgaatgggatcttctacagaaaaacctacctgaatctatatacgttagagtctatgaggacaggactgatctgctgagggctgccatagtcgggccagcaggaactccataccatgatggtctgttcttcttcgatgtccgttttccttgcgaatacccaaagtgcccaccaaaagtatactaccattctggcggacttcggctgaacccgaacctgtacgagagcgggaaagtgtgcctgagccttctgaacacctggtggggcaaggggtgcgagaagtggggcaagtcgagctccagcatgctgcaggttctggtctccatccagggcctcgtgctgaatgacaggccatacttcaatgagccaggatccaagaactcggctgaaacgacaggtggtgagaggtgttccctggcttacaatcagacggccttcgtcagatcatgcaagacgatgctgtattcactccggaagcctccaatgcattttgagacccttgtgttgtggcacttccacgagcatgagcgtgccatcctcgacgcttgcagggcttacatgtctgggacagtcgttgggtcgtctgctgggactgggagcaaccgcagatacgtccatgacaagtgctttgcagaattccacaagtcgctgacgctctacactgaacatctcagggctgagtttgctgcaaacacaagacgagtgatggagctggaaacagaagacgagatcgtgcctagcatagcagctagcgtgaaatcgtgttgaaggcaaatgccccacggtgttgtatgttgctctcatcatcagatatttgctggcttagctatttctagcctcattctacttcattcatgtcacttgaataatctaattcatggcaattgtacctgtccctatacctagatggcttaaaatctgaaggtttattacagtttctttctgatgaaacaaaaaaaaaaaaaaaaaaaaaaaaaaaaaaaaaaaaaaaaaaaaaannnnnnnaaaaaaaaaaaa

SEQ ID NO: 24712 - DNA, 509 bp, Zea mays
  Clone ID: MRT4577_122544C.1
cgagtcggtcggggcacgtaccgcactgattgggctccaatatcggtcgctgccaactggggggcctcaccgccacccgttcttggaaaacgcacgctacttacttggaaagaaattagattatcaggtgcattttgtgtgaggatccagacgcaggaggatggctctcaagaagttgctgcagctcttttgtgtcggaaagaaggattccaagaagaaaggtaaattcatcgatccactctggcaagcctctgcctcccgcttcctctgtgaatgtcactgcaaacaagactcatttggatccctgttcaagtgggaatgacactgtaagcgtgcaaaaccatgaagttgaatcctcaagtacggtttcctcgtgggcaaggacagagcaaggaactgagattggctcatcatacgccctttagtcaatttgatgttgcccaagatttctcggatcaccactatgcaaagaccttcacccagccaaggccactcaggatcgggtgaag

SEQ ID NO: 24713 - DNA, 1302 bp, Zea mays
  Clone ID: MRT4577_122545C.1
gacactggccccctcccaaaggtgagtcgcttctcctcttccttgatcgccgatttccggcttctttccttttcccctccgccgccggggattgtggttgtggttgtggcttccgtatcctcatcctcatggcgtgatagaaggttgcttcgtttctttgattggccatggacgtacgtctttcgttttctcggtggggatgggagggggttcttgatagtgatgcgctgctgctacagtgctcctgctcctgctgctcgacgctgacggctcgagcttatccctccggcctccggggtctcgctctctggattattcctacttctttttctttctttttgtctcatcttgaattgaaaaacttggccctgcggtgtctcgcttccactggtcactggagcactggaccgatatatatatagagagagaccgaccgacctggcgtcacgcacgcaccgcactgattgggctccaagatcggccgctgccaactggggggcctcaccgccacccgttcttggaaaacagcacgctacttacttgaaagtaaagggagatacttgccgcgttgggattctccaactccaaccggccgggagacgaacgatttcatcccactaatcctttttcttttcttttcgtttttatttttaatttcttggttcggttcttgatcacctgttcttccttatgaccttatccaggaaattagattatcaggtgcattttgtgtgaggatccagacgcaggaggatggctctcaagaagttgctacagctcttttgtgtcggaaagagggattccaagaagaaagcctctgcctcccgctcctctgtgaatgtcactgcagacaagactcatttggatccctgttcaagtgggaatgacactgtaagcgtgtaaaaccatgaagttgaatcctcaagtacggtttcctcgtgggcaaggacagagcatggaactgagattactcatcatacgccctttagtcaatttgatgttgtccaagatttctcggatcaccactatgcaaagacttcagcaggaaaggtcacaaaggattgggtgaaggcaatccaaagtgaatgggatcttctacagaaaaacctacctgaatctatatacgttagagtctatgaggacaggactgatctgctgagggctgccatagtcgggccagcaggaactccataccatgatggtctgttcttcttcgatgtccgttttccttgcgaatacccaaagtgcccaccaaaagtatactaccattctggcggacttcggctgacccgaacctgtacg

SEQ ID NO: 24714 - DNA, 667 bp, Zea mays
  unsure (1)..(667): unsure at all n locations
  Clone ID: MRT4577_122546C.1
ttcccgggctccaaaacggccgctgccaatgggggcctcaccgccacccgttcttggaaaacacacgctnnacttgcttgaaagcaaagggagatacttgccgcgttgggattctccaactccaactccaaccaagacgaacgatttcatcccagtgcattttgtgtgaggatccagacgcaggaggatggctctcaagaagttgctgcagctcttttgtgtcggaaagaaggattccaagaagaaaggtaaattcatcgatccactctggcaagcctctgcctcccgctcctctgtgaatgtcactgcaaacaagactcatttggatccctgttcaagtgggaatgacactgtaagcgtgcaaaaccatgaagttgaatcctcaagtacggtttcctcgtgggcaaggacagagcaaggaactgagattgctcatcatacgccctttagtcaatttgatgttgtccaagatttctcggatcaccactatgcaaagacttcagcaggaaaggtcacaaaggattgggtgaaggcaatccaaagtgaatgggatcttctacagaaaaacctacctggtcagtttaagcaaataatgattattgttaattggagaatttacacctgaaatgagctgatcttctgttgctgctagaaactatatacgtta

SEQ ID NO: 24715 - DNA, 1101 bp, Zea mays
  Clone ID: MRT4577_122547C.1
cctcgaggccggccggggtgcgacccgttaaaataataacgcgtccgctcccctctcgagtcccttgccccacccaagtacccaactcgagcggtggagccttgcgtgtgtctaaaaatagcgcccgaatcgcggcggcagccacatcgagtaatttatcgagtcaggtgagagggcggagcagatctcgccggccggggccatgggtgctgccggcgcgatccggcgggcggcggcgtcggtggtcgacagggcgtgcgcggggacgcggggcttccgccgcgcgctggcgcggttcgcgccgcggccgtcggcgttcggccccgccgcagacgcggaggccgcggcggtgcgcgccgtgcggaacctccggaccttccggttccactacgccgtcctgcagtgggtgctgctgctggcgtccctggcgccgcggcaccgggcctccgtcgtcttcctcatggcggcgtccaagggcctcctcgtctacggcggcctcctcaaggcgttccccaactcggcgctgctccggaggctcctcgaccgccgcctcgtggccgccgtgttcgtcgcgctcgtgctcgccgacatcgtcgccgcgggcgccgtcgccaacctcctggccgcgctcgccgcgggcgtccccgtcatcgtcctccacgcgtccttccgcgtccgcgacgatctcgaggcgccctcgccggacgcggcggcggcggccgagaacggcaaggaggacgaggcgtcggcggtcgtcgagaagaaggaggacggcgacgtcgaggcggggcccacgcggcggtccatggcggcggcaccaagatcacccaaatgaggaatttactagtaatacgagctagtgaaaaccatacgtttttcgtaggtttttaatttaactactggccccgttgtcatggaacataggaacaattcgtggtcaaacctgtcttcctgcctgcttgttgattcatactttgagcctaggattttttttttttggagaagttcaatcagtagaatgtagtggtagctgtgacagacattgaacgtggaattgaggattaatacttataggggactcagttgtgaagtcctctattc

SEQ ID NO: 24716 - DNA, 285 bp, Zea mays
  Clone ID: MRT4577_122548C.1
gcggccggcccgacgggctccggctgcattaaggaatgcctcctgcacgttgttcgcgcggttagcccatgccttgataccatccagaccatgctggttgagactcgtggacctctttcttatacagtgacagctcgcctatgaaaaaggtcacatttgtctacgaccatgcttactgccatgtcaacattggcctgttgcctgccattggccagcctgctggcgagatgacagcatgtgttctttctagggatgtcactagatcaaaggggctccaacagctcc

SEQ ID NO: 24717 - DNA, 294 bp, Zea mays
  Clone ID: MRT4577_122549C.1
accactcgtacggccacgactatacgaacccaaagctaacagatgctgttgggcagaagtgggggagaccctttgagaacctatatacttttgatatggaaaatcatatacagttcacttagtctgtttaacattcgatttcacttgctccaaacgaaaaatgcgatccaatgttcgtgcgatttctgtgtaaaactgttatacttttaactgtcctcaactatccatttttttatatataatgtcttggtgttaaaaaaaaaaaagggcagaagatataaaggaaccaaaaat

SEQ ID NO: 24718 - DNA, 689 bp, Zea mays
  Clone ID: MRT4577_12254C.1
ccggccggggccggggactccacgcagaagcactacacaccaccacacattcccgacgacgacgatcacacacgcagaagatcgagagttcgttcgatcgtgaccgtgacgcaggaagctataagctagccaagacaggaataataatggcggcgtcgacggtggctagcctctctgtcccggtgacgacgacgaccttcgcggcggcggcggcggtgggcggcggcgacgtgctgatcgtcgtcccgaggagggcgggcgctgggcgcgtctggttccccgcggcggcgcgccgcggcggcggcagcgggcggttggtcgccgtgcggtccagggggccggccacgccgccggagatctccgacaggtgtcggagagcatcaagcaggcggaggagacgtgcgcggacgaccagaagggcgacgccgagtgcgcggcggcgtgggacgaggtggaggagctcagcgccacggccagccacgcccgcgacagcctcaaggagaccaacgccaacgacccgctcgagaagtactgcaaggagaacccggactccgaggagtgccgcatctacgacaactagctagtcgtatagctatatagggcgtggaatgatactctcgatcggcgcgtcatacgtggaatgaacttgtatgaagctatacctcaaaaaaaaaaaaaaaaaagcggcc

SEQ ID NO: 24719 - DNA, 1725 bp, Zea mays
  Clone ID: MRT4577_122550C.1
ggattgggtacctcgaggccggccgggacgcacgcaccgcgcaccgcactgattgggctccaagatcggccgctgccaactggggggcctcaccgccacccgttcttggaaaacagcacgctacttacttgaaagtaaagggagatacttgccgcgttgggattctccaactccaaccaagacgaacgatttcatcccactaatcctttttcttttcttttcgtttttatttttaatttcttggttcggttcttgatcacctgttcttccttatgaccttatccaggaaattagattatcaggtgcattttgtgtgaggatccagacgcaggaggatggctctcaagaagttgctgcagctcttttgtgtcggaaagaaggattccaagaagaaaggtaaattcatcgatccactctggcaagcctctgcctcccgctcctctgtgaatgtcactgcaaacaagactcatttggatccctgttcaagtgggaatgacactgtaagcgtgcaaaaccatgaagttgaatcctcaagtacggtttcctcgtgggcaaggacagagcaaggaactgagattgctcatcatacgccctttagtcaatttgatgttgtccaagatttctcggatcaccactatgcaaagacttcagcaggaaaggtcacaaaggattgggtgaaggcaatccaaagtgaatgggatcttctacagaaaaacctacctgaatctatatacgttagagtctatgaggacaggactgatctgctgagggctgccatagtcgggccagcaggaactccataccatgatggtctgttcttcttcgatgtccgttttccttgcgaatacccaaagtgcccaccaaaagtatactaccattctggcggacttcggctgaacccgaacctgtacgagagcgggaaagtgtgcctgagccttctgaacacctggtggggcaaggggtgcgagaagtggggcaagtcgagctccagcatgctgcaggttctggtctccatccagggcctcgtgctgaatgacaggccatacttcaatgagccaggatccaagaactcggctgaaacgacaggtggtgagaggtgttccctggcttacaatcagacggccttcgtcagatcatgcaagacgatgctgtattcactccggaagcctccaatggtgaactgaacaaatatgaatggatacttcatctcttgattgattgattgattgattgatatagcttcatctccttccctgcagcattttgagacccttgtgttgtggcacttccacgagcatgagcgtgccatcctcgacgcttgcagggcttacatgtctgggacagtcgttgggtcgtctgctgggactgggagcaaccgcagatacgtccatgacaagtgctttgcagaattccacaagtcgctgacgctctacactgaacatctcagggctgagtttgctgcaaacacaagacgagtgatggagctggaaacagaagacgagatcgtgcctagcatagcagctagcgtgaaatcgtgttgaaggcaaatgccccacggtgttgtatgttgctctcatcatcagatatttgctggcttagctatttctagcctcattctacttcattcatgtcacttgaataatctaattcatggcaattgtacctgtccctatacctagatggcttaaaatctgaaggtttattacagtttctttctgatgaatc

SEQ ID NO: 24720 - DNA, 1475 bp, Zea mays
  Clone ID: MRT4577_122551C.1
ctcgaggccggccgggacgatctcctgattgggctccagatcggccgctgccactgggggcctcaccgccacccgttcttggaaaacagcacgctacttgcttgaaagcaaagggagatacttgccgcgttgggattctccaactccaactccaaccaagacgaacgatttcatcccagtgcattttgtgtgaggatccagacgcaggaggatggctctcaagaagttgctgcagctcttttgtgtcggaaagaaggattccaagaagaaagcctctgcctcccgctcctctgtgaatgtcactgcaaacaagactcatttggatccctgttcaagtgggaatgacactgtatgcgtgcaaaaccatgaagttgaatcctcaagtacggtttcctcgtgggcaaggacagagcaaggaactgagattgctcatcatacgccctttagtcaatttgatgttgtccaagatttctcggatcaccactatgcaaagacttcagcaggaaaggtcacaaaggattgggtgaaggcaatccaaagtgaatgggatcttctacagaaaaacctacctgaatctatatacgttagagtctatgaggacaggactgatctgctgagggctgccatagtcgggccagcaggaactccataccatgatggtctgttcttcttcgatgtccgttttccttgcgaatacccaaagtgcccaccaaaagtatactaccattctggcggacttcggctgaacccgaacctgtacgagagcgggaaagtgtgcctgagccttctgaacacctggtggggcaaggggtgcgagaagtggggcaagtcgagctccagcatgctgcaggtctggtctccatccagggcctcgtgctgaatgacaggccatacttcaatgagccaggatccaagaactcggctgaaacgacaggtggtgaaaggtgttccctggcttacaatcagacggcctttgtcagatcatgcaagacgatgctgtattcactccggaagcctccaatgcattttgagacccttgtgttgtggcacttccccgagcatgagcgtgccatcctcgacgcttgcagggcttacatgtttgggacagtcgttgggtcgtttgctgggactgggagcaaccccaaatacgtccatgacaagtgctttgcagaattccccaagtcgctgacgctttacactgaacatttcagggctgagtttgctgcaaacccaagacgagtgatggagctggaaacaaaaaacgagattgtgcctagcatagcagctagcgtgaaatcgtgttgaaggcaaatgccccccggtgttgtatgttgctctcatcatcagaaatttgctggcttagctatttctagcctcattttacttcattcatgtcccttgaataatctaattcatggcaaaaaaaaaaaaaaaaaaaaaaaaaaaaaaaaaaaaaaaaaaagaaattaaaaact

SEQ ID NO: 24721 - DNA, 1001 bp, Zea mays
  Clone ID: MRT4577_122552C.1
acgcatccacccacgcgtccgggtccgctccggggctccaagatcggccgctgccaactggggggcctcaccgccacccgttcttggaaaacagcacgctacttacttgaaagtaaagggagatacttgccgcgttgggattctccaactccaaccaagacgaacgatttcatcccactaatcctttttcttttcttttcgtttttatttttaatttcttggttcggttcttgatcacctgttcttccttatgaccttatccaggaaattagattatcaggtgcttctatttgtttgtgcatctcttgtttgcgcctgcgatctggaccttttttggctcctcaacaaaagagaagatgagcctttcttgttggtagttacaaccggtggcgtctcttgttgtgcaggtgcattttgtgtgaggatccagacgcaggaggatggctctcaagaagttgctgcagctcttttgtgtcggaaagaaggattccaagaagaaaggtaaattcatcgatccactctggcaagcctctgcctcccgctcctctgtgaatgtcactgcaaacaagactcatttggatccctgttcaagtgggaatgacactgtaagcgtgcaaaaccatgaagttgaatcctcaagtacggtttcctcgtgggcaaggacagagcaaggaactgagattgctcatcatacgccctttagtcaatttgatgttgtccaagatttctcggatcaccactatgcaaagacttcagcaggaaaggtcacaaaggattgggtgaaggcaatccaaagtgaatggggatcttctacagaaaaacctacctgaatctatatacgttagagtctatgaggacaggactgatctgctgagggctgccatagtcagaccatcacgaactccataccatgatggtctgttcttcttccatgaccgttctccttgcgaatacccaaagtgcccaccaaaagtatactaccattctgccggacttcagct

SEQ ID NO: 24722 - DNA, 364 bp, Zea mays
  Clone ID: MRT4577_122553C.1
attcggctcgagtgaaattgtcagattttggactttgtaaaccattagattgtagtacacttgaagaaaatgatttttctgagggtcacaatgtgaatggatctacacaaagctcaactcctaaacgctcacaacaggaacaactgcaacactggcaaataaacaggagaacacttgcttattccacagttggtacaccagattatattgctccagaagttcttttgaagaaaggttatgggatggaatgtgattggaggtcacttggagctattatgtacgaaaagctggcgggatatccttctttttattctgaagatccaatggtaacctagcaggaagatagtaaatggggaaaacttac

SEQ ID NO: 24723 - DNA, 829 bp, Zea mays
  Clone ID: MRT4577_122554C.1
tgggtgcggggtcgaacggacgctcctggactctgcaatgacactaggcccatgacggatctgctgcacgtgctgccggactttgatgccaccccattctcccatctgctaccttcgctcgacaaggccctcatcaccaccaatgacgtcctcactctcgacgcgcccaccatcgccaaacgcgcccaggtgcccaccggcgaactgaggaagctcgcagatgccgtggttgctgccctgcaccgtcagcttggcttcgggccagaggaacctgcccccactcccaagcgcgactgggcttgcatcagcaccctcgatgacgagctcgatgctgccctgggcggcggcatcccgcgtgggtacctggtagaggtgacgggtgagagcggcgccggcaagacgcagctgcttctgaccctcctcttggcctctcagctcaagccgccccacggcttcgcaaagtcggcagtctacatctccaccgaagctgtcctgtccaccacccgtcttgcccagctattatccacccacccggctctagttgccctccccgatgctgagaagccttcactatcacgcatcctgagcatacaaacgcccgacctcgagtcgcaagagcatattctgcgctatcaactgcccgtcgcaatcaagaagcatgacgtaggcctcgtaatcctcgactctgtcgcggcaaactatcgcgccgagttcgacagcaaagcggtggaaatgctgctgcatccatggcacggcgtggcacacagctcgctcagctcggcgccttgctgagagagcttgcgcgtacagagggcattgccattgtcgt

SEQ ID NO: 24724 - DNA, 264 bp, Zea mays
  Clone ID: MRT4577_122555C.1
cccgcgtccgaaaaaaaaaaaaaaaaaaaaaaaaaaaaaaaaataaaaaaaaaaaaaaaaaaaaaaaaaaaaaaaaaaaaaatatggggagggggctttcctgcgaccaatcaaactttcccatcggctggtttgttgttgctttggtatactgacactattttcagattatgcaaggtctttttttggagaggctgcctaacttaacgaccccccaggctcttctgttgtttggctgtgcagactacatcggtatcatcgagt

SEQ ID NO: 24725 - DNA, 1129 bp, Zea mays
  Clone ID: MRT4577_122556C.1
ctcttgctgattcgtgagggtggggagcttttggtggcggtgacatggctggctcgatgagatacgaggagagaatgattcatgctgaggtatgctacttctgtgtacagccggccgggggactctgctcccctgccccagacccccaccgctcctcacgcctcgcctgactgccgaggcaatcccggaagctcctcccgcgcgcgaacatgatttggcctgaacaacgcagaggaagtgatcttatgtagctacaaaagatagtaatggggatatccaaggtgacaggcattgccgccacagcttttcttgtcacatctgttagtctgtgccagttgggaatgaggattattatgcttccattcctagccaccggtattgttgcttccattgtcacggttgcatcgcatgatgccatcaacctaccgtggatcttggggaagaactcggtcggaaggcttcctctttggtcgattatactgtttggtcctttcttgacgcttgctcggacatatgcgatggttaagagatacatgaggaaggaggcagtgtatgacaagatcgtggaaggcctatatctcggaggatggccgtttctcttgaaacatttgccccgcgcctggaaacccatctgtcatagactgcacttgtgagcttccaagaagttcattcgttccagcagacgagtatctttgccttgcaacttgggataccagagctccaacaccataccagatcgaaaaagctgcacgttgggcttgtgaaaagagatctgaggggaagccagtttatgtccattgcgcatttggttagtaacccacgttttgttataattacttttaggattgcatcttgatgtttgtattatgtacataattatattttctagtatttatgcactatattaactgttaggtttgttctttgtgatggacacattatgtcatggaagaagtgcccgtgttgtgtgtgcaattctagtagcgctgggtactgctgtgaactggaaagatgctgagaacatcatccgtgaaagaagaaagatataaatgaacgccccttacccgtaaaccttggaagagtggtccaaacaacgagttcgtcagaaaaaggataagtacgtgtaaga

SEQ ID NO: 24726 - DNA, 742 bp, Zea mays
  unsure (1)..(742): unsure at all n locations
  Clone ID: MRT4577_122557C.1
ccggccgggccgggaggaggtatatttgtattgttgacttgtttgccctccatctggattggtgtggttgcattgtagatttgtgtgacctttccttgtaccggacgtgcgcggtgcttctagatggccgactggtgtcgctgagatgatgacctcggagctgttcgggctgcatgacaccagatgctgctgatgatgctgccagacattggatgcacgccttcatgtatgttgctatttccagagcactttcgccgccttcttccgccacgactacatcttcttcgctctcttcgtcgtgtgctcatcccatccgggcattcaccacggattacccgtctcatctcgctattcgtaactggatctttctgtccgtagatcttgctcgtgttattcatgtatacattcatgctcaggacgtattctttacccctctgtcaagaagtatctctcttgatcaacatccctgatagagtgcgcatctatcaacctataatatgaggcatctgctgtgagactgctatcattaactcctccatcaagaaaacctatcagctgcttccagcgcaggtcatcacgatcagggccctaaggttctcaagctccaagttgcttttccattcgtcgctgatcattatgcaatctcccggaatccacgagaccacctactactcnatcatgatatgagacgctgatatctcgaaggacctgtacgccaacatcgtcctcagtggaggcacga

SEQ ID NO: 24727 - DNA, 189 bp, Zea mays
  Clone ID: MRT4577_122558C.1
gtgggccggcgccgggcgccgcgcagcagaacaggcgctggcgcgcgaacggatctcgtgttttccgacgccatcgcgcgagcaggccgtcgcgagcacgtcgggcttcttcgactggatgttcgtgggagagcgcgtctaccgcgcgctcgcggatgcctatccgttgctgaccgatgcgcgatatgc

SEQ ID NO: 24728 - DNA, 850 bp, Zea mays
  unsure (1)..(850): unsure at all n locations
  Clone ID: MRT4577_122559C.1
cactcctatgggcgattgggaccctcgaggccggccgggactcaacaccttacgtccctagccatcctccgccgcctccgtctctgcttccctagagccgtcgcgatggcagcagcccctgccggtgcccctgcaatcaccgcatcctcctcctttgtttcttcgtctccgttctgtctcaaggcatcgatgaccagccagcgccgacccgcggggagagtctccatcgtcatccgctgcgtcagtagcccgccggccgtcgacacatctttcaagactaatgtcccgcgcaatgctaatatggccaaactccaagcaggatatttgtttcctgagattgccaggagaagagccgctcatttgctgaagtttccagatgccaaaattataagccttggaataggcgacactaccgagcccattccaaatgtcataacaaatgccatggcagagagagcacatgccttgtcaacaattgatggctacagcggttatggagctgagcaaggtgaaaagaaactcagagcagcaattgctgcaacctactatgcggaccttggtattgaagattcagacatatttgtctctgatggtgccaaatgtgacatatctcgcttgcaggcatatgttgattcaagtgttatcatggggcaaactgatttatatcagcaagacgttcagaagtatggaaacattgagtacatgagatgcggtccagaaaatggattttttcctgatctgtcaactgtccctaggnaagatatntattttcttttgttcacccacaatcctactggtgctgctgcatctcgggacaactaaccaattagtaaattgcaaaggacacggg

SEQ ID NO: 24729 - DNA, 281 bp, Zea mays
  Clone ID: MRT4577_12255C.1
aaaacaatgtataattattgctgcctttctaaaaacccaaaatgtagttctctattaacctgaaatgtacactagcccagaacagtttaatggtacttactgagctatagcatagctgcttagttgtttttgagattttttagtcaacacataatggaaacttctttcttctaaaagttgccagtgccacttttaagaagtgaatcactatatgtgatgtaaaagttattacactaaacaggatagacttttgactccccttttgttcatttgtggaataa

SEQ ID NO: 24730 - DNA, 1940 bp, Zea mays
  unsure (1)..(1940): unsure at all n locations
  Clone ID: MRT4577_122560C.1
cgttccctacaccctactccctccgtcagccagcgaagttccttcggcgggaccgtacaccctccatcgttccctacaccctactccctccgtcggcccgggacggtccttcagtcactcaacaccttacgtccctagccatcctccgccgcctccgtctctgcttccctagagccgtcgcgatggcagcagcccctgccggtgcccctgcaatcaccgcatcctcctcctttgtttcttcgtctccgttctgtctcaaggcatcgatgaccagccagcgccgacccgcggggagagtctccatcgtcatccgctgcgtcagtagcccgccggccgtcgacacatctttcaagactaatgtcccgcgcaatgctaatatggccaaactccaagcaggatatttgtttcctgagattgccaggagaagagccgctcatttgctgaagtttccagatgccaaaattataagccttggaataggcgacactaccgagcccattccaaatgtcataacaaatgccatggcagagagagcacatgccttgtcaacaattgatggctacagcggttatggagctgagcaaggtgaaaagaaactcagagcagcaattgctgcaacctactatgcggaccttggtattgaagattcagacatatttgtctctgatggtgccaaatgtgacatatctcgcttgcaggtcctttttggatctaatgtgacaattgcggtccaagatccatcataccctgcatatgttgattcaagtgttatcatggggcaaactgacttatatcagcaagacgttcagaagtatggaaacattgagtacatgagatgcggtccagaaaatggattttttcctgatctgtcaactgtccctaggacagatattattttcttttgttcacccaacaatcctactggtgctgctgcatctcgggaccaactaaccaaattagtaaaatttgcaaaggacaatgggtccatcatagtctatgattctgcttatgcaatgtacatatcagatgacagcccaaagtctatctttgaaattcctggagcaaaggaggttgctattgagacagcctcattctcgaaatacgctgggttcactggtgtccgtctaggttggactgttgtccccaaggagctccttttctcggatggacatccagttgctaaagatttcaatcgcatagtttgcacttgcttcaatggtgcatcaaacattgcgcaagctggtggtttagcctgcctctctccagacggtctaaaggctatgcaagatgttgttggcttctacaaggagaacactgaaataatcgttgagacatttacatcactcggattcaacgtgtatggcgccaagaacgctccatacgtatgggtgcacttccctggccgcaattcgtgggatgtgttcgctgagatcctggagaaggccaatgtggtcactactcctggcactggatttggaccgggtggcgaaggctttgtgagggtcagcgcgttcgggcacagagagaacatcattgaagccgcaaggaggttaaagcagctgtataagtgagcaccgatgcagcttctgtgccctcctagacagatgtatcaataagaacacatcagggcaccaaaaatcgcttggtgaagctgccagaaaatgttagattttgtttttttaaattctcgtgcggtgtccacattcaaaccatttcgaactctagacaatgcttgttgtaatcctgagacccttcattcactggtgaagttgtgattgtcttgtctgtgttcaaaaaaaaaaaaaaaaaaaaaaaaaaaaaaagtgcgttgttaccacaaaaaaaaaaaaaaaaaaaaaaaaaaaaaaaaaaaaaaaaaaaaaaanccctagggggggggcccggcccccatttccccttatagggagtggttttacccc

SEQ ID NO: 24731 - DNA, 505 bp, Zea mays
  Clone ID: MRT4577_122561C.1
actcgttcgcccacgcgtgcgatggattggtggtattggaacttgccctgttggacgaatcaatactggtgtcataacccatgatgtgctttatctctttaagctattgatgtatctactgttgataggcctagcctatattcatcatgaacctgtagtctggcatattgatgtagaccctcaaaacttttaggttgatactgttactgacaaggatatgctgtgtgacttatgtggcctacaactccctggttgatgctgaccaggaatatgctacatatgccttcaggtcatgatcatgaaccaccctggccagattggcaatggctatgccccagttctggactgccacacctcacacattgctgtcaagtttgctgagctcgtttccaagattgataggcgatccggcctggagctggagaaggagctcatttttctaaggaacggtgatgctggtatggggaagatggttcccactaagcccatggtggtggagaccttt

SEQ ID NO: 24732 - DNA, 346 bp, Zea mays
  Clone ID: MRT4577_122562C.1
tgctcggaattcggctcgagggatgagcctttttttactcataaatcatctgctatttcaatcaaccatgtggatgacaaatgggccaacaactgttacatcgataaaatatgctgtggccggacagtgttatcaggctagtaacgctgcatccctaactgagaagagcatgttcagatgagtatatatggagaaaaaagcagcaatgtttactgctcctctctattactctctgtctgtgtaggtgacccgatcaagatgaagcaccttacagagtgcagaggaggagcacatgaaagaccccagaggactgtcgaaagcaatttgccaataagcatacgatgag

SEQ ID NO: 24733 - DNA, 258 bp, Zea mays
  Clone ID: MRT4577_122563C.1
aaccattccaaaccaacttccggaaaattaattcgagaaagaacaacgacatgaaggcagaccaaatacgggggacagaatgaaaccccaccaaatgaaaaagcgggaagggacaacacccaacgaccccctgaacgctatacaaaaagccacctaaagccaagagaatggctcgggagacagccctaggagatacacatctttgacaaataaagatgagacacagggggggttcgtccccaaaaccaaggaaggtac

SEQ ID NO: 24734 - DNA, 287 bp, Zea mays
  Clone ID: MRT4577_122564C.1
aaaagcttggtctcagggcaaataaattccaagaacttattgcaaccaaagcctagatctccatcatgtgttaaataatctcaagttcaagatatgtatcatattttgcaagaattcattgtttaattaagtagaacttaattaaaaaaactctttgagttgcaagcatgatcacagcgtccagcctggctccatagcccgcgacacctgcgtggtccatgatctttttgggttagcacatatagataatcatctcgaaagatgtagacctcataatgatagcattt

SEQ ID NO: 24735 - DNA, 240 bp, Zea mays
  Clone ID: MRT4577_122565C.1
aaaaggatgcacgcatcatattgaacattgccttaagccagttcacaagacactaccagccgatacctgcgcaaaccaaatttggacaaacagtcgtaactgacggaaaaacagtataccacagctgtgacatttaagacatgctactcacaatgcatgaacagcattcagaacgtaaaccttgggatatctgaagtgccaactgcagataattgaccgcactgttataggaaacaaagt

SEQ ID NO: 24736 - DNA, 495 bp, Zea mays
  Clone ID: MRT4577_122566C.1
ccactcgttcgttaaattttttatcttttccctcgccgcgcgacgggccaaggacccgaaagagatgcactttattgcgttaccgcagtgaggactgcaactccgccatacggcctcaccgaaatattcgtttcgccccactgctggccctaaatggtgaaacaaggtttgttgggctgccccggaataggaatgcttttgtactgatcctaagccggggaaccttgctgatgctggtgtatggaatgaagcctaaacctctgcgtttcggtgggaatcccagcggagctttcccttcgtcaccgactttcgggaacggcaaccgttactgactatgtccgttggtctacataaaactggtcgagttgaaagggacattgtaccctgccgacccttgtggtttttattgataggggagcctagaagaggttttggcgaagctttgcacttaggtggaggggatgattgttttgggggggatgggggctttcaccc

SEQ ID NO: 24737 - DNA, 450 bp, Zea mays
  Clone ID: MRT4577_122567C.1
ggatacctgacctcgttgatgtattgtgaagtcctcttggattcagcacatttcatcatgggatcctcgacagaagaaaacgtgaaggctttgctaaaagtccttgtagactgtgccgaagatgccaccaaatcactgggtggtttagtagatcatgcttcagaccacatgcatgatgaaaagatcgtatctagaaccttgtttgtcattaaagaaagactagaattgctacagcaagatgccttagatgcaaaagtgcaagcatttccagaaattgctaagtatcatggggatgacataagtcttgaacctacaactccatcgacctctccaactgttactgatcgatcttttgatgaatacgagaatgtactgacccgatgtcagtgatgagtggtacttcaccgattctgataggtctacacgcaatagctactggaatatttatta

SEQ ID NO: 24738 - DNA, 123 bp, Zea mays
  Clone ID: MRT4577_122568C.1
atgtagcaggggcattgacgcctagatatatgagaggatggatagaactgcaagaacacgcgaggagtaaagagttggtggacgagcgtgaggatagaagggcgtgatgataagatttcatgg

SEQ ID NO: 24739 - DNA, 388 bp, Zea mays
  Clone ID: MRT4577_122569C.1
gctgtgtctttgcagagtatcgggtagtcctttcaatcctcagccatggcggaacagacggagaaagcatttctcaaacaacccaaggtgtttttaagctctaaaaaaaatgggaaaggaaagagacctggaaagggcgggaatcgcttctggaaaagcattgggttaggctttaagacacccagagaggccattgaaggaacatatattgataagaaatgcccatttactggcactgtttctattagaggccgtatccttgccggtacttgccatagtgcaaaaatggtaaggactattatcgtccgaaggaactaccttcactacatcaagaaataccaaagatacgagaaaaggcacagcaatatcccagctcatatatccccct

SEQ ID NO: 24740 - DNA, 926 bp, Zea mays
  Clone ID: MRT4577_12256C.1
ggtcgcctccgggccggccgggagtgaactcagctccgccgcgcgtgtcagccgatggaagagctgcgggccgccgtgacggcgcacttggaccaggtagcgggcctcgtgcaggcgctctcctccgagctccgccgcggcataggtcccgccgccgacaacctgcgcgccttcatccgcgccgttgactggacggagccatggctcatgtgcttgatggcattccatgtggttctgctgctcactgctgtagggttcaggaggaatgccaatttccagctattcttgttatttcttgcttattcaggagtgtatctagctgaaaagatgaacagatacctgggagagaactggaagagctttaccagtaggaattattttgaccgttctggagtttttatctctgtcgtctggtctgggccccttattgtcatatcgattgtcagtgtgattagcagcctcgttgcattatgtcgattgatggtgaaatggaaaagagcagaacttaggcaccgggctcgacttgctcatgacaagaaggattgagagaagagaaaaaaatccttattatgggagaatcgaatgatttagtgattttgaacttttctaagtttgtatgccgcttgtcaacagggcactcaagaattaagtgttggaaatcctggataagcgaggagtgtctacagctattgttcctgctggtcactgtaggacagtagcagctagacatacttcataaaaaaatagatatggtacctgtctctatcttgttttagattgtagatgtaaacatggatgtaatcttgattgaaactgccaagatttgtagaacaaagcctcactgtttcgtttcccatcacaaatatgaaatatgagacgcggaagtgatacgagtaaaaaaaaaaaaaaaaaaggcccctagggcc

SEQ ID NO: 24741 - DNA, 567 bp, Zea mays
  Clone ID: MRT4577_122570C.1
aaaaaaaccacccccaaaaaaaaatatattttttagttgtttaaaaaggacaaaaaaaaaggggaaaaaaaaaaagggccctcttgacccgaattggggggggcctatccccttatccaaattggccgtttggacccataaaaggggaatcccctttttcaagttgaaattatccctgaaactggtgaacccccggaaaaaaaaagggttaaaactttgtaatgtaaaccaaaaaatccggtttaaaaaaaacccgggaaatcgttgccccccccggggcgggaatggcctttgggcccttaaaaacaaaggggcccttggggaacttgtctttgaggggggtttcctcctccaaaacgtatttctcaactacccgaaggcccttttccccccccggttggccaaaaaattggggggccatcaaatcctttttgccccagggaaaattttgaaaaaacacgggccccgggggaaaaaaaatttgtttgggaaccccggcgccggcccccgggaggagcacttgggccggtttacctttttcggaaaacacacccccggaaggggggg

SEQ ID NO: 24742 - DNA, 125 bp, Zea mays
  unsure (1)..(125): unsure at all n locations
  Clone ID: MRT4577_122571C.1
aaccgatttttgtcaggaaaaatgagnccctgcaagcagcaagtacagagagaacaactggataggtcgaaacgtaaatctgcttcaaaataaattgaaactcgaatgggaaagacggctcgata

SEQ ID NO: 24743 - DNA, 581 bp, Zea mays
  Clone ID: MRT4577_122572C.1
ttgggtacctcgaggccggccggaagaccttcacaaggagagcgaaagaccgattggctacctccgctccgctgtttgttctcggggactccccttcacctccgccgctcgccgccgtctcccgagcgcggtggtgcctcctcccactcctcctcgtcgacctcgactcgtaactggcctacgtttccataaattttattaaaggagagtttgttgggggatctgatatgatactcgccgtgcaccataagggtgaactgaaggaactgcttggcgatattgcacaaaaaggggaacaaagtgattcctcatgaaacaagtgctgtgcaagcttctcagagtgttgtgatggaagatctacgccaggcccaacagcaggagcaacacagctcttttcttgataaatatatgtcaatgttgccactggttcttttaggaatcatgctgactgtctgcctcagcttgatgtttaatgcttaaagctgtttttttaactcaacggatgctgttgaaacatgcaattaggacgtggcatgtttgtacgctctatcgattcgaaaaaaaaaagaaagaaagcagcc

SEQ ID NO: 24744 - DNA, 396 bp, Zea mays
  Clone ID: MRT4577_122573C.1
cgcctgcaggtaccggtccggaattaattcccgggtcgacgagctcactagtcggcggccgcccttttttttttttttttttttttttcacttgatcattgttttttttttttacttttaaacaaaaccagaaacctggccctggggagctgcaaaaactgcgacgggcggttgaaaccaagtttttaacaagggaactgcggggggtgccttaatacacaaagagacacgcatgcggatttacagcaaaacgactagccggaggtcttgagttttcggggatgcgggaacttttcgcctgcgaacttcgctttaaagtcagactttaaagtccttgtgccggcacaccttcagtgagaggagggcgatcgacccctctgtacgatggggtgttga

SEQ ID NO: 24745 - DNA, 207 bp, Zea mays
  Clone ID: MRT4577_122574C.1
ataaaagccggaagccaattgtgtgatttgaaccttactaaggaacaacacacacgtgcgtacaagaaagaagattccgttacactacaatccgggcagaactatatgcaacgtgtgcgacgcatggcccctcggaatcttgttacttgtatggaggctacgaacggactaccgagacacacagggtaccactggaaactagtatct

SEQ ID NO: 24746 - DNA, 416 bp, Zea mays
  Clone ID: MRT4577_122575C.1
cacaagctcttcttttttcatcaatctcttttttttcctctctttttttctttttttttttttttttttctcatatgatccctcccagagggccccaccaaagaagggtcgccagcacaacgcagaccgccccgtaggagccaccccccccgggccggccccccccgggggcgcccccagggagggaacaaaaggcgcaacaaccccgccccccgggaccaacaaaaagcagggggaaaaaagcagcccccccccccacgagccccccagaagagagggaggacccccccggtgccccccccccccggggagccgagggcagccaccagaccacaaggaacagagcgccagggggaagcggcaacaaacaggaaggggcccaccaaccccaaggggccccaagcacccccccggga

SEQ ID NO: 24747 - DNA, 2047 bp, Zea mays
  Clone ID: MRT4577_122576C.1
ggtcgacccacgcgtgcggaccaaagccgggcatacgcccccaagtccaaaagccctctccgccccgctctcccactcgtaggtgttctccccgtctccgcccgcactcgctcgtccgcgcgcaggaaggttgacctgtcgagggccggcgagcccggtaagtaagagtgaaaatggatggaagtagtaaagggagtgggcattctgaagcattaaggaactacaacctgggaagaactttaggtatcggtacatttggaaaagtgaagattgcagagcataagcttactggacatagggttgctataaagatcatcaactgccgccaaatgagaaatatggaaatggaagagaaagcaaagagagaattcaagatattgaagttgttcattcacccccatatcattcggctttatgaggtcatatacacacctacagatatatatgttgtgatggaatattgtaagtatggcgagttatttgattacattgttgagaaaggcagattacaggaagatgaagctcgtcgaatcttccagcagatcatatctggcgtcgaatactgccatagaaacatggttgtccaccgtgacctaaagccggaaaacttgttacttgattcaaagtataatgtaaaacttgcggattttggtctgagcaatgtcatgcatgatggccattttctgaagactagctgtgggagtccgaactatgctgctccagaggtaatatctggtaaactatatgctggacctgaggtcgatgtatggagttgtggggtgattctttatgctcttctttgtggaactcttccatttgatgatgagaatattcccaatctgttcaaaaaaattaagggaggtatctacacacttccaagtcatttgtctgctttggccagggatttgatcccacgaatgcttgttgttgagcctatgaagagaatcacaattagggaaattcgggagcatcaatggttccagattcgccttccacgttacttggcagtgcctccaccagatacgacacaacaagccaaaatgattgatgaagatacacttcgagatgttgttaatatgggatttaacaagaaccatgtgtgtgaatcactgtgcagcagacttcaaaatgaggcaactgttgcatattatttactattggacaatcggtttagagcaactagtggctatcttggggcagattatcaagaatcaatggacaggaatttaaatcagctggcgtcatctgaatcatctagttctggtacgaggaattatgttccaggaagcagtgatcctcatagcagtggtttgcggccatattatcctgttgaaagaaaatgggcgcttggacttcagtctcgggcccaccctcgtgaaataatggttgaggtcttaaaagcacttcaagaattaaacgtcagatggaagaagaatgggcactacaacgtgaaatgcagatggtgcccagggtttcctgaagttaatgacacgttagatgccagcaacagctttcttggtgactctaccatcatggataatgatgatgctaatgggaggctacctactgtgatcaagtttgaattccagctttacaagacgaaggacgacaagtacctcttagatatgcagagagttactggacctcagctgctcttccttgacttctgtgcggccttccttaccaagcttagggttctatagtggtctaccatgtgcaaattttcactgtggtgatgaataaccgaaagcatgtaaataggaaccttgttctcgtcttttggacaacgaacatgtttgagtgactggtcttgtgttgagcgcgtaaaggtcatgtatacttaggttagtactatttccgttcttaaatatttgtcgtctgctagtgatagttcatttttgaactaaaacgttacgaataaaaaaagagtatattactgtctgcataaaaaaggctgtttcagtaggccgtggcaccgcagatggcgatgctcactgcaacctattaaaaaaaaaaaaaaaggagggcggccgccgactagaagctc

SEQ ID NO: 24748 - DNA, 960 bp, Zea mays
  Clone ID: MRT4577_122577C.1
cggtgaccgcgctccgcgacgcgccaccgcacggcgtctacttctggacgtacgagcgcgcccgggagcgcctgcacccggggtgccgccgcagcagcagcagccaggaccaagacggggacgagggcctgggcaccatgctcgtggccggcggcctggccggggtcgccagctgggtgtgctgctacccgctggacgtggtcaagtcgcggctccaggcgcagggcgcggcgtcggcgtcggcgcccaggtaccgcggcgtcgtcgactgcttccagaggagcgtccgggaggaaggcctccccgtgctgtggcgcggcctcggcaccgccgtcgcccgcgcgttcgtcgtcaacggcgccatcttctccgcctacgagcttgccctgcgcttcattgccagcggcggcggccccaggctggtcatggaggacaagtgagtcagactggaccgtgttgtacataggctagtataagtatccattccagtggttggtggagagtatccatgccactgccagcgcagtgagctgagattcgtggactggagtagcgtaccgtagctgcaagcttcatacaaatcgaagcatgcgtcttgatgatggcgatcgattcaccctggtaatttggggaaatacactgtgcagtgcattgtgcattaaaaaaaaaaaaaaaaaaaaaaaaaaaaaaaaaaaaaaaaaaaaaaaaaaaaaaaaaaaattaacgatgttaaaaaaaaaggaaataaatccaaaagaaatcccttcaggggttattattttccctctgatgaatttttttaaaagatcggaaaaattatgggaataccaatttcaagggtggaatgaatatgggataaaaattccccataaattactaaccgttatttaaataggtaaaaacaggggggccaaaggggtgagttaaataaaataaatggtttaaaattgaatgcccatt

SEQ ID NO: 24749 - DNA, 240 bp, Zea mays
  Clone ID: MRT4577_122578C.1
tccactctttcgtaaaaaatgatagttgtatcacagtcaggttccgacactgactgagaggggctacccagtctcttgagagccccgtaccggtaaagacatttacaaggactacgcagtccgacggaacggtctggttcgcgctctcacatttgaagtcaacggattgtacagaatgtgcgccccagagaaggagaacacttgccttatcggtctcctttacgtcgtttgagagagtat

SEQ ID NO: 24750 - DNA, 752 bp, Zea mays
  unsure (1)..(752): unsure at all n locations
  Clone ID: MRT4577_122579C.1
ggccggccggccctagctacgtcttcgtcggtcccttcccagccttcgtcgcgtccttcgccgtcgacgagaacaaacgagatttttaccggcagaaaaagaaaggaggcgtggcgaagacagcttcatcctcaaagaacaagacacggcattacactggtggggcttctgttggtgcctcagatgcagctcagacatcagctctagtgtctcatggctcctgggatctcaaagatgactttggtgatgaagaagagcagctgcgacagtttgacgtggacatgaagtttggtccttgcatcggtgttactcggcttcagcgctgggagcgagcctctgccatgggcctccagccaccagctcatctccgggacctcctactgcacgcggcatcgacaaagaatcgcggtgacggtagcccctctgtcgagtgcctttgggagggtaaagtctagaagaaatatcttctcatcccccatcccaggtcaacttcaggtggttaactggagacgcttgttgtaccatgcagcctcttgttgatgtatgttggcactcgtttgtttctcttgcatgtgttcggtaacagtatatggatggctacttgtgcgtatgttggcgcacttcatgctgaattctcttctcgtagggagatcctgttgcgttgtctgtatctgagtgcgtcaagcacgcacatgaacacatcttctatgtgctggcagntgcattgtgaatcaccgctttgggtgctgccg

SEQ ID NO: 24751 - DNA, 999 bp, Zea mays
  Clone ID: MRT4577_12257C.1
ccaagctatatatcagaatacatataaggacgagccgcgtcctcccccacgcgtccggccacgcgtcggcgcgtccgcccacgcgcgaagcactacactacactacaccacacccacccgacgacgatcacacacgcagaagatcgagttcgttcgatcgtgaccgtgacgcaggaagctataagctagccaagacaggaataataatggcggcgtcgacggtggcgagcctctctgtcccggtgacgacgacgaccttcgcggcggcgggcggcgccgacgtgctgatcgtcgtcccgaggagggcgggcgccgggcgcgtcgtctggttccccgcggcggcgcgccgcggcggcgggcggttggtcgccgtgcggtccagcgggccggccacgccgccggagatctccgacaaggtgtcggagagcatcaagcaggcggaggagacgtgcgcggacgaccagaagggcgacgccgagtgcgcggcggcgtgggacgaggtggaggagctcagcgccacggccagccacgcccgcgacagcctcaaggagaccaacgccaacgacccgctcgagaagtactgcaaggacaacccggactccgaggagtgccgcatctacgacaactagctagtcgtatagctatataggccatcgacatgaaggacgaaggttgtagcacactacgaaagaatgatactctcgatcggcgcgtcatacgtggaatgaacttgtttgtatcaagctatctatacctcaatgcttctctacctgccgccgccgcaccccgtatgatatgtgatacacagctgggatggtatactgatattttgggttaatttaaaaaaaaaaaaaaaaaaaaaaaaaaaaaaaaaaaggagttgcaaatattataaaggggggccaagggtgtttaaagtttgggataatggactgagggatactttgcatttcgcaaggaatccgaccccgtggggtaatctcaagccagtttcccgcc

SEQ ID NO: 24752 - DNA, 1042 bp, Zea mays
  Clone ID: MRT4577_122580C.1
ccggccgggaagaaaaaagaaaaaaaaaaaaaaaaaaattttagcaagagtttaccctgtcaggtctcgggggcgcctcgagccggggcggtgatccggggcgaagtcttggctacctcgaggccggccgggagtcgggtctgtccccactccccatttctcagcgtgcgcgctctttctctctcctttgtggtaactggcggcggccgacgccgacgccctagctcacgtcttcgtcggtcccttcccagccttcgtcgcgtccttcgccgtcgacgagaacaaacgaggaaacacttgcaggactgaagaatagagaaacatgtcgtctggtggtgtgaaagatttttaccggcagaaaaagaaaggaggcgtggcgaagacagcttcatcctcaaagaacaagacacggcattacactggtggggcttctgttggtgcctcagatgcagctcagacatcagctctagtgtctcatggctcctgggatctcaaagatgactttggtgatgaagaagagcagctgcgacagtttgacgtggacatgaagtttggtccttgcatcggtgttactcggcttcagcgctgggagcgagcctctgccatgggcctccagccaccagctcatctccgggacctcctactgcacgcggcatcgacaaagaatcgcggtgacggtagcccctctgtcgagtgcctttgggagggtaaagtctagaagaaatatcttctcatcccccatcccaggtcaacttcaggtggttaactggagacgcttgttgtaccatgcagcctcttgttgatgtatgttggcactcgtttgtttctcttgcatgtgttcggtaacagtatatagatggctacttgtgcgtatgttggcgcacttcatgctgaattctcttctcgtagtgagatcctgttgcgttgtctgtatctgagtgcgtcaagcacgcacatgaacacatctcctatgtgctgccagttgcattgtgatccaccgttttgggtgctgcgatttgacgctcatttgggcttgtttggc

SEQ ID NO: 24753 - DNA, 384 bp, Zea mays
  Clone ID: MRT4577_122581C.1
atggcgctgcttggcatgggcaggcttgacgggatgcgaaacggcctgcccgccgtatcgtgcacaggcattttggtcctatccctgcatagggaaaagacaacgggaatggatagagcgaggcgggtcgtcttactcgggtgtggtcgcgcggcagtcaggccctgtagtcgcgtcaacggtgtgcggttggtgtccttcgcccaagtcggggccgaggtcatcaagcttcggggccggtgctctcctttagtatccggttgcacttatatcgtgctcacttctcgagccctattcacaaagggacttatcctgagcaaagctttgaaggccaagaaggatgtcgaagacaagagcactcgaatagccttacataatttgtga

SEQ ID NO: 24754 - DNA, 1790 bp, Zea mays
  Clone ID: MRT4577_122582C.1
ctctcctcctccagagctcgtcgccaccggccaccgccaccctcgatcacgccgtccgtcgaggtaaggtcagcatggtgagggtcagtgtgctcaacgatgcgctcaagtccatgtacaacgctgagaagatcggcaagaggcaggtcatgatcaggccgtcgtccaaggtcatcatcaagttcctgacggtcatgcagcgccacggctacattggagagttcgagtacgttgatgaccaccgatcgggcaagatcgtggtcgaactcaacgggaggctgaacaagtgcggcgtcatcagccctcgctttgatatcggcgtgaaagacattgagggatggactgcaaggctgctcccgtccaggcagttcggatacatcgtcctcacaacttcggcaggcatcatggaccacgaggagacccgccggaagagcgtaggaggcaaggttctaggtttcttctattgaagaagctgagaatctttgttatggcctgcctgcctgtcttactctctcagactagagtacctgttattttactttaatatgtctctctcagactagagcgccttcttttacttgaatattggtgactgcattggtctttcactttaaaaaaaaaaaaaaagtcccccgccgccgccgctcccagtctccacgcggaagcagcgcctcgcaccgctcctacccaatggcgccgacgtcgaagctgtcgatgggcatcaagcgcgcgtcgcggtcgcacgcgtaccaccgccgtgggctctgggccatcaaggccaagaacggcggcgtcttccccaaggccgagaagcccgccgccgccgcggaacccaagttctaccccgccgacgacgtcaagcctcgcgttcccagcacccgcaagcctaatcccaccaagctcaggtcgagcatcacgcctgggacggtgctgatcctcctcgcggggcgcttcatggggaagagagtggtgttcctcaagcagctcaactccggcctgctcctcgtctctggtccattcaagatcaatggagtaccgatccgtcgtgtcaaccagacctatgtcattgctacatcaaccaaggttgacatctctggtgttgatgtcgcgaagtttgatgacaagtactttgccagggagaaaaagcagaaggtgaagaagacggagggtgagctttttgagacagagaaggaggcgtccaagtctctgcctgatttcaaaaaggatgaccagaaggccgtggatgctgctctgatcaaggctattgaggctgtcccagagctgaaggcctatcttggcgctcggttctcccttagggatggtgacaagccccacgagatggtcttctaaaccgagttttggagttcggaggaagtcgttttggctgtgctctcttgtgacaagccccacgagatggtctcccagagctgaaggcctaccttgtttcattctgcttgaagtctgtcaaatattatgagaagatctaagaaagttttatcggtattggtggttcagcatggcgttatctgcttttggttctttgtgtaggtcaatgttgtcttaagatcctattttgtttgaattgctgactgtcgtattttttttggctatctttgaacgccttaaccgttcgacactaagagcatgtttggatgagttaggttttagttactagttgagctaaggctatctccaggacattttctatttcaaacttttctctgcaaacattgttaactgttaaacaacgttatttaagaaaaaaaaaaaaaaaaaaggcccctagggcc

SEQ ID NO: 24755 - DNA, 697 bp, Zea mays
  Clone ID: MRT4577_122583C.1
atggacctcagcggcgggatgtgtcccatagaagacgacccatttttacagacacagggaaaccttgactgcgcgcggacaaaccctaatcccttctgtcccggcggcttgcccgcggacgaggccgatgatgtccaccaagactacctctacttattccaccacgaacggctagaagaacacctatacacggatgggattctgcacaatgatggcgcctcatgacctgcccaaagcataacgcatgaaacatgacactccgatgacaatgtatctgcccctgccgaagaatcatgatgcatggagacaaaggtgccatgccccatacgaagaaacatctcggactactgatgaggacgcctccacacagctggagaatgcttgatacaggtattaggcccgtcggcgtatgttccaattcgccgctgacacctatgggataggacaccccgacattagtggcgaactccttgtgtgatgacttggaacccgactgtcgataaatactaccgcttcgtccatcataatgttccggtgacgaatgatatattgacgtgcaagacggtcaagtgctcagtaactatcagggatcataatgatgctgaggtgctctcccacaccgaaggaggaagagacggacgacgaaggccaaggttaatgccaataagatgatgaagaataagcagacgaccttcct

SEQ ID NO: 24756 - DNA, 912 bp, Zea mays
  Clone ID: MRT4577_122584C.1
atggaggcctactgcgacgaagttcggcgcttggaagataaattctatgggctggaactcaaccacgttgctcgatggtacaacgagactgcagatgagctggctaagatcgcctcgggacggacaacagttcccccgaatgtcttctccagggaaatatatcaaccatccgtcaaactcaacgacgcacccaaacccgaggagacctcggcccagcccaaggtaccctcggccgccgaggcacctcgagccctcgtaggaaacgctttccgacaaggtttctactggccgaccgcagtggccgacgccactaggattgtacgctcctgccgagggtgtcaattctatgcgagacggacgcacctacccgctcaggccctacagacaatacctatcacttggtcgtttgctgtgtggggtctggacctcgtcggtcccttgcaaaaggcacctgggggcttcacgcacctgctggtcgccatcgacaaattctccaagtggatcgaagtccgacccttaaccagcatcgagtccaaacaagcggtggcgttctttacaaatatcatccaccgctttgggatcccgaactccatcatcactgacaatggcacgcaattcactgggaaaaagttcctagacttctgcgaaggccaccacattcgtgtggactgggctgtcgtagctcacccaatgacaaatgggcaggtggagcaagccaatggcatgattttgcaagggctaaaaccaaggatctacaacgacctcaggcgccacaagcttactcctccctgggaagggtcgttcatcatcgccaaaattttgaagcccaggacatacaagttaggcaacgatcaaggcgaggtctacagcaacgcttggaacatcgaacagctacgtcgcttttacccttaa

SEQ ID NO: 24757 - DNA, 320 bp, Zea mays
  Clone ID: MRT4577_122585C.1
ggggtaaaaccttaaaggggggttgggtccccacaactaagttcaatttacattaaatggttaaataggaattttgaacattaaggggtttaattttaaaacttatttcaaacccttaaagacggttcggggtttttaaattttattaaacattttttttatgggggtaattgatatccaaatttttgatacgggttcagtaaaaccaaacaccctttacgggattttttgatgcccggcacctgacgagagaccatttaccacttttggcgcattctcgtacctgactggtggcgcgggggtgcaccgattttttttta

SEQ ID NO: 24758 - DNA, 545 bp, Zea mays
  Clone ID: MRT4577_122586C.1
ttcccgggtcttcccacgcgtccggtacatcgtctgtactgcttgctacacatacatacgatatctaataccgtataatctcgtgtcaagtcatacgagcacaaatcatggataaagagaagaaagaggatacttatggcgggtcgacgggcgtctatcccgctcatggagctcatggatatgctggggatcgtggatctaccatagtcgggtcagaccacgaacggggtgcatacgggggaaacgagaaggaagatttctatgatccaagtttggagagcagggcgactaggctgggtttgaattgggagtcgttcaagcgggctccgggtgctacgaggggtcttgtagtacacggtggtgccgcacctgaactggtcggtcaccagaatccgctcttgcagcaaaaaatgaaaccgaggcatctggctatgatcgctgtaggtggttctatcggtactggtctattcgtcgcttctggtggtgcactccgaacgggtggtcccgccggtgttatcatcgctcggtgcattatcggtgtcatg

SEQ ID NO: 24759 - DNA, 1368 bp, Zea mays
  Clone ID: MRT4577_122587C.1
atggccgaatacgaggccttggtgaatgggttgcgcatcgccatagagctaggggttcggcgcctcgacgctcgtggtgactcgcagcttgttattgaccaagtcatgaagaactctcactgcctcgataaaaaaatggaggcctactgcgacgaatttcggcgctcggaagataagttctatgggttggaactcaaccatgttgctcgacggtacaacgagactgcagatgagctggctaaaatagcctcgggacggacgacgattcccccgaatgtcttctccagggacatatatcaaccatccgtcaatctcaacgacgcacccaaacccgaagggacctcggcccagcccgaggtaccctcggccaccgagggtgaggccctgcgcgtcgagatagagcggaatggggtcacaccaaacctaaactggcaaaccccgtacctggaatatctcctccgaggagagctgcccctcgacaaggctaaagctcggcgactggctcggcgcgccaagtcgttcgttttactgggtgatgaaaaagagttgtaccaccgcagcccctcaggtgttctccaacgatgcatatccatcgcccaaggacaagagttgttacaagaaatacactcgggggcttgcggtcaccatgcagcacctcgaaccctcgtaggaaacgctttccgacaaggtttctactggccgaccgcggtggccgacgccactaggattgtacgcttctgccgagggtgtcaattctacgcgagacggacacaccttcctgctcaggccctacagacaatacctatcacttggtcgtttgctatgtggggtctggacctcgtcggtcccttgcagaaagcaccccggggcttcacgcacctgctggtcgccatcgacaaattctccaagtggatcgaagtccgacccttaaccagcatcgggtccgagcaggcagtggtgttctttacaaatatcatccaccgctttgggatcccaaactccatcatcaccgacaatggcacgcaattcactgggaaaaagttcctagacttctgcgaaggccaccacatccgtgtggactgggccgccgtagctcacccaatgacaaatgggcaggtggagcgcgccaatggcatgattttgcagggactaaaaccgaggatctacaacgacctcaacaagtttggcaagcggtggataaaagagctaccctcggtggtttggagtctgaggacaacaccgagccgagccacgggtttctcaccgttttttctagtctatgaggccgaggccatcctacccacggacttagaatacggttccccgaggacaaaggcatacgacgaccaaaacaaccagacccgctga

SEQ ID NO: 24760 - DNA, 404 bp, Zea mays
  Clone ID: MRT4577_122588C.1
gccctctacgctgactagtatcacgacagttgctgctccccccaacttctcctcctgctcctgccctgcggagttcatgatcagcgaacatgagaaaccgaggcgtcgccctgctagctcctcgcggcgaggatgatgcctctcagtggctactcccagcggaaaccgaggggcggaggcggctcgcgctgaagaagcagcccgtcgaccagaacggccgcgtcgccgcgcgcctctccgccgaggagaggcagcgcctcctcctccgcggcgccaacgccctgggctcaggcggcgacgacgactccgacggcatcgcgctcaagaactacatgaacgcgcagtactttggggagatcgtcgtcggatcgccgcagaaaaagttcaacggcatcttaaacacc

SEQ ID NO: 24761 - DNA, 678 bp, Zea mays
  Clone ID: MRT4577_122589C.1
atgggcgagggagaaggagctgacgggtggggcccggcggtcagtgggcggggtctgcgcaagagagagggcgagcaggcgttggagttctttacaaatatcatccatcgctttggggtcccaaactccatcatcaccgacaatagcacgcaattcactggggaaaagttcatgtacttttgcgaagaccaccacatccgtgtggactgggtcgctgtagctcacccaaggacaaatgggcaggtggagcgcgccaatggcatgattttgcagggactaaaaccgaggatctacaatgatctcaacaagtttggcaagcggtggatgaaagagctaccctcggtggtttggagtctgaggacaacaccgagccgagccacgggtttctcgccgttttttctagactatggggccaaggccatcctacccacagacttggaatgcggttccccgaggacaaaggcatacggcgaccaaaacaaccagaccagccgagaggattcattggaccagctggaagaggctcgggacgtagccttactacactcggcatggtatcagcagtctctgcgacgctaccatgcccgaaggattcagccccgaggcttccaggtgggagacttggtgcttcagctacgacaagacgcccgtgggagccacaagcttactcctccctag

SEQ ID NO: 24762 - DNA, 628 bp, Zea mays
  Clone ID: MRT4577_12258C.1
gagttaactcagctccgccgcgcgtgtcagccgatggaagagctgcgggccgccgtgacggcgcacttggaccaggtagcgggcctcgtgcaggcgctctcctccgagctccgccgcggcataggtcccgccgccgacaacctgcgcgccttcatccgcgccgttgactggacggtattctctccggatccgccaacaggagatcgcatccggatcaccaagaccttgtttcctttcctctcccacttccagggctgacaaatatcatgcgctgcactgtgttgcgctttgaatgtgctgctgtttcaggagccatggctcatgtgcttgatggcattccatgtggttctgctgctcactgctgtagggttcaggaggaatgccaatttccagctattcttgttatttcttgcttctcttttccgttggtgccattcgattcacacccttccgtgtgaaatgaagccattggagggaaaatcgatcctgacattgatttcgatcatattattcagtaataggccaagagcaatgtatatgtttgtacactaatttattactcccttcgttccataatataaggtgtaaccattttttgttttaaaaaaaaaaaaaaaaaaggccccta

SEQ ID NO: 24763 - DNA, 4641 bp, Zea mays
  Clone ID: MRT4577_122590C.1
atggcgatgctacttcaaacaatgctggtgccatccaccaccgaggggcgacgtatccagggcgagctcaagggcctcctggaagacgctgctgtccgacaagccgagagctctgcctcccggaggcgaggagacccctcggagcatcgcgcaacgccctcccgacgcttgcaggaggcctcggtccacaccgcacgcacacgggatgggacgcctacagccccggatcgcctcggcgacgagcaacaccgccgcgatcgtcgagcccgactcgaggaaagggtgcgtcgaggctaccaccccaggcgtgggggacgctacgacagtgacgaggatcggagtccctcgcccgagccaccaggtccgcgagtcttcagccaggccatacgacgagcgccgttcctggcctggttccgagccccgactaccatcaccaaatactcaggggagacaaggtcggagttgtggcttacggattaccggctggcatgtcagttgggagggacggatgatgacaacctcatcatccgcaacctcccccttttcctctccgacgctgcccgggcctggctggagcatctgcctcttgcgcagatctccgactgggacgacctggtcaaggctttcgctagaaatttccaggcgcaccgagctgccaacatcaccgactcggacgtcatcggggcattcctcgccggcaccacttgccgagacctggtgagcaaactaggacgcaagactcccaccaaggtgagcaaattgatggacatcgccaccaagttcgcctttggtcaggaggcagtcgaagccatctttcgaaaggacaagcagcctcagggagggcagaaggaagacaccctcgaggcatccgtccagtgtggcacgaagaagaaggccaagaagaaggcgcaagcaaagcgcaacgccgtcgacgtgaatctcgtcgctgctgccgagcataggaaccctcagaagcctcccggaggagccaacgcattcgacaagatgctcaaggagtcatgcccctatcacaggggtcccgtcaagcacacccttgaggagtgcgacatgctccggtgctacttcaataaggctggaccctcggcagaaggtggcaaggaccaaggcaacaacaagaaggggggcgacaaggaagaggaattcttgaaggtccacaactgcttcatgatctacggcggacaggtggcgaatgcctcggctcgacaccgcaagcaggagcgccaggaggtttgcttggtgaaggtagcggcgtcggtctacctagactggtccgacaagcccattaccttcgaccaaggcgaccatcccgactacgtgccgagcccaggaaggtacccgctcgtcgtcgacttgatcattggcaatgttaggctctccaaggtcctcatggacggaggcagcagcctcaacatcatctatgccgagaccctggagctcttgggggttgatcggtccgagatccgggctagtgtagcacccttccacgggatcgcacccggaaagcgtatcctgcccctcggacagattgacttacccgtctgcttcggaactccctccaacttccgaaaggaaaccctcaccttcgaggtagttgggttccgagggacctatcacgcggtgctgggaagaccgtgctacgccaagttcatggccatccccaactacacttacctcaagctcaagatgcatggcaccaacggaaccatcaccatcggacccacgtaccgccacgcttacgagtgcgacgtggaatgcatggagtacgctgaagccctcgccgagtccgaagccctcatcgccgacatggattgcctctccaaggaggcgcccgacgcgaagcagcgcgccggcaacttcgaaccagccaaggcagttaagtctgtccctctcgaccccagcaacgacgccgacaaaaagtcaggatcggcttcgagcttgaccccaaataggaagcagtgctcgtcgactttctccgcgcaaacgctgaaatttttgcgtggagtccctcggacatgcccggcataccgagggatgtcgccaagcactcactggacattcgagccggttccctaccctctgcctcgcatcgatcaaattgtggactccactgctgggtgcgaaaccctgtctttcctcgacgcctattcgggctatcaccaaatcaagatgaaagagtccgaccagctcgcgacttctttcatcacaccctttggcatgtattgttatactacaatgccatttggtttgaggaatgcaggtgccacctaccaaaggtgcatgaaccatgtgttcggagaacacatcggcagaacggtcgaggcttacgtcgatgacatcattgtcaagataaggaaagcctccgacctcctctccgacctcgaagtaactttcgggtgcctgcgtgcaaagggcgtaaaactcaatcccgagaagtgtgtcttcagagtcccccgaggcatgctcctagggttcatcgtctccgaacgaggcatcgaggccaacccggagaaaattgcggccatcaccaacatggggcccatcaaagatttgaaaggagtacaaaaggtcatgggatgccttgcggctctgagccgcttcatctcgcgcctcggcgagaaaggattgcccttgtaccgcctcttaaggaaggctgaacgcttcacttggaccctcgaggccgaagaagccctcggaaacttaaaggcactccttactaacacgcccatcttggtgccccccgctgagggagaagccctcttggtctatgcagccgcaaccactcaggtggtcagcgctgcgatcgtagtcgagaggcaagaagaagggcatgcactgctcatccagaggtcggtctacttcatcagagagttgcgacactacttcgagtctcatctggtgactatggtgtcatccttccccctgggagagatcatccagtgccgagaggcctcgggagcaggtgcgggcttgctcttcatttcacccctcggagaacatgtgcgttatgtgttgcgcctccattttccggtgtcaaacaacgtggccgagtacgaagccttggttaatggactgcgcatcgccatcgagctgggggtttggcgcctcgacgctcgtggcgactcgcagctcattattgaccaggtcatgaagaactctcactgccgcgaccaaaaaatggaggcctactgcgatgaagttcgatgcttggaagataagttctatgggctggagctcaaccatgttgctcgacggtacaacgaaaccgcggatgagctggcgaaaatagcctcggggcgaacgacggttcccccagaagtcttctccagcgacatatatcaaccattcgtcaaactcgatgatgcgcccgaacctgaggagacctcggcccagcccgaggtaccctcggccgccgaaggtgaggccctgcgcgttgagggagaacagaacggggttgcgccaaaccaaaactggcagaccccatacctggaatatctcctccgaggagagctgcccctcgacaaggccgaagctcggcgactggctcggtgcgccaagtcgttcgttttactgggtgatgaaaaggagctgtaccaccgcagcccctcaagcattctccaacgatgcatatccattgcccaaggacaagagctgttacaagaaatacacttgggggcttgcggtcaccatgcagcacctcgagcccttgtgggaaacgctttccaacaagggttctactggccaaccgcggtggccgacaccactaggattgtacgctcctgccaagggtgtcaattctacgcgagacagacgcacctgcccgctcaagccctacagacaaaacctatcacttggtcgtttgccgtgtggggtctggacctcgtcggtcccttgcaaaaggcacccgggggcttcacgcacctgctggtcgccatcgacaaattctccaagtggatcgaagtccgacccttaatcaacatcgggtccgagcaggcggtggcgttcttcacaaatatcatccatcgctttggggtcccaaactcaatcatcaccgacaatggcacgcagttcactgggaaaaagtttctggacttctgcgaggaccaccacatttgtgtggactgggccaccgtagctcacccaatgacaaatgggcaggtggagcgcgccaactgtatgattttgcagggaccaaaaccgaggatctacaacgacctcaacaagtttggcaaggggtggataaaagaactaccctcggtagtttggagtctgaggacgacgccgagccgggccccgggcttctcgccgtttttcctagtctatggggccgaggccatcttacccacgaacttggaatacggttccccgaggacaaaggcttacgacgaccaaagcaactggaccagccgagaggattcattggaccagctagaagaagcttgggacgtagccttgctacactcagcgcggtatcagcagtccctgcgacgctaccacgcccgaaggattcggccccgagacttccaagtggggaattggtacttcggctgcggcaagacgcccgagggcaccacaagcttacccctccctgggaagggtcgttcatcatcgccaaagttttga

SEQ ID NO: 24764 - DNA, 259 bp, Zea mays
  Clone ID: MRT4577_122591C.1
aaaaaaacctaaggggctcaagctttaacgcgagagccttttcgggggatgatgaaaatttttgcaggcacaatacacaattatttcccccttcagctttaggttggggtacactttcccaacacccaattagggccccactttttgaaggcttttcaagcaataacccacgcccccccacagtttacatttgtttttttggggggggccctccggcttgccccttttttggcttgctcggactaaaataactggaaaa

SEQ ID NO: 24765 - DNA, 262 bp, Zea mays
  Clone ID: MRT4577_122592C.1
gggcacagaaatgaagttttactggaaggaactttgacgatcggcgcagacccaaggtcgaaactattaatctgacgagccacataaaccgcccgcattgacagctatagattatgctgggcatatacatctaggatacactaccaaacctgtatgtgtttgataggcaggacaagcaccgtgctgaatgaaccggtcaaagcacgggtatccatggaccgtgacactgtaacacggctaacaaggctcgctattgttgaga

SEQ ID NO: 24766 - DNA, 300 bp, Zea mays
  Clone ID: MRT4577_122593C.1
gggcctaacacgggcaggacagattttcatcacaggcggagtacaaaaaacaataggacatttttggggttcggtacccacattcaaaaccatcaggacatcaattgtcttgggggcatacctgggttcctcatcataattcaaaaggacatttaaaatgggtagctagtccagaaaactcttttcgcgacacttggaacaggaaactaaggcgttcaagcttccactgtctcggggggagcctaaatcaaaagaccctttgtcggcttacccaaaaagttggagaactcctggaacggg

SEQ ID NO: 24767 - DNA, 258 bp, Zea mays
  Clone ID: MRT4577_122594C.1
gtggtaatgggatctcttgcaggtggtaatagttactgtatgtaattagattggatagtactctctctattcttttttatttgtcacggtttagtgtaaaaatgatctagcgaacgataaatattactatcggaaagagttttactaaacaaaagtatttattaaaaaaaaaaaaaaataaataataatataaaaaaaataaaaaaaatatattttttaacccatttttatttttttatgtttattttttaaatttta

SEQ ID NO: 24768 - DNA, 688 bp, Zea mays
  Clone ID: MRT4577_122595C.1
ttttttttttttttttaacactattttctcgcaattccatatgagggctcaatgtatttccttactatgaatggttcctctataatctctctccatctttgttacaacagctactagctaaccctaaacagatctcaagttacagagcaccaaacttgaggtgaaaacgcaaaggctaaatttcagctaactgaaaaagacctgaacacaacacctgacatagaaaattgcagcacatatttctccatattttacacagtagtaagccccactcctctgatgaagcttgttcaccttcatctggtctttgacttttctatacaactggtaacccaaaacctcatgaactggtcataggagagctccaaactgagcaatctgctgcaatccagttttcagctaatctggtcacggcgaggtggactaactgtcaacgatggtcaccacctagggactggtacaccaagctctgggcagatggactaagatattgggaggggattaactccggggaaacatagtctacaagagccaaggagatcactcgagctctaggactgcacggcctactggaccttgacttaagtaggagatgggaagactagggcagatcgagttggtggctcggaagaggagcttagacttacaaacacgaaccgctaagacaccaagtaagcaactaaaactt

SEQ ID NO: 24769 - DNA, 283 bp, Zea mays
  Clone ID: MRT4577_122596C.1
gcaaaaaatattattttttttggtgagtgaaaaggggaaaacacgcacatatgttttgcacaagcgcgggtgtggtcttggtgcacggtataaaaggggaaaaaaaaatctctaactttggtggggatgtggaccctgtctgccttttacctatattaagcgagacaccgggttttatgattgtttctccccatccagcgtgagtaactttttgtatattatagggcgccgccctgtgaatatcccccccgtgtccctggggcgagaccactctaggggaaat

SEQ ID NO: 24770 - DNA, 298 bp, Zea mays
  Clone ID: MRT4577_122597C.1
gggccgcggtacgtcgatcccatcagcagattctgcttgctctgcgcgtgaacgacgagacagagagcaagatgcactatctaccacagaggctagctatagcggtcctcgaacgaagtatgttggcggtgttcaccgcctaggtgcgtcgcagcggccggagccatctgcagcccatatcaacaacatgcaccaccagccagtacccaaatacctcatgtgaggactacgcgaacactcacctcggccacatgcataccatccctcccgctcttcgattcattcgacggctcataat

SEQ ID NO: 24771 - DNA, 630 bp, Zea mays
  unsure (1)..(630): unsure at all n locations
  Clone ID: MRT4577_122598C.1
gtcatatgaatcagttggagaatctgtaatggcagtgcttctaaaagatggtgctttgcgagtgcaagatgggcacagtattaggcattacttcactgcaaatggtgaaaaagcagaacgagattccaatattcaactcatggatgctgaggttgctctttactggaaaatcatgtgcaagcatttgcaagctgaagctcaggtcaaaggctcagaggctgcagcaactacaggtgcggaagcagcggtatatgcttctgaggctactgataaaaacgaccttctcgacagtgtccttcctagcacaattactgattatgttgatttggtaaaggcacacctttctgccggaccaaattatcacttcacatcaaggcaattattgctacttggtgaaatgcttgagttctctgatactatgaaccgaaagattgcaagttcttttctgcacgagcttctcgtcaggcctcttgaacatgaagttgatgatgatgggaaccagattgcaattggagatggtgtgagtcttggaggagacaaagactgggcgaaaagcagtggcggagttggccaaaaaagtgcattcttctngttggtgaattcgaaatggtggtttccacttgttgttga

SEQ ID NO: 24772 - DNA, 688 bp, Zea mays
  unsure (1)..(688): unsure at all n locations
  Clone ID: MRT4577_122599C.1
gttttgcagccctgtcctcccccgccctctgcccgctactggcgtcgaaactgtagaatcggggaaaaccacgaatggagggtgccgtgacggagaatgcagcggtgcctgtgcgagcggcggcccctgaagccgctgttcactcggatcagcacgtggagcacgtggagagtggtgcgatggtggaggactctgcggcgtccacggtggctccagagtcaacttctgacgcagatcaggctatcgaggacgcagccccggaggacggggtggacgaggatacagtgacaaatgttgatttcagtcctgaggacatgagaagcatcattgaagttatagctgacaccggaaagttctggcatgactggaggttcctcaagagtgtactgtctattcaattgaagcaggtcttggatgaatattttgaggttgaaatggtgagccaaagtgatgggcaacagaggtctctctcagagctatttagtcggctaaatggtgcccttgaaaggtttgaagagggtcctccattcacattgcaaaggctttgtgagattttgttggatccaaaaggaacatatacaaaattaccaaagcttacattggccctggagaagaatctnctagttacatctacaataacgaagtgcactgacccatatncagctgctcatgggctgncatgttcgga

SEQ ID NO: 24773 - DNA, 258 bp, Zea mays
  Clone ID: MRT4577_12259C.1
tctctctgattccgtatcaaacatctctttgttctgttcggtgtctttgaatcaaaaagttcgaaacttgaataagtaatcaaattccggagctttctgtatataatcagcccaagacaattgatttacatacatattttctttgttgaaattgattggtgagatgattaggtgcaaaaagaaataggcttttaagctttttaccttgtctgaaactgaaactcttctgtctgaagcaaagtgaattgaataaacaaa

SEQ ID NO: 24774 - DNA, 464 bp, Zea mays
  Clone ID: MRT4577_1225C.1
ggggggttaaaaaaaaacccattggccccccaccggggaaaaacaaggcaacaaggccttcaaaaaaaggggaaggaagggcttttgccttttgaagggaaacttttcccttggggaaaaagcggggaaaaccccaaaacttggaaccttggtaaaactaaatatgggggtttgggcggcccctggcccttgggggcccacgggggtcccccggggggcccagggggtgaaaagctttaaacagcagggggggggaaaccaaaagggaatttcaaccccgggccaaaaaaccccaacatcctggttaaaggattgggggggccctttatactttaacttcccccctaagctggcgggggggaccctaaatttcagccctattttccccaccccgggtggaattggggcatttcccgggacaaacagggggaaggggcccacccgggcacccaggggcccgaatt

SEQ ID NO: 24775 - DNA, 1581 bp, Zea mays
  Clone ID: MRT4577_122600C.1
tgggtacctcgagccggccgggaaaatacccgttttgcagccctgtcctcccccgccctctgcccgctactggcgtcgaaactgtaggtgagctcccctccaatcaccgcctccgctgttacgagtcctgtaaccctagattgcagcgcccccaggtcctctcgccctcggaagaatcggggaaaaccacgaatggagggtgccgtgacggagaatgcagcggtgcctgtgcgagcggcggcccctgaagccgctgttcactcggatcagcatgtggagagtggtgcgatggtggaggactctgcggcgtccacggtggctccagagtcaacttctgacgcagatcaggctatcgaggacgcagccccggaggacggggtggacgaggatacagtgacaaatgttgatgtcagtcctgaggacatgagaagcatcattgaagttatagctgacaccggaaagttctggcatgactggaggttcctcaagagtgtactgtctattcaattgaagcaggtcttggatgaatattttgaggttgaaatggtgagccaaaatgatgggcaactgaggtctttctcagagctatttagtcggctaaatggtgcccttgaaaggtttgaagagggtcctccattcacactgcaaaggctttgtgagattttgttggatccaaaaggaacatatacaaaattaccaaagcttacattggccctggagaagaatctcctagttacatctacaataacgaagtgcactgacccatatccagctgctcatgggctgccatgttcggattgcacgcaaattacagaaatttctgggcctgctgatgtagggtctgtgagcacacctgagcatacaacagcagtaccaaatggaacagagcatgtagcaggtgatgttgacggagagatggctgaagcagaagctgaggaatcatctggtagccacgacatagagatgcaggaggacaagcctgatcaggttgataatgttaatgctgatgctaatcctggtgctgcagctgctcctgaagcatttaatgccagtgaatccacatcgcagccacaaagttgagcttgctagaaaagaaagtcgcagaatcaagtttctagtacagctgtccatttagcaatttgagagtattgctcgccaactcttgggattcgctccttgcttcctcaaacaaccagaaagggaatgtggattcagaagttgacaggattagccgatcatactagatgttgatcatcctgaaacactttaaactttccagggaatgccttactcacaaaggccatggtatgttttgatcaatcgtacctttctttctgcgtcaccacataggttagaaattctgtgtacgggttgccaaaatccatgaaggatgagtaaaacgaatatcttcactaagtcgctgatgtatcatgagagtgaatttcatgcacgtctcgccccatctactccagtatttattactgaaccttgaaaaaaatcccagtccatcgttcatttgtaatgactttgccctgatgccttcactaggttaagataatgctaatttttctttcattttct

SEQ ID NO: 24776 - DNA, 434 bp, Zea mays
  Clone ID: MRT4577_122601C.1
agagaacttttacctccacacaatagtatggacagttaccatcatttatgcttcagtatgttgtccaataataaaaagccatctgcttcttattcagctaatcacagccaagtgatgtatccatgactcctttaacataattaaaatcccccaaaacattgcaaatttagtctggagggttgttgtttgttaaaccgctttccggttttaagttctgacccaatgacttgctgttaattatattttttccctcaattttaacattacagcttgaactgcagtgtgccaggaatccctgtcgaattgtttttatagggataatctgaaatataacctagcatatgcaaattgtttctgtagacacttctggcattcattctcaggcaaaaaaatattttggcattattgcatctaccaatactaggtatgaacta

SEQ ID NO: 24777 - DNA, 246 bp, Zea mays
  unsure (1)..(246): unsure at all n locations
  Clone ID: MRT4577_122602C.1
ccggaccggaatccccggttcgactccacagcgacgggngtttgtttagcaagcgtttacgagccgatccaatgagcgagcatactcacggtgatatgggcgagagccgccatgagctggaactgcagatgccttctggaagtggtcatcgagctgttactgaccgtgaacctcggcgtgcgcaccaccggattcctggaagtcgtcgacatcaaggtgtcgagtgcagggactccagacccggac

SEQ ID NO: 24778 - DNA, 441 bp, Zea mays
  Clone ID: MRT4577_122603C.1
tggcctggaacctttgggctgatttatgtgcttgcgcaatcggaagtgaggctctggcgttgccgtttctcgttctgcatgcttctggtgtcgtgggagtgcgtaccgccgagtgagcgtggttaagtaatgtgggtctgaggagacgacgtcgagtgggtatggtggtgggaggtgttcgcctatggtgctgtagcggtaggagtctgagtattaggtgtctactcctaagcatacggttctgggtgtgtttgcgttgtatgattctgcttcattgtcttgttctgttattggtgctgatattgtgtttctttctgttcctttgttgtagttcctgttgctgtcggtgcatcggggtcgtcatggtgtgggggtgttgcctggttgtaaggtggtggaggatatggagttggcgtggcgttggtggatggatggtaagaa

SEQ ID NO: 24779 - DNA, 280 bp, Zea mays
  Clone ID: MRT4577_122604C.1
aaaacaaaaaaacagttctgggcgttttattcattttttccagctccaaaacccgaaacaaagccctatctataaatctttccgcggggaatttgaaacagggctccgggcccgggttaaatccccgctaaagaggccctccgggggctccaaaaaccgggtttccccccgaggccccagcgggggcctgggggtccttttcggtttcgccttgcccccccttcggaaattcctcgatcagctcccggtgtttaaacgtaaaattttcggggatggtgcc

SEQ ID NO: 24780 - DNA, 1217 bp, Zea mays
  Clone ID: MRT4577_122605C.1
atgaatgggttcgggtcatgggatgagaacggcaaatgcaaaccaatccgatggcaatgggtgcaaggaggggaatgaaccacagtgcacatgacctatcgcaattgggtcagttacaccagcagcagcagcagcatcaacagcagcatgacataggaaaccagctgttgggtggatttaggtcagcgagcagcttcaataacattcaatatgactggaaaccctcacaatagagcagccagaaaccatagagtttcagtgtgatgatgcatctggcttcgctggcaatgcgtgtggagcatccacatttatggtgccataacctccccttggcccaatagcatttgggcctttgcattaatgccgccatcaaagggtaccataagcgatagcaagcatcccggctggtacatgtaagtctaactgtcagtttagctatctcgtgtgtagctccctgagttttacaacattagtcgattttaccgggagttgcaataccatcatgtgtcacattgtttgtccactctttacccccttcaatgctgtgaaaagaaaggctaagtagctgtagcatgttatagtaggtgtatgtggggtaattcctcattagctcttagatctagtctttcctctgtctatttatacggttatcattgacatattgcggaatggagagccagacttacaggatttgtcactgaaactgtccgagttgggtgcctgtcacttactgcttgctccagttatctgagtgaggaagatactctgaaagaattagagcctctctgcactttttaccatctgtcagatcctattgtgctttgtggtacggaaatgaagttgtccctcgccttttttcctcgttggatgacatgtatcttatcctctgcaattcctaagactactggtgctgatatcctcttatcctcgcgtttggagaattctctttgtagctttactgtgctgcactgttgtataattggcacactgactagatcgaagtaccaccatggaatggatgttctcctagtcttgttgctttatactctctcctccgtcttaaaatataattctttttagctcattttttgtctatattcaaataaatgataataaatatagacatgttgattaatgaatgtatgtttagtctaaaatgaattctattttgagacggagggagtatgattcggagggagactgtttttttgtgtgtt

SEQ ID NO: 24781 - DNA, 669 bp, Zea mays
  unsure (1)..(669): unsure at all n locations
  Clone ID: MRT4577_122606C.1
ggtccggnnaattcccgggcctgttcttacaacatgatgattattatcaagacctacctgcaatctattactgtgagggttgaggaatggagattaaagcaaagagaactgaggaatggatgagacatcgtcagcttccttgtgaactgcgggaaagggtgagacgatttatccagtacaagtggcttgcaacaagaggagtgaacgaagagtcaatattgcaggctctgcctgcagaccttcgacgtgacattaagcgccacctttgcctgggtcttgttcgacgggtaaatacttctacatgcttttgtcaaagtacatatgaaataaacttttgaaacttctatggttggatgatggttaccaccatttcatttctgcatataccaaacttgtctatcaccattatagccatgaatgtatatggtatcctttttatgttagaagtcggcatcatatttctagtgtcgctagaggaatttgaggtgatatgcttctcatgttgaggatacacttgtagtcaggaaatgtcttggtacagctacaatgtgtgttatggccctgttttcactataaaaaggatttttttttcaagtacaccactcaaatgttgctgagaatccagagtaacatattttagcaatacaagtatatatccctttcccccct

SEQ ID NO: 24782 - DNA, 352 bp, Zea mays
  Clone ID: MRT4577_122607C.1
tgtagatgacggtgaggacaacgacgaggaacaagatgaagacgacgagaggcaaacggcgcggaagcagggggttaaagcggccaggaggaacgagacgtcggatctggacgtgctgacgctgtccgtgcgggcggtctttttttcgaggacgggcggaggatcacgtgaccgcaaaagccccattaccgcccaccccgataggagcctcagcctagggctgaaatgactgacactcgtgtagagtactgtagtatcgattgtagtattgtattgagtggtgctgcacgcttgaattgaatcatctagaaatcaaaatttaaaaaaaaaaaaaaaaaaaaaaaaaaaaaaa

SEQ ID NO: 24783 - DNA, 275 bp, Zea mays
  Clone ID: MRT4577_122608C.1
tatttgcaacaccaccagctactgccattcagaccgctggctgctggctaccaccagcaatttcttccattcaaccaactggagctcattggaactctcctgcgttatgtgcaacaacaactactatttttcttcacagcggggtgctgaagagccctgctgccttcttgacacaacaacagttgttgccgttctacctgggcgctgctcctaacgttggcaccctgttacaactgaaacattggctgccattcaaccaacatgcttggacaaac

SEQ ID NO: 24784 - DNA, 1431 bp, Zea mays
  unsure (1)..(1431): unsure at all n locations
  Clone ID: MRT4577_122609C.1
gcaaacatattttacatttccaaagctcaagttttacaacataagaagaatggtaattattacaagtcctgatagtacccaaagtgcataacttattttaataattggaagggtgaagcctttccataagagatacacataacattctaagcttcaaggcctccacatgaagtaactaaccaaaagataagggaataaaacttctcctgggattaaacactattaagtcagtgtttgttaaacgagatttgcttgtcggtcatctcccatctgggtactcgatatatccatccatctcgaacttggtccgttgacatcgtctctcgaagtaatccaccctttgcatcaccttgaggtcgactcggctctcgtcctccgcatcacgtgatcactaacgtactctgggattaaacactattaagtcagtgtttgttagacgacgatttgcttgtcggtcatctctcatctgggtactcgatatatccatccatctcgaacttggtccgttgacatcatctctcggagtaatccaccctttgcatcaccttgaggtcgactcggctctcgtcctccgcatcacgtgatcactaacgtactcaagtcaattagaaatccgtgaacgcggcgacaacacctggctcatttttttatttttgtcgaacacctggcggacgttgcgggacttcgcttgctttatcgacacacacaaatcgctccacaccggatgcagtagcaaggtgatgacgagacgaacagggctatgcaggttttagggcgtgctgctcgatcacgcanagctgtagcagagtaggggcatggcctgtgcaggggacaagctgaagctccgagtaggcgctggtggcacagcgaggatggagacaacgacagatgacacagagctaggtggtgcggaccaccagagcgccacggcgaggaaagagcatggccgatgagtttggagaagaggcgaacaggaatttgccaagtgggcgtgctgggcgcggtgttgtgtgcagatagggaagccgagcaccagaggaaggccaaagcagcgatggcaacgactaggcggccaacacgacgagcaaggagctgggtgaggcgagcccatggcggcgcccgccggaggatgatggccgaagtgcacttggggatgagcagtgagatgggctgggaaggcatggctgcttggggagatggaggagcggcacgtctggcacaaacctgacggggtggaggccgagcaaggaaagcagaggacgacgaccatggaagaggggctcggatgcgagacggcttcagcagcttgaatgaaggacggggtcggaaggagacgcacgggaggagctcagctcctggattttgagatcacgtttggagagtcaggcgtggaaggggtaagggagaggaaggaggtgacctatggggagt

SEQ ID NO: 24785 - DNA, 268 bp, Zea mays
  Clone ID: MRT4577_12260C.1
cccacgcgtccgcggtctactaccactttgtgcacgggctagcggagttcccgcgcgaggacgacctcgaggcgcggttcatgctcccgggcctcccgacgctgtccgtcgccgacgtgccgtcgttcctgcacgcgtcagacccgtacaaggtactcggcgacacgattcaggaccagttccgcaacatgggcaaggcgtcgtgggtgttcgttaactcattcgccgagctggagcgcgacgttatcgccgcactccctagcgtcag

SEQ ID NO: 24786 - DNA, 166 bp, Zea mays
  Clone ID: MRT4577_122610C.1
ggccccgctgcgccaccggcggctcctgctcggagcaagcaattcttcgcgtccacgcgatctttccggagctataatgctcctgcgcgtcctacccgtgcgtcttcgggcgcccccgctacgtcggggtcacgcacaaccatcgacataaagtcccagacgtctc

SEQ ID NO: 24787 - DNA, 512 bp, Zea mays
  Clone ID: MRT4577_122611C.1
gacaagggtttttatttgttttacattttgtcatctcaaagtttcatgacatcagccaccagaatacataaagttaggttcttcactttatacagagaggaaaataataaactccagtagaagttcacttgaccaaagagaccacctctgatggaaaaccacacccaggaagacccaatatacatacacacacacacacacacacacacatatatatatatatataatgtatagatatttatagatatctcatctgaaagaacacagaaaaaaaaaatccaaggtctgcagcactatctacagtaaagagggattaattctaccagcttttcaaacagtcacatttgatattcaaaggaagcacgtgaatgaatagaactgggcacagactaacactccaccaggctctagagcagtctagtaatggcttaagattctagaagggtgtgatatgtgcaaaggaaaggtggatgcaggtgtccgctcagcctcagagcaccccacacacaact

SEQ ID NO: 24788 - DNA, 372 bp, Zea mays
  Clone ID: MRT4577_122612C.1
aacatagtagtttgcattcttttgtactagtgatatacaatatttatgtattcctcgtgttccctaaaaaaaaaaaaaaaaaaaaaaaaaaaaaaaaaaaaaaaaaaaaaaaaaaaaaaaaaaaaaaaaaaaaaaaaaaaaaaaaaaaaaaaaaaaaaaaaaaaaaaaaaaaaaaaaaaaaaaaaaaaaaaaaaaaaaaaaaaaaaaaaaaaaaaggggggggttctttagagggacaaaaattaaagtaccccggggtgcaaaaaaaaaaaggttttttttgggggaccccaaaaagaaaaaaacgggggggggtttaaaacgaatgcgttggaaaaaacctgggataatccaaataaaaagctttcgaaa

SEQ ID NO: 24789 - DNA, 561 bp, Zea mays
  Clone ID: MRT4577_122613C.1
agccacgaaactgcttttcatcagccggtactgtagccatcccaaattctacgatccattagctactgcacctcactagttgccttgttcatcatcagcccatatatctccaatccggcaatcgtcccaagtagtaactgtatcaggatctctccatatccctctctacagagggagcttccagcacaccaaaccctacctgtgtctgtgtgtgcctgcctctctttatcatcaggagcttccactattccacaccttcctccatctcctgcccggccccctcgccacctcaaccgatccagcgccatccgggtacgtccatggcgtccaccaccagcgatagcctcccctcctctccctccatccccaccaccgacggagccgccgaccaagagttctcctcctcccactaccaccaccacagcagcagcagcagcctcttcttcccgccgccgtcgtcctcctcctcctcccagctgcccagcctatacctcgactcctccttccacggcctcctccccactacatcttcccccgcggcggccacgtcgtccccttccc

SEQ ID NO: 24790 - DNA, 769 bp, Zea mays
  unsure (1)..(769): unsure at all n locations
  Clone ID: MRT4577_122614C.1
cactcccttcaacctccattaaaaactaagcgttcacgacccccagcttcaccatgtatggtttcaggactgccttcaagttttgtgatctttgccagaagttggaggagatgtttgacatccagggggggagctcggttccacgctcaagaagtggcgggtcgttttcactgacgatgaggatgacatgatgcttgttggagatgatccttggggcgagttttgcggaacggtgcacatatgaggaggcaaagaagctgacatccgagtacaagttaccggttagcagtgacagcaggaagctgagcgccgtaaactcactgtctgaatgacttgactaatcttgttgtttccaccattgactatgggggtaaattgcccatgcaccattgctccgtgggctgaactcgtggttggcgttcggttgccttgggttttggaggcttttggactgccatgccagcatgagcctcctggaaggaggaactctggcatctgcgtgccattatttcccatttgtccgtgcagtttggtcaggtgggagatgtatgcttctttcagcaacaatatttgcggaagcgatctgtatatatattagtctactgtttaatacgtaagcaattgtgctcctagcctgcccttgcgccgtaccatgccgtggcgcttctcttgtgctggctcgatctttttgatataaattactaacataccaacactctggtctttattggtgacctcnnggcagacnngaanaagacaaggctgcggg

SEQ ID NO: 24791 - DNA, 1721 bp, Zea mays
  unsure (1)..(1721): unsure at all n locations
  Clone ID: MRT4577_122616C.1
ggatatataattcggaacagagggtggtaagtatttttttctttctttcaatcctaaatcaatctaatgggcgaactaattttccatcccctgttcagtaagtatgtttcaagcatcaaacaactgatcatcttgtcctctaattgaatgttcttgtttgtttgattagtgtttagatataaccaaatccactttccttgcagagacaactggggttcacctttcggagaaagcagatactgaaaggagtagctcaacaggagcatgattgtattccggatgaacattatgtgcagacattattttctatcaaaggacttgaagatgaactggagagaagaactttgacctatacctcgtggaaccaatcatcaaatccgaaagacaaaatgacttggcatcctatgaaatttgagtatgatacatctagccatgagcatatcaatgctatcaagagaattgatcatgtcaactatcaaatggagcacaggacagagtggtgccaatgcaatggtacctcggtcccatgttttttatttgccaggaagttctcctatagtgcggccatgcatcttttggaacaaggagccattggcacaccgaaatctgctcagctgatgattaacttttaacaaaattgtttacacaagtctgcgctcacttttttgatgggtcattataccgttcacaatttcaccagcctcaatgggagctgtacattagcagcggtagctacagagacatggagtatcagagtattgacagcgaccagaatgcgcttagacagctaaggacttgaagagagttgatgcacaaactacagagcctcggttttgaagtttgtcagctctatcagtatgcgatttccaggggacagatggtagtgaaggacagagtacacacaacccttaccctaacaggacaggaaagttataacaatagcttgattttccttataaatattcttccccttgtatgattaaagaatagatagttttttttacttgcatacaggttatcagacatagcgaatagggaaacatgcaagaagatacatgtgtccataggacctactgtttagaacattggtcacattggcaagaagataagctgccttttcatgatctgcagctacaacatagcggacgccccaagattagtgactttaaaatgccttttaaaggaaaaatggttcaagcaccattacatagtccttaatttgactgtatatattacttttgaacaggttaattagggtttaataaagataacaaaaaggcnatgaaaaaaaaaaaaaaaaaaaaaaaaaaaaaaaaaaaaaaaaaaaaaaaaaaaaaaaaaaaaaaaaaaaaaaaaaataataaaaaaaaaaaaaaaaaaaaaaaaaaaaaaaaaaaaaaaaaaaagggggggggccttttaaggggacaaaatttaagaaccggttgttggaaaggtataattttttttttggggcccctaaaaaaaaataagggggcggggtttaaaaaccttgggacgggaaaaaacctggggttccccaatttaaatggtttggaaaaaaacccctttttccccggtggggaaaaaagaaaagggcccccacccaaccccttttccaaaaattgcccaaccttaatgggcaatgggaccccccctttaaccggccattaagcccgggggggtggggggttacccccagggggaccctttaaattggc

SEQ ID NO: 24792 - DNA, 1279 bp, Zea mays
  Clone ID: MRT4577_122617C.1
actccatagggcgattgggttcatcgagggcggccggggcgccacgcgtccccgacgacgcgaggttttataaacccacggcacagagctaatcggggatagggggcaccgacacatgtgacaagcctcatctcagccgtgcaggaccaagtagttttgcttcactccggcattccatccatatccatccatcagaattctcagtctccacagcagcaaggcgcacgaccagcaccagcagccggcaacaaaagacacagcagcgatggcgttcgtgccggtgtgcgtgcagtgcgggacgcggagcaacccgtgccggtgcaaggtggtcgggccgacgctggggttcgtcgcgttcgtggtggccggggtcatcgagtggccgctgggggccgccgtgtacctgttccgccaccgcaagggacgacgcatcatggcgcacccggccaccgtcgtgtacccgcgcgttaccagggccatcccgatctaatcggccgaccgatcagccaggtcgcggtttcatgtccgggtttgtgtcgccaacgtactgagatgtcgtcagtccaaatttgtgaatccttttacacccgcctgcctttctttctcaataagagtcgcaaatgtgtgtggtttcagtttgcgtacatttgtactccgattgtaagcatcgccgtcaatgtacgtaatactatgtatgtcatctcagtctatccgagtaacttcctattactaacttcaaacacgatcgactatccccttcccccccgggggggggcgcatccccccccccccggttttttactttttttttaaggggccgcggggggggggggaaaatccttttttttttttttttgggaaaaaaattacaccaaaatatttattagcgcaggccgtatacgtatatattccgcgcaccatgccaccccgttaacacatttcctaacacattacaatatgcggcgctcgcgtatcaccgccaggtgttttcccctttcccgatttatgtttttcctccgcctcgcgtttcggataacccgcaagcgatccccagcggcccaattttatgcactttcgtatcgtttatcttgtgtcccggggcgcgtcttatttttatccccccccgattatcttatcgctaactctcgccgcccggcacgtttcgtcaactccccgcgtatctcgataattaaagtcagcgcccacccgtttccagcggcgctgcttatatatttatatttcccccgcccagcgtaccccgatacccgaccccactcct

SEQ ID NO: 24793 - DNA, 550 bp, Zea mays
  unsure (1)..(550): unsure at all n locations
  Clone ID: MRT4577_122618C.1
cattgggtacctcgaggccggccgggaactctgttgcttacactgctgacgacggcttacataatcttcgtatatgtgccagactccatgtcccgtatttccaggacgtacttggatggtcgtcggcttcatgccagctttcccgcgtaagaggtcaacatggtgaaggctgatattaggagtgaccccaaggacgcctaccacctactctgctgaaggctactaccagtggacgaaccattctcccgccggtatgggagacgacacagaacaccgcgacgccgcccataaggagagacgagctttctggaaagatggctggacgctctgggctgctgctgtttgatcgacgagtgctgctgccagccgttcatcatcttccacagctagcattagatgaagaacaacctattggacatatataatatgtatgaatacagttggactcatagctttattcctgcaacttcaagctcgagatgattggatctcggacggagtngaagcgtatgtctcatctgtatcaactatcatcctgccattgtattgc

SEQ ID NO: 24794 - DNA, 2533 bp, Zea mays
  Clone ID: MRT4577_122619C.1
ctcacgcgtccggtgggacagccacaacagattcgaggccgggctgttttctttctcgctcctatcatttcgttccgttcctgatacaggcgagcagggacgactgcaggcctccccctctttctcggcttccactcacccgccaccactggaccacccccaacggcgagggagtgagagagatcggcagcagctcgggggcctggcagggcagctgcattgcgctgcggcgggcggcggccatggccgattcgtacggcgacggcaagggcccatcactcaagagccagagccagaaccagcagccgcgccctggcccccgcctcaagcccgccatcgagatggaggatctcatcaacctcctccacggatccgatccagtccgggtcgagctcacccgcctcgagaacgaactgcagttcaaggagaaggagctgggcgatgcgcaggcggagatcaaggctcttcgcttgtcggaccgcgcgcgcgagaaggccgtacaggatcttaccgaagaattggcaaaggtggatgggaagctgaagctcacagagtctctccttgaaagcaaaaaccttgaagcaaagaaaatcaacgacgaaaaaaaagcagcgcttgccgcacagtttgcagctgaggcaacactacgaagggttcatgcggcacagaaggatgatgacatgcctcctattgaggccatccttgcaccactggaagctgagctgaaactggcccgtcaagagattgcaaaattacaagatgacaacagggcattggatcgtcttacaaagtctaaggaagcagctctgcttgaagcggaaaggacggttcagatggcactggcaaaagcttccttggtggatgatctgcaaaacaaaaaccaagagttgatgaaacagattgagatatgccaggaagagaacaaaatcttggatagaatgcaccgccagaaagttgctgaggttgaaaagctcacgcagactgtcagagagctagaagaatctgttcttgctggtggtgcagccgcaaatgctgtcagagactaccagcggaaagttcaggagatgaatgaggaaatgaaaactcttgatcgtgagctagctcgtgcaaaggtttcagcaaatagggttgcagtagtggtggcaaatgagtggaaagatggcgatgataaagtaatgcctgttaaacgatggctcgaggagcgaaggattctgcaaggagaaatgcagcaactccgggacaaacttgctattgcagaaagggctgcaagatcagaagctcaactgaaagagaagttccagctacgacttaaggtactcgaggaaggattgagaatgtctacatcgagaaccaatgtcagtggcacacgccgccagtctattggtggtgctgatggtttgtctaaggccaacggcttcctgtcaaaacgcccatcattccagatgagatcaccagtgtctaccacaacgactctagtgaaccatgcaaaaggagcgtccaagtcgtttgacggaggctgtagatcacttgaacgctataagggccatgtaaacgggaatggtatgaacgtatctaccgattccagtgaagataaagattcaaacaactcagatgagaagtgtaacgagtttgcatctgctgagtcggaggactcggtgtcaggtgttctatatgatatgttgcaaaaggaggtcatttctctaaggaaggcgtgccacgaaaaggatcagagcctgaaagacaaggacgacgcagttgagatgttggcaaagaaagtagatactttgacaaaagctatggagtcagatgccaagaaatcgaggcgcgagctagctgctatggagaaggagctggcagctgtgcgcttggagaaagagcaggataacagggcaagacgttttggtagttcaagcggttctgccagcagttcgcagctcccacctggcaggactttacctaggagcggctcggcgcgcaacatgtgaaggcatgtaggaattgaccgaatatggctttgatgatccttacttggattaggactggtgactgggaaggaacctctcattgtcctggagaagatggcatcagcggaagagcctcttctgcctacatctcgtggtcgcagggatgaactactttgtgtctaacatctccggctagtgttttcttttcttttgttttgacgacgtgtcattcggtggtgattgctgttgtttcttttcttttggcaatttgatgatctttgttggtgctgtataggtttggtgaggcgttgctcctttttcttctttggtttgtttgttcgacatatccgtcggtctggatgtttacgatgtaaaatgtacgcactgaagagttgcttatggtttgcctgatattcccccctgtttctgtcagtgttgggcaagttgatgataaccagcatgatgaatgactcagctggctgttgtaaccatgtgccgaatgatgaagaaaccgctttgcatatgtctgatgatcaccagatgaatggagttagggcaagttcgaccaa

SEQ ID NO: 24795 - DNA, 1128 bp, Zea mays
  Clone ID: MRT4577_12261C.1
ttgggtacctcgaggccggccggggcttctgttctgcctgcctctatggctctatataaccagcgggccgcttgaggtctcccggggacttgtccaccgtatcctctccagctttccgctccgcgcttgtcgctcgtccagccaccgtgcgtgcccgtgccgccgagaattctatccagaagcaagcaacaagagcccacccccgcttcgcgcttgctttcgtgccagacacagagcacagctatctgctcgtgtcccggtccgtccaactcgctcgctcgctcaatccaccactgatgatggggatcccgctggtgtgctactgcctcgccgtgcccaagccggtcatcgccttctgcaggctgctcagcgccgtcagggacgccgccctgctgatgctggccgtggtggggctgtgccgcttcccgcccgacagcgcggtggacgccggccaccagcccggcgaggtgaaggcccggctccccgccgtggagtacggccagctcctggccgagcacgacgagcagcagcagtccggcgaccacgactgcgacggggacgccgcgtcgtcggattgcatcgtgtgcctcgagacgctggaggcggcggacgaggtgcggcggctgggcaactgcgcgcacgccttccaccgcgcctgcatcgaccgctggatcgacctcggccgcgcgacctgcccgctctgccgctccgacctcctgccgcgcgcgccgggctgggccagccggctcggcctgggccggctcacgcgcgttcggtgaggaggtcaggaggaccgtcttccatggcagttttgtctattggatgatggggcgcggacaggttagcgacggcgatccgcccggttggtataacagctgctctgcctgccatcattaacccgttaaaatatcgggggggcttctcgaggacgtccgggttgacacgattttcattctcttctcgaccatattaatagtaattaaattagttcgtcaacttattgtgcaacttggtgagcttagcagcagcaagtttgcgcaactggcagtgatgaataatttagcaaccaacttgaatcctctcatcaaaaaaaaaaaaaaaagcaaaaaaaaaaaaaaaaaagcggcc

SEQ ID NO: 24796 - DNA, 829 bp, Zea mays
  Clone ID: MRT4577_122620C.1
cattgggaccctcgaggccggccggcatagttgcacaccccacggccgcggtgcgtcggtgcggttgatcccgccaacaaggcaacaacgggcgcccgcccccgtcctgtcatctccgctcgccacaccagtcgccgtcggccgtcgctcctctcctccacgcctccctccctacctacctacctcgccttggcatccccgcaaggaatatcccttccatagcgtcccttgcttctttaccaccccaccctgtattcgtgtgtccctgccgcttaatttcccggtttctctgcgctctttcgtcatcttggatcttggttgcctcgggtggttcacaggattaatgctgaagtgttatccaatattcagtgaaaacgaggtactgaaaaataggagttgcaatgcctttgatgccccattcatctgtttttgcatgtccttgtatttgctgcgagaacttccatctactaagacactctataggagacacttgcagcatcagatggcttaaatgccatagcagattaatatatgaaactttcctctcaagcagaagacatcaaagtaaacctcttagtacaacagttctagcaagaagcacaagaaaaatttggagaacttattcccattctgctataataggtgtggagttgtcagatggacggcaaactagttctctggttactcctaatgggcattcctttgatgtatcctttttctcatctttgagttccgactgtgtgaagtagagatgcctagtgattgactctttgtggatactcttcctattgcaagacaattcggtggattctaatgaactctattggat

SEQ ID NO: 24797 - DNA, 597 bp, Zea mays
  Clone ID: MRT4577_122621C.1
cttccgtttcagctaggggccggggctttttaaggcaacggtggagagcgtcagtggcagcagctcgtggtccgtccggggtttgctgctccgttttcttcagagcagccagcagcgtccatccatggagaggacgaagaaaccatgccttggcgtcgtcgctctgcttctcttcctgctcctggcgtcggccgcccatggagctcagcctgcagatgccaaggacatagcaggtgacggcgacggcgacggcgagagggtcacggtgaggacagggcacgggcacggctacagcagcagccacagcagcgggcacccgagcggcggcacgccggagcagggcggcgcaggggtcgtcgatccccgtaacctcaacgccagaagccaccaccgccgtggcgcggcgaccagggcaactgcctactcttcttggctcgtctgcacgcttgtcgcaggaggtgttatgctgctgctgctgctttgaggtactagctgggagatgacgtgtgatgcatgtacaaatttaatggtgatgttcagatctgggttttggagggagagagatatatatacacctcgtggggtgtgaagttgatg

SEQ ID NO: 24798 - DNA, 289 bp, Zea mays
  Clone ID: MRT4577_122622C.1
ccaccacagacgaccctgtcatccgcaagctggcaaaaagtcaggggaatgtgtatgccaccggtgccatcctggccacgctgatgagctgtacccgctcagtgtattcctgggatattgtcgtccagagagttgggtccaaactcgtctttgacaagtttgacaactctgactttgacctcctgacagtgcctgagactgccaatgagccccctcaagatgaaggtaattccttcaattcaacccgcaacctggccatggaggcaacctacatcaaccacaatttctc

SEQ ID NO: 24799 - DNA, 411 bp, Zea mays
  Clone ID: MRT4577_122623C.1
cgtgcacgtcgactggaccaatggttttatctttggtggcaaccagtccaactgcggcacgtggatggacaaaatgggcgagagcgaaaaggctgggtccaagggtgttcccggtacgccccgtgatggtgccgccattgagattacgggcctgctgtacagcacgctgaagtggctggcccaccgcaacagcaagggcggttttgcgcacgagggtgtcaagaaggccgacggctcgtccattacgttcaaggactgggcggcactgatcgaggacaactttgagcgctgctactatgtgccccaactgccctcggatgacgagaactacgacgtcaaccccaaggtggtcaaccgccgcggcatctacaaggatctgtacaagtccggcaaggagtacgaggactacca

SEQ ID NO: 24800 - DNA, 262 bp, Zea mays
  Clone ID: MRT4577_122624C.1
cttatgtgcctccgagccagttaccacaatggttttttaccacccacctgcgcctgcctattggctaggtcaagcagatgcggggagcggggggcaaccaccggtggcccaagtgcaccagcaatgccttggcacatggaacagtacaaaccatcgggaggcagcaccacccgggggtcctaccagcactgatccacctaaccatggggaaccctgtcgcctacttagcaacagcaagtgcgtgcgtccaacccacttgctc

SEQ ID NO: 24801 - DNA, 202 bp, Zea mays
  unsure (1)..(202): unsure at all n locations
  Clone ID: MRT4577_122625C.1
tctcggcttctcgcgagtcgcgagtcgcgacagagagagaggcggagttgcggagaagatgcagagcagcagcatgaagagggagatcagngaggnccacgacaccattcgattagggataaacgccggggtaaaagacgaactaggaaagcggacgaggtaaaaagtattataaaaaaaagaaaaaaaatttggggggggg

SEQ ID NO: 24802 - DNA, 604 bp, Zea mays
  unsure (1)..(604): unsure at all n locations
  Clone ID: MRT4577_122626C.1
ccggccgggaaattcccctgcgatcctctctgtccacctctcctttctcacaccgcgacgcctctctctctctttccccgagctcctcgaaaccctaggtgcgtgccgaccggcggcggcggcgaggtgatggcgatggacccggacgcggtggcgaaagccttcgtggagcactactaccggacgttcgacaccaaccgcgcggcgctggtggggctgtatcaggagacctccatgctcaccttcgagggccagaagttccaggngcccatccgccattgccggcaagctcggatctcttcccttccaggcctgcgagcaccctatcaagttctcccaggcattccatttgctgccggcagctgggtccttcttcgtgcagaatgacatgttccgcctgaactatggctaaaagacagccgaaaactcttgtgatgaacgaatttgttaagggcttcatgttgagacgatgaataccgactgtcgccgctactctcgtctcctttgtatctcctctgttggctgattaactgttattacaagaaattgctggacttgtttttttccagttgttttgaaccaaaaaaaaaaaaaaaaagcggcc

SEQ ID NO: 24803 - DNA, 614 bp, Zea mays
  Clone ID: MRT4577_122627C.1
gtgcggcgctcgaggcggccgggtccgaacttggtccaccgcgacgcctctctctctctttccccgagctcctcgaaaccctaggtgcgtgccgaccggcggcggcggcgaggtgatggcgatggacccggacgcggtggcgaaagccttcgtggagcactactaccggacgttcgacaccaaccgcgcggcgctggtggggctgtatcaggagacctccatgctcgtcttcgtctccggttccatccgcaccggccccgaggagcaccctatcaagttctcccaggcattccatttgctgccggcagctgggtccttcttcgtgcagaatgacatgttccgcctgaactatggctaaaagacagccgaaaactcttgtgatgaacgaatttgttaagggcttcatgttgagacgatgaataccgactgtcgccgctactctcgtctcctttgtatctcctctgttggctgattaactgttattacaagaaattgctggacttgtttttttccagttgttttgaatcatgtattatggttgcatgggcaccatttcttcgtgggatgtgaattgaaacagtccaaaccaaaaaaaaaaaaaaaaaaggccccta

SEQ ID NO: 24804 - DNA, 687 bp, Zea mays
  unsure (1)..(687): unsure at all n locations
  Clone ID: MRT4577_122628C.1
ccggccgggtcctttctcacacctcgacgcctctctctctttccccgagctctcgaaaccctaggtgcgtgccgaccggcggcggcgaggtgatggcgatggacccggacgcggtggcgaaagccttcgtggagcactactaccggacgttcgacaccaaccgcgcggcgctggtggggctgtatcaggagacctccatgctcaccttcgagggccagaagttccagggcccatccgccattgccggcaagctcggatctcttcccttccaggcctgcgagcaccagatcgtcaccgtcgactgccagccgtcggggccccagggaggcatgctcgtcttcgtctccggttccatccgcaccggccccgaggagcaccccatcaagttctcccaggcattccatttgctgccggccgctgggtccttcttcgtgcagaatgacatgttccgcctgaactatggctaaagacacccgatactcttgtgatgaaggaattgattaagggtttcatgttgaaacgatgaatacttaatggtgccgctactctgggctcttttggatcctctttggtggctgcttcactgtattancagaaattgctagacttggattattntcagntgttttgaatcatgtactggttgcaccatttctttgtggaatgtgaattgaaacggtcgtagcc

SEQ ID NO: 24805 - DNA, 450 bp, Zea mays
  unsure (1)..(450): unsure at all n locations
  Clone ID: MRT4577_122629C.1
gttttcctcactgacaataaacagagaccacctcagctgccagtgccttgcagccctgggcgaccctccccttgccaggcctaccttcttccctgcctccgctgtgcctcttggctggcatctccgctgacccaggagggcgtggaggggctgtccactgccgggggccctggcccctctctccctgcccctgggcaggacgccttcttctgcagggaccagtctctccctccttcccagagggaccagacggacgcctctgaccgtctccttcctgacgggcctgttgacctgccgctggagtcaccagctccagcgcctttcgggggccaggcaggtgacacaggcgaatccaggctggatgcgtcctgcggggcggccccgtcaggctgccttggtgtcagaacacctgngtggtggggactggggtgaactggggtagatacactg

SEQ ID NO: 24806 - DNA, 1155 bp, Zea mays
  Clone ID: MRT4577_12262C.1
cattgggtacctcgaggccggccgggcggacttgtccgccatatcctctccagctttccgctccgcccttgtcgctcgtccagccaccgtgcccgtgcccgtgccgccgagaattctatccagaagcaagcaacaagagcccacccccgcttcgcgcgcgctttcgtgccaggcagacacagagcacagctatctgctcgtgtcccggtccgtccaactcgctcgctcgctcaatccactgatgatggggatcccgctggtgtgctactgcctcgccgtgcccaagccggtcatcgccttctgcaggctgctcagcgccgtcagggacgccgccctgctgatgctggccgtggtggggctgtgccgcttcccgcccgacggcgcggtggacgccggccaccagcccggcgaggtgaaggcccggctccccgccgtggagtacggccagctcctggccgagcacgacgagcagcagcagtccggcgaccacgactgcgacggggacgccgcgtcgtcggattgcatcgtgtgcctcgagacgctggaggcggcggaccaggtgcggcggctgggcaactgcgcgcacgccttccaccgcgcctgcatcgaccgctggatcgacctcggccgcgcgacctgcccgctctgccgctccgacctcctgccgcgcgcgccgggctgggccagccggctcggcctgggccggctcacgcgcgttcggtgaggaggaccgtcttccagggcagtttttaatttgtctattggatgatggggcgcggacaggttagcgacggcgatcgcccgggtggtataacaacagctgctctgcctgccatcagccaaccgctaatctacgggggggcttcattagtacgtaaaaggcgcctcacacttggtatacgtaaaagatatactagttattaatacgttaaaggattgagtatacggcacctagatgtttcatttgtacacgattttaatttcagtctctcctcgaccatatattaatagtaattaaattagttcgtcaacttattgtgcaacttggtgagcttagcagcagcaagtttgcgcaactggcagtgatgaataatttagcaaccaacttgaatcctctcaaaaaaaaaaaccaaaaaaaaaaaaaaaaaagcggcc

SEQ ID NO: 24807 - DNA, 1486 bp, Zea mays
  Clone ID: MRT4577_122630C.1
gccgggaaaaaaaaaagaaaaaaaaaaaaaaaaaaaaaaaaaaaaaaaaaatggttcctgactcaatggggatgtgacttttgtgaaaaaaaaaaaaaaaaaaaaaaaaaaaaaaaaaaaaaaaaaaaaaaaaaaaaaaaaaaaaaaaaaggctttatctttttcgccgagctcctcaaaaccctaggagcgggcttgaccggcgggggcgaggggatggcgatggaccctgacccggaagcaaaggccttcggggagcattactaccgaacgttcgacaccaaccgcgcggggctggttgggctgtaccaggaaacctccatgctcaccttcgagggccaaaagttccagggcccctccgccattgccggaaagctcggatctctccctttccaggcctgcgagcataaaatcgtcaccgtaaactgccagccatggggtccccagggaggcatgctcgttttcgtctccggttccatacccaccggccccgaggagcaccccatcaagttctcccaggcattccatttgctgccggccgctgggtcctttttcgggcaaaatgacatgttccgcctgaactatggctaaagacacccgatactcttgggatgaaggaattgattaagggtttcatgttgaaacgatgaatacttaatgttgccgctactctggtctcttttgtatcttctttgttggctgcttcactgtattacaagcggacgcgtgggcggacgcgtgggcggacgcgtgggcggacgcgtgggcaacgctctatctctttcgccgagctcctcgaaaccctaggagcgtgcttgaccggcggcggcgaggtgatggcgatggaccctgacgcggtagcgaaggccttcgtggagcattactaccgaacgttcgacaccaaccgcgcggcgctggttgggctgtaccaggagacctccatgctcaccttcgagggccagaagttccagggcccctccgccattgccggcaagctcggatctctccctttccaggcctgcgagcatcagatcgtcaccgtagactgccagccatcgggtccccagggaggcatgctcgtcttcgtctccggttccatacgcaccggccccgaggagcaccccatcaagttctcccaggcattccatttgctgccggccgctgggtccttcttcgtgcagaatgacatgttccgcctgaactatggctaaagacacccgatactcttgtgatgaaggaattgattaagggtttcatgttgaaacgatgaatacttaatgttgccgctactctggtctcttttgtatcttctttgttggctgcttcactgtattacaagaaattgctagacttggattatttcagttgttttgaatcatgtactggttgcaccatttctttgtggaatgtgaattgaaacggtcgtagctacttgataaaaaaaaaaaaaaaaaaaaaaaaagtactctgcgttgttaccactgct

SEQ ID NO: 24808 - DNA, 315 bp, Zea mays
  Clone ID: MRT4577_122631C.1
aaaattaatagggaaacaagggcttttttaatattactactaccatatgaagtacaagctttcaaatacggatggaaagattcatagaagaagcagaatgtaagctacctgacttgtaagaacgcttataaaacacatgcgaccatttacaaaaacacttgacaacactattggtgcaaatatggggatgtaatatacaacttggccatacacttctaattgtacatgtaggggttacaaaaaaatagagagagagagagactcaacctgagcatttcacttaaaaacaccactcccttcagcgacatataaact

SEQ ID NO: 24809 - DNA, 812 bp, Zea mays
  Clone ID: MRT4577_122632C.1
gggaccctcgaggccggccgggagctccgctctggttcctggtccaggggccttccacgccttccctttccatggcgtccagggatctccggcgcctgctcgacggtgtcgccctcgtcgcgcgcgaggccacgcggggtacctccctgcgtgatgtcctcaggtctgcgctccttgccaccaccgacctcgccggcctcaccagaggcaccccgcgccgtccgccgcaccctccaggcgcaggaccgctgcccgccaccgaatcctcccgcccctcctccgtcgtgtacttctcccacgatgaagccacggcgtcgccgcaagatcatgcactggagcgtccgccgccagcgcaagaggccccgcaccccgcgcggacgcaggagaccgtccgaactggtacaaccgcctccgttgcagccgaacctgctgccgtcgcggcggacaggcccgaacctgcggcacctcctcccgatccctcgcctttgccccaacaggcgccccctttggcctcagcggcgcctggggagaagaggaggcggctgcgggaacggaaggttccatccacgcccttcaccagagcactcgggtttgcaggactgggcgccgggttagcgtggggcactgttcaggagtcggcccgtcgggtaatgtatggcaccccggtggacacagagggcaagcgatcagcgctctccccattcttgtctgatcagaatgccgagcgtgttgcacttgcgctctgcaggatgcggggagcagcgctcaaggtggggcagatgctgagcatccaggacgaatcccttgtacct

SEQ ID NO: 24810 - DNA, 797 bp, Zea mays
  Clone ID: MRT4577_122633C.1
accagggacaattcccctgcgatcctctctgtccacctctcctttctcacaccgcgacgcctctctctctctttccccgagctcctcgaaaccctaggtgcgtgccgaccggcggcggcggcgaggtgatggcgatggacccggacgcggtggcgaaagccttcgtggagcactactaccggacgttcgacaccaaccgcgcggcgctggtggggctgtatcaggagacctccatgctcaccttcgagggccagaagttccagggcccatccgccattgccggcaagctcggatctcttcccttccaggcctgcgagcaccagattgtcaccgtcgactgccagccgtcggggccccagggaggcatgctcgtcttcgtctccggttccatccgcaccggccccgaggagcaccctatcaagttctcccaggcattccatttgctgccggcagctgggtccttcttcgtgcagaatgacatgttccgcctgaactatggctaaaagacagccgaaaactcttgtgatgaacgaatttgttaagggcttcatgttgagacgatgaataccgactgtcgccgctactctcgtctcctttgtatctcctctgttggctgattaactgttattacaagaaattgctggacttgtttttttttccagttgttttgaatcatgtattatggttgcatgggcaccatttcttcgtggaatgtgaattgaaacagtccaaatcaattggtgtggcagatatctggtttgcccttctacaaaaaaaaaaaaaaaaagcccctaggg

SEQ ID NO: 24811 - DNA, 744 bp, Zea mays
  Clone ID: MRT4577_122634C.1
gggtacctcgaggccggccgggccgggacctcgacgcctctctctctttccccgagctctcgaaaccctaggtgcgtgccgaccggcggcgaggtgatggcgatggacccggacgcggtggcgaaagccttcgtggagcactactaccggacgttcgacaccaaccgcgcggcgctggtggggctgtatcaggagacctccatgctcaccttcgagggccagaagttccagggcccatccgccattgccggcaagctcggatctcttcccttccaggcctgcgagcaccagatcgtcaccgtcgactgccagccgtcggggccccagggaggcatgctcgtcttcgtctccggttccatccgcaccggccccgaggagcaccccatcaagttctctcaggcattccatttgctgccggcagctgggtccttcttcgtgcagaatgacatgttccgcctgaactatggctaaaagacagccgaaaactcttgtgatgaacgaatttgttaagggcttcatgttgagacgatgaataccgactgtcgccgctactctcatctcctttgtatctcctctgttggctgattaactgttattacaagaaattgctggacttgttttttccagttgttttgaatcatgtattatggttgcatgggcaccatttcttcgtgggatgtgaattgaaacagtccaaaaaaaaaaaaaaaaagaaaaaaaaaaaaaaaaaaaaaacccgcggcc

SEQ ID NO: 24812 - DNA, 217 bp, Zea mays
  Clone ID: MRT4577_122635C.1
ggagccgagcctggtactgggtagccaagcccatcccggtcctctcccggcgtcttctccctccgcaccgaggctccagcgatggcgggcgtcagctgctggctgtgtttgatgtatttcttggtcatattgttgatccttgctgaagctgcagctgatgcattcattttgtttgtccatggctggatagatgtaattccagtcgtacacatcacat

SEQ ID NO: 24813 - DNA, 923 bp, Zea mays
  Clone ID: MRT4577_122636C.1
gggaccctcgaggccggccggggtcgcgttctttcgacgccaaccccgacccgcggccccaccacccagggccaaattcccctgcgatcctctgtgtccacctctcctttctcacacctcgacgcctctctctctttccccgagctctcgaaaccctaggtgcgtgccgaccggcggcggcggcgaggtgatggcgatggacccggacgcggtggcgaaagccttcgtggagcactactaccggacgttcgacaccaaccgcgcggcgctggtggggctgtatcaggagacctccatgctcaccttcgagggccagaagttccagggcccatccgccattgccggcaagctcggatctcttcccttccaggcctgcgagcaccagatcgtcaccgtcgactgccagccgtcggggcccccagggaggcatgctcgtcttcgtctccggttccatccgcaccggccccgaggagcaccccatcaagttctctcaggcattccatttgctgccggcagctgggtccttcttcgtgcagaatgacatgttccgcctgaactatggctaaaagacagccgaaaactcttgtgatgaacgaatttgttaagggcttcatgttgagacgatgaataccgactgtcgccgctactctcatctcctttgtatctcctctgttggctgattaactgttattacaagaaattgctggacttgttttttccagttgttttgaatcatgtattatggttgcatgggcaccatttcttcgtgggatgtgaattgaaacagtccaaatcaattggtgtggcagatatctggtttgcccttctacaaaacgaattgtacctggttgatatgcagtgcagttcgtcaccacagcaagtattcgagttcccggtgctttgcccctgaaaaaaaaagaatg

SEQ ID NO: 24814 - DNA, 1018 bp, Zea mays
  Clone ID: MRT4577_122637C.1
acctggcccatttgtagcccaggcctaaccacccatttgtcgcgttcttttcacgccaacccggacccgcggccccactacccagggccaaatttccctgtgctcctctccatccagctctcctcttgctcataccgcgacgctctatctctttcgccgagctcctcgaaaccctaggagcgtgcttgaccggcggcggcgaggtgatggcgatggaccctgacgcggtagcgaaggccttcgtggagcattactaccgaacgttcgacaccaaccgcgcggcgctggttgggctgtaccaggagacctccatgctcaccttcgagggccagaagttccagggcccgtccgccattgccggcaagctcggatctctccctttccaggcctgcgagcatcagatcgtcaccgtcgactgccagccatcgggtccccagggaggcatgctcgtcttcgtctccggttccatacgcaccggccccgaggagcaccccaaaaatcaagttctcccaggcattccatttgctgccggccgctgggtccttcttcgtgcagaatgacatgttccgcctgaactatggctaaagacagccgatactcttgtgatgaaggaattgattaagggtttcatgttgaaacgatgaatacttaatgttgccgctactctggtctcttttgtatcttctttgttggctgcttcactgtattacaagaaattgctagacttggattatttcagttgttttgaatcatgtactggttgcaccatttctttgtggaatgtgaattgaaacggtcgtagctacttgatacgcattttgttacaacagcaggcattcgagtttctggtgcttgtacctggagctgttggaaattttcgcttcttctgcagaggggaagtcttcgggcaagatgtggtaaaccccccctcgattttgtatgtctggttagcgaggttgaattgaatactcttgtgtctatgactaaaaaaaaaaaaaaaaaaaaaaaaaaccccccc

SEQ ID NO: 24815 - DNA, 1983 bp, Zea mays
  Clone ID: MRT4577_122638C.1
gggtacctcgaggccggccgggaacgaagcgtgttctcataatggcattcgagcgaatccgtagtttgataatggcataaatccaattttctcctccaccgagccggccgaatcaaatcgaaccgcgggcagcgcgcacgcgcagcgactgccggcgatggcgagcctcaccctgccgccggcgccccccaacccacgccaggacgccatcgacctccacaaggccttcaaagggtttggatgtgacagtacaacagtgataaacatacttactcatcgcgattcggtgcagcgtggactcattcaacaggaatacagggctatgtatcatgaggaactctcccaccgtatttcatctgaactcagtggaaaccacaagaaagctatgtcgctgtggattcttgatcctgctggacgtgatgcaactgttttgagagaagctctaaatggtgacactatggatctgagagcagccactgagattatatgttccaggacaccatcacagttgcaaataatgaaacagacttattatgctagattcggtacttatcttgagcatgacattgctcaccacacatccggtgatcaccttcagcttttacttgcctatgtggggattccacgctacgaaggtcctgaggttgatcctaccattgtgacacatgatgcaaaggatttgtacaaagctggtgagaaaaggctcggtacggatgagaagacctttatccgcgttttcactgaacgcagctgggcacacttggcatctgtttcgtctgcttaccatcatatgtatgaccggaaattagagaaggttatcaagagcgaaacatctggaaactttgaattcgcacttttagctatcctcagatgcgcggaaaacccagcaaagtattttgcaaaggtactgcgcccatgttgttttcagtaaaaaaaatattgtagattttgaaatcctgtgcaggcaccataggtgtataaaatcactgattgatttagagtcgagttatgttttgctgatagatttagccatagccaacagctgttctttcttacgaaattataatttaacatttggtgaagcaaagatcactagttgatatgacactgatataaagtttgctgtaccatctagagttgatctttttatttcttatttcaattatatgtaacttgccaccattccaaagtgttgttttctgctaatgctgcgaaatgagcatgttcaagattgctcttgtatcttcggtgccgaatacagctcttacgaaaggccatgaaaggtctaggcactgatgacatgacacttataagggtggtggtgacgaggaccgagattgacatgcaatatatcaaggcagagtacttgaagaagtacaagaagccattagctgaggctatcaactccgagacatcaggaaactatcggacgttccttctttcacttgttggtcatggccattaggttcgcccatatttctctggaggctggagctactagacctacctggaaaacttatgatgttgccatttatctgtcgtgactcttggatctaactgccacacatcacatatgcggttcctagtatgcttgtgtaaagtattcgtgtatatatttccatctgggtttcttgttggaagattctggatggggcaccagatcagctgttgctggtcacagtgggcttgcctggtgtctctatgacgccaatattattatgtcatgttcttgtggtatttccttcatttgttattctgtttttcgctgcttatcccatatccctgttttctccggtccttcgcggagaccaacgtcttaggacatgacccacccatataggggtacgtttcttggagtataaaagataggttttgtatcttattgtaagatatgactcatacgagggttgtatgtatgaagctgtttgttggacttaaaagaaccgtgttaaagatatgtcattgttaaaaaacccccccaac

SEQ ID NO: 24816 - DNA, 427 bp, Zea mays
  Clone ID: MRT4577_122639C.1
ggggccaactcgtcaaagcaagaattttcgaaaaaacagaaacaaaacttttgcaaggtgactaaatatcaatcaattaaattacaatttttggacaatcatacacagaactccaacggatatgtaaggggcaactaaaaaaaaagcttgcgctacaaaagctatcaatcaatcttttttgaagaaagaaacttcctggggagatcagatttcaatttgcatccaagagaatgtgttttgatgaataagccaccaatctcttcctccttctgttcggatacgtagaaagctataaacgcaaaggtaacccctatagtatacaagctctgcagtgaaaaggctccaaggaagctgagaatgaacagagagagaacagccttgaagaacagcacccaatcattcccatctgcagggatttcaaaacatt

SEQ ID NO: 24817 - DNA, 753 bp, Zea mays
  Clone ID: MRT4577_12263C.1
agcttaccacacttactgcatggatccaccgcgcagttctgtcccgagaggtaaatggttctgcacgccgtgtagtgcatggaggtcggcgaacgggatgcagaggtatgagaagtcgatcctgcagagcgtcaagcgtgttcctgatgccaaagggcccaaggtgcaggcagcagctgctgctccaggaaaataagcagcggcgctgtggatgcgagggtacaaaaagaaatgaaaggattcttgttcctctgaaggtgtatgcattactctgacagactgaatcgagtaatcggaggatgggctgtgtatacgtggggagaagacctgttggcttgtgaagacggagatggtggcatccgagtggacacgcacttttgtctctgtggatggagctgctgatgttggttccctgtcctgttatttccttcctggaattcttctgactaccccaagcgagtaggttgttgttgttgttgttctgttatgttgtgtctgccctttacctgatgctaagtggtaacactgacacccgcccatgttgacattgatatgtacatgtccgttacctgttttctttttgttggacaatccatatatacttttctgcatggcatgtggtcgatgtctgtataagtttattacatatctgattgaacccataaggcagaaagcttgggtgatatctaaacaatgatgcatctccatgttttttcttctttctttcaagtgtcatatttatgttgttggaga

SEQ ID NO: 24818 - DNA, 689 bp, Zea mays
  Clone ID: MRT4577_122640C.1
aaactttgaatttgcacttttgactatcctccagatgcgcggaaaacccagcaaagtatttttttaagctcttccgaaaggccatgaaaggtttaggcactgatgacatgacacttataagggtggtggtgacgaggaccgagattgacatgcaatatatcaaggcagagtacttgaagaagtataagaagccattagctgaggctatcaactccgagacatcaggaaactatcggacgttccttctttcacttgttggtcatggccattaggttcgccctctggaggatggagctactgtgagtatagcattttcaaactgatctcatattcactcttgtgttttcctcttgtcaggctatgtttcgaccatggggcatgatatttttatcgatcccccctaaatgcagcgacctacctggaaaacttatgatgttgccatttatctgtcgtgactcctggatctaactgccacatatcccatatgcggtccctagtatgcttgtttaaagtattcgtgtatatatttccatctgggtttcttgttggaaaattctggatggggccccagatcagctgttgttggtcagtggtcccagtgggcttgacttgtgtcttcatgacgccaatattattatgtcatgttcttgtggtaaaaaaaaaaaaaaaaaaaaaaaaaaaaaaaaaga

SEQ ID NO: 24819 - DNA, 179 bp, Zea mays
  Clone ID: MRT4577_122641C.1
cagaattccccattagaccgcatgacatgtggaccgccgggcaacgtgataaagtgcaaattcgctgtggagtcggtacctttgtaacacgctgccaatcaacgaggtggaggtggagccaccgcaaggcgtggagatggccgtctagataattttactctccctctgccacaccgtac

SEQ ID NO: 24820 - DNA, 1612 bp, Zea mays
  unsure (1)..(1612): unsure at all n locations
  Clone ID: MRT4577_122642C.1
cattgggtacctcgaggccggccggggccgaggcagggtctggggccggtcagtgttgtgccgcccgttgaaaccaccacgcgtctcggacgggtagacgcggtccacgctagctcctcgctatctccgtcctactcctcctcatactttaccgcaaagcgcgcaccacgaattgcacctacccatttcgctaatctccctccacgagccgaccaaatcgaatcgattcgcgcgcagcgcgcccgcgcagcgattgccggcgatggcgagcctcaccctgccgccggcgatggcgaacccacggcaggacgccatcgacctccaaaaggccttcaaagggtttggctgtgacagtacaacagtgataaacatacttactcatcgcgattcagtgcagcgtggactcattcaacaggaatacagggctatgtatcatgaggaactctcccatcgcatttcatctgaactcaatggaaaccacaagaaagctatgttgctgtggattcttgatcctgctggacgtgatgcaactgttttgagagaagctctaagtggtgacactatggatctgagagcagccactgatattatatgttccaggacaccatcacagttgcaaataatgaaacagacttattatgctagatttggtacttatcttgagcatgacattggtcaccacacatctggcgatcaccagaagcttttacttgcctatgtggggattccacgctacgaaggtcctgaggttgatcctaccattgtgacacatgatgcaaaggatttgtacaaagctggtgagaaaaggctcggtacggatgagaagacctttatccgcgttttcactgaacgcagctgggcacacttggcatctgtttcgtctgcttaccatcatatgtatgaccggaaattagagaaggttatcaagagcgaaacatctggaaactttgaattcgcacttttagctatcctcagatgcgcggaaaacccagcaaagtattttgcaaagctcttacgaaaggccatgaaaggtctaggcactgatgacaagacacttataagggttgtggtgacgaggactgaaattgatatgcaatatatcaaggcagagtacttcaagaagtataagaagccattagctgaggctatccactccgaaacatcaggaaactatcggacattccttctttcacttgttggtcctggacattaggttatgtttcgaccatgggacatgatattccatccatccaccctaaatgcagcgacctacctggaaaacttatgatgttgccatttgtcagtggtgactcgtggattcgtctaacttccacatatgcggtatctagtatgcttgactaaagtattcgtgtttaaatttgtatctgggtttcttgttggaaaattctgtgcgggggcacaacagctgttgttggtcacgctaggcttgacttgtgtctccatgacatcaataatattatgtcatgttcgtgtgtggtcattccactattagagaaagcaccatatgtaccggttgagaattggctttaaagaggagattttagtaccggttcttggtatgagctgatactaaaagttacatatttnaaaa

SEQ ID NO: 24821 - DNA, 552 bp, Zea mays
  Clone ID: MRT4577_122643C.1
gtatgaacaagtgatagcgttaaccatatgatagtgtggttctgggagtacaatcttgaagcatccaacgagacagggcaacagagataacttttcagtaaaactattgacgacctaccgatatctatacagtaaagaaccaaacaaacccctatctgcatgatctcacgctaactttacacttgaactgggaagccaaaattctggaacaccctgatctcgcctgcccgcccagccgtgacaatcaccaaaccccacgcagaccggcgctggacatccatagctcccatgcaaagatcggacgagcagtgaccagggctgctcttggctgatggtaatttttcgtcaggccaggatgtggacgctccatcaccttgatgtctactggtgcttctgcttgtcacaccttcgcagactgggctctcattgtatctgatatcagctgcatcacaattgtgctgagtgttctcaactgggaggtctcgaccagagttcactgctccatctgaatcactgtgcctgctgctttgagatccaaacgaacctcgggct

SEQ ID NO: 24822 - DNA, 451 bp, Zea mays
  unsure (1)..(451): unsure at all n locations
  Clone ID: MRT4577_122644C.1
cggaattccggtcgaccacgcgtncgccacgcgtccgttaaagtaaaagtccatttgtaggtgtttatttgtaggtgttatgtatataaaggggctaaccgctaacgtgttatagataattatcttagccatcattgtctcttttcctaaggttacagacgtctaagacagtcatcgaatcatcaaagtatgagaccctcactacagataagctttttcagcgagttcaagttcatagaaattaatcactagacttggaaaccctagtgcatccaccataagccttgtcttaagaggtgatatctctttagcttggcacttgttgtcagtcgtttttgcagcttcacaacaatgatatgaatcggcggtgtggcacgaacaaggacgcctgctttcactatacagacctcgactatttcatcgccaactatttcaagatgaagggcaagtc

SEQ ID NO: 24823 - DNA, 1651 bp, Zea mays
  Clone ID: MRT4577_122645C.1
caggggcacgagatcatcatccttccctcttaacgccggcacgaggccaaatcgcacctaaccattttcgctaatctccctccaccgagccggccgaatcaaatcgaaccgcgggcagcgcgcacgcgcagcgactgccggcgatggcgagcctcaccctgccgccggcgccccccaacccacgccaggacgccatcgacctccacaaggccttcaaagggtttggatgtgacagtacaacagtgataaacatacttactcatcgcgattcggtgcagcgtggactcattcaacaggaatacagggctatgtatcatgaggaactctcccaccgtatttcatctgaactcagtggaaaccacaagaaagctatgtcgctgtggattcttgatcctgctggacgtgatgcaactgttttgagagaagctctaaatggtgacactatggatctgagagcagccactgagattatatgttccaggacaccatcacagttgcaaataatgaaacagacttattatgctagattcggtacttatcttgagcatgacattgctcaccacacatccggtgatcaccagaagcttttacttgcatatatggggattccacgctatgaaggtcccgaggttgatcctacaattgtgacacatgatgcaaaggatttgtacaaagctggtgagaaaaggctgggtacggacgagaagatttttatccgtgttttcactgaacgcagttgggcacacttggcatctgtttcttctgcttaccatcatatgtatgaccggaaattagagaaggttatcaagagcgaaacttctggaaactttgaatttgcacttttgactatcctcagatgcgcggaaaacccagcaaagtattttgctaagctcttacgaaaggccatgaaaggtttaggcactgatgacatgacacttataagggtggtggtgacgaggaccgagattgacatgcaatatatcaaggcagagtacttgaagaagtacaagaagccattagctgaggctatcaactccgagacatcaggaaactatcggacgttccttctttcacttgttggtcatggccattaggctatgtttcgaccatgggacatgatatttctatcgatccaccctaaatgcagcgacctacctggaaaacttatgatgttgccatttatctgtcgtgactcctggatctaactgccacatatcacatatgcggttcctagtatgcttgtttaaagtattcgtgtatatatttccatctgggtttcttgttggaagattctggatgggataccagatcagctgttgctggtcacagtgggcttgactggtgtctctatgacgccaatattattatgtcatgttcttgtggtatttccttcatttgttattctgtttttcgctgcttatcccatatccctgttttctccgtccttcacggagaccaacgtcttaggacataacccagagatataggggtacgtttcttggagtataaaagataggttttgtatcttattgtaagatatgactcatacgagggttgtatatatgaagctgtttgttggacttaaaaaaaaaaaaaaaaaaaaaaaaaaaaaaaaaaaaagcggccctcgaggggggaacccgggtaccca

SEQ ID NO: 24824 - DNA, 903 bp, Zea mays
  Clone ID: MRT4577_122646C.1
catctaccagcacagcaactgcaaaccatacatgtaacatggccattcgcgtgctggggactggatatgattggacccttcaagaaagctcaaggaggatgcactcatgtactggttgcttttgacaaattcactaagtggatagagtacaagcccattgcttttctaacttcagctaaggcagtggaattcatacaggacataatattcaggtttggaataccgaacagcatcataactgacctaggatccaatttcactagttcggagttctttgatttctgcgaacaaaaaagcatccagatcaaatatgcatcagtggcacacccaagagccaacgggcaagtagaaagagccagcggaatgatactggaagcactcagaaagaaagtcttcgacaagaatgaaaagttcacaggaaaatggatcagagagttgccgtatgtgatctggagcctaagaactcaacccagccgagctttgcatagaaacactcctttctttatggtttatggttcagaggcagtgatgcctgctgatctcaagtttggggcgccaagattgatcttcgaaaacatagctgaagctgaggctactagattggaggatgttgatatactagaagaagaacgattgaatacagtgattcagtcggctaggtatcagcaaaccatgaggcgctatcatgataaggccatacgacatcgatcctttgcagtgggagatcttgtcctccgccgaattctagcgggggagggacgacacaaattgtcgccactatgggaaggaccattcatagtagcagaagtcactcggcctgtatcatattgtcttactcaaatggatggcacggaaatagggaactcatggaatatagagcatctcaggaagttttacccctag

SEQ ID NO: 24825 - DNA, 777 bp, Zea mays
  unsure (1)..(777): unsure at all n locations
  Clone ID: MRT4577_122647C.1
ttggtggacgcctgcaggttccggtccggaattcccgggtcgacccacgcgtccggacgggcatcgccatatctgtggccgccgtggctctgggggccaaggtgttggaacgtcacataacgttggacaagacctggaaggggagtgaccactcagcctcgctggagcctggggagctggcagagctggtgcggtctgtgcgcctggtagagcgggccctgggctccccaaccaagcagctgctgccctgtgagatggcctgcaatgagaagctcggcaagtctgtggtagccaaagtgaaaatcccagcaggcaccaccctgaccctggacatgctcactgtgaaggtgggggagcccaaaggctatcctcctgaagacatcttcaacctagcgggcaaaaaggtgctggtcactatcgaagaagatgacacggtcatggaagaatccgtggaaagtcacagcaagaaaatcaaggcttaaaataaaagtgccactgcggcttgtcagccaccctgctgctgctgtccagtgtgttgggtgcagaggggcaggaatgtcagtctccaggccaccctgtcgcagtggccacctgtgtctagcccattgggaaggaggagccaacgaggctgttgtgctttggagcgtccagccagagaaggtggcccagagcacatgcagctcctttagggtctctgtgtggctctgttgacatcttcagccttcaacttcccactctacanagcaactccagggacctgagctctcagctcctcat

SEQ ID NO: 24826 - DNA, 392 bp, Zea mays
  Clone ID: MRT4577_122648C.1
tttattttttttttttttttttgttttttttttttttttttttttttttttttttttttttaaaaaggaaatttgtttaggaaagattaaaaaattccttaagggttggcggaaaccccgaaaaggttgccctccccacgaatccttgtgggggccccccctcccccttagtttgggcaaaaaccaagggccccataggggggggttcttcgttgccccggcccggggaaccgcttgcaaccatgtacaagctcggggggggccacccacaaaatctttggacttggggggatcaacgtatccccaaaccaccggttaggtttttaggagaacccgccccccaaaagtaacaagcgctaacttttaattgacccaaaaaagtctaaaggggg

SEQ ID NO: 24827 - DNA, 348 bp, Zea mays
  Clone ID: MRT4577_122649C.1
atccgtttgataccacagcacgcacaaaaattgcatgacttacttttggagagtggagcattgctaccctccggataaataatcagaacaaaaaaatcatgacaattacgagaaagagagaaaaggaagggaattagttgctcaaacaacacaaaattcgccaaatgcatatgaagcaaaagatacgtcatcgcatgatgaagatgaacagtcccgtgcagaaaaaacagaagcaactcatcagagattcggataagcatggacacactgctagtgcaacttccaaagagggacaaacggtcgatgaagggactctggcgaacaagtcaggaagtaacaaaaggaaaa

SEQ ID NO: 24828 - DNA, 376 bp, Zea mays
  unsure (1)..(376): unsure at all n locations
  Clone ID: MRT4577_12264C.1
aaaaaaaaaaagggacgggtttttaaaaccccaaaaaaagcccattggtttttagcgggcgggggggtaaaatgccaaaaaaacccccgggggccccccctaaacccataggggtaaaaataaaagaaaggggggggggaacggccctttgggagacgggggttgggggcccccnattaataaaaaaagggggggataaacccccccaaaggtgggcccccgggggtgggggggtcctggaaaacccgagccaaaaatattacggnttcaggggggattctttgggggaaaattttgggccaggggggagctttgatttggggaaacaaaaaatcggggaatttgggattaatccccttaaatcccccccgggggg

SEQ ID NO: 24829 - DNA, 521 bp, Zea mays
  Clone ID: MRT4577_122650C.1
cccacgcgtccgggaacagtagttgcaaaatcaagggatgattctgagcctcctttgctggctacttgcgaaggacttgaatatgtagcgataagcaggcctctaccaattatacgtgggcgagcactatttaaactcaagatatctcagctctcttccaaatgtgacaataagctcttccgtattaaattctctacacttcacatgcaaagatattcttttctggaagcatattccaaaccgattcactgtatatctcgaagccgcactgtccgccccttgggtcctacaaagcgggcgagttctgcaacagcaaatgaaattgacatgctcagtaatggccaagggtttgttagtactgacaaagtaaatagtcgtggacattcagtgtgtctgcatacgcccatgtttcccaagatagaagatggaatggtggaagtagtagaggcccccaaaatagtatcacagaataagaatgccagaaaagtggtagtaagcaaagaagcacagaatgtcagagg

SEQ ID NO: 24830 - DNA, 357 bp, Zea mays
  unsure (1)..(357): unsure at all n locations
  Clone ID: MRT4577_122651C.1
aaaatcaaatttttttttaaaaaaataggattcatactccgtgtcattcgacacatgttcccagatacacgantaaaaagggatagtaatattctgtgctttgacagctcgactggtcacaaaagggggacgcacaaatgctcccatcataaagattcacaatacaagcttacaagcagnattctgcatgcctaattcaacaccgacaggaccaaacccaggtggcacagnctggggctnccacactgcccatggggaaacctctgggggcatcaggcatgcgggggcctgaaggaagtttgttggccccaataggcagctggggatgcggtttaagcttggtnataaggttatgcg

SEQ ID NO: 24831 - DNA, 695 bp, Zea mays
  Clone ID: MRT4577_122652C.1
ggccgctcgagtacctggccggggccgggaactaaccaaacagcgacagtcaacatgcctacccgactgaccaagactcgcaagcaccgcggccatgtctccgctggtcacggacgtgtcggaaagcacaggaagcatcccggtggtcgtggtatggccggtggtcaacaccaccaccgcaccaacattgacaagtaccatcccggttacttcggaaaggtcggtatgcgttacttccacaagatgcagaaccttttctggaagcccgtaatcaacctggacaagctctggtcgctcatccccgccgacaagcgtgacgagtacctcgccaacaagggaggaaacgctcccgtcctcaacctcctcgactacggttactccaaggttctcggcaagggccgtctccctgccgtccccattgtcgtccgcgcccgttacgtcagcgccgaggctgagaagaagatcaaggaggctggtggtgtcgtccagctcgtcgcataagcagttacagcatgatgtacatgatatggcgtctcggatcacacaaaaggatagggtcttaagggtccacagtgcctacgggcctgtgtagactcgtgttcagcgtggtggctgaggaatgtttcatagaaaatatgaccattcctgaaccaaaaaaaaaaaaaaaaaagcggccgcgagggtgggctgtgagc

SEQ ID NO: 24832 - DNA, 245 bp, Zea mays
  Clone ID: MRT4577_122653C.1
attttggactatcagactttgttatataccagatgagatgctcaatggcatagttggaagtgctgagggtgtggctccacaaattctgcatatattctatagcacagaagctcgtgtctggagcataggtggaatgggatatatcctattttgtggccgcccaccattttgggcacgcaccgaatctggtataatccgctcggttcttaaagccgaacccagatacaatgaggcaccaaggtctt

SEQ ID NO: 24833 - DNA, 272 bp, Zea mays
  Clone ID: MRT4577_122654C.1
atcccgtggcatcccatgccactaccacccatttcggcgtacgccgattcaatccgaactgtgcaaggcatgggctgagagggcaacaaagaggagctggccaccctctgcaggcggatctgaaggggaagaaggtgctcggcgcccctaccttaatggccgctcgctgtgcccaggaggtcaccgacgacacccggattcgtgtcttcggacgcaccattaaggttcttattggagaagggggcactgggtattctttccaggcagcttgg

SEQ ID NO: 24834 - DNA, 128 bp, Zea mays
  Clone ID: MRT4577_122655C.1
tctacttgatgggctacaccaccatgaagagctttttaatactctacggggcttatcactttaccaatttcttccccttctaatagcgccaccagatccatcccttataaaatctcactcgatagctt

SEQ ID NO: 24835 - DNA, 1000 bp, Zea mays
  Clone ID: MRT4577_122656C.1
atattcattcggctcgagggagagtctagtagggttctaagcctcggccgtttcttcgtctccacagctcccgccgccgcggaccagcgcgtcactctaccgggttccggcgtctccccgtagcgcggcatccatggcggagcagacggaaagggctttcttgaagcagcccaaggtgtttctctgttccaagaaggccaccaaggggaacaaacctggcaagggaggaaacaggttctggaagaacattggccttggtttcaagacacccagggaagccattgaaggaacctacattgataagaaatgtccattcaccggcactgtgtctatcaggggtcgcatcatcgccggaacatgccacagtgctaagatgaataggaccatcattgttcgtaggaattatcttcacttcgtcaagaagtaccagaggtatgagaagagacactccaacatccctgcgcacatttcaccatgcttccgtgtcaaggaaggagatcatgtgatcattggccagtgcaggccagtgtcgaagactgtaaggttcaatgtggtcaaagttattcctgcaggttcgaagagtggagcagtgaagaaagctttcactgccgcttaagatcatgacgagttcatcatccatggcccggaaaagctctgtgttataacgttttgatgctgcctattagcctttttccccgtaactactatatgtgtacttggaattggacttgaattacatccagaacttgaaatcctgaaaaaaaaatcataaccctttgtctgaaaaaaaaaaaaaaaaaaaaaaaaaaaaagggcgacccgccgactagtgagctctaggtcagtagtgatacgtttgaaaccttttggcatccatcttgggtttgaaaaaattgctattttaacattctcaattgtggctctgtgctattatgccatattgtatctataaattataggacaatttgtgtcaaacaaaaaaaaaaaaaaaaaagcggcc

SEQ ID NO: 24836 - DNA, 627 bp, Zea mays
  Clone ID: MRT4577_122657C.1
ccggccgggacataaactgtctatgaagcatcattagatgctcgtcacaagccactcgacctcaaaatgacctccgaaacaccccaagaacttctttccgctctccttcaaaccctggagcatgacattgtcccattgacagaacaaggcgtcgcctcaggaagcaaagtcttcggcgctgccatcctttcgtcacaaaccctcaaaccgctcacagtttcaaccaacgatgaacgagtatctcctcttcttcatggcgagataaattgcattcaaaccttctacatgaaaaccttccctgatccaaaaactcgaccaaatcctcgtgaggaatgcatctttttcgcaacccatgagccgtgcagtctatgtctaagcggtatcacatggtctggctttaaagaactgtactatttgttcacctacgaagacagccgcgaccagttctctatcccgtatgatattgatatcctggaagaggttttccgcgtgagaacggaaggagagagtgacacggcgttgaaggacagagctctttataacaagacgaataagttctttacggccaagagcgttcaagatctcgtcaatgagattcaggatggggacgagaaacagcgtctcgag

SEQ ID NO: 24837 - DNA, 668 bp, Zea mays
  Clone ID: MRT4577_122658C.1
ccggccggggacccttcggccgcctgtatttcctcacccaacttcgtccctctctcccagcccagatagatctttcccccgtcctccctcgccttcgcctcgccggcaggagatttccaccaccaccgccggaccaccccgaccctccttccctctcgcgctatggcccagactgttgtgctcaaggttggcatgtcctgtgagggctgtgttggagctgtcaagcgggtcctgggcaagatggaaggcgtcgagtcctacgacgtagacatcatggaacagaaggtcaccgtgaagggcaatgtgacacctgacgccgtcctgcaaactgtttccaagactggcaagaagacttcgttctgggaggctgaggccgtgacaagtgaatccgccacacctgccggcgccaccgcctgacaggttcgatgatctggaagtgcccagcaaaaaaatgtgaatgtatttagcttggatctgttacaaataattgcaaactgctagctcggtctgtacattttacagttgctatttgtatactgtgatgttctcgtatgtttgtggaggcgataaaccaatatttgtatgatatatgtgtcgtgtttcataaaaaaaaaaaaaaaaaaaaaaaaaaaaaaaaaacaaagaaaaaaaaaaaaaaaaaagcggcc

SEQ ID NO: 24838 - DNA, 1593 bp, Zea mays
  Clone ID: MRT4577_122659C.1
gccggccattattcgggtttccccggcgcccccggccgcctgtatttccctcacccaactccgtccctctctcccagctcagatagatctttcccccgtcctccctcgccttcgccttcgccttcgccggcaggagatttccaccaccaccgccggaccgccccgaccctcctcccctctcgcgctatggcccagactgttgtgctcaaggttggcatgtcctgtgagggctgtgttggagctgtcaagcgggtcctgggcaagatggaaggcgttgagtcctacgacgtagacatcatggaacagaaggtcaccgtgaagggcaatgtgacacctgacgccgtcctgcaaactgtttccaagactggcaagaagacttcgttctgggaggctgaggccgtgacaagtgaatccgccacacctgccggtgccaccgcctgacaggttcgatgatcaggaagtgcccggcaaggcggcaaagaaaaaaatgtgaatgtatttagcttggatctgttacaaataattgcaaactgctagctcggtctgtacattttacagttgctattcgtgtactgtgatgttctcgtaagtttggggagatgataaaccaatatttgtatgatatatgtgtcgtgttccataaggtaaggttttgacggtgtgctatcatcacctgaggtgactttagcatcaccaggctacttccagatgaaaaaaaagaaaccaggacagcgtacaaggctgctagggaggaatcagaccatgctgcagaggcatctgtgggagaaaaggtctcctccgctttgactgatggggttgatgctatgcttcaaaagttagaaaaggagattgatgacgttgacgctcgaattggcaatcgctggcaccggctggatagggcctgcgatggcgcggtgactcctgcagaggtagctgcagctgcaaattatctcaaagacgccataggagcagaaggcgtccaggagcttatcagcaatctttctaaagacaacgaagggaatatccttgtggaagacattgtgaagctggcgtcacaaacagaggaaaacaacgaagctgaagaaactgcacgatgatttggaatagcagccacattcttggctcttaaaactcgacggtccattccttttttaaaaggaaccgcacataataaagctagttcctggcagtctcatgcaaaaatcaccaagcaggatggtcattctttttgttctgactggcggctgcagagaaaattgtatcctgctgttgaaagatattcatttatacagttaagtcccagcacaaccgatcgttaggttaggaattctgtccgaaatggcaacttgcatttcaaacgtctgccatgaaaatgagaataaattcggcgggctctacagatttttcatctattgtctgaacaaaagtataggcatcaaataagtatctgggtaagtttatactatttgaataagaatcagctggatttgtttaaattcttaacaagaccgttttagcagtttgactatatggtcaatcaaaacactattttgtattgtatattgtactatgtgcacttttgcagtgagattt

SEQ ID NO: 24839 - DNA, 189 bp, Zea mays
  Clone ID: MRT4577_12265C.1
atggcctcacagcagcgtgcccgggccgaaggtttcgagacggctctcaacgagtccgtcaagaactgcaaggcgctcgcccaggcggctgagcagaaggaggccaaccgtgtggccatgtcagaggctatctcggccttttgccgggccttcgacctcgacgacgtcccctcagctagctccccctag

SEQ ID NO: 24840 - DNA, 287 bp, Zea mays
  Clone ID: MRT4577_122660C.1
ccactcgaccaaggcaaagatgagcaggaagggagccccggacggagaagagaacagacaaaaccccgcggccagcccttcctgcctatatgtctctctctgtcgtgcgcgacagagggagaccagcaccaacacctccggtttcttgattgggttctgatcggtgaaagaaggaggaattaagatgaagctcatcgggctatgggaacaagaatcagaagacgttcaggccgaggaagaatgcaccgtctggcaacaaaggtgtacaactaaagaaacacatcgat

SEQ ID NO: 24841 - DNA, 825 bp, Zea mays
  unsure (1)..(825): unsure at all n locations
  Clone ID: MRT4577_122661C.1
cctcgaagccggccgggtgaggtgatgatcctttcccaaattatcgactatgattatactgtgcgatttttcgagctcttctcttcggagaaggcgctcctaagccagatgttctgatcgaaaaaaaatagaanaaaaaaaaaaaaaaaaaaaaaaaaaaaaaaaaaaaaaaaaaaaaaactccgtccctctctcccagctcagatagatctttcccccgtcctccctcgccttcgccttcgccggcaggagatttccaccaccaccgccgaaccgccccgaccctcctcccctctcgcgctatggcccagactgttgtgctcaaggttggcatgtcctgtgagggctgtgttggagctgtcaagcgggtcctgggcaagatggaaggcgtcgagtcctacgacgtagacatcatggaacagaaggtcaccgtgaagggcaatgtgacacctgacgccgtcctgcaaactgtttccaagactggcaagaagacttcgttctgggaggctgaggccgtgacaagtgaatccgccacacctgccggcgccaccgcctgacaggttcgatgatctggaagtgcccagcaaaaaaatgtgaatgcatttagcttggatctgttacaaataattgcaaactgctagctcggtctgtacattttacagttgctattcgtgtactgtgatgttctcgtaagtttggggagatgataaaccaatatttgtatgatatatgtgtcgtgttccatatggtaaaaaaaagacggtcttcaaaaaaaaaaaaaaaaagcggccnnnnnnnnntnnnaaaaaaaaaaaaaaagcggcc

SEQ ID NO: 24842 - DNA, 497 bp, Zea mays
  Clone ID: MRT4577_122662C.1
gactcctccttctttgtatctgtccgtcgctactcgctacaggtgccattacgccaacaaccgaaacagaattcgacgtcctttctttcagttggaacttggaaaccatgtataggtggtttctgtaagactgtcgcaggatccaccatgtgtcgccgatggcttgatgcctatttccgcgtcagcactcagcctgagatttgtctaacgtattaggccagcctgagatttaagaagttttttgttaaaaaaacaatcactgaatatatatatatagaaaatactgtcatcaattatatcttcaaataacttcattacaaaaaatgtattttatgatcaatccggcgtactgactacacatcatagaaaacagttccattttatatgtacctaatcaaacatcttttttttaaaaaaaaaaatctcaaagaaagccccaatgtctccccttttagattacattacgttacatttcacgggatcattaagctaactag

SEQ ID NO: 24843 - DNA, 313 bp, Zea mays
  unsure (1)..(313): unsure at all n locations
  Clone ID: MRT4577_122663C.1
gntgtaaatcacgagcggcttcccttttttttttttttccggcctcccatggctcgcggggcgaccacccgattcgaagcgtgcggatagaccgaataagcgggagagatggctcgcaccaagcagactgctcgcaagtccacgggagggaaggctcccaggaagcagcttgccaccaaggctgcccgtaagtctgcccccaccactggtggaatgaagaaacctcaccgctaccgccctgtaactgatgccctccgttagatccgccagtatcacaagagcactgagctgcttatcaggaaactgcccttcc

SEQ ID NO: 24844 - DNA, 613 bp, Zea mays
  unsure (1)..(613): unsure at all n locations
  Clone ID: MRT4577_122664C.1
gccgtttntactaatgcttagttggcagnagttatggtttagtcatagnatgtttactgtcgtcgtcaatgatgtcagtaggtaacatggtttccttgtcaagtacctgcacatgcacaggtgatttgattaggcataactcagtcacctggaatctaagatgaccatgacatctcactgttcagttatgatatgacagaagcagcacagttatagtgccacagccacatgtctaccttgattttctaaagctccaatcttttagggtgcaacttagaggccagtaagtttagcacagtccaaggctagtatacaaagtaaaaaaaaagaaatgcagtcaccaaatcatttactttgagaaataaaagtaatggtgcaaggcaaaagggagatatcatgaaagaaagctacttatctatcttaatctgtaaaagtatggttagtgttaccagtcagattgcatgcttatcttttgtcaaatactttttcctcctggaacctgaaacgagtgagcatgtatttggctctgctgcaatctgatgataattgtatagtatttttctgcctgacctgcatctggacaccgtagagtaaaaacacatgcttgattata

SEQ ID NO: 24845 - DNA, 1194 bp, Zea mays
  Clone ID: MRT4577_122665C.1
acacatgttcatcagctacagctagcccttgagagctctctctctttttttttttttgagagcagagagatgggtgattccactagtacgggcttcgcggcggccctggagctgtggcaagagcaccagctgagcatcctcgtcgtcgcgagcctcgccatccagtggttcctcttcgtcttcgccccgcttcgacagcatcggatcccaggtctgctcaggctctccatctggctggcctacctgggcagcgacgccgtggccatctacgccctcgccaccctcttcaactcccaccggtgcgacaccgacaccggccgccccggcgtggagctgctgtgggcgccaatcctgctggtgcacctgggcggccaggacagcatcacggcctacaacatcgaagacaacgagctatggcggcggcatgtcgtaacagcggtgtctcaggtcgccgctgcgatctatgtgttcgtcaaggcgtggccgaaatccctggtgactactgctcaccaagcagttaaccaagccacccttgacaagcacttcttctgttcttctgcgggatcaccaaatgcgtgttcaagccctgggacctcaagagagtcagcgtcaacagcctcgtcgactcttcatcgggctcggaagagaagggcggcgagagtgagatgaattcgcttcaggagtacgtgggagctgcgacacggtatttcgagtcccgcggccatggcagaggagcaggactgcaggaggatgacggcgacgacgacacttgtaaagcaggggaagtttggaagccctacaacctatgcgtggacctggcgcccccttactccggccggctgagctgcctgaaacacctggcgcgcagcccagcggacgaagcccatcgcctggtgaaatccagcctctccgcgacgttccaccagctctacaccaaggaatcgctgaagctgcacgacacctcgcatttcgtcttcacgaacaacgccgccttgaaccgctggaaggtgctcacctcggctcgagggctccggacggtagccgcggccacgctgctcggtgcgatcgcggtgttccactacggcggcggcgccgccgaccaggtcaaggccgacgtcaccggcacgtacgcgctgctgtggtctgcgtttgtgatggagtacgtcttgcccaccgggatccaccatacgttcg

SEQ ID NO: 24846 - DNA, 450 bp, Zea mays
  unsure (1)..(450): unsure at all n locations
  Clone ID: MRT4577_122666C.1
gagcgcgacgcacaacancaacgggaacaagancnncaagggcancacggccaagcncnncaaccncccgnggacggnggagcgcaaccncaccancggcgagcccaacaaagacnncngacgacacccnccncnaacaagnaacncggcagcacacgcacgacgacccnnggnanananancaagggnngacagggncgngncnnccgaaccccnngcccngngcgagccgccggagccaagaagngaccgagcangcccgncgnccncnnccnccggggggccggcngcagcaggcaagaagcccnnngnaaanaaagccaaaggngacggncccgcgngcgngcgggagcgncgncaaaagggaagaaaaccgcgaggngngacngngaagnaacaccccgncngnaacaaacgccagaggnaaaggaanaccagnaaanacccncc

SEQ ID NO: 24847 - DNA, 369 bp, Zea mays
  Clone ID: MRT4577_122668C.1
gacgtataaagctttcaaaaaattagcatatattaggcgcattttaaaccagagttcatttaaagaatcaaaaggggaaggttccttccccttaaacttaaagtacacccatgggaatggaacattttaaaattaaaaccttaaaacacagttttttcccgggtaaaaaaaatgacgcgagcaggcaataattgggcatgcttgccgtttgggggcccatattaacaggttgggtttattttagccgaacccggaaataacggggagcaggaagtttccaaagggttccctgtgggccttgacgaggttttcaacggggccttatccgaggacgaacgaccaactgaaaaaggagaacatgaagaacat

SEQ ID NO: 24848 - DNA, 364 bp, Zea mays
  Clone ID: MRT4577_122669C.1
ggggggtacaaaaaccactgttaaaatcgcttataataatataaaatggggcttaaacaagctttaacaccaccccacaaccctaagccttgggcctaacagagagcattgggttcattccccttaaggctcacccccaatcccccatggaccttcccccaacaaacacatggtgctcctaacactacggttataacaaatgttgtttccacacctaactaacttctaaagaccaatcagacaaaattccaagttccccctcaataataccagggcctaaaggaccaaccctaagagggaccccatccatttacaagaagaagttattagcgttatacttaacccttcctcctacccttattcc

SEQ ID NO: 24849 - DNA, 380 bp, Zea mays
  Clone ID: MRT4577_12266C.1
ggctcattagtcggggcgcctttttttgttttttgtaaaatcgcacctgtacaaaacgcaaagatctgcggctgctcgacacttacgtctcagctacacagaaaggctacagccattttgcgcaataacgggatgcagcagccgctcgatttcgtaacggtggagagccgtgctaatcagacgaagcggggacgaccccgccatgaccgaggttagcggcgttgactacgtggtcctggtgcgtattgtcaggttctatcaaatcccagggcacgaggggcttgctgagcgtattcgtgtccacggccgtctctcctttcagagtggtcactagcggagacatgttcgggcggcgattggtgcccttttgggtgcatagg

SEQ ID NO: 24850 - DNA, 1307 bp, Zea mays
  Clone ID: MRT4577_122670C.1
ttcttaaaataaagcttggtggagtaatgcccaatttggtgcccttctgtattatactgctgctttaaaaaatggccaaataataatgtatattgcatctcaatgtcaaatgaggtctttttaactgtgatttgaattgttgtattccagaatctaatttggactaatttatgctaatcaaaacttttttggctgcttggcctattgttggtacatgtgtatcttgatacatttgttcaattgccagttgctgcattatcgtcatatgtttctgcattgcttccaattcctaccttagtttgttttcattgtcttcctattgcccacccggcgaacaccaaccaacccgatgtcccgatccaacaaactgcgaacgaagcgacggacgactggacgagacgaggcacggaacggagggaggggagggaccgagggagccagtgagcgagccagactacccacctactaggtccagcggcaatgaggggcagcgagatgttgaccgcctcggggggcaccggcacggccccgtccacggcctcctcgtcgtcggcagcggcggcggacctggttgccggagccgggggcttgggcgccatcggcgtgggcggaggaggcggcaacttccccctcgccgttgctctcctcgccttcgcctgcgccaacttcatcaacctcctctccatctggttaaaagagaagaggtgggatgcaaggaaatttcttacttcagctggagtcatgtcatctctttctgcaactgtggggagcttggccgttgctgtgggtcaacgagaaggcgcagatagctctgcatttgccctcgcattggtttttgctgcagttgtaatgtatgatgcatcaggaattagatggcacacaggccgccaagctgcgttgttaaatcaaatagtctgtgaattcccagcagaacatccaatcatttcaacctttaggccactacgggaacctcttggacacagcccacttcaggtttttgcaggagcacttgttggctgtgcagtcgcttatttcatgggaaagtctgtatgaggaatgagctaggatttgcattgtacacgaatccaattgaccttaatatataaatcttcttgtgtaaaaaaaaaatctctttgtacatgtttgcctgtcataaatgtcagaattttcttttctgtttgcacttcagagtgaaccgcagaggccattatttagtggttagaatactgtatttgctgaccagaggacgtttaggctatgcagcactacagcagtaatcctccattggtaattgaattttttactct

SEQ ID NO: 24851 - DNA, 228 bp, Zea mays
  Clone ID: MRT4577_122671C.1
ctcatccctaaactcggatccaggatcaattaacgttttcttctacaaccttaaacagggctaccacacgctgggcggggcccaggcttaactcatcccattccctagagctcacctttatactctccttaaagcttaagaagcggagtattccgtactcgtagatgacatttttgctacgcgttagcattttccccttcccatcctttggattttgatgtttttcac

SEQ ID NO: 24852 - DNA, 622 bp, Zea mays
  unsure (1)..(622): unsure at all n locations
  Clone ID: MRT4577_122672C.1
gttggttgatcaatgatatttttttacaaaaataagtcaatggaattcgtgtacaagccaaaccctatacattcctattccttatacagattttcccatganataagcagctgcacaaccaacaagtgctcctgcaaaaacttgcatccatgaatagaagatagaagtatgtagtagagctacctgaagtgggctgtgtccaagaggttcccgtagtggccgaaaggttgaaatgattggatgttctggtgggaaatcacagactatttgattcaacaacgcagcttggcgacctgtgtgccatctaattcctgatgcatcatacattacaacggcagcaaaaatcaatgcaagggcaaatgcagagctatctgcgccttcttgttgacccacagcaacggccaagctccccacagttgcagaaagagatgacatgactccagctgaagtaagaaatttccttgcatcccacctcttctcttttaacctgcaacgtcagatggagacgaggttaacgaagtttgcgaaggcgaaggcgaggagggcgacggcgagggggaagttgccgcctcctccgcccgcgccgatagcgcccgtgcccccggctccagcaaccaggtcc

SEQ ID NO: 24853 - DNA, 567 bp, Zea mays
  Clone ID: MRT4577_122673C.1
acgagggagtgtcagacatcgtctcacacttgctgccatttcttagttcacttgacccaccactggtgttcgaggttgggatcaacgtgttggcgcttgcagatgtccctggaggcaagccagaatgggcatcaactggaattaatgcaatcctgacactatgggaccggcaagagttctcttcgatgagggagacaattgtaagggctgttgtaaccaatcttcatttgctggatcttggaatgcaggtctctctattcaaaagactgcttcagatggtgagaaacttgagagcagaatcagatcgaatgcatgctttggcatgtatttgtcggactgctctttgtgttgatctttttgcaaaggagagtgtccgaagaggtcagaagcctgttcctggaacagatgtgatatcgctctttgaagatgtgagggtgaaggaagatctaaacagcgtaacaagcaaaaacttgttcagagaagagctagtggcttccctagtcgaaagttgtttccagctatctcttccactaccagagttgaagaattctgggacagagagcagag

SEQ ID NO: 24854 - DNA, 731 bp, Zea mays
  Clone ID: MRT4577_122674C.1
ctgcggattcaccaattgccttgacttgcattcctcgccagaaatgcatcccgactatcctcgaagcctccgactagcatcacatcatgtcgagactactgttcccaagtcgacgggtgatatcatcttgaatgctgcctacatcgcgacccctgctgaggatatccttactggtgattagtcaactgccaaccattgccaaccgcctttccttgatccactgccgcagaacttcctaggaaaacccgcatgctctcccggacctcctgttctgctgcccatggtgccctctctactacatgagaatgtgtgatcctctgtcagagtagaaccctctactctgaagaccaaggatgtcttgacttttgacgatgtcctcacagaggaaagactgcctccctggcatcattgcccacaaggccacctttgaggtctcgatggcaccgacaatgagaccaccacccattgccgcgatgactctcgaaagagcgctgaactacaactacgagggcactgcccgatgtgccaagaagtcgcgctgctctaatatagctccgcaatcagccggctcagcttgacattgacctgaatggtcttgtctggatcgctacggcatcatctgacactactaaccatgtgacgacaattgttgaacctgacatgcttgttgatgtacctcatgacattgatcgctgcgcttacctaaatgatacagaccttgctgcccgata

SEQ ID NO: 24855 - DNA, 608 bp, Zea mays
  Clone ID: MRT4577_122675C.1
cccccctcggattttcctttttttttttttttttttttttttttttttttttttttttttttttttttttttttacagcaaccactctgattcatctatttctcctttttttttttcactttatacaaacaaaaaacatccagggggaaccaattaaccaataaacaaaaggatcaaaggtaaaataaccctaccccccgatgaggaaaaaaaagacctaatgaactaacaaccccggaacccccggcaatggattggaattggatggatgctgacacaaaccaatgcatgtgatgatgggcggaaaacaatccatggcggtgaccggggaagcggtgataataaccatgatgggcgaccaccactgatgaaccaaccatgcctgcatacatatatagctatatgggggacaaaaccgaccgacagtccggcaaccccgtgccggaacgtaaatcccggggggggatgaactggaaaaggtcccacgacgggtcgccgttccggacagccttttggcgcatttccaccacccttttgtgcaaattggagtggatggacggcacaaaggtggggctcgccgcggggcggtactccggaaacaaacaacc

SEQ ID NO: 24856 - DNA, 161 bp, Zea mays
  unsure (1)..(161): unsure at all n locations
  Clone ID: MRT4577_122676C.1
cagcggcggcattcccccaaactaacccttcgactcncgcgcgcgcgtgcgatgagnnatggcgtccctccccctatcccggaggcggnccgtttcgcgcgcgntcagcgatncgggaccgcggatncgacgagtnagtgaanagacagcggcgatacgga

SEQ ID NO: 24857 - DNA, 572 bp, Zea mays
  Clone ID: MRT4577_122677C.1
cgtgcttttttttttttgagtttttttttttttgtttttcgttccctaaaaatggccaggtttgtttcctaccatgttatgagcgggggtatgacaaagttcgcgggatcacatccccgggtatgggggaaccatgctaatcaccagcgagcgcttttcttttgcgtagctgggtgcgaaagcgttgcccccaaagagagctagcctttgttgccggcgggcgcaaagaggcgctccacaaaaaaacaggcggagatttttttgttgcggaaaaagaggcgccgcaacaagatccacacgtaattttcttggttgagaagaggaggagagcccctttaaaacccagatcctgactcctctgagcaatacaaagaagggcaaccccctaataaaggagccgggtgggtcactctggaataaacaaccagggcctgatggcggccctggtatattatagggggcattaaaaaaggggggcggcatggccggcagaggtgcctcctgggaaaagttgttaacccaagaaatatcccaaaaaagacgggggcggaggataaagagtgaaggcgggg

SEQ ID NO: 24858 - DNA, 518 bp, Zea mays
  Clone ID: MRT4577_122678C.1
cccagcgtccggtccatctgccctatatatagactctgggtatcccttgcctttcaatctatctctctattatcaactctataaccatctcctcactccatctcttgaaatctcctcctcaacatcaccaccaccatgttgagcctcttgtccactctcctcctcgccagctcggccctggccctgccctcccgcgtcgtccctcgagatgccaacacctcctatcctcctcccgctcccaccgccacaggatgcaccgccgcctctacaaaagtctcccagtggaccgtcgacgagtttgacttccacgcctcgtacatcttctcaacgcccgcccaccagaactcctggggctacgtcaacttcacgctgagcaacccggcgctcagctactcgcccgtgtgcagcgccccgtccaaccagctgtccgacttcttctaccgcaactttggctacaactgcgaggggcccgcgtatgccggttccttcaaggccaccttcaccttaggcccgcccaa

SEQ ID NO: 24859 - DNA, 357 bp, Zea mays
  Clone ID: MRT4577_122679C.1
tcggacactcttgcgttatccacggaaccctattacaactacaacggctgtcgccctatgtggaacgcgcattgtcagagcgagcggtctactagcagctacacatcataggtggtgacactgcttagatggctcaatagctgtaattcaataataaagcctcttggatgatgtatgttgacagccagaaatccgaagtgacatatccagcaggatccatcaggcaatcgcaacaggcatcttaccattatcacccttgttccttcaacaaccgtcagccctattacagcagttacctttggtccatttggtggcacataacatcatggcacaacaactacaacaacttgtgctagc

SEQ ID NO: 24860 - DNA, 461 bp, Zea mays
  Clone ID: MRT4577_12267C.1
aaaaaaaagcgtttctcatgagagggggaaacttcatgccccgggtaaaccaaccttggtttacatcacgcccccgtccctcacaatttttaaacaaaaacgggcgtgggggcctacccttgcgggaaagagacttttatgccttaaattttattatccccacatttaccccccccccccagggggggggccaatcaccgccgggggcccaggaattatttctaggggcccagcaaaaataacttatggggggatttggggcaaaaaggttttgaacaaatttgggaaccccaggtggcttccaaggttttaggggggaaggtctataattactttggggggggccccccccaaaaaacggggaaaaagcttttcagagaagaggttgacttttgggttttaaaagcctttgaaagggggcctttaacccgggaaggccgtaaaaaggggttctttttatg

SEQ ID NO: 24861 - DNA, 607 bp, Zea mays
  Clone ID: MRT4577_122680C.1
gggtgttgttgtttatcaatcattcaaaacagtgttatcattaggtggggataatgtgttgtgcaagctactcagatcactgggtattgaggccaacataatgcatctaattgaatgagtgatctatactatgttcgagaattcaaaccgggggggggcgaaaacaatcagccggaagaaaacacactggggtacaagctcctgtggcgggcactcgtacaacactgtggtgcaaacataacaacagatgagaggggtcaatgcatgagaggggtcagaaaggacaactggctactacaaaaacaaaagccacttatgtgagcaaacctcgtgaaaaaaacggattagttttggatgtcgttcttgatattttatgggactactcactcgttaaaatgcagaaacataatcatgtgtcattagttttgtgtgcaataattaagacaaaatggggataccttagtttggactatgaactgcacttagttgtatagacaaatgggtagttaacaggtgcagacaaggctaaaatgaacatgaattcaacacagtagtttatgtaagttaacaacttccattctttatattaatttatatccctgctact

SEQ ID NO: 24862 - DNA, 703 bp, Zea mays
  Clone ID: MRT4577_122681C.1
ccggccagacccacccactgcctggtgatcgtcgtgctcgtggtggcgggtccggcgagcgagcgcggcgcccatggcgagcgacggcgaccacggcggcgcgctgcagaagccgctgctgccgaaggcggccaggggcgggggctggttccggaaaggtacgagcacggcgcacccgtccggcctcagcgccgccgctgccggcacctcgtccaaggccgccgcgctgcggccgacccaccacgtgcccgcgctgctctgcacgctggtcgtcgcgctcggccccatccagttcggcttcaccaccgggtactcctcgccagcgcaggacggcgtcacccgggaccttaacctctccatctccgagttctcggcgttcggctcgctgtccaacgtgggcgccatggtcggggcgatcgccagcggccagatggccaagtacgtcggccgcagaggggtgagaactcaaaccacagctctgcgcagactatgggttgtatgtttcaggttgattgaaccccacagtcccactgctcactagccgggctagccgcacacactatttcgtggtctatgctgcttggatttttgttttggtttgtttctggggattttgaaaaccaaaaaaaatagtgtagattaagagacctttggcgcttttttagccagtaataactgataagaaaacgattgcatgctctcc

SEQ ID NO: 24863 - DNA, 291 bp, Zea mays
  Clone ID: MRT4577_122682C.1
acgcgggacctgaatgaaccattgaaatggaaaggaataatatatacgggaaaaaggatgtttggaatacaaaaataaaaacaaactaactttaaaaagaagaattattaaaaaaaaaaaaacagaaacgatagaactttcctaacagtagtacaggggagagtgaagaatagtctacaccaagaagcagcaacattataagcggagatatgtaaatagtatcacgcaaaagaaactgtttctcttggcccccgcccttgcgcgcgcttttttgggtttttttccctttcc

SEQ ID NO: 24864 - DNA, 366 bp, Zea mays
  Clone ID: MRT4577_122683C.1
cggcggccaccatgccgccgccgccggagctgtgccgcgacctcctcgtggacatcttcacccgcctccctccggacgaccccgggtgcctcttccgcgcatcgctcgtctgcaccgcgtggcgcgccctcctcaccagccccgagttcgcccgccactaccgcgaggtccaccggaccccgcccctgctcggattcttcgagaaccacgacaccgtcacgccgtggttcgcgccctcgtcccccgccgcctcccccttccctccgctcttccccgaccgccgcgccctccacgtgttcgactcccgccacggcctcgtcctcctcagaaaccctatacgaatcactgagaatgaccacgccgtga

SEQ ID NO: 24865 - DNA, 395 bp, Zea mays
  Clone ID: MRT4577_122684C.1
tcggccgccgccctttttttttttttttgtttttttttttttttttctttttttgtccttttttgcttttttttttgttgttgttttttttttaagaccaccgccgaaattgtcgctttaatttggggagaatagaggggtccaaattcccccaggggcggaatagcctcccccccagggggggttatccccaggttttttcaaaagggcttagttgggtttgaagaaatttttggggaatcaacttgcttgctctcggaaaagaaaatgggcaggctcttctccaaatggataaaaagggggggggccgggcttaagtattccatggctggggaggccgggtactgggccctcggggccggggggtgcacctggaggggggggcccccccccag

SEQ ID NO: 24866 - DNA, 565 bp, Zea mays
  Clone ID: MRT4577_122685C.1
ccggccgggatcctctcttcttctacctaccggatacagctctcgtctcccgccgcttggttggacaacaacatgccctcctccaccaacccaatgcacctacatcctcctggtgtgaactccaccacccaatagtaggtcgcctgcttcgcattattgacctacaactgttcatcgaactgaaagggagcaacgtgatgtgcaagaagatctcgatgaagctggagctcccacttgagaagatgaagtatgaccgtaatctcatcaaacagaagaaccctgacacatttcctgtgaccgtccacatacgtgacacgagcgacattctcgtgacatcacacatcaaaaagaacctcccccctgataatcttacgggtgaacaatttctgtatggtgtcaagaagaaaaacaagctcactgctgagaaagatatcatcatctgtctgaacatcacccttccatcataagctgctctgatgtcttcaatctatgaagacaaccatgactgaggatgtttcctctacatgacctagaacgtagataacaccttcaggctgctctagat

SEQ ID NO: 24867 - DNA, 182 bp, Zea mays
  Clone ID: MRT4577_122686C.1
ttatgtgtgtgtttaaccatccaattatgactttatattagacagagaatgatttagctcctatgagcgggtgcagcacatatgatatgcgcctcacgtatttaacgtacaaagatctatgcataagtgccaataaaatgatcgcctgtgattgtaatcgacaaattagtggagggtaacca

SEQ ID NO: 24868 - DNA, 491 bp, Zea mays
  Clone ID: MRT4577_122687C.1
ggccgggctcttctactaagccgaccgaattccgtgcgatctattctcccctctgctcctctgctccccctactcaactccacagcgcatgggatacagagaaagcgcgccgtctactttgaggtatatgggccatggcgaatctggagggtggacgaccacagcgcacacctgtgatcctaccactcttggaaggcattgagaagcgtgtgatcgagagggtcgagaatgaggctgctgtcatgaacaagcgaggcttcgagtacgcgtgagtgctcgaccagctcgagggtgaccgcgatagacggatcaccattgatatcgctctgcggaatgttgacaccaccaagtactactgcacggtcattgatgcccctggacaccgtgacttcatcaagaacatgatcactggtacctcccaggctgactgtgctgtccttatcattgactccaccactggtggttttgagggtggtatctccaaggatggc

SEQ ID NO: 24869 - DNA, 605 bp, Zea mays
  Clone ID: MRT4577_122688C.1
gttggccgcgccctgtgccgctgaggaccgcagcaggcgccactaccgtttcttattctgagagcccaaggaagcggacagcgcggctttgggagacggaggttgcgcagcagagcggcgcgacagagggcgcttcggcctcgaaggcggatcaggttgcagcgctgagaccactgctcaccaactgcagattccagctcacctgcacctgagcttcctggtctacagaagagccagtctgaggcctcggaagatctccgccctttgtccagggcagaccgagatggccacggcccaggaattgttgaccttcagggatgtgtgtgtggacttcaccctggaggagtggcagcaactggactcggctcagaagaacctctacagggatgtcatgctggagaactacagccacctggtgtccgtgggatacctaggtgccaaaccagatgtggtcctcagattgggacgaggagaggaggccggcatgacagagggagagacgccaacgtggaagtatccagatgtggcccctctggatgtgaacaggactgggctactttggaaagaagcttcctgccagcatccagatgcctatgatgagaaaa

SEQ ID NO: 24870 - DNA, 256 bp, Zea mays
  Clone ID: MRT4577_122689C.1
ccggtggctatgtcctatgcgcaccgaagacaaccctaccagcaccccctgcacccatcactcgtaatattcttccgctccgcctgtccggaatcagagccacgaggatctacggctatctttgccgcgccatgcatcccctcggaaccaactcgtttacctcaacagcctcactcttgccgcttttaaaccgagtttggtgctccgcttttaggcccgagctcacaaaatgaaatgagactgcctgtggctgcct

SEQ ID NO: 24871 - DNA, 172 bp, Zea mays
  Clone ID: MRT4577_12268C.1
aacaaaactttaggggttaaaaaactcattgggggcagggggggtaattttagggctaacagaagcgggggggggaaccgatttgggcgcccctttttttttaggacattagggggctaattgaagaggtgggcaggggtcgcttaaacatatacctaacgggaaatatttt

SEQ ID NO: 24872 - DNA, 534 bp, Zea mays
  Clone ID: MRT4577_122690C.1
gtatgtatggttcaattcggtagcgagaatccagactatatatatataacataggggcacacactgctggtgcatggagagcagcaggggcgtcattctatgcatacatattcggtacaggcagacaagcagtatgcatactgaatatgcatgcttgcaactgatccgaaccgatcggtttaggtattagttggagttcacgtaaagcccgatcgtgtacaggcaatttacagagcggacaaagaagccagtgacggggccggtgatcatcaccttgcacacggatacggacggccctcgtccctgacgaacggcccggatagacagcgtccgttggtgacgaatttgagagacttgaccagattgtaaatgcttgaggctgagctccgtgatcccgttgatctccgtgaagctctcgaccaacctgaacagatcaatcttgtactccgggccagcatgggcgaaaccccatgaactcttctaggacgggtagccattggttgccctgtaaatcaaggatatacagcggctgca

SEQ ID NO: 24873 - DNA, 188 bp, Zea mays
  Clone ID: MRT4577_122691C.1
tctttcaccgccgccgtggcggcggctaccgtggcattcgcgaagagccacaggatctccacgggaaagatgggtggtaagaaaaagaccgtgaactccttctctaacatcgacttggctgacatcaaggccccaaacgactctattgtgcgcaacaatgcgaaaactcttgagttcagcacacattc

SEQ ID NO: 24874 - DNA, 428 bp, Zea mays
  unsure (1)..(428): unsure at all n locations
  Clone ID: MRT4577_122692C.1
ggaaanttnaanagttanaagttagagnnnanaaaaggttttttngaaaattatagaaatgttatttgtnatttgatggatnagatatgattatttttttttatntnatgngtttttggtggggggggttttttttttttntaaaggnntgtnnttggaggggttgtgaatttattttgtattattaattatttggaaagaggnatttgatgnatgtagtttgtttatggatacattagatggtgaaaatttttttaaatattntnaagaanatttntttggtaagagtggnnatttanttatgattgttgtnnaaagattggattttatttngaggggttgtattttttnntgggttgaaagtgggttnttgaaggtatatgatngtgnagagaagttttanattgtttaggggaaagtgtggttag

SEQ ID NO: 24875 - DNA, 234 bp, Zea mays
  Clone ID: MRT4577_122693C.1
agaaacaccatcatttcacccatgctaaacactgaatcggttcacatagaaattcatattacattgcctcgtcttttctgtctatctcggattctcggtaacaaaaggctgtcagtctgcagacactgaaaaaagcacactccttttaaaccaaagggccatgatcacaagagggcatcttctgctttcttgccatatccgctgcctgtctcagagatcaatttaagctgaacc

SEQ ID NO: 24876 - DNA, 238 bp, Zea mays
  Clone ID: MRT4577_122694C.1
attcggctcgaggggcaacgggtgactgatgtttggcgaggactactacctaggggcttgcccggagttcatctgctactgcctggcgaacagcccggggttcgcgaagtaggccgattataagacgaacttcttaattcaacgatattgaaaaataaaaaggatgggacgatttgaccttctataattcagcgttaactcatgggggttttttatgggaggtgcaagcaaattaaag

SEQ ID NO: 24877 - DNA, 641 bp, Zea mays
  Clone ID: MRT4577_122695C.1
ccggccgggaagtcctttcctccccgcccggcgcccgcggcccgccgctcaaacccctaaaccctagccgcaccagcgccctattccctccttcggcggctccggcagcgggcggtcactagcaaccagcatcgtacggcgaagaagcgccgtttacacccatctggcggagatgccgctggggcagcgtccgggggacaagagtgacgcccgctactgcggggcggaggtgctcgacttccctgccggcgaggacctccccgccgtcctcaaccactccctcgcctccgccttcgacttcatcctcgtccctctggttgatcccaactaccggccggcgcccggctccgttctgcccgtgtcggcgtcggacctcatccttggcccggcccagtggagcaaccacgtcgtcgggaagatcagcgagtggattgatttggactctgaggacgagcggctccgctttgactccgagctcacgctgaagcaggagattgcgtgggcgtctcacgtctcgctgcaggcatgtggtcttcctgccccccagagatcttttttgtggaattatgccagagtcgtgaatcaaattttgcaaggcctgacccatatgcatgttgcctctggagaagtccgagcctatg

SEQ ID NO: 24878 - DNA, 435 bp, Zea mays
  unsure (1)..(435): unsure at all n locations
  Clone ID: MRT4577_122696C.1
cccacgcgtccgaattttcatcgtttcgaattctttagacggttgaggcttcctgaatagttcccatctaaaagtagttaaaggagttgcctggcattacattttccgaggacagattctgatgtgaagagggcgcctggcatgaatcaaggggcatctccacccactctgaaaggctgccatgagggtggaaaatagctcacagtcgcaggaagaggaatagcatcctgccaacatgggtgagctgcgggcgcatcataccaattccgcttctgctatgctccgtccaccaggtcaccagcttgagaccgaggcatcaaaccgccagattttgtgtttctcagagcaagtagaactaaagcacctcanagatgtaaatttatgcactcccaaatttaggattttgagcgcaatcttggcagttttcatacatgc

SEQ ID NO: 24879 - DNA, 2579 bp, Zea mays
  Clone ID: MRT4577_122697C.1
tccatgaccagaaagttgatgcctgaaggttttaggtcagtttatgttcaggggtcgtgtagtcatgtgctactatgcgttggttctttttgctgtactctgaagttacacctgcctaccattttcccaatgcatcaaacataacttgattttttgcacctcttagcaggcccgagcctcatcaatcgatcacacgcgacgcgagtacgagtacgagtatacggccacgagcagacgagctcctccgccaccagtgtcatcgcgcagcctcgcgctcgtccatggcgtccgtgtacacggcgccgcgcgccccgctcccgacggtggcgtcctcctcgtcatccgcgcggcaggtggatccgaaagtggagctgggagaggtggaagcggcattttgctctcattgaggagagcgagcgtctcgttgatgagctccagttgcaactccaggcgtctgtttatagagaagactacagaagtgctcataagctgaggctagctattgctactacagtaaaaaatgacactgtgggtagagctgtctctgacttaaatatggccatagatgaggagcgctacaaggatgcagcatatatcagagatcatgctggcacaggactgctggggtggtggtctggaatttccggaaatttgtccgatccatatggtcttataattcgtataagtgctgaacatggtcgatatgtggcaagaagttatgatacaagacagctgacttctgacagctctggtctccctatatttgaaatatactttgcagaggcaaatggtggatacaacctgcaggcagtgcatctgaaaccagatgatagtgattctgaccaagtgccaaacatgttaagggagaaacttggcatggacagtataaatatatctagcagttcagtgtctaagcatgaagaattcgatggaagtgtaaacatggatgataagtgatgatagcaacattgatgctggccctggttcgaaagacttgtcaagcgatccaactgcagttcccaggattaaaatcttgaaagtggtacccatgcagaatgttgacaaagactacataatcaatatttttgatcagatttcagaggaaaatgatgatcctgaagttgaaaatgaatcttcagaagatgctggtgatgaagataacagtggagtagcagaaacagtttctgcagaagagaacggtgatgaatctggtgacgaaagtgatattgaacccttggtttcaattgattttgtcattgagaataacgatgactatgcttctcatccatctgctgaagcttttgaacgaatgccagctagattagaaaaaagagaccgcttctcgttttccttctatactgaagaatatagtaaaaaactagatgctggaaaggcccagcagacttcaaagaaaacagttcgtttgcataccgatcagcaggattatgatggttttgttgagcttgatcgtgtaaagttgagcggcagcaacaaaaaactttcgatactacaacttggcatcaaacgaaataacaaggttcagaaaaaactgcatggagttacccactttagtcgtattcagatgcctatatcttcagatcctcttaccggcttatatttgaccgcatcaggatttgactcagaaattcttagtttacaacgaaaatttggtcaatggcgggaggatggtccatctgaggagcatagtgacctattgttctatgagtatgttgaagctgtaaaattaacaggggacaacctcatgccagctggtcaggttgttttccgtgcaaaagttggtgaacactatcggctccctcataagggaattatccctagagaacttggagtgattgctaggtacaaggggcaaaggaaaattgcagatcctggtttccaaaaccctcgatgggttgatggggagcttttgatactagatggaaagttcatcagagatggtcctgtgatagctttcttttactggacatctaatgttcatcttttcgaattctttagacagttgaagcttcctgactagttcccttctaaaagtagttaaaggccattataatttcagcatagctgcgtttggagccaaccggagttgcctggcatcgagtacagattctgatgtggagaacagggcgcctggcatgaatcagtggcatctccacccaactctgatagcttgccacaagggtggaaaagagatcgcagtcgcaagaggaatatcatcctgccaacatgggtgagccgcgggcgcatcatacttactaattacgtttctcctctgctcgtccaccgccagtttttgtgtttctcatagcaagtagaactaaagcacctcaaagatgtaaagttatgtatgcagtcgcaaatagtttaggattttgagcacatattgataatttttatacatggagagtcagtatgtatgtgaaatagtacgagcaagagttttgtgcagcgtgatcaaactgtggccactgcaatcagcagcagaggcgtagagaccaccacggttacacagatttgttagggggtaagtttggtttattaaggaatcactccattttttt

SEQ ID NO: 24880 - DNA, 2832 bp, Zea mays
  Clone ID: MRT4577_122698C.1
cgaggtctctagcacgactccaactgccacgcgagctgcgagcggcgagcctcatcaatcgatcacacgcgacacgagtacgagtacgagtatacggccacgagcagacgagctcctccgccaccagtgtcatcgcgcagcctcgcgctcgtccatggcgtccgtgtacacggcgccgcgcgccccgctcccgacggtggcgtcctcctcgtcatccgcgcggcaggtggatccgaaccctagtggaagccgcttcctcgccgggcggcgcctccgcgtcgtccgccgcctcgccggcgcggccccgtcgcggcgcgctccgtgggtctgctactccgcgcgtagccccgacgcggacgccggcgatgagcaacgccggcggggttgggacgcgatgctccacgacgccttccagggtgccgtgcgacggtggagcgagtacgtcagcaattactggcccctaccgccctctgtgaaggaggcgggtacggggaagagggttgggagttcttacgatgaggaggtgatgaatggggatgaagaggagatgaaggttggggaggaagagggaaagtggagctgggagaggtggaggcggcactttgctctcattgaggagagcgagcgtctcgttgatgagctccagttgcaactccaggctgctgtttatagagaagactacaggactgctcataaactgaggctggctattgctgctacatcaaaaaatgacgctgtgggcagagctatctcggacttaaatatggccatagatgaggagcgctacaaggatgcagcatatatcagagatcatgctggcgcaggactgctggggtggtggtctggaatttctggaaatttgtctgatccatatggtcttattattcgtataagtgctgaacatggtcgatatgtggcaagaagttatgatacaagacagctggcttctgacagccctggtctccctatatttgaaatatactttgcagaggcaaatggtggatacaacctacaggcagtgcatctgaaaccagatggtagcgattctgaccaagtgccaaacatgttaagggagaaacttggcattgacagtataaacatatctagcagtccattagggtctaagcatgaagaatttgatggaagtgtaaacatggatgataaagatagtgatgatagcaacatcgctgctggccctggttcgaaaaacttgtcaagcgatctaactgcagttcccaggattaaaatcttgaaagtggtacccatgcagaatgttgatcatgactacataatcaatatctttgatcagatttcagaggaagatgatgacaatgataatcatgaagttgaaaatgaatcttcagaagatgttgataatgatgataacagtggagtagcagaaacagtttctgcagaagagaatggtgatgaatctggtgacgaaagtgatattgaaaccttggtttcatttgattttgtcagtgagaataacgtctatgcttctcgtccatctgctgaagcttttgaacgaatgccggctagattagaaaaaagagatcgcttctcattttccttctatactgaagaatacagtaaaaagctagatgctggaaaggcccggcagacttcaaaggaaacagttggtttgcatgccgatcagcaggattatgatggttttgtccagcttgatcgtgtaaagttgagtggcagcaacaaaaaactatcgatactacaacttggcatcaagcaaaataacaaggttcagcaaaaactgcatggagttacccactttagtcgtattcagatgcctatatcttcagatcctcttaccggtttatatgtgaccacatcaggatttgactcagaaattcttagtttgcaacgaaaatttggtcaatggcgggatgatggttcatctgaggagcatagtgacctattgttctatgagcatgttgaagctgtaaaagtaacaggggacaatctcatgccagctggtcaggttgtcttccgtgcaaaagttggtgaacgctatcagctccctcataagggaattatccctagagaacttggagtgattgctaggtacaaggggcaaaggaaaattgcagatcctggtttccaaaaccctcgatgggttgatggagaacttttgataatagatggaaagttcatcagagatggtcctgtgatagctttcttttactggacatctaattttcatcgtttcgaattctttagacggttgaggcttcctgaatagttcccatctaaaagtagttaaaggccattctgatttttgcatagttgcatttggagccaacaggagttgcctggcattacattttccgaggacagattctgatgtgaagagggcgcctggcatgaatcaaggggcatctccacccactctgaaaggctgccatgagggtggaaaatagctcacagtcgcaggaagaggaatagcatcctgccaacatgggtgagctgcgggcgcatcataccaattccgcttctgctatgctccgtccaccaggtcaccagcttgtgaccgaggcatcaaaccgccagattttgtgtttctcagagcaagtagaactaaagcacctcaaagatgtaaatttatgcactcccaaatttaggattttgagcgcaatcttggcagttttcatacatgcgaagtgaactagtacgagcaatagttttgtatagcgtgatcaaacagtggcagcaatcagtagcagaggcatacagaccaacacggccacacagatttgttaatatatctaagtttgtttaaccttgcccatttcttaagcaagaactccatttttt

SEQ ID NO: 24881 - DNA, 515 bp, Zea mays
  Clone ID: MRT4577_122699C.1
gcacgaggcgttgttagcatcctcttatctcctccgccgccgccgccgccgatccctaaggacaggtgcgtgccgacgacctcctccgcggacacggagtagcagtgctcctccatgctgctgctgctgctggcggccgtggtgaggctcgacatggcgaagatggaggctcgatcagtgcacagggtgctgctgtgctggtggtgctggtgcgtccgcttatataggtggcagtggcagagtggcacacgagcagcgttccacttccacaccaagaaccagctgatggtggcggattggagccaggggacaaggtcgtagtacggtttcgtgtggtgggggggttaatgaagggcaattaaggttgctaatgaatgtgggggggtaatggcgggagttttagtacgtacgcgttgatgcgtgcgtggttgggttggaataaatgccaagaacaggaaacagctgctgcaggggcaggcaggcaggcaggcagacaagtcgtcggtttctcggac

SEQ ID NO: 24882 - DNA, 303 bp, Zea mays
  Clone ID: MRT4577_12269C.1
tttaaaatcccccatccaacccctaactttatttcatcctttaactccctttttaccatattaatacataacttattccaattaataaacataacttaattctcctaataccttacattacaacaaatatattcatcccataaccccaacccaaactttttctctcacccaattttacaaaaaaaacactttttatttatacccatcatcatctataactaaccaacaaaataacaacttttatttcactttaataatcatttataaattctttacaacctctaaatcttcattaaacaaccc

SEQ ID NO: 24883 - DNA, 313 bp, Zea mays
  Clone ID: MRT4577_1226C.1
gttggttgttttgttctgtttttggcgccgaaaaacacctaatttgttattggggctccacgttttatcgcagggcaccttgcaaacctttggcacatctaatgttccaccaggatcctcctgcatgggggtctacttggaccaccctcctggcatgaatttctcaatccatcggtcccgcctccgtggcactgggtgcggtgctaaccgcccttgccctgaggccaccaaaaaagaaattacatgtcctgatcagtgggcccaggaagacatacgctcagggcagcagcatatctcattttccagaaaatgt

SEQ ID NO: 24884 - DNA, 462 bp, Zea mays
  Clone ID: MRT4577_122700C.1
gcgaaatcagacgccaaatccccttatcttatcatcaaatcgatcgccaacgggcatgatctgatggctccctcatcatagcctctgctcggccaccacagcaaaatggccctggtttagtttagtcctcaagatcccgcctttctggtgctctgtttggctagtgtcgtgccgccgcgcgaggacccggagattcgattccggtccggtgtatctctaggctgcttggtttgggttaggatttagtgggcagggttgtgcagctggtgtctcgtggaggaagaatttcgtgggaggattttgaccgggtttgggcaaagagcgcgccgttcgggaggaggtgattctcgcgtggttgcgtgctttgctgggagtctgctgcggccaccgccggtatggcgacgcacttcacgccgtcgcaggcgcacgcggcgtcgcaccacgcggcgcaccaccactcgg

SEQ ID NO: 24885 - DNA, 704 bp, Zea mays
  Clone ID: MRT4577_122701C.1
tacctagtaaatacacgctaggtataacaagtaagttaaagcaaatacttatgatgacggcaacgactaatatacaagtagatacaagcttgcaagcagatttttttgtttgttatatctaaaatccaactgtaaatataattgtggtttgttagagagttttttattaagctacaccagatagtggtgaaagaatttaagtgctaattatgacatatcgttggatctaaatctaacggagtaaaatatctatttacattgcatctagtataagcttgtatattagtcatcgcctatgatgatatgtcagagttttagttatcgtaacactcaatctaactacactcttcaccaaaccaccgcacctggaggccgatagtccatcaagaccaagcggcgttgagctttctcggagttgtgacgacgacgatcggtgatacaaaacactagagcttggcaatgtcgtggtgtagatggaaactgcaaccggccaactgtggtagcagcggtgcggtaggaacacttcttgaacttgtggaagcgcgacgaggaggcagggagctcggcacagagctagcggcgagcacagccggaggtggccgagcagagatggctggaccatcggcaccggcgagctccggtgcaggaccataaccgcggcgaggagaccgaagtctgggcgttgagcacggtggaacaggggc

SEQ ID NO: 24886 - DNA, 550 bp, Zea mays
  Clone ID: MRT4577_122702C.1
acaagcttttttttttttttttttttttttttcttttttttttttttttttttttttttttttttttttttttttttttttttttttttttttttttttttttttttttttttttaattttattaaatttgtggtcttttttattggatccaaactttgttccaattttggggaaaacaggggcaaaaacccttccgggggaaaattgttatcccctgaaaattccaaaaaaaaaacgaaccggaaacaaaaaagggaaagcccggggggccaaaaaagggaacaaaaaaaaaaaaattggggggcgctaactacccaaataaaaaacggaaaaactaaaaggcaaaccgcattaataaaaaaggcaaccccccaaaaaaagaggtttgggtattggacccccttccccttactgaaaaaatgacccgctgcgcttggtaaaaaaaatccggcaaccgggataaaagaactcaaagggggaaaaaccgttttccccttaatcaggggaataacccgggaaaaaacatttaccaaaaggccccgaaaaagc

SEQ ID NO: 24887 - DNA, 337 bp, Zea mays
  unsure (1)..(337): unsure at all n locations
  Clone ID: MRT4577_122703C.1
tcgaggccggccgggatctgtggatcagagagatgtgacgtggcncatttctgtttacgatcatgtaaagataggaggaagacgatgttgaaggggtgcatgactgggcgggcgttgctaggctaggctaagggcctgtttgtttacccccatggattatataatctggattattttntggaggattatataatctggattatataatctggattatataatctcggtagtcctgtttgtttacccagattatttgagttgttaatatgattcttttgtatgagaaagacaagaatgccctctaaaaaaaaagaaaaaaaaaaaaaaaaaagcggcc

SEQ ID NO: 24888 - DNA, 1477 bp, Zea mays
  Clone ID: MRT4577_122704C.1
accctcgagctgccggctccgttccattccatccagacaagctgcccgtccggcactgacagacggcagcaccactatatataaaaccaactccgatccgcaggcgccggcgccaaatcgaagagctgcgagagcacgcactgctggcggcgcggctaagaccgagagccgccgcgcacattattgttcgcgcgaggccagccgccggttgcattgcatggcgcagctgccgcccaggatcccgaccgaggtgcaccactggcccgaggggggccagcacggcgcggcggcggcggcgtgggcggacgacttcgccgagttcgcggcggcgcggcggggcgcgcaccgcaggtcgctcagcgactcggtcgccttcgtcgaggtggcgccggccgacggcggggccggcgagttcgacaggctcgacgacgaccagctcctgtccatgttcccacccgacgaggccggcggcagcggcggcggcggcgggtcgtccgcggccgggtcccgagaacggcggcagcagcgacagcgacggcgataagcgtggcgcgcgcggcggcccggcgggaggcgctccctccaccggcagtggcggcggcgagcagaacggagtcgtggatgcgcaagcgccggcgactggaggacaagctgccgtcgtcgcctccacggagctgatccgggaccccaagagggtgaagaggatccttgccaaccggcagtcagctcagaggtcgcgggtgaggaagctgcagtacatctccgagctcgagcgcagcgtcacaacactgcagctaacttgctgcggccgtacacgctgagccctgttccagaagactccattcagccgcacatgtagtactgcacgtctactggaacctgaagccagagtgcaagggaggcaaaaaaaaaaatccagaccagtccaagaacatgcatggggatagtttttcgtttatggtctcgtcaacagtgccgcgtgtgaagaattttgtcggagttgcttgcttgcttgcttgctattgctctgcgagatgttgtgttgttgtaactttgtaaaccgaccgtctgtttgccctgcgcctgcctgcagaacgaggtgtcggtgctgtcccctcgcgtggcgtttctggaccagcagcggaccatactgagcgtcggcaacagccacctcaagcagcggatcgcagctcttgcccaggacaagattttcaaggacgctcatcaagaggagctcaagaaggagatcgagaggctgcgccgggtctacgaccagcagaacctcaggatgtcagccggcggcgccgccgcttctgaccatgggccgccaccgccggtggtgcgcgctgagaaggagctcatgagctagcgaaccagtctatgcgtgcccgatgtgcagtccgccttatcattaacatggagggaacattgcatcatgattttttatttccagattatgtggatgttttcttccttc

SEQ ID NO: 24889 - DNA, 1111 bp, Zea mays
  Clone ID: MRT4577_122705C.1
acaccatccagccttcccacctccctcccccaccacgccgtcgtcatggacgccaccctcagcaccacgaccacccaggactccctactcttcctcctcccttcagccgccaccttgctctccccgctcctgaccgtgctcctcgtagccgtctcgctgctctggctcttcccgggcgggcccgcgtgggcgttcgtttccaggtcccgcgcgacgccgccgggcgcgccgggcctggtcaccgcgctcgcgggccccgcggcgcaccgcgccctcgcgtcgctgtcccggtccctgcccggcggcgccgcgctgtcggccttctccgtcggcctcacgcgcctcgtcgtagcgagccagccggacacggcgcgggagctcctggccagcgccgccttcgccgaccgccccgtgaaggacgcggcgcgggggctcctcttccaccgcgccatgggctttgccccgtcgggcgactactggcgcgcgcttcggcgcatcagctccgcgtacctcttcagcccgcgcagcgtggccgcggcgggcccgcgccgcgccgccatcggcgagcgcatgctgcgggacctcctctcgggcgcggccggacgagaggtcgtcatgcggcgcgtgctccacgcggcatccctggaccacgtcatggccaccgtgttcggcgcgcgctacgacgccgccagcccggagggcgcggagctggaggagatggtgaaggaagggtacgacctgctcggcatgttcaactggggtgaccacctgccgctgctcaggtggctggacctgcagggcgtcaggaggcggtgcaggagcctggtgggcagagtcaacgtgttcgtggccaggatcatcgaagagcacaggcacaagaaggacgacgccattggagagccggccgccgccggagacttcgtcgacgtcttgctgggactggatggcgaggagaagctgtcggactccgacatgatcgctgtcctctgggagatgatctttcgagggaccgacacggtggcgatcctgctggagtgggtgatggcgcggatggtgctgcacccgggcatccagtccaaggcgcaggcggagctggacgccgtggtgggcc

SEQ ID NO: 24890 - DNA, 535 bp, Zea mays
  Clone ID: MRT4577_122706C.1
gtgggtgtttttttttttttaaaaaaattttttttttttttttttttttttttttttttttttgtatgaaaacagcctatatttgggaacatgagcatattcaaacaattgtttcgatgataacaatgggtagtagaacatgataatgtacatgcgggggtagctcacagaaatcaaagcacaccatctaatgggttatcactatcaaattctgcttctggcaacttagtccccagctctttcctgggcttaggtgaaagtcccttcgcaagcattttctcatcatacttcctagccaaatccaccatacccttttgcagtaatgcatcaataagtgcattgtatgcaaatgcatccgggctaaaaccctgcttttccattgccttccacacaatgaacaccggccgaaggaacccccagcgtccaaaccttttaataagcatgacatatgtgtccatccttggctggcaacccctctcaaacattttctcaaacagtccgaggacctcttggggacggctcaaatactggaaaa

SEQ ID NO: 24891 - DNA, 502 bp, Zea mays
  Clone ID: MRT4577_122707C.1
caggactactacacaagcgtgcctctgacgcagagcgctaacaaccgactgatttgtatgggagcggcgactggatttactaggaacagatctccatcttgtgcgaatgggacctgatggccacattgcgtctgtcttccatggccaccctcttgttaaccagaaagataggtgggctgacatacattaaagattctacaaagccacctacagagagaatcacattcactgtttccagtgatcaactcataacgcatacgcagcaacggaggtgactgaagctggaaaggccaacacggtgctaacagagcgtatagacaaccaaacctggtaaaacctgtttcctgtacgagtatggctacaactgcaagatggagaattacctgtttcactgattaggcaggcttgaccttgctgcaaaacaaggagagtccaatgataacccaggctcgaacccatattagctcataaaataaaagatacagagaccctatctacatag

SEQ ID NO: 24892 - DNA, 218 bp, Zea mays
  Clone ID: MRT4577_122708C.1
atttttactttattcaggacacgacaagcaaatacatctccaaatacgaaatttaagatgatacgcaggactttattccacatgcactagcactaaacctgcactacacttatcttctctaacctgctattgacactaacaatatgatgaaacactttacaaaatcactcgatcacttttaaggtagatccccttacatttaccctctatacactttt

SEQ ID NO: 24893 - DNA, 495 bp, Zea mays
  Clone ID: MRT4577_122709C.1
aacaaaaaatctacgcgtaaaattaaattcaaggtattgggtgagaccatcaccaagtcatcattcaagtttcaggttatacatccagagatcaatggttaatgccatagatccaaccatataaacacaaagttcttgcattgatgggagtatcgctatgtctgtacattcctatcggtcaatctgaatggaagaactatagacctacttatgccagagtaaactacttcaacattttctgagactggaaaactttatgatcagctaccaaagctggattatcatgctctgagaaagcatgaagattgttatgtgcagggtctgcagtggcagtccgacagtccgagtcattaccttcatcaacctgctcaactggcggaagagagtgttcctgatgtctcttagaaaggtctcgcaaagcacccctatttgcccaaaaaagcccacaagcgttgcaaagtgaccttggaccagatggccctagccgatcattgg

SEQ ID NO: 24894 - DNA, 367 bp, Zea mays
  Clone ID: MRT4577_12270C.1
ccctgccgggcggcccctgggggggggggctcggggcccaccggggggcggtcctgggggtgccgggggcggggccgaacttggcgtcccctcgggcttccccgctccctcggggccgggggcttccggtgtaaagtccggggagcctaccgagcgggcgaactaacagtaaaggcgggggggccacgggcgggggcccagtcaggaaacctggcgtgcccgccccgcccgggaaccggcccacacaccggggggggccgctggcgtaatggacccgccaaccctcccggggaggcgggctgggtggggggggcccttccgcttcctcgcgccctttcaccccacccaaaggccgtccggcgggggg

SEQ ID NO: 24895 - DNA, 194 bp, Zea mays
  Clone ID: MRT4577_122710C.1
tttactcaaaccttgatctaacaaccgtggggtgaatttcctatgaggagcttgcgactcatttaagtgctgaaattgactctgtactatcagacacgcacaactctaagccggtgatattagaaaacattagtttttgttttgtgatgaaggatactcaggatgaccagcataaactaggatgaggcaccaat

SEQ ID NO: 24896 - DNA, 409 bp, Zea mays
  Clone ID: MRT4577_122711C.1
ggtaccctccgggtccggccgggctgcgcattccttcttcttcgctgtcgcctgttgttctctgctgccggccccatggggagaagggctgcgcagatgctatctgccagcatcaagaaacaatgccatacacccatagtgcaggtactgccgtggtgtcctctgaccccaagtacaggatctacgatgtgggtatgaatagaaagggtgaaggtgcacaccacctactgtgcacaccttgctgattgtgatgccgagaaagtctaccgcgagcatcttgtcgctgaccattttggctacacatgcacgtgatcatgaatgcctgagaggatgaacatcccctatgcttcacagatcacctcattacatgtgcttggtatgaacaagactctctctgatgctgccgctg

SEQ ID NO: 24897 - DNA, 143 bp, Zea mays
  Clone ID: MRT4577_122712C.1
ttttttttttttttttaaaacgacttaccgagtatatactataatgtttcatcaaactgaaacattttatttatacatccgatactgtttcattgaactgaaacgttttataatgaaaccgccagtagtattctatagcagct

SEQ ID NO: 24898 - DNA, 402 bp, Zea mays
  Clone ID: MRT4577_122713C.1
gatgagcaagagccagcacattctattcggtctaacagataccatgtgtgacttgagagcttcgggcagtatgagcgcttgggtaggtgtgtacaggctatcgtattcagtgtctcgacctgatctattgagcttaccccatacctgcagcactcagtgtcaaattgcttttgagaatggtagtctttcaagcatgactatggctgccgataagtttgagagtgccctcatcgattgagccatagatcgcgtacacgatgattgatcagtcggcagtctgatcacgatgaattatcacgaggtcttccatgctgacagaaacggtttatgcaacaaacttgaatgctgtgagtataggcacttcggacggacctcatgagtcatgtatcagtggacatattg

SEQ ID NO: 24899 - DNA, 359 bp, Zea mays
  Clone ID: MRT4577_122714C.1
caggaagggtgccgccccatggtgcacacgtacacgcccatcgtgcagggctattgtcgtcagggccagatcgaggaggctaccaacctgattggcttcatggaggaagccggttgtcctcccaatgctgtcacttacaatgttctgataagggcgctgtgtgacgatgccaggttcgctgaggtcgagcaggtgttagcagagattgaaactaagggccacgagctcagtacggttacctataatatatacatggatgctcttggcaagaaaggcatggctaaggaagcactcaagcagtttgaggccttgcaatgtaaagggctgcatcccacagcttttactttgagcatcattct

SEQ ID NO: 24900 - DNA, 254 bp, Zea mays
  Clone ID: MRT4577_122715C.1
ttttttttttttttttttttaacaggaaggcggcagacgccattattattaaaaattcccggtggccggcaacatcttgtagcactccagtatacaaacgatttgacagtttcggggctagctgttacgtacgatcgaagacggttagcgggggcagccccgctggaggcgacgacgacggggccggcgccggggacgacgacgatccgtcctggcacgaggagtggatggtgcagttggggatgacgcagggg

SEQ ID NO: 24901 - DNA, 155 bp, Zea mays
  Clone ID: MRT4577_122716C.1
gacgccgacatggccacgctcggcgccttgctggtccgttccagtcacggactctaattgtcctcgtgttagcgtttctttgcgattcgctgctatatctgctcgacgacgcgttttaggtgaggcaacataacctgacctgtcttgccattttg

SEQ ID NO: 24902 - DNA, 172 bp, Zea mays
  Clone ID: MRT4577_122717C.1
cacgcgtccgttagtaacatcgtacaactatgaagtgaggattgttcttattaagctgaatatttctcagacgctaagatgttgatgtaggcgttctcatccgcgcatctcctagtctttctcctggatgaagtccacgttgtggcttcaaaggatggagtcatcgcagttg

SEQ ID NO: 24903 - DNA, 514 bp, Zea mays
  Clone ID: MRT4577_122718C.1
ggggggttttttttttttttttttttttttttttgtttttttttttttttttttttttttttttttttttgccaaagcaacatttgaaattgaaccggggacccccagggacaagggacatcgactttggcaacagccttttaactcctagggggggatgaggggaaacaaacaatacgggttctgcaactctggggtcgcagtttacctacaacaaaactgaaatgctagtagggggggacacaaccccccaagagcgagcaagcaggacatattcttaaactttggtttgggtgggcagtttacctagaacataaggaacaacagaaatgctagggggggagacacaggaacacaacaacacacgtttttattttggggatgaaaaacccctgcttttaagctgaaccatccccgggctaaaagcagggttagggccccatccttttttatttcgaagaggccttttggtgccgggccaaattctttgggggggggtgaacaaccccctcct

SEQ ID NO: 24904 - DNA, 476 bp, Zea mays
  Clone ID: MRT4577_122719C.1
gaactaaaaagcagtagcgcccaatacggggtacagtgagcaaaggttagaataggatgtgcatagacaggcaaagaggcggttacagggaaaatgggaaaataaaggtcgagtcccatgaaccatcattggacgtggaacccaaacaagccctaaccaatccttttcaacaaacagagcctaaccaactttactcgacatcagaccccagagcataaagatgaaccgttggcgaatggcgactgcatagagtatgatacaggttgaacgacacttgacagaactctatttatgaatggctgccaccgaaagaactggtttccaacagcctgttgaaaatggcctgagaccaatacattgaccagcatcttgatcaagggcttgttggttgaccctccaattcaaatgcaaccgaaccagacctacggtggagcttgtgactattcggccatttcacagtatcggggatagagttt

SEQ ID NO: 24905 - DNA, 247 bp, Zea mays
  unsure (1)..(247): unsure at all n locations
  Clone ID: MRT4577_12271C.1
gcctcaagaagaactttttgtttgttttttttgctggnaataggcaagacacacacatacgcaagggctgcagtgcagctgaacacgcactacaaatctaactaagatccttttatttgttttgaagcgcaaagcccgattcccacaaccttcacatcctgacttgttgaccctgatctcaatgccctgcacaggaagaccgtgtgttcaattggcgacccagggctccatgaggctgacggacacc

SEQ ID NO: 24906 - DNA, 734 bp, Zea mays
  Clone ID: MRT4577_122720C.1
ggcggggtcgctggagtctcctcccgctaccggaggacaccccctacggtcagtcggcatacgctggtccccaacagactcgtcgttcgtctcctcctctaccgtaggtcagcagcgaccgagctctgtcagcgatggactactcttgtacctaggagacgtatccctccggggcttggtggtcgaggaagacggtggccgccggtgaccggtgagaaccgcaggatctgccatacgctcgcctgcgcgcctggcgcgagcacggcctcaaccgcgttgatacacccgctgggatcgggcagcgcggacgaggtcgccgcggcctcgcagactcctctggcgatgtctcgccgtcgtatgccgaaggttccaggtgtccgacggccgctgcgctgccaagctcgacgcatggatctgatattccgcatcgaggctcgacatcctggcgaattacatccgccgcgccgtccaaagagagcaaaaccaaatcgtggaagcacgccaagagtgggcgctcgagcaagttctactgcgcttacatgatcaccgaagcgatcctagccgctgtgacggtagcctccgtcaacaaggacgatccccgactgcagatcctagatgtcgctttctctacacggcgagctgacccaccgatgacaggactgctcctgcaacatgagcgaattgcagatgcgcaaattcaaggcgctgtgccgaggtacctgctacacgcgtat

SEQ ID NO: 24907 - DNA, 270 bp, Zea mays
  unsure (1)..(270): unsure at all n locations
  Clone ID: MRT4577_122721C.1
tgtgctcgtgangaacgagttggtggtctttgttggcgaatactcagtcacacgtgtgtaggtgcatgctctaatcagatcccaaatgatcaactttgtgcttctcattagtcgcgaagggaatgtgagattgacaaaatggtactcatcttattctcagaaagaaaggagtaaggtaatcggtgagctcagtggaatgattctttcccgtgcggcctagcattgtaattttgttgaatggcgtggagataaagttgtttataaaaggta

SEQ ID NO: 24908 - DNA, 790 bp, Zea mays
  Clone ID: MRT4577_122722C.1
attgggtacctcgaggccggccgggactagccccacgaccctcctctccgctcgtccgccaccgccaccgccgcgccgcttctcgtcgtcgccagaaacgaagcagggctccgcgctaccccgctgatcttgcgcttgaagatcaatcaggccgctgacgcagttctctacgtgcaggggcggagggcccattatccatctggcccaagcgcctcgccctttctccacgactccaacccaggcagcctccgccccgtcacccgccgccgcggtcacagacctctgccgtcgacccgcggaccgcggtccggctccagcctccacccgcccgccgtcctcctccgtcgcgacctgcggaccgcggtccggcttccagcctccacccgcccgcccaccgcccaccggcttccggtctccgcccgccgtgggcggcctcttgccctcagcccacctggccatctccgcatccggcccccggcctccggtctccagtcgcccccggcttctggtctctgcccccgcagtggtcgtgccccactgggctgaggaagaacagcttccggttcctggtgctgatcttgaacggcgcggcgctcaggtcggaggaggcgttgccggcgagactgaggtgtcgcagaaggagccataccaaaaaaaatcgtcctccgctactgcctacgtgacaaaaatcctgcggagacctggcagaagtcgcccggtctcccccgcctctggcttgggctcgccatttacgctacaccttgagatttttattcactccattcaatct

SEQ ID NO: 24909 - DNA, 264 bp, Zea mays
  Clone ID: MRT4577_122723C.1
gatggatagaaggaacatatcaatcccaactcatcgacagcactcccccaaaaaccgcagagctgaaacacaaccatgcggagcgcgtcggcgccggggcccgcgcgtacctttacgccgttctagagcatatcgccgccgaggtgctggagctggccgggaacgctgatcgggacaacaggaagaaccgtatcgtgccgtgccacatacagctggcggtgcggaacgacgaggagctgagcaggctgttgtgcactgtgacga

SEQ ID NO: 24910 - DNA, 211 bp, Zea mays
  unsure (1)..(211): unsure at all n locations
  Clone ID: MRT4577_122724C.1
cgccaaaaagcttgatgcatgttttatttcgcctcacgcttttacctgtaagtccacacgactactgcaagtgcagantgtattgcagtagtattttagcgatcgaatccacaacgagagaagtacatcaaagaaatccttaagattagagttatgctaggaccacaataaaagagtggcgcttacttcatcgtttcttgatacctcattt

SEQ ID NO: 24911 - DNA, 487 bp, Zea mays
  Clone ID: MRT4577_122725C.1
tctaggtctgcgagcgaggcgtcctttcttgatcgttagcggacacccaagttcagtttgtttctaacacaaaaaaacagtatagacattgttttacataaaaatgcctaaacatgttggacatgtgacaccagatcgttttggatgggtctcggctattcacaaacggtggtgataagctttaacaccacagaatttgactaatttgacactagaatcgacgaatcctttggaagaagagactataatatccatgtgcgctgagcttttctttgaatactgctgtgatctatcctttaaatgctgcagtgctttctgtattacatgcaccacagctagatgtattctatgagctgtaacgatagcagtactatcggggtgcctgtagtcaatgcacgggtgggccatgtgctgagaccgacatgtacataccaagtgggaaggcaatgcacattcaattccacgatgatcttgaatatggatagca

SEQ ID NO: 24912 - DNA, 521 bp, Zea mays
  unsure (1)..(521): unsure at all n locations
  Clone ID: MRT4577_122726C.1
ccccctctcgagtttttttttttttttttttttttttttttttttttttttttttttttttttttttttttttttttttttttttttttttttttttaaaaaaaccggggggattttactttgacccaaaaggggggtttttgttacacgcccaaaacattttttttttagggggcaaaagggctaacaaaaaaaacagggcccccttaattcaccctttatcacgggaattggcttgggggtccccccccccccccggaggaggaaaattttttaaaggcaaaactgggtttgactgaacaaccccccccccccccagggccagggggaccctaaaaaatgcttcctatcaccaacccgggtttccgaggccccaagcggaagggagaaaccaccttttccttggaaaggggaggaatcccctttggggggnaaaagccaatttgactcccctcaaccccaaggcccaaaaacccctcctcccactttttgggaggccccttccaaaaaaggttttgccc

SEQ ID NO: 24913 - DNA, 461 bp, Zea mays
  Clone ID: MRT4577_122727C.1
gttgtaaaaggtatctctataaaaacagagtggatcacactgcttatgacacaacaggttacctaggcacagctgatacgccactgatgacatggcacaggcaaccatgaacaaatgacatgctcacaatgatgtagaacttaataaaactgctgaatatcagtccacagatatgaacatgatcaatgatacagcaagagtgtgtaatcataactgaaccgagaataagattgatgtaaagggcttgttaatatcaccatttgatccatatcattggctgaaccgactcacctcacacgcagattcttccttgtaggcactgaagaacttccgcttcttagcaaacccactgataaccttgagctgttctgctgattcttgcgtcgacactactgtcgtgccactaaaaggtatgcactactcgaatgcaaaggctactggtggactcactgcctttgcct

SEQ ID NO: 24914 - DNA, 803 bp, Zea mays
  Clone ID: MRT4577_122728C.1
cctcgaggccggccgggacacagccggctcgttttgtacatagatctcacgatcaatcctcttccatattgccagagacgtcacttcggcccgcaagaggaacacgtaccttgacctgtccggcctgggattttactatatatcttcacctgggaacctcgagtctttgcatctcacacgcccaaacaactcaaaatgggaaaagttcttctcgtcctctacgatggtggcatccacgccgagcaggagccccagcttctcggtaccactgagaacgagctcggtatcaggaaatggattgaggagcaaggccacgagctgggaaccacatccaacaaggagggcgaggactccgagttcgacaagcaccttgttgatgctgaggttatcatcaccactcctttccaccccggttaccttaccgcagagcgtctcgccaaggccaagaacctgaagcttgccgttactgctggtatcggatctgaccacgtcgacctcaacgctgcgaacaagacaaatggcggtatcaccgttgccgaggtcactggctccaacgtcgtctctgtcgctgagcacgtcgtcatgaccatcctcactctcgtccgcaactttgtccccgcccacgagcagattgccaagggcgaatggaacgttgctgaggtcgctaagaacgagtacgacctcgagggccaggttgtatgcaccgatgctgtcggacgtatcggagagcgtgtgctccgccgtctcaagccctttgactgcaaggagctgctgtactttgactaccagcctctgtctgccga

SEQ ID NO: 24915 - DNA, 1699 bp, Zea mays
  Clone ID: MRT4577_122729C.1
gccggccgggctgcggaaaaaaaaaaaaaaaaaaccaaaccactggggagtttctttctcccctcataccaaaggctgactcaaagcgatgcgcagctccgtaaccacttcgtcctcacttctcagtccaccttcccaccgcaaccacttcaccacctcctcacagtcccagcaatggagctagtagcgtggctcgtcatcgtgtcctcagtatccctcgctgggctcctgccagtggtctcggcgtcgacgacgacaccgcagcagcaatgtggcggcaataatgtcggacctgccggagtgagagcaggctactggtcgccgtcctcgaaccgctactccgcggtcggcagcatcgacgcgtccctgtacacgcacctctactacagcgcggtgaccatcgacgagacgagctgcgcggtcgcgccgcctccgccgacggccgaaggcgcctcgctgctcgccgccttctctggcgcggtcaagtccgcgagcccgtccaccaggaccgtgctgtccgttggcacggacgagtacagggtgggcgagtcgaacgccgccttctccaggatggcgtcggacgcgggcctccgggcggtgttcatcaactcctccctggacctggcccgcgccaacggcttcgacggcctggacctgtcgtggatcttcccggccacgcaggcggacatgcagaacctcggcgccctgctcgcggagtggcgggcgaggatcacggaggaatccgtcgccaagtctttgcctcctcaacctcaaccccttctcctcaccgcgacgctctacttctccaaccacctgttcggcacgcccgacggcaacctcgactaccccgtggacgccatcgcgagcagcctcgactgggccaacgtcctcaccttcggcttccgcggggacagcggcgtcaccgcggccgacgcgccgctctacgacacgtcctcgcacttctcggccagctacggcgtggtctcgtggctggacgcggggctccctccgtgcaggctggtgatggggatacctctgttcgggaggtcgtggttcctcaggaacaaggccaagaacgggctaggcgcgccggccgccgccgccgggacgaagcagaggaggagcaaccagactgggataatcgcgtacgcggagaccgaagagtacctgagctctcaaggcaccgtcgtcacctacgacgaccagtcggtggcggagtatttctgcagcggtgacctctgggtcagtttcgacggcgcgcaggtcgtgcagcggaagctggagttcgcggcgaggtctcagttgctcggctacttcctctggaccgtcggcttcgacgattcgaacagcacaatctccaggaaaggtcagtagctagctactgagacatgacagccatcggagtcatggcaccagtatgctcagggtggttttggaatcatgcacgcaggaggttcaaaccaatacgttgcatttaactcgtcttcagtatcacttggtagctgctattcgagatctctcagctgtttgctgtcttcagtacttctgttggttattctgtttcgttaaagcgtatcagtaaacaggccagaaatgtaaaataatagtttcaggtgatatattcatcaaaagcgaacgtctaataaaaaaaaaaaaaaaaaaaaaaaaacatgttcaggtgtatttgttgacttctctc

SEQ ID NO: 24916 - DNA, 148 bp, Zea mays
  Clone ID: MRT4577_12272C.1
acccctgccatttaaggcacaagagacgcgacgacacacacgcgttcctgggggctgtcgacaccatggagcgcaccccagcactgagatgatgctcaacatgacacagcccaggaccagaccactgctctcgagagcaggttcattg

SEQ ID NO: 24917 - DNA, 432 bp, Zea mays
  Clone ID: MRT4577_122730C.1
tttgggttttttatttttttttttttttttttttttttttttttttttttttttttttttttttttttttttttttttttttttttgggcgatttcaggtatctttttaaaaaaggccctgccaccccaacaaaaatcccttatcgggcaagggcgggtttatacaacaattgcccccggggggccgccccaaccccccaaggggaatagttcaggaaaaacaaaaacccctttcccccccaaagacccccccacaaaacaaggggggaaagcccccccccccgaaaaagccccccccccgaaataccgaaaaaacattggccccccatttattcaacccctcaaggagaatttctttcccgggaaagccgcgaaatttggggcttctttcttgggcccccctgcttccttttcaagggccctttcggctcg

SEQ ID NO: 24918 - DNA, 593 bp, Zea mays
  Clone ID: MRT4577_122731C.1
taccctcgggcttgccgggaacggtcgactcgctctagttcggcgtcgtcttttttcggtcggctgctactgtgtgccggtcggtgtctcgccgcggattgctgcgccctcgtgcggcggcaccactggcaagcgcgcgtcttctagaaggccgcgcactccagcgccgaatggataatgtgcaccgcatctgtatccactggccatgcttgccgccgcccgaatgacctggtggggcggaccctgtttcttttttgacccgcagctcgcccgtgcccatcaccgagcggagcctggatgaccacgcgcaccacacaccagctggtagagcgactacacgcgttgcggagacatcgcgagggaaccgacgccaaacccagccgcagaggcgagggacggtgacgaagcgcccaaggtggcacccagtgaggccggctacgcgttacaagacgtgccccacgtgtgggactacctacccggacttcgaacctactcagatgcagtacaagagagccggggagactgtgttgagaaccactactttgtacggccaggagacacctcccgccacgcgattggggctgacaaggatg

SEQ ID NO: 24919 - DNA, 346 bp, Zea mays
  Clone ID: MRT4577_122732C.1
tgggcatttgtggagaacacggtggagagccttcctctgtggccttcttcgcgaaggctggcctgggtccgttcctggttcccttttcagggttccgattgctaggctagctgcagctcaggtccttgccttaggctgcctcctaattggcaaccggtttgcctgcttctggggaattgggggtccacccgtttttttcccagaccctccctttgaacccttctctggtcccagctcttttaagctttccatccctatgcctttttttccccaacctgtttaactttctcactctgctccacggtttcaaatctgttctttaaaacaccatctcctatcaccgttt

SEQ ID NO: 24920 - DNA, 383 bp, Zea mays
  Clone ID: MRT4577_122733C.1
aaaaaaacaaagggggacaaactatattaaatacctattaaaaaaaaaccccccccccgggggatactcccctctcggcgggggaaatgcccatgaaaaaaaacatgcccatccattcggtattatgggggggtcattaattcgggcatcccaactttaaggggccccacaacaaaacccagggggaacaggcgtttcccttgtcggcaaaaaattcgaggggggggagggccttggggacggaaaactctagccggaacttgggcccccaataatggtccaagaaggggcggaaggcgtcctcccccaagggggggaaaaatttccggggtgccacccccacctgcccaagaaaacgccacccgaccccggggtccacccgg

SEQ ID NO: 24921 - DNA, 2079 bp, Zea mays
  Clone ID: MRT4577_122734C.1
gccaggcgtccggcgcggcgtgctctccgttcgaaccgatgcccatctgctgaatcggatcggatcgtgcgatcggccgccacgccacggcccgcgggtgaggcgtggtctccgggaggcagccaacctatcccacccggtctagcctctagcgatcccggcgccggcagcgcgcacgagaggaatggacgcgtcgcacccggagggcgaggccacggcggggtggctgacgggcgaggagtggagcggctcgtcagcctccgcgctctcccgcaccgccgtcctcaccgcctccgcctcctctctcaccgcacacagcttcggcagccggtgggaacggatcgggagccgcatgctcggcgccttcgtgcctgagggctttcctgggtagcgtgacctccggatttagatcccgttccaagctgtttggataccatggtgcagtctcctccacattacatccgttgcatgttgtcgtctaccactctcttctgggcagggggaatcggagtgcaggaacagtccgcgatcgagataggtgctcattgtcagccggcggccgcgtatctaagggcagcgaggttacgggtaactttgagcttggaattggagaattatctggattttaaccaaaaaggtcaagatcaagtctttatgaatgagaatgatgtgggcatgtttatagtggtctcgaccgttctcttctcgttaacattgataatgtgcttacgcagcctgtctaggtcattcactggtgttgctagtggagcaactagagcagcactaacgcagcattttgcacttggcaaataatgcagctgatatttctgcaaaggagggcagtcaggaaacacttgctacactacatgttagggatggggttggggatgcttgttagctcaaattaccagagggcatgctttgagtgtatgggcatcttttctttctcttacgatgttccatatgtatgcaaattacaaggcagtgcagtcactttcactcactacgctaaactatgagagagcttccatcttgctacaatacttcaaggaatgtggtgaagttcttgtgccacggaaggtttcccagcaggaacatattcttccttcttggtcaaactggaggaaactgaacagaattaaactgccacatgagcgtgtgcacttgggtgctaaagcctcgatgcttacacacagtgacatgttggtgattgcaaaaacaagataccactatgaaaacgcgaactactttttgctggataaacaaggcatcgtttacgttttcatccacaaggaggcaacaccagccgatgttttaaggtccttcgtacacgggctcgtgctagctagctcgacacagaacagcaaacctcagcacttagaggcccgtcgatggatggacgagatgtataccagttttatctcgaagctgcagactgaaggttactcgacggaacgccttctgtcgcattcgattctttggagggcacactggcttcacggccagctggatgagaagctcaagtaggaggaacactgcaagaccgcgtctgcttatccaaggacaggtcacaggtatatcgcccaggacgcgattattagctagggtgagaacgtgttaattgttcgcttgtgcatggcatgactgcatgatgaaagatagatgcatgagctgcaccgagcaccaccaaatatagttaaccgcttcgaggttctagcatatggacggacttcacgataaaagtgctggcctgtacgctcgagttcagcatgttaatggttcacactacgtccatccgcgccgccttagggcatgtacagtgatgtttaatgtggagtctcttaaggtgtttaagggagttatttgccaaaaaggtcaagagcagatgctgctggaggagaatcatgaaggcgaggttagagtggcctagaccgtcgtcttctagttaactttgattatggaggatcgtcgtcgtcatatgatgcattttacttagttattttgtacaaaagctcctattatgtaataaagatgtgatgttgttttctagctaacaataattactgagtacacaagacg

SEQ ID NO: 24922 - DNA, 1724 bp, Zea mays
  Clone ID: MRT4577_122735C.1
gaggcaaccagagtatccccgggggtctagcctctagcgatcccggcgccggcagcgcgcacgagaggaatggacgcgtcgcacccggagggcgaggccccagcggggtggctgacggtcgtggagtggagcggctcgtcagcctccgcgctctcccgcaccgccgtcctcaccgcctccgcctcctctctcaccgcacacaggttcggcagccggtgggagcggatcgggagccgcatgctcggcgccttcgtgcctgagggctttcctgggagcgtgactccggattatgtcccgttccagatgtgggatacgttgcagggtctctccacatacatccgtgcaatgttgtctacacaagctcttctaggggcaatcggagtgggggaacagtccgcaactgtcataggtgctacttttcagtggtttctgagggacttgacaggaatgcttggagggatattgttcaccttttaccagggatctaatcttgatagcaatgctaaaatgtggcgtctagttgcagactttatgaatgaccttggaatgttgatggatcttttgagccctctgtttccttcatcgttgatagttataatgtgcttaggcagcctgtctaggtcattcactggtgttgctagtggagcaactagagcagcactaacgcagcattttgcacttgcaaataatgcagctgatatttctgcaaaggagggcagtcaggaaacacttgctacaatgttagggatggggttggggatgctgttagctcaaattaccagagggcatgctttgagtgtatgggcatcttttctttctcttacgatgttccatatgtatgcaaattacaaggcagtgcagtcactttcactcactacgctaaactatgagagagcttccatcttgctacaatacttcaaggaatgtggtgaagttcttgtgccacggagggtttcccagcaggaacatattcttccttcttggtcaaactggaggaaactgaacagaattaaactgccacatgagcgtgtgcacttgggtgctaaagcctcgatgcttacacacagtgacatgtaagttctaagttctggttggtgattgcaaaaacaagataccactatgaaaacgcgaactactttttgctggataaacaaggcatcgtttacgttttcatccacaaggaggcaacaccagccgatgttttaaggtccttcgtacacgggctcgtgctagctagctcgacacagaacagcaaacctcagcacttagaggcccgtcgatggatggacgagatgtataccagttttatctcgaagctgcagactgaaggttactcgacggaacgccttctgtcgcattcgattctttggagggcacactggcttcacggccagctggatgagaagctcaagtaggaggaacactgcaagaccgcgtctgcttatccaagggcaggtatatcgcccacgaggttacgagaaacttggagcttgaattggagaagtatctggagtttcaccaaaaaggtcaagagcagatgctgctggaggagaatcatgaaggcgagtttagagtggtctagaccgtcgtcttctagttaactttgattatggaggatcatcgtcgtcatatgatgtattttacttagttattgtcaacaaaagctcctattatgtaataaagatgtgatgttgttttcgaaaaaaaaaaaaaaaaaagcggcc

SEQ ID NO: 24923 - DNA, 202 bp, Zea mays
  Clone ID: MRT4577_122736C.1
ctgtgtttgttttttttttaaagaatcgtcatattccatgccattctgtggttacaaacaagctcctaaaaaattcctaacagcatataggccagagccggctaggtcctatgacaaccaaatgccaaaagagcccgcctcaacgatgacttttttagcgggggtgcgtgtgaccacaagcattaattaattacaacaatgg

SEQ ID NO: 24924 - DNA, 202 bp, Zea mays
  Clone ID: MRT4577_122737C.1
ttgggtacctcgagccggcgggaattctaacgagggacaactcgcgtagctgaacacgaaagacttctgttgagttagacgaccagcacctagactaacaccctcgaagcacgatgcgacaatgaccagctgctgcgctgctgtccccgacgccctcgccggcggcatgcgcgagcaactcaaggaagagtactacgactac

SEQ ID NO: 24925 - DNA, 677 bp, Zea mays
  unsure (1)..(677): unsure at all n locations
  Clone ID: MRT4577_122738C.1
acacaaatgatgnataatttgtggcacatatggatggtcccttaaccaatcagtcaacacttcgacgaagtgcttagagggattctatctaagtcatgagttcatcaagcttcctgatctagaaaccactctacctgaggatccagagtggaaatagtttgaggactgcctaggtgcactagatggcacacatatccatgtgaatattccattgactgaccaaggtaggtacataaataggaagcaatggaacaccactaatgttccattgactgaatgttcatgttggagggaaggatgttcgccccctcgatcagttttctttaacaacaattgaacatgttttatcgcacatataggaaacggagggtacctcgaccggtatcaaaatcgaggtcttcatccagaactgcagaaggcatcgaagcgaagggctgcaccgtttaaaaggggggctccttgtagcttcgcgaaggcggccctgctggctcagacaattctgaacaacaacagtcttggcaaggtcgaagacccgacgtcatagggcgaagagtgtcgcgtgcgggcgagggccgcgttctgctgtcattcgggcccatttgtaagcccctccttggggtaggggtttgtaatacattttgatcatgatgtacttaatatcattggaatgaccctat

SEQ ID NO: 24926 - DNA, 520 bp, Zea mays
  Clone ID: MRT4577_122739C.1
acccacaaaatcccttgttcctggccgggccagttcactttccttctttttccccataacaaaaaaaaaggcgggaaaacgtttcacaagggggggggctagtatcaaaaaaagaacttttaaacaatcaaaggaccccagggaaaaatatggaaaatggctagggctgcttcttgacccctctcgagggggttttggccaaaacattgcatatcccccttttttttttggggttttcgcccatcttcccaaaggcaacgttggcctgtcgttccagcgcttccctcaaaaaaaatttcaccctccaaaaagttgtctcgctctgggcatccataacaaaacccactttttttgctttagtcagaaagctaagattgtcttgggcaacaatttttagccccttgctaaaatcttttggagacaagtgacaaatacccgcacccaacttccttttttcgggtgggcagcattttcctgcatttggaaaccaccatttttccgagactcctccaactttttt

SEQ ID NO: 24927 - DNA, 353 bp, Zea mays
  Clone ID: MRT4577_12273C.1
gtcatgatcagaacaaaacaatttatttcttaggctcagccttaacaaacgaaaatcattacagagggatacatgaaatgaaatgaggagagggcaaaaaaacactgtatataacttctttccggcttacgcttccttccttaggacaagcaagtccatatatatcatacccttcaccctgtatggttcaggtggacttcacttcattatggtaaaagaaaactgaccaatcgcgcttttggtatagccgctcacggagatccctgtgttctggtgcaccttgaccgtcaagccttcaggaatggccatccgaacagggcggtagaatcccaggttcatcacttgagccgaat

SEQ ID NO: 24928 - DNA, 125 bp, Zea mays
  Clone ID: MRT4577_122740C.1
atgtcgcgaacactgcacagagcccgcgcaagttcgctgaaagcgcaaagcagacacagaaccccctgcacctgcagactgcagacgcaatgtcggttctcgggacgctctccggagccgctgcc

SEQ ID NO: 24929 - DNA, 198 bp, Zea mays
  Clone ID: MRT4577_122741C.1
aagaaaaacgggccttattcccgcggagaaacaaagccccccccaaaaaagcgggccggggggccggcttaacgggaagacttttggtaacgagcacaagcgcctggaccaccaaaatttttggactcgcagggggggggggtggcaacaagcaatgaggggtcttacccgagcgggaaggcccgggtttccttcttt

SEQ ID NO: 24930 - DNA, 481 bp, Zea mays
  Clone ID: MRT4577_122742C.1
gttggaactttgggctgatttatgtgcttgtacgaatacgcataagagtaaggatacgtccactaaggatgctaacgacatactggggggggatacgttcaatatggatgggacgaatactaataatctacgtgttgctactaccatcaatattattacacgtgctggccatgatcgaactcttactcggtttcggattcttaaatcaaatacaatttgttcgattcgacgttatggttatggtacgagtaccatcagttcaaggtggcttaaggatgagaacgatccactcgacacgaattcacaacatcgtatgtccaataagatcgttaatggtccttctacacacgtacacgaagatatatctccttactctattagtcgtaagacttatcacgagaacactaagacggacgatctcggtcatttcactacgactgatacgaaccatcgttttaatacgacacgtatttctaacggc

SEQ ID NO: 24931 - DNA, 125 bp, Zea mays
  Clone ID: MRT4577_122743C.1
cgatggatgggattgtccaatgtatgtggagggcgttgtgcattctgatgtcaccgtgcgccgccagacgccagtcacgggagccagtggtggtggtatcggtttcggcgtgggaccaggtaggc

SEQ ID NO: 24932 - DNA, 388 bp, Zea mays
  unsure (1)..(388): unsure at all n locations
  Clone ID: MRT4577_122744C.1
cggaattcccgggtcgacccacgcgntccgtccacgctgtacanttggacaccagacgtactatgtctcgagagcggagatatcatccatctatgggaggacaacatgcgcctagtccgttcaatatcattatgcagctccaagttcctatcgcatgatgttcagactgttagacgaagaaccgctgatattgtgatagtgaattggtcagatgaaaatgataagctattgcaacaacacatcacatatacattgcctattacatgctgctatgaagatgctaactatgagtggatcaacatcagccactgctctgttagagctttcgtagacctgtaagaaacgaaggcagcatcagctgatcatggaccacgactgaaatctctct

SEQ ID NO: 24933 - DNA, 414 bp, Zea mays
  Clone ID: MRT4577_122745C.1
ggggggccacaaaaacgggggggacaaaaaggggaaaacaaaaaacccccccccctggaaaccacgggaaacaatattggagccccaaaaaaaacaaggacccggaaccgggtagggccaaattatacattggacccaggtttcaccctggtctcaacccgttcggccccattgggggcaaaaaaaaaagggaaaccttccccaaggccctgaaaagaaaatatccaaacccaaccgggaacccaattggccccatcgttggggggccaaagggggaacagttttaaggagcttttaaaacattggcggggcaaacaaaccctaaaaaataaaaacctaaaattgggttccccacccctttggaggggccttcggggccagtctaagcccaaaaccctggcccaaaaattcaaa

SEQ ID NO: 24934 - DNA, 391 bp, Zea mays
  Clone ID: MRT4577_122746C.1
ttcctcgcgtccgggagagaacaaccgccgtgggggcctctgcacgggggggaccgaatcaacgcaagactgctaggtaatactgatggggtggtgccatcagacggaggaagctcgggacgcaggggacacgggctatgaagatgatggagctgaaaacgttgatcacacctaagaagagggagacacataaaaggacgatgtggattcagactacgaacaccatgcgagagatgaaacacctgaggcatctctggaacgagatgcactaacgatggctgcggtgaagtcaatgccggaaggagacgttgctgaagggacccaagacatgcgtttgagcagtttgaatgacgtggacaaacagaaaacggagatgccactgacacaaaaa

SEQ ID NO: 24935 - DNA, 141 bp, Zea mays
  Clone ID: MRT4577_122747C.1
attcccgggggacgccacgctcgcccgaatgtccaagctctccgtgctggctctacgcgctttggggctggggcacgcgcagtcccatatgaaccagcccggccgcacataaccgtgcgtccggccgcgggccatcactca

SEQ ID NO: 24936 - DNA, 291 bp, Zea mays
  Clone ID: MRT4577_122748C.1
accatacgtttggggtgttcctgaaacactgtccccctatatgttcgcctcttcttccgcataatatccgatatgttggtatatcgaattcttcaattgtgacggttggttcaaaggcggctaatctctactacttattaacttagcaatattaccctgccttaagggtactgtcgtgtagttctctgacacgtagggcccacttgctcctgcgtgtatgctcccggtttattacgtcacacatttcttttacttgctaagataacattaattttctcaaaagacatcatt

SEQ ID NO: 24937 - DNA, 294 bp, Zea mays
  Clone ID: MRT4577_122749C.1
caaacaataaacttattcttcttacgaacatcaatttcatctgatccatgtctcaaacttaacgggggctgaatgcatctcctggtcttgagctcagagttataaatgtccacctgttcttaaagaattccatctcatgattcatgtaacatgaaacatttgtccattttttagatggagtatattttatttaagatcattccctatatcccatgcccttagttttcatactatatctttcatttaaactgtatatgttaattacattactatttataatgtcatctattcacc

SEQ ID NO: 24938 - DNA, 2748 bp, Zea mays
  Clone ID: MRT4577_12274C.1
tcgcttgttctccctagttccgacccgaagcagggaatgagcttcggcgatctcgacggcggcgggtccaagcgcaagaagccgtacaaccgccacgcgccgcggcagatcgaacagctcgaagcgatgttcaaggaattccaccacccggacgagaagcagcgcgcgcagctgagcaggcagctgggcctggacccgcggcaggtcaagttctggttccagaaccggcgcacgcatttgaagaaccaactggagcggcaggagaacgcgaggctgaaacaggagaacgacaaactgcgcgtcgagaacctgtccatccgggaggccataagggacctggtgtgcagctgctgtggcggtccagcggtgctcggggagctgtcgcccgaagagcaccagctgcgcctcgagaatgcgaggctcagggacgagctcgctcgagtctgcaccgtcacttccaagttcattggcaagcccatgtctcacatggaactgctgctcgcgaaggagccgcatcctattacaggctcgtcactggaacttgcagttgctgttggtgttggttccggcgtgccatcgagcaaaatgcccgtctcgacgatctccgagttggccggcagcacatccagctcaacgggaacagtgaccacgcccatggtgactgcatccttgccgatggttagcattgtcattgacaagtccaagttcgcccagcttgcagtgagtgcgatgaatgagcttgtcaagatggcgcggatgaatgaaccgctgtggattccaaccattccctcacctggctcaccaatcatggagactctaaactttaaagagtacttgaaggcattctcaccatgtgttggagtgaagcctactgggtttgtgtctgaggcctctagggaatccggcattgtcaccattgacagtagcgctgctcttatggaggtcttcatggatgagagacgatggtcagacatattctactgcattgttgccaaggcatcaatcgttgaggagatcttacctggtgttgcaggaagcagaaatggtgcattgctgcttatgcaggcagaactacaaatgctttcacctcgtgtccctataagggaggttacatttctcaggttctgcaaacagcttgctgagggtgcatgggctgtagtggatgtttccattgatggactgcagacggatcagtgcctagatacaaacacgaaatgccggaggctgccttcaggttgcgtgttgcaagatacccccaatggctgcaaggtcacatgggttgagcatgcagaatatcctgaggcgtccgtgcaccagctctaccagcctcttatgcgctctggcctcgcccttggcgcagggcggtggcttgcaacactgcaacgccagtgtgagtgcttggccatcctcatgtcatcgcttgcagcgccagagcatgactcagcagcggtttctctggaaggaaaatggagcctgttgaagctggcacggaggatgatggagaacttctgcgcagggatgggcgcgtcatcttcccgcgaatggagtatgctggatggtttaacaggtagcatggggaaagacgtgcgggtcatggtgcagaacagtgtggatgaacctggggtgccaccgggtgtggtgcttagcgtcgccacagcagtatggctgcctgtgacccctgagcggctcttcaacttccttcgcgacgaggagctccgtgctgagtgggacatcctcagcaatggtggccctatgcagcaggtgctacgcattaccaagggccaactggatggcaactctgtggctctgctgagatccgatcatacagactcccacctgaacagcatcttgattctgcaagagacgtgcactgacagatctggcgcaatggtcgtgtacgccccggtggacttcccggcaatgcagcttgtgcttggtggaggggactcgaagaacgtggcgctcttgccatctggtttcgtcattctgcctgctgggtctagcgccggtggggttgggcacaagtcacgcggatcgctgctcacagtcgcattccagatccttgtgaacagccagcccacagcaaagctgacggtggagtcagtggacaccgtgtacagcctcatctcctgtaccatcgagaagatcaaggcggcacttcactgtgacgtctgttaacttgggaacaggaagcttcaggcatggaggcaaggcaacagctggtgatcagcctgagtcaagaacgaaccgcgcaaaacagtagtgacctttgctaggtggtacgggtccatagggctggcccgtagcacacagcaatggcggtggttcgggtattgactcagcctccaattgttctgggttaaattttgcattttggacctacgcctggccgggcaatgccatggttggttttggtggttttagggagtctggagtcatcggtgctttttgttggctggctcgtggttttttggtatcaggtttgcttttgtaaccatagatgtaggagagccccccttgatgttgatgatacagtcaatatcagacaaatgcagcattgtatcgtgagattccagtctcagatcactgtggatttaccttgtgtggaacagtaggacgaggagcggcagtttatgtaaaaaaaaaaaaaaaaaaaaaaaaaaaaaggagggttgtgtcatccaaaacaagcttcctgtttcgatagaggaaattgatacagttaatgactgggtgtcacagttttgt

SEQ ID NO: 24939 - DNA, 291 bp, Zea mays
  unsure (1)..(291): unsure at all n locations
  Clone ID: MRT4577_122750C.1
gtcgaactcgattncatgcctacgacaggatcnacngtnacttaggttcgtgggcagtggctaacccattggtcgctgccttcctacagtagcaacatttgctgccatacaaccggctctctttgatgaatcctgtcttgtcgaggcagcaacccatcgttggaggtgccatgttttagattacatatgagatgtactcgataatggtgccatcataccggcatgcgtttcctagaaataatcaatatattggttgagatctatcttgatgtaaaaaaaaagatgaaatac

SEQ ID NO: 24940 - DNA, 250 bp, Zea mays
  Clone ID: MRT4577_122751C.1
tgtgatgatatctgcagattcgccttagcagtggaacaacgcagagactttttttttttttttttttttttttttcttttttttttttttttttttttggggaaagaacaatttatatatcacggttccttatttggctacaagttcccgtggtccttattccacagggacaaaatttaatccactcaccccaagtgccggggggggggaccccacctgggaaccactggatgagggcgactcccgacgc

SEQ ID NO: 24941 - DNA, 421 bp, Zea mays
  Clone ID: MRT4577_122752C.1
aaaatctgataaccacccaacaccatacaagttctattcaatctcaaaaacaaatccccagggccccacaaaaaaaatagagattatacaacatcttctttatatacttgggctaaaaaaaaacaaagttatgactgtctccacacactccaaaaaaagcagtccttgtaaaaaaaaacaacagtctccataaaaactcgctaaacacggcccaaaaacaaaagaaattcattctaaaaaaaaaaactgctcgcataacaaaactataaaaattacattttcccctgcaagctaaccctcacccaaaaaaaaaggctcctcgatttttaatcccctgcccccccgccccggaaaaagctaaagaacacaggcttaacttaaatgcacatccatcctccctaaaaaaaaagaaatcccatct

SEQ ID NO: 24942 - DNA, 240 bp, Zea mays
  Clone ID: MRT4577_122753C.1
gcgaagctggatgctcatagtcgaccttgcgtccttttttagagcgcatccagaagctcaaagaggctttttactggggcgggccgaactccatggcctagccgtcatatcaccgtccagcggttgatgaggaggcctcggcagccggctaggatgaggacacctgctcccatgtcgcgcccatcgtgaagcttgaggaggtcgccgttaccaccggagaggaggacgtggtctcgcttc

SEQ ID NO: 24943 - DNA, 842 bp, Zea mays
  Clone ID: MRT4577_122754C.1
gctcgaattcggctcgagcatttccacgcctccaaagcaccagaccatccgtccatgacgacgtcgtccagcgaggtcacggtgtgctcccacctgttcacggtgagaggctacacccacacaaggggcatcggcgtcggcaggtccatcgagtcgcaggcgttcgacgcggccggccaccgctggtccgtcgtgttctacccggacggcgacgaccaggacgcgaggggccacatctctatcttcgtcaggctcatcggcagcggcggcgccggagacgtcacggtgctctacggcttcagcctcgtcgacccgagtggcgccgcgccggcgtcggaggcctccaaggcccccaaggtcgccacgttcagacattcggcgggcggcgactacagaggtatcggccgcttcatggagcaccagaggttcgaggcgtctccgtacctgcgggacgactgcttcaccatcaagtgtatcatcggcgccgtcgagaggcccggcctgccgccgctgccggcggcggcctcggagctgcaccacgatttcgaccgacttgcggtagacggcggccgttcggaggacgccatgtccgacgtcgactgaggaagccatgctgctgtgcactgtgctatgctcctcttcctctatgcaacgagcgcagctgcgcaggtgtatcatcagcaaggccgaaaataaaaaaaaaaagtaaaagaaatgaaaaccgacttgtatctggcagtccattgcaatccgatgacaatcaggaaaaaaaaaagcagtatactcatgcatacattttaaatagagtaacatttaacaaaaaaaaaaaaaaaaaagcggcc

SEQ ID NO: 24944 - DNA, 633 bp, Zea mays
  Clone ID: MRT4577_122755C.1
aaaccaaacgccgaagaagagaggagacgaaaggggatcgccgccgccgccgccgccgaggatgacgtcgatgctgtccgcgttctcgtcgtggttcgtgaacccgcgccgcaacccgctggcccgcatccacatgctcaccatctccaaccgcctcaagaactacggcctgaggtacgacgacctgtacgacccctacttcgatctggacatcaaggaggcgctcggcaggctgccccgggaggtggtcgacgcccgccaccagcgcctcaagcgcgccatggacctctccatgaagcaccagtacctccccgacgacgtccgggcactgcagacaccattcaaaagctatttgagcgacatgctggctctggtgaaaaaggaggcagcagagcgtaaagcactgggagcccttcccctctacgagagaacccttccttgaagacatttttccttgatatgcgccacagcttttgctcctcgtagcatcacaatgcatgaaataaaatgcagattatgacactgttcctccttccggtttcatgtccatggcctgtagctcgtgccccttcccaaattaattgcgacagaatttctgttgctgttgctgatataaaagtttgttttggatgt

SEQ ID NO: 24945 - DNA, 371 bp, Zea mays
  Clone ID: MRT4577_122756C.1
gttggaactacctgatcacactacttattgtagccgctctgctctacacgctggggctagatgtgaacgccatctgtatcggcatgctgctggcaacgctatcccaaactgatgtgcttgtgtttataacgtcggagaccgactgggaaaaacaggtggaggttggtcaagagatgttgaagatacaggtcatggaagagaacatacgactccaggggtccagactaaaccctcatgccggccctcaactgcactgtgtatctctagttttccactgaccaaaagaacaaaacgagggacactactgcttcacgtacaagccgatctgaggctgaaggatcatatatgggctgatggtatcgaaacacaaa

SEQ ID NO: 24946 - DNA, 211 bp, Zea mays
  Clone ID: MRT4577_122757C.1
ggggagggacaaaatctttgttgagaccatccaactttttttaggtctttggcaacaacttaaagggggaaaacgtttccaaaaaaaactttaggggggaaaagcaaggggtttccatatttacatcctactacactggtgctgggggtgcccgcattggcagcctattccccaaaggaagctgcccggcccttgactggtgctgctgggg

SEQ ID NO: 24947 - DNA, 391 bp, Zea mays
  Clone ID: MRT4577_122758C.1
gcgcgagatccactcggagggccaccgcgaccgctccggtcggttccggcgaggtgccagcctaccgcctgggcgttgctgctccgctccctctctccttgcacccgcttgctggcgtggatccagcggagctggtcccgtccttccccgccgatgagctagcgaacgaggaggcgagcgaggtgccgcgcggtcgtaagtcgtaacagcatacacagggcagacaaagctgcgattttgggggggctgttggtccagccgtggttgttggtggagataaaccacgtgaaggctggtgctctggtacatgttcgccaggcactgatggcatttggccgaggtggaaagatggacggccgccggccgtcctcatcgtcgtcgtcgtcgttct

SEQ ID NO: 24948 - DNA, 421 bp, Zea mays
  Clone ID: MRT4577_122759C.1
gtgctgagacagtgcagttgcatgttgttcaagagttatgggatatgttgtctgttgatcagccagagtctaagggggagtttgaggattctgttgaccagttaatgctcttattatccaaggaatctatgtcggctaatacactatctaaggcattcagaatttgtggacaactgcaaggcatggagatgttgatgctgcttgattcagggagttcccatagttttttgaattcagtccgcaccaccgacttatcaggttttgttccgttggacacgcccttgtcggtcagagtagccaatggcaatgtcttgctttgttcagtggagctacctaatgcacaatggtcagtgcagggtgtcactttttcttccacatttaaagtgctgcctgtacccttttatgatatcattttgggcat

SEQ ID NO: 24949 - DNA, 332 bp, Zea mays
  unsure (1)..(332): unsure at all n locations
  Clone ID: MRT4577_12275C.1
ctcgagccgctgcttaagagtaatatttatgggatctgtggacgacgatgacataacacatcacgatagcatgtgaagttaggttcctaggccagcaaacgcactagatggctatatggttctagaataaacgtgcgcggtggcattccaagcagatctagcacgacttcgtcccacacgtgttctaggctcagtacaacacgctgcacgcaggggcaaatttaggtgtgtttattggggtcagtcgaccncgattaaatttataaattctttaacataacactattaaagttcaaaaaaactattgcatatagtaaagatgaccctgatga

SEQ ID NO: 24950 - DNA, 318 bp, Zea mays
  unsure (1)..(318): unsure at all n locations
  Clone ID: MRT4577_122760C.1
gtcttcttgtgttttctagcgtttttctctgccagaagaacaggattctgcggaggattttttaagagggccgggaaggccctccacnacaagcttataaggaggagctcaccaagccttctcgtatcataagctttccaagttggcctactactactacgcttgcggcgccgaagttccgtggtcgctgctcgagaacatggaggccctctccaccatctcgatctcatcttgatgagtttagattgcctagaaacgtactccgtggctggcttcttatgtctaacctggcttcttaagtagcttcttcttattctt

SEQ ID NO: 24951 - DNA, 895 bp, Zea mays
  Clone ID: MRT4577_122761C.1
accagtcaccatcactaatgaagaaaatgttgatgaaccaccatctgttgttgctccagtggccgaaattatgcctctgcaagacatcaacaacgatgaaaatgctttggtgaatgatgtggaagagagatccaaagaagaacatccttctactgagagcctgaaaggcagcaagaggaggtcttcattctcagctaagcctgaatatccagaaaatggctccaaaaattctccagctctgccaagctacatggctgctacacaatcagcaaaggcgaaactgcggggaaatagctcaccaaaacttagctctgattcagcagagaaaaacggcttcactcgtcgtcactcccttccatcctctaacaacggtaagatggtttcacattctccacgtacacaaaggccagctaatgctggtggcaaggatggagcgaaaggtgacaaggctatgctgtcatcaagagatgcaagcgagagaccactgaaagctgagtggagacgttgaggcggcgaatcaaatccaaatcctccatttgattagcgcgaccgtttgggtggatggatcgcccttgcagtttgctcggatttgttttgtttgtgatgtaaaaaaatgatgtcgtcatcgtcggcgagatgaatgaaccggctttgttgtgatgaatccgctgggagtcaacttatttattatagggttttccgtcatgccttttgtgatgtatagctgaagtattttcccggtttgttttggttcccagacccccagacttcctcccttctccttgttgagagctgctgatgttagagagaatgagaacatgcatggattgagttgaacaatcttacccatttggggaaaaaaaaaaaaaaaaaaaaaaaaaaaaaaaaaaaaaaa

SEQ ID NO: 24952 - DNA, 327 bp, Zea mays
  Clone ID: MRT4577_122762C.1
ggaaaaggaaagggctaattttttcatattcatgagtcacaaataatccagatctaactaaaagctgctacatctggggtcggttttactatgcctgtagccctgtactaccccttgggtcccaaggttcaatgttctcatgaacatagatgttgatgaccccaaagggtcataaacgcactatcacatcatcattggcccctccagctacacatgcgagcgctgcatggtttattactctattgcaggaaaacggggatttttggcgcctgctttcatttaacttaactggggttaagccgccaagtgctaaatccatgccttaaa

SEQ ID NO: 24953 - DNA, 449 bp, Zea mays
  Clone ID: MRT4577_122763C.1
aagggaaacttgttcataattcaacttgatatccagacacccaaagacaaaacagattaaaaaaaccaaaatcttttgactaaaatatggaaagtgttccaaagcagacgagattattactggctagcaccgagccatttggggaagttatcaaactcggggtaatcactgtcggagaacataatcttgtaccacaacttgcctgctgctttgattgccaacccctcctccttggtaacgggtttcctctttttggggagcttcttcttcttagccttaactctctgtgcttcaactaaaagggacatcctttttgggggcttagcataaggattcaacttcaacatcacattgagattcttcaatggattctttttaaaaacaaacctcttcgcattctttttgatcggattcacaacactctgaaactcatctgaattgaaaatcct

SEQ ID NO: 24954 - DNA, 105 bp, Zea mays
  Clone ID: MRT4577_122764C.1
gtgcaaatgagataatgagggcgatggagcaaacactgatgataggtaagcaagctcaagatgattgtgctgctgttgtgaagaagcttagggctatgctccact

SEQ ID NO: 24955 - DNA, 279 bp, Zea mays
  Clone ID: MRT4577_122765C.1
tactcgaaccatcgaatacctacaaattttctttctaatctgtccaatcagccatcaatctagtttattactgtggaagatgttagttacctaagttgtgaatttgcttcatgacatcttagtatctgatttgaaaatcctccgtagcttctgccatgtcattgctagttatatgttcaaactcaatagccaacaacagaagtgcataaccttatgtatcgtgcattgatggattgtacaagtgatgtgtatggatcatggatgtaagaatctgatacc

SEQ ID NO: 24956 - DNA, 179 bp, Zea mays
  Clone ID: MRT4577_122766C.1
cccactgctgctgcatttgggggtgtatggcattggcccattgaccgtcctggctgatttaatggttgcaatgggttaaggacctggttttttgttggttgtgccattaatttccaattccttcaaaacctttaaaaaggaaaggccactggacctgggttctttgggttttgaataat

SEQ ID NO: 24957 - DNA, 809 bp, Zea mays
  Clone ID: MRT4577_122767C.1
aatacataggaaacgttcccgctttccttggtaacggcttggccccgaccccgcgttgatcaagcacaaaccagcggcagcactagcaccaccaccaccgccggcccccgtacgtctcccgatcggatcggccgtcgtccccgccggcgagcgagcgagcgagcgatcaagatggtgctctcccacgccgcgtcggctggatcctccgatgactccgtgcgctccaccttcgcctcccgctacgtccgcgcctccctgcccaggttccggatgccggagaactcgatcccgaaggaggcggcgtaccagatcatcaacgacgagctgatgctggacgggaacccgcggctgaacctggcgtccttcgtcaccacgtggatggagcccgagtgcaacaagctcatgatggactccatcaacaagaactacgtcgacatggacgagtaccccgtaaccacagagctccagaaccgatgtgtgaacatgatcgcgcatctgttcaatgctcctctcggggagaccgagacggccgtgggagtgggcaccgtcggctcttcggaggccatcatgctcgccgggctggccttcaagaggcgttggcagaacaagatgaaggccgccggcaagccctgcgacaagcccaacatcgtcaccggcgccaaccgtgcaggtttgcctgggagaagttcgcgcgctacttcgaggtggagctcaaggaaatgaagctgagcgaggggtactacgtgatggaccccgaagagggcgttgagatggtcgacgagaacaccatctgcgtcgccgccatcctc

SEQ ID NO: 24958 - DNA, 750 bp, Zea mays
  Clone ID: MRT4577_122768C.1
agcacggcgcacgccatccactatacaataggaaacgctcccgctttccttggtaacggcttggccccgaccccgggttgatcaagcacaaaccagcggcagctctagcaccaccaccaccgccgtcccccgatcggatcggccgtcgtccccgccggcgagcgagcgatcaggatggtgctctcccacgccgcgtcggcagggtcgtccgatgactcggtgcactccaccttcgcctcccgctacgtccgcgcctccctgcccaggttccggatgccggagaactcgatcccgaaggaggcggcgtaccagatcatcaacgacgagctgatgctggacgggaacccgcggctgaacctggcgtccttcgtcaccacgtggatggagcccgagtgcaacaagctcatgatggactccatcaacaagaactacgtcgacatggacgagtaccccgtcaccaccgagctccagaaccgatgtgtgaacatgatcgcgcatctgttcaatgctcctcttggggagacggagacagccgtgggggtgggcaccgtccgctcttcggaggccatcatgctcgccgggctggccttcaagaggaggtggcagaacaagatgaaggccgccggcaagccctgcgacaagcccaacatcgtcaccggcgcaaacgtccaagttttgctgggagaagttcgcgcgctacttcgaggtggagctcaaggaagtgaagctgagcgaggggtactacgtgat

SEQ ID NO: 24959 - DNA, 1884 bp, Zea mays
  Clone ID: MRT4577_122769C.1
ggtaacggcttaaccccgaccccgcgttgatcagacaaaccagcggcagcactagcagtctagcaccaccaccgcccccgccggcccccgtctcctgatcggatcggccgtcgtccccgccggcgagcaggatggtgctctcccacgccgcgtcggcagggtcgtccgatgagtcggtgcactccaccttcgcctcccgctacgtccgcgcctccctgcccaggttccggatgccggagaactcgatcccgaaggaggcggcgtaccagatcatcaacgacgagctgatgctggacgggaacccgcggctgaacctggcgtccttcgtcaccacctggatggagcccgagtgcaacaagctcatgatggactccatcaacaagaactacgtcgacatggacgagtaccccgtcaccaccgagctccagaaccgatgcgtgaacatgatcgcgcatctcttcaatgctcctctcggggagaccgagacggccgtgggagtgggcaccgtcggctcttcggaggccatcatgctcgccgggctggccttcaagaggcgttggcagaacaagatgaaggccgccggcaagccctgcgacaagcccaacatcgtcaccggcgccaacgtccaagtttgctgggagaagttcgcgcgctacttcgaggtggagctcaaggaagtgaagctgagcgaggggtactacgtgatggaccccgagaaggccgttgagatggtcgacgagcaacaccatctgcgtcgccgccatcctcggctccaccctcaccggcgagttcgaggacgtcaggcgcctcaacgacctcctcgcggccaacaacaggcgaacggggtgggacaccccgatccacgtggacgcggcgagcggcggcttcatcgcgcccttcctgtacccggacctggagtgggacttccggctgccgctggtcaagagcatcaacgtcagcggccacaagtacggcctcgtctacgccggcgtcggctgggtggtctggaggagcaaggaggacctccccgacgagctcatcttccacatcaactacctcggcgccgaccagcccaccttcacgctcaacttctccaaaggttccagccagattatcgcgcagtattaccagctcatccgcctcggattcgagggctacaaggacgtgatgcagaactgccgcgacaacgcggcggtactacgcgagggcatcaacaagatgggctacttcgacgtggtgtccaaggactcgggcgtgccgctggtcgccttctccctcaaggactcctccaagtacacggtgttcgaggtggccgagagcctgcgccggttcggctggatcgtgccggcctataccatgcccgccgacgccgagcacgtggccgtcatgcgcgtggtcatccgcgaggacttcagccgcgggctcgccgagcgcctcatcgcggacctgggcaagaccatggccgacatggacgcgcacgccggcaggaagcaggcgccggagcagcccaagaagtcggtgcacgacatcgagaaggaggtcaccaccttctggcggaggctggtcgccaatagcaagaagaagagcagcatggtgtgctagctgatgggcgctctgcggaggaataacgcaataacattcgtgatgcgagatgttctcacacgttttcgttttcggtttacgtctgcgtacgtgtgattcgattttttacctcacatttggtatgcttcaaatcgaccttcctgacggaattagttagaacttgtcaggacaagctcgtgaagtatttttattggagaggatgttaacatcttgagaaaatagtaaaaaaagaataataaaagataaagtgagcaatgacctttttgctcgtgccgctcgtgc

SEQ ID NO: 24960 - DNA, 772 bp, Zea mays
  Clone ID: MRT4577_12276C.1
gccgctccggccggccgggccggggtattgccgagcagaacttgaagcagaacagagccaaaaccaacccaaaaagcatttcgtgctaggacagtgaagccatggagaagaccgttgtcctgtaccctggcgtcggcgtcggccacctggtgccgatggtggaggtcgccaagctgttcctcaagcacggcctggccgtcaccgtggtgctcatcgatccgcaggtcgagtccacggacttctccgccgccgtcgcccgcgcgagggcctccaacccctccgtcgccttccacgtcctgccgccgccgcccgccgattccaactccaacagcgcgcccacgcaccccgtcatccagattttccggctcctgaaatccatgaacgctcccctcctcgacttcctccgctcgctgccctccgtcgacgcactcgtcctcgacatgttctgcgtcgacgcccaagatgtcgcggccgagctcaagctgccggtctactacttctacgcgtcggccgccgccgatctcgcgctcttcttcaacctgccgagcaagctcgccggcagtaaggtaaaggagctcggcgactctatcatcactttcccgggtgttcctccgttaaaggcttcggacttacccgaagtcacccacaacgatgaagtactcaaggccatctcaggcatgttcgaccgaatgccagatgccaacggaattctcattaattccttcgagtcgctggagacgcgggcggtgcgcgctctcaaggacgggctctg

SEQ ID NO: 24961 - DNA, 1875 bp, Zea mays
  Clone ID: MRT4577_122770C.1
actcctatgggcgattgggttcctcgaggccggccggggtcctctgatctcctcctctcatctcggacacggcaaatttaccggcaacgtacggcgaaagccagaggtccgcagccgttgagccccaagggagaggacgaaatggcgctgtccacgacgaacacgaacgccgccgagtcgcagctgcactgctccacctttgcgtcgcgctacgtgcgcaccgcgctgccgaggttcaagatcccggagcagtcgatccccaaggaggcggcgtaccagatcatcaacgacgagctgatgctggacgggaacccgcggctgaacctggcgtcgttcgtgaccacgtggatggagcccgagtgcgacaagctcatccagtcctccatcaacaagaactacgtcgacatggatgagtaccccgtcaccaccgagctccagaaccggtgcgtgaacatgatcgcgcacctgttcaacgccccgatcggcgacgacgagacggcggtcggggtggggaccgtcggctcctcggaggccatcatgctggccgggctggcgttcaagaggaagtggcagaacaagatgaaggcggcgggcaagccctacgacaagcccaacatcgtcaccggcgccaacgtccaggtgtgctgggagaagttcgccaggtacttcgaggtggagctcaaggaggtgaagctcaaggaagggtactacgtgatggaccccgagaaggccgcggagatggtggacgagaacaccatctgcgtcgccgccatcctcggctccacgctcaacggcgagttcgaggacgtcaagctgctcagcgacctgctcacggccaagaacgccgagacagggtgggacaccccgatccacgtggacgcggcgagcggcggcttcatcgcgcccttcctgtacccggagctggagtgggacttccggctgccgctggtcaagagcatcaacgtcagcggccacaagtacggcctcgtctacgccggcgtcggctgggtcatctggaggagcaaggaggacctccccgacgagctcatcttccacatcaactacctcggcgccgaccagcccaccttcacgctcaacttctccaaaggttccagccagattatcgcgcagtattaccagctcatccgcctcggattcgagggctacaaggacgtgatgcagaactgccgcgacaacgcggcggtgctccgcgagggcatcaacaagatgggctacttcgacgtggtgtccaaggactcgggcgtgccgctggtcgccttctccctcaaggactcctccaagtacacggtgttcgaggtggccgagagcctgcgccggttcggctggatcgtgccggcctacaccatgcccgccgacgcggagcacgtggccgtcatgcgcgtggtcatccgcgaggacttcagccgcgggctcgccgagcgcctcatcgcggacctgggcaagaccatggccgacatggacgcgcacgccggcaggaagcaggcgccggagcagcccaagaagtcggtgcacgacatcgagaaggaggtcaccaccttctggcggaggctggtcgccaatagcaagaagaagagcagcatggtgtgctgatgccgatgggcgctgcggaggaataacgcaatgacattcgtgatgccagacgttctcacgttttcattttcggtttacgtctgcgtacgtgtgattcgattttttacctcacattttgtatgcttcaaatcgaccttcctgacggaattagttagaacttgtcaggacaagctcgtgaagtatttttattggagaggatgttaacatcttgagaaaatagtaataaaaagaataataaaagataaagtgagcaatgacctttat

SEQ ID NO: 24962 - DNA, 341 bp, Zea mays
  Clone ID: MRT4577_122771C.1
taattttttttttttttttttttttttttttgggtttttttggcgccattcaatttcaaacccatggaattgttaaactcccctgggctttcaaaaattttatcagcacccggccggttgggaagaacatataacgagggtccaaaaaaaaagtccaggttttaaacctaggtccaaacatttttggaagacgatgctagcaaacaggtgcatccaggccaagcctagttctggggggctattggaaaactaatttatggccacggttttattcaccctgacccgagttctggggctagttttggactgggccttaaactttttagctggcttggaacccc

SEQ ID NO: 24963 - DNA, 765 bp, Zea mays
  unsure (1)..(765): unsure at all n locations
  Clone ID: MRT4577_122772C.1
gggaccctcgnagccggccgggaataagtctttaactcgtcgccattagataactcctccgttagcataactatgcgaatggcgacgtcaccatgtccctctgctctccagacattcgtcgggaccgcaccgcacgtgccgacgcctctcttcgcggaggtccgcatgacaataagaaaaacggcagcaaaggaaaactcgaggagaagctcccaaagcccgggtgacgcgacccgactacctgctctacctgggtctcttgtgcggcgcgcccccaagatatctgcccctccatcctatgcgagactatcgctgtgacgcgcgctgtgtcggaggactccgagaccctgacgagaaccgggcacttcaggtcgtccactcccgatgcgacatgctggatctacatgagctgcatgatcacgtagctgttcgaccgccatggttgccctctctgtaaggactcgtgcttctttagaccagtcgccgatcttcagcgaaggtggcttgtgctatctcagatagccgactctgatgcactgacagagtatccatcagcatctggtactgtcagttgccgatcatgcttatcatcgactcgtaccgcgtctccatggaaccgctcctagaggccgctgatccgctctaatgcgactctatcttcgatactgtcatgctcgacgactaccctgatgtcttcgcggaaatcctgatgaatgagctcctgaacggccgcctcgccatgttctccatgttcgggttcttcgt

SEQ ID NO: 24964 - DNA, 627 bp, Zea mays
  Clone ID: MRT4577_122773C.1
ttttttttttttttttatttttaatccatttattattttcattgtaaactcatacacttgttctatcatcaaccgtttataatttacgttatacacgtcatacatcacgagatgagacttaacactaacgcaccttgtgttgtaagaaacgacggccattttgaactaagtcaaatcaatttaatttttattttcttcacagatgttaggtgcataataagaggaattagtaaaaaacgttgtttttaaaaataggtaattagcgttacaatcatccgttgcttatattttttgttaaaaatgtaagcggatttgtaataatctattttgtcctgtatttattttattgagcttatttcaacctgagatgttaccatcttctctagtcagaataaaataaactaccgacaatacacatatctatataaataaaaatgaattgttgttcgttagtctgattaaaactcgagaacggctgggccgattgagctgattttggttttaaaatgtttgtagaggtccagggaagggttgaacgatacgaagttcgcgggatcagctagttttaaaataaaaataagtcatattgtaattacacttttttatataaattagggattgtatggt

SEQ ID NO: 24965 - DNA, 415 bp, Zea mays
  unsure (1)..(415): unsure at all n locations
  Clone ID: MRT4577_122774C.1
cgtgttccttgtcaagttctcataaactcataatccacaagtgcatcatatatacatagcttgctttgtgtgccgtcggaatcgcgaaatggcaagctctagttctgcacaaggcgcacactagacagaccctgagaaggtgaagctcgtcaccgtcctgagcatcgacggtggcggcgtcagagggatcatgcccgccaccatcctcgccttactagaagagaagctgcaagaactggatggaccggacgctaggatcgacgactactttgacgtcgttgccggcacgagcaccggtggtctcctggcggcgatgctcacagccactggcctgcatgaccatgacngacgtcgacagccgctcttcgacgccaaggatctggcgcagttctacatcgaccactcgcccaaaatc

SEQ ID NO: 24966 - DNA, 360 bp, Zea mays
  Clone ID: MRT4577_122775C.1
atgatctccatagtaactaagctaaacaaataccttggacaaccattgcacaaggaatttgtagtgtttatgacaataaagtctataccaaagaagtatgagacctttcatgttcaacataacattagtgtccaggataagtggaccctggatcaacttatggcacaatgtgtccaagaagaagaaagttttcaagtactcaaacagggctttattctctacgctcgtgacaatggcatttctggactgctggtggggttctatgtcagcgacctcaccatcactaggaactatgccagtgagatcgtgaagttcaagcgagagatgagcaccgagtttaagttgagcgatcttgactga

SEQ ID NO: 24967 - DNA, 640 bp, Zea mays
  Clone ID: MRT4577_122776C.1
aacaaattgctctttggttaaccctttttctgccatttggttttgacttaaagtgttcctgcattgtatccataattccatagcgccacttttctacttttcacactattattgttcacaggggttaattaatcaaaactactgcacggggtatattatctgataagctaggtatagtatttgatatggagactgattagttgtttcatctatcgtaccttgtgtgaagtttgcagaaataaattaatgtatagtttgttttgccaagttacttcaatttatatgcttttgcttctataatctatatattctatcctgtattcagggaagtttaatttgataaaaagaacaaagtgcaaccacgtacgtaccgcgtacgtactccaaacatgcacttggtattaattacaggagagtactcactccattccaaatcttttctagttatatagtttttgatatgcatatagatatatggtcaaatctatacacatccagaaatctagaatgacttacaacttagaataaagaaggtaaaaatacttcatcaaaaaattatcctagttttggactactctagtactatgacaaaatcttatgcatatatgatattaattcaatgggaatatctcaaggcata

SEQ ID NO: 24968 - DNA, 642 bp, Zea mays
  Clone ID: MRT4577_122777C.1
atggaggctgcggcgtcgaatatggatcacgcgcccatggaggaggatgcagcgccggcgtcgatggtggagatgaatgcggaggagctggaggtggccgacattctgagcgacctgagcaggctcatccgctcacgggacccgcaggagcggcgtcgggaacggagggagaggcaccgccggcggccggtgcagcgggacgacaatccctccccggaaccagctcccgcggccgcgtcctccgccgtccctagccccgaaacaccgctcgcgtacccgcagagcggcggggacgacgacgcgccgcccaaggacaagggcgaggccgccgccgctgttcgcccacgggaccagagcgcggagcagcagtacggcgaggaggcggcggcgagctcggggcaggccccggaaaacgcgcgtccactaacggtggcgacgaggaagaagaaggacacaccgtggacggtgccgtcgagagacctgactgacgagcgactgctagagtgggcaaaggcggtagaggatcggtacctgcaggccatggccaagaagcagaaggcggccgcgcggcggcgccgcgtcggcatcctgcgcgccaagggcctctcgctggtgtctagaaggatgtggcgcgctagctag

SEQ ID NO: 24969 - DNA, 1103 bp, Zea mays
  Clone ID: MRT4577_122778C.1
tctcacagcacaacacaacacaaggcgcggggggggcagcggggcaccaccccctcctccggccgggaccctcgctccccaaatctctcctcactccgccctctctccgctccgctagacccgcccatgaggatcaggaggcggcctccgggccagcctctcgcctacctgctgccctcagatccatccgccgcgccgcagtcgccgccgcgtgcgtcgtcgatagatcgtcaggagcgtcctcctccgcccccggggggcaagcaaggggagggggagttgcacttgcacccggcaacaaatgattcccccgcacccgcggatctcgaggacggccgcagccgctcctccgcgctccggcgcccagcattgctgccgcagttgcaggagcaggacgacgcggtggagcagcgcagccgctgcggcggcctaggtgcgcaacaacggcaacgacaggggccttcagatggccgcagcagcctagacaatggtcgcgactgccacgtgccggagccggtgacgatccaggccggagagcgtcgtctcagcaacggcgtcggcgcagcagcggtggcgacaacgacgacagcaacagcgggcgcgaaggcgacgaggcagcagcaagaggcaaagcaggataccggcggcggcgcgaggaggcccgcgcggggccctgcaggcgcgctgatggaggggtcgcggtgcagccggaagaacgggcgcgggtggcggtgcagccagccgacgctggtgggctacgctctctgccagtaccacctcggcaagggccgtatgcggagcgggagcgccgcgaccggcgggcgcggcccaggccagctcggacgcaccgagcacgcgaagaaaacctccgccgctgcgcccaaggcggacgtgccgctgccgctgccgccgccgagcgtgcagcgctgctagaggcgcgcgcacatggctgtgatcccccccccccggggaacgcaagattcttggacatcgtggtggggttgcatatcatcctggcggtgcagtggtggcgactggaattcttttgttgcgtttctaaacattaattaatttaaatgttgtcctgcccacgtaccgtggct

SEQ ID NO: 24970 - DNA, 459 bp, Zea mays
  Clone ID: MRT4577_122779C.1
aaacaaaaaataacactgggggtccacatgcctcagcagaaacccaaagcaaaaaagagggggggggacaaacaagcctgggcattgggcttcctttttgggaaaaaaacgcggcatatggggaatcttccaaacaacagggggggggggaacactacaggcccctaaaaaaatttttttaaaaaaaaacaaaaacaaaaggggcggataataatttggcaagcatacctccagcaagaaaaaaatcggggggggggacaaaaatagcgctgactgaataacaaattagggggggaaaaaccatctggaccttctcaaagagattcgactccgatccattgccacaccaacaccacggggggggccccaagggacaactttaaatctgcctcgggggggaagctgccatcaacaactaacatcttaaaaaagaaggcggaggcaacttacaaccccggg

SEQ ID NO: 24971 - DNA, 287 bp, Zea mays
  Clone ID: MRT4577_12277C.1
cacctcaattgttgagaagcaagctgttgtttgggtgcgtataccagggatacttcatgatacatgaaaaccgtctgtcgtcaagtgagacaaggttgttcaggctggagagaacaggtccgtgcaaacttgaaatgaatgatggtatacgagataaggttagtagaaacaggtaactggtaagaggccatacaggacacttcttttgaaaagcagggcaacaccaacacgatcggacgacacgacttcttcgccggggcacgccaaaacacgggatctggcgtagc

SEQ ID NO: 24972 - DNA, 255 bp, Zea mays
  Clone ID: MRT4577_122780C.1
gttagtcagttgacacaggaatggttctaagatacaactcctctgaagtcatatcgggtcaagacctaacagtctatggtgccctttcctctcttgcttcttttgaccgttcatacctgaagagcactttcactgacaatatcaactttcgcaactatctgcatcttgtgcctgaagtacagcagctggttactgatctatatgcaactcgttatcgatcttgcctcgcatcatcttgaaaagctaaaacctaac

SEQ ID NO: 24973 - DNA, 511 bp, Zea mays
  unsure (1)..(511): unsure at all n locations
  Clone ID: MRT4577_122781C.1
ggcgctggccgngctcctggcggctgccgtggtggctcccccggccgcggtgcgcgcggcgntgtcgtgttccaccgtgtccagcacgctgatgccgtgcctgccgnncgttttttttttttttttcntgccgccccgggggtggtggggcggttttttttttttgctgcnncnngccngcgggggcggggagggccgcaccatctgcggctgcctcaagaacgtcgcctacggcgccaacgggagcggcacctacatcagccgcgccgccgcgctgcccagcaagtgcggcgtcgccctgccgttcngatcagcccnacgtttactgctcacgattattaagtgaggcgtctgtgcgcgtctccggcggggtgctgctggcgctgcgggngtgcttatttgctctggtttttagcttatcgggtgtcctgctcttgtcttttttgggtttgggtcgtcgctcccgccgtccgggttcgtgtgctgtttcgcgggcgggcgttgctgaccg

SEQ ID NO: 24974 - DNA, 517 bp, Zea mays
  Clone ID: MRT4577_122782C.1
ctgaagggggaccttttatttcaaacgtttcaaataatcagggaaaggagttcccataatcgcggaaatctacgggaatccccaattgggaagggcaacgggaatgaaaatgatttggcatactggtgcggcctgcaaatgttcccctagctcaggcctttttaattcagggggggggcccagggaaaaaaaaggcgacataataaaaacggttcaaaagcgtcccccagaaaagcaccacaacttcggcaaggatttcaaaggttcaagttggcccccacccttaatctgagctcgtaaacaacagcgtaaaaaaacccctccgggttcaggaaagggctcctcgggatatttaaaaatccctgaacaaaaagggcaagggccttggtaattttcccaaactcgacgggtccaacccaggcagcctaaagcttctgggggaagtcaagtagtctaacattgtcataaagctttgccctgtgggcaagtccttttgtccacccaaaaatgaggcaac

SEQ ID NO: 24975 - DNA, 651 bp, Zea mays
  Clone ID: MRT4577_122783C.1
cggacgcgtgggattccgtagagaaaaagtgatattcatgttgatgctgttctgaatgtgactcaggcaattttgggagggacagttcaagtcccaactcttagtggagacgttgttctaaaggtcaaacctggtactcaacctggtcagaaggtagttctgagaggaaaagggatcaaggcaagaaactcaccatactatggagatcaatatgtccatttcaatgtcaccatccctatgaatttgacaccaagacagcgggtgctgattgaggaattcgcgaaggaagagcaaggcgaagatgagaaggacgcgaaggcagccggggcatcaggatagcctattttaggagccaatccacattccaatagtgccttagctgatctttataccgtgaggtagaataggctgctgcctgaaattcgcaggcaacatatagctggttgcatggaatactggaatttccaccgcaacatatagatctttgtttgggattttgtagctggaataatactagatcgcccgtgcctgatatgttcaatcctaagcctaatgctagcagggcgtgcaaggactcttgtacaattttgttgatcagggtgaccagatgtaaaaacacacggtaccaatgccaattcatgttttctgtcg

SEQ ID NO: 24976 - DNA, 823 bp, Zea mays
  Clone ID: MRT4577_122784C.1
atcatagttcgagctgatacttccactggccctccgatgaagataagctgctaccctccttactaagaaccatgctctgggttctacacatcatgcccatgttctacatgatatgtggcagcatcgttgaggagacaactgctctcatacacatccggtccacgttggagggaaggtacagtgttcctgcttcttggaaacaaagcgatgactgctgctcgtgggaacgagtccgatgcaacaacggcagaagagtggtagatctcaacttgtcggatctgaggctgaactcaaccaccggaggtgggtgctggaatctgaacttggcgattttttcagcatttcatgagctccagcagctggatttgtcttacaatcaggcctgtttacaaagctttgatggtcttcaagggctaactaagcttcgttatctcaacctcagtgacaacaacttgatggggaggagtattgatgtgttcagatatctcggcaagttggtttctcttgaagtgataaatcttgacaggaacaacatgagtggtgctcttcatgatacagctttcagaaacttgaagaacctgagggaactgcatttaagatccaatcggttgagtggaagcatcccgggatcgttatttgagctccagctacttgaattcttggatctttctacaaaccaccttgaaggacacatacctataagtctagcttcgaatctgtcttcgtcactccacactctgaaactatccgataaccatcttaatgggacgtttgatttcttctggctaagagctgcaccatgctcagacggtgagcttgagcc

SEQ ID NO: 24977 - DNA, 1764 bp, Zea mays
  Clone ID: MRT4577_122785C.1
ccctcgaaggcggtggggccgggcaattttgggagggtcagttcaagtcccaactctcagccgccacgtgtccctcgaggccccagcgcaactgacaacaccggcctccgagaagcagcgcaggcgcagggcattccagaacgttcggcggcggcgaggcgacacgcccaccaccagtcagccgccccgccacagccatgcgcctccacgccggcgcacgcctcgcgctcctgctcgcccgccgctccctctcctcctccccccgtatcccgcgggtgcacacagggatacggagcgaggcgccctcccggagctctcccttctatccgccgagcagcgcccgcaggtccttccacgggaccaggccggtggcggcaagggactactacgatgtgctcggcgtcagcaagagcgccagccaggcggagataaaaaaggcctattatgggcttgcaaagaagctccatccagacacaaataaaggtgatgcggatgcagaacgcaagtttcaagaggttcaacgagcttatgagactctaaaggatgaacaaaaaagatcattatatgatcaggttggccctgatcagtatgagaaaactgcttctggcggaggcggaactggcttcgagggtggttttggaaatccatttgaggatatttttggtggtggcggtggcggtggtggaatgaatgatttctttaggaacatttttggggatagggactttggaggacgagatgttaaggttgcactcgaactatcatttatggaagcagttcaagggtgcagcaaaacggtcaccttccaaacgtctgtaacatgtgaaatctgtggtggagccggtgtgcctcctggaaccacacctgaaacatgtctatcttgcaggggttcaggatttatattcatgcaaaccgggcccttcaggatgcaatcaacctgcacaaaatgtggtggttctgggaaaactgtgaaggaattctgcaaggcatgcagaggaaacaaagttgtgcctggaaggaaatcagtccgccttgacatactgcctggtttggataatgaggataccataaaggtggttcgatcaggtggagaagacccagatggccgtccaggtgatctttatgtgaccctcgaggttcgtgaggatcctgttttccgaagagagaaaggtgatattcatgttgatgctgtcctgaatgtgactcaggcaattttgggagggacagttcaagtcccaactctcagtggagacgttgttctaaaggtcaagcccggtactcaacctggtcagaaggtagttctgagaggaaaagggatcaagacaagaaactcaccgtactacggagatcaatatgtccatttcaatgtcaacatccccgaaaatttgacgtctagacagcgggagctgatcgaggaattcgcgaaggaggagcaaggcgaagacgagaaggacgccaaggcagcagctggagcatcggggggatagccggttttaggagccacagtagtgccttttagctggtatttataccgtgaccatagacctgtctcaaattcgcagcggaaaaaatatatagataggtctttgtttcggattttgtagctggaataaatggataatacgtctagaactgattttctgtcttctttttcaaaaatctgctaagcatgatcccttccaaaaaaaaaaaaaaaaaaaaaaaaaaaaaaaaaaaaaaaaaaaaaaaaaaaaaactcgagactagttctctctctcctcgtgc

SEQ ID NO: 24978 - DNA, 460 bp, Zea mays
  Clone ID: MRT4577_122786C.1
ggccgcttttttttttttttttttgttttttttttttttttttttttttttttttttttttttttttttttttttttttttttttttttttttaaggacaaggggtctaaaaaggcccgctttgggcaaaaaagaaaataaacaaccccaacttttaaaaacaagacggagggcattttaaacgaaggggaccaacccctcccgggataccgggtttttggaccggaaaggcccttttatcaaacccgccgggtctaagcctttattgtgaacgtatacaatccccataaagacaggggaaaataaaaacatgggggggctggggttccaacggcccctttaaaaggccacaggtcggggaacatgcgaaaggatacctccttgactaaggaccccccctggggggggcaaccgagccttggattaaactcccccgcggggaacttggcgggaacggggc

SEQ ID NO: 24979 - DNA, 254 bp, Zea mays
  Clone ID: MRT4577_122787C.1
cgctacgcgctactgctacaccaagcagagctgcggctaccccatgtgcagcaagccggcgagagacttctatatccacagcatatcgcccaaccgcgacgactgcacatgcactcataactgcatctccaacaacgccttcaacccgaggaaggtgagcgagctaatgagcagcctgcatgccaagaggccgacgctggcatgcccgaccaactacggtgtgcacttctggggccacgagagggagaagcacg

SEQ ID NO: 24980 - DNA, 438 bp, Zea mays
  Clone ID: MRT4577_122788C.1
cggacgcgtgggcgcggaccgtgagtacggtgcttagtcggacagcgaggaggagaggaggctccttatggcaaagaccttggccaagtcccgtgcgccggaacccactaatttaaagggagcgccgccctccaagaagccaaagttcaggtgaatgctgccttcgcaattcgttcgtgccaaagtgcagcagctttaagggagcaccacctccaaaaaagcaattttttttaatgggacttcctttaacttttgccccccgagtttaactttttttatagattgggattttttttttttaaaatttccaaaagtttcttttttctcttctatttttttttctttcttatttttttccttttatatggtacgctttattctttttattttttttcaataatcttttttctattcctacttttccatatttttttttaa

SEQ ID NO: 24981 - DNA, 568 bp, Zea mays
  Clone ID: MRT4577_122789C.1
cacacaccgaacattgcggaagagcataaacttgcactggacacaccatgaccatgcggctgctcctagtgtggaacttgaagaccaagaggactttgaactgcgcatgtctcgccaccttgaagcccttattacatcggatccatcgctgtattaaggtcccactcctcgctcacgaagcagacacactcgagattgtttacaacgtcacatcaatggtgaaggcctgactggtcacactaatatcaatggcaacaattccacactgagctggagctgttacatgtcaagggaatccagcatgattgcataaccgcatgctgaagagcttgagcaatacatgatggagggtacctacaaccacaaggtaatcgctatagacgatgagccacatgagaccaacatttacttgatgaaccatgtcgacaaaacacataaacaggagatcgactggtacatcgaaaaggggcataaatctctatatgacagtgaagcaaaacacatgattatggccaaatatcgaccaagagcctgacaaaggcctcactgaagagcaccagtgaaggaa

SEQ ID NO: 24982 - DNA, 277 bp, Zea mays
  Clone ID: MRT4577_12278C.1
ggggaatactttctctggagacacaggccaagcgaggtcacattattcatttttgtacttcggatatgtaaacaccagcgggatctctgtgggtgagcacacataccggagctcaaggtcctttctcgaaaaacttcgggggttaccaactgctgctggttttacacggtgacgcggcgccagccacccgacacattcgggaacagaggtgtcccctcttagatacaatgcctatcttatttacaggggaaactttattttcgggcacgccacgggt

SEQ ID NO: 24983 - DNA, 228 bp, Zea mays
  Clone ID: MRT4577_122790C.1
aaaaaaaaaagaagggatccgcttcaagactttagtgggactatttgtttacccccagggatcctttctatgatgacttcagaaacccaggtctggataataggttccacccctaattgcctcacaaaaacctttgctaataaacgggcccagccattttgttttctccctgtcggggattatcttttacatgtttaccccgcagcagaaaaacctgcttgccttggc

SEQ ID NO: 24984 - DNA, 325 bp, Zea mays
  Clone ID: MRT4577_122791C.1
atcttctttacctttttctactccttctctcacttttcgttcaccgtttcttttgttcacgttttctgtgcctgctaagaagctctcggacaccttctttgcgagatccggcggcgtgggcggcaagctggacgacagcccacaaaccggaggagcgcgcgcaccggacagacgacgatgaacgttaccaccctttggcgggaccgctgctggaggcttctttgatctcagaaagcgaacaccgcggtcacagaagcgactgagatggccttggctttgcgatcgagtactcttggagtactttataaagcggacacttgaaact

SEQ ID NO: 24985 - DNA, 380 bp, Zea mays
  Clone ID: MRT4577_122792C.1
ccggggagaccctatcctttccccatcccgggtcaccagtcatgcctacctctcccgtccgccgagccggcgcgcggcttcccttccactcccgagccaacagacatgccggaaagctcacgaagacgggaggtgctgagcgcaccggggggaagggaagcgtgcgcaggaagaagaaggcaggccacaagactacaaccacacatgacagaggggggggggcacctcgagaagaataggagcgaacagcattaccgtggtattgaagaggtcaacatcgttaaggaggatgccgatattgagaacgtaaagcctaaaggggaagcgagcaatgggggctaagacaagggcggacagaggaacccgacagacaaagaagc

SEQ ID NO: 24986 - DNA, 513 bp, Zea mays
  Clone ID: MRT4577_122793C.1
cataaaacaaacaaaggcaagggctaacctacctaataaagaacaaaaaaaaaaaaaaaagcaccaaaaaaaaaaccactacaacaaaaaacagaaggtcgtgccccttagaggccccaggtataaggaactcgtgcctgggaaagcaagcatcttatatcgggcggccgggaaagaactcttgtgggcgactctttaaaatgacaggattcgggaacagaccttgctggggctcaccataatttccttggtgctcctccctgttgtaccattggttcatagatagcaacagatctccttgctaaacgccttctcaattgtaggctgcgttagggccaaatactagcctctcccatggtgattacattaaggggtgggcaagattcacttattcatgtttgttcaccctttcttgcactcgccgactttcctcatgtttaactttgaatccttttattcaacacaagttgataaaaatttcctcgctgagttaaaaatggggggctcctttta

SEQ ID NO: 24987 - DNA, 202 bp, Zea mays
  Clone ID: MRT4577_122794C.1
gtccgcccacgcatccgccgttggccgccgaaaacgggaagtccgcaagggttgttccgctggcctcaaacaaggtggtgccccttttaatgggaaccaaatataacccaaccgtggcctccaagctccgaatgaagggcctcaaggccctccccttggagaacttttccccgaaactgaaaacctccggaacaacaatggg

SEQ ID NO: 24988 - DNA, 1212 bp, Zea mays
  Clone ID: MRT4577_122795C.1
gtgggggagagatctttgggtgcttcatgtcggtagtctatccggggcaagaaattaaacgtgtttagaggatgtcccaagacggtgtagaatcgactagggacaattgacaaagaagatgagaaggatggatcttgcctccaagatcttagggtcgtcttggggtcgatagaccacccaagatagatctagactacgtagagtcgaatataagtggaggtggatatgtggaaagttacaactaaagctacgttacatctactcctaaggcagtaaaggtaaataaagtagattagtttgattggaatgtgtttgggggttctcaatcgatcgtaccccttcatatatataaggggtgaggtctagatccgtttctaggcgatagccaacagatctctcgtgatttgatggataaccacgcatgagataaggatgattgcccgtgttaatctgatcgcagggcgcggaccgtctaggcctcagagctggaccgtccgccacttttggtgttcaacatgatgttagaggatgattttgaggctgccataaattattaccataagtgaggcgggccagaggctatgatggagcgggagacagatcgagcgttggtgatgccgctgccgcacccgatggacgtggcacgagcaggaggcaccgacgaaggcggtgcccttcgcaactacgacgtcagtttcggtcaaggagaagcgaagcctcctcgggacgccagatccggacatcgaggtgattgtgctgttcgcgcagttgctgcggcagcggatttgggcggttccttggtagcatggagtcctcagacagaagatggaaacatccttccagctgcttaaacaggtcggtcctgctatgactgcaaccaggcctaaaggcatgtaaggaacgactgatgccgtaacgatgggccacgaaaaaggagtttcctatttttctatagcttatcggggggttatctgtaggttttaagtgcaacacacttcagaatctaggcattaagctggtgctgtcgagtgccgactagctagggacactaactaggccgacatacaaaatggaatgaaatgtgtcgttctaattttatttgctaggaaaatggtgatttctttatactgaaattaacctggtatttttctctatttttactgtctaccatgacttcgattatagtatactctgcaataataatgttgctag

SEQ ID NO: 24989 - DNA, 465 bp, Zea mays
  Clone ID: MRT4577_122796C.1
acaagcttttttttttttttttttttttttttttgtttttttttttttttttttttttttataatttttcctttttctttttctttttaaaaaggaaccccagcccccaccccgccgagggcaaaggcccccacaccggggccccgcccggggggaacccagccagagcccaacccgggggaaaagaggggccaacccgcaaccccgggaaaaaagggcaaccgggaacaaaaccacaaaaaacacgggccccaaaaaaaaagggaaaaccccggggagcccaaagggggaaccaacccacaaaaaatggggagaccccccgggcccccctccaaaaggaaaaccccaccgccccgggggaggaaggaaacggccaaagcccggggaaaggccgttggggaaaggggcgctaatccccgtcccccggcaggggagaggggggctcggtcaatcgggggggggaag

SEQ ID NO: 24990 - DNA, 167 bp, Zea mays
  Clone ID: MRT4577_122797C.1
cgtccgggcggtggtggtactgaagccgacggtgacacgtagcacgtctataccgatccagtgcctcaacgctgcctggcagccgaacgcgaagaataagagcttctgtgatcgccgccgggcgcaggtgtttctgtgggaccatatatccaacttggtcaacatcg

SEQ ID NO: 24991 - DNA, 382 bp, Zea mays
  Clone ID: MRT4577_122798C.1
agcagtggtaccaacgcaaagtaccgggattttagaatatattctttgataatatactgagcaggggtatacttacaaacttagttgggatatgttacaatattcacatgtcatcagttaatctttggggctaatttctgttggccccaagttttgaaaaaaaaaaaaaaaaaaaaggaaggggccctctgtttttttccccctgtttaggggcgttttcgggcaatttgtggccagttgcgggtggttcggccatggataaaaagcaccatgttcaccctatgatgagacaatccaccatacaaggatggagacttatgaagaagaagtagggaaaaccttgggctagcgaatattagagaaagaccacttaattcacatt

SEQ ID NO: 24992 - DNA, 430 bp, Zea mays
  Clone ID: MRT4577_122799C.1
cggacatcgcggtgcgccggttccgctcgcgcggcgcggtggcgcgggagccggcggcggcgtcgcgcgccgcggcgttcctgcgcctgcacgggctccaccaccaccgcccgtccttcacactacgagcagctgcgcgccgccaccagagggcttcgacgcggcgcggtaatctcggggacggcggcttccggacggtgtttctcgcgtacctaccgacctccgcccgtcctggcgccgacaagcgcctgcacgtgccgacgtctacgttcccgtccccgtcccagtcggtcccctgcgtctgcgacgcattacgaaggtggtatgcagcgaggtgctgatcctgtccgagctccgacactgcgcacctcgaacgcctccacgagaggtgcgcggacccgctcacgctgatcatgatggacaactgctt

SEQ ID NO: 24993 - DNA, 1320 bp, Zea mays
  Clone ID: MRT4577_12279C.1
gcatgatgctgagtacttcactgctgactggccgcatgacaacaggccgtttctttctcggtctatgcacccagcagaacacccgtcgtatatgcacctgcaggtgaagaggacgaatagggcacacccgcacaacagcggttatcggggaagaacttcaggatgtactccactgctggtggcctgacaccactgcgagatgcgaccacgcgcgatgctgccggatgttgtcaatcgagcccgcgtggcaggacgatcggcttattcaggtggataggttagcttatcgatgagctctcgctttcgaggtgactggtgaaggaaagtggccccgcgcccacacatgtggtttgtgtacaatatcgccacccagtagcgcatcggtatcacttgaatttcgcggcgaggagcgtgtcatggtgttcaccatgcgcgggggcaaggacgccgtggacgccgcggtggtgcgcccgggccggctggacgtgcacatccagttcacgctctgcgacttcgaggccttcaaggcgctggccagcaactacctggggctcaaggaccacaagctgtacccgcaggtggaggaggggttccacgccgccggcgcccgcctcagcccggccgagcttggcgagatcatgctggccaaccgcgcgtccccgagccgcgcgctccgcagcgtgatcaccaagctccagcacgtcgcgtccggaggcgccgcggtgccgcggaacccggcgcacaggcggaacacgagctggtccggcgcctggaccggacaccagtgggaggaccaggcccagccggcgcgagccagcgcggtctccgtggaggtcgacgagacggccgccggggcaccggcgacgtgcggcggggtgttcggaaaggaggcgcccatgagggagttcaagaagctgtacgggctgatcaaggtcaggagccggagggagggcgccggcgccgtgccactggaaggcgacgcgcacgggccgccgacgccgggcaaccatgacagggagcggtgatcgtcgtggatggtagaattgtagtggtgtgcaaaaagaaagcatttttatttctttctcttttttttcttgttattgttacagtttattacactactctactaatgtgtcagtgactgcaagtaggaatggcaataggtgaattggatggagcaaaaatccgcctccgatcaacctggccacggtctcaactgcgagtgtaattttaaacccacagtcgaacccgtcgagtttcaggtcacctcaggtttttacttagtgtgcacttttaaacaatataagcaattaaaacaat

SEQ ID NO: 24994 - DNA, 384 bp, Zea mays
  Clone ID: MRT4577_1227C.1
aaaaaacccagggcgggggaaggggttttcaaatcatccaccccccaaaggaaaaccccctttcaaaaaattttattctttttggaccacccacccaacccaggtaaagaccctttaaaaaaaaataaggggttttagggccccattgggggaaccaaaatttaaaaagaaaacataaaaattttaaccggcccccctttgaaaaaacccccctcccttcaaaaaggcgaaaaggggaaaaaacaaagctaagggtttacccccaaacaaaaggaacaggtggagccaaaccaaaaacatgggtggcacactacatggacaatttactggaaaaaaagaagcttttgaattacaaagaagggcatccaaaagggatgcccttac

SEQ ID NO: 24995 - DNA, 327 bp, Zea mays
  Clone ID: MRT4577_122800C.1
gaccgcgccgaggtccccggcggcaccccgggggcgtgggcgtggcgacgctgccgcgcggggctgacctccaatggcgcacaagaaggggggccggaggcaccataaaaggcaaggagctccaagggccagcgcctcggggtcaagaattgcggcgaaccagctcgccaagcccggcgccatcatcatccgccagcgcggaaccaaggtttatcctgcaaataatgtgggaaagggcaaggatcacaccctcttttccttgattggaggactttgcaagtttgacaaacatggaccggacaggaaaagggcaagcctctacccata

SEQ ID NO: 24996 - DNA, 321 bp, Zea mays
  Clone ID: MRT4577_122801C.1
atgccgaaagaaattccctcgtacattgttagtcatcagacacacaccaccatacgctcttgcttaaacaaaaaggtggacgatgagctggacggcgtgatgacgtcgtcgtcggatgcggtgtccagaacaacccgagagtcgtcgacgttggcgacaaccatgaggcccccttgcttaacgatggacaacgcggtacagctactctggaccgcgtccaagcggcggctttgcgagagtttgtcatacacaacggcgcatgcgaccacgtatgactgcgagtgcctcctgctcatggtgtttgttcagggtttcaagtaa

SEQ ID NO: 24997 - DNA, 363 bp, Zea mays
  Clone ID: MRT4577_122802C.1
aagaaacatccccgccttttcctctgcctcatgtgagagaacagagaagccgagcgagatcggaggatgctgctgaggagctcgtccacgccgttcccgctccccttcctctccacctcctcctcctccctgcacctccgccgcgccttctccgacgcccacctcccctccctccacccgccgtcatccaccctcaacgacgccggcaggaccagcaaccccggaggcggcggcctccacacggagctctccttctccgtctacaacaccttcggcaagggcgaggccgtactcgccccgctggcgtcgccaccccgctcccagtcccagggacaggaagggggtcggcagcagccgccgacg

SEQ ID NO: 24998 - DNA, 444 bp, Zea mays
  Clone ID: MRT4577_122803C.1
cgtgcgtgaagcttggcacctattacacggccgacctttgtgtttttttttttttgttttttttggtgtttttttttttcatggttattagggcaattgcgggatgagaatggggtaaaagccctaatcctgatgtttccctttacattaaactatgggccctggagctccatacatagcatgggtccgtttggggacacatatcatgccacaattttttagatgtgggcatgaatatatactattaaacacgtgggtttacacctgttgggaacttatgtatgtacaagatcggggtaacaaattggacatgctattaaggcgcaaaactccagggctctatgggatttggcaaatccaatcctgttttagtttgaagtaaaacagtgtggtgggcccttataaaacatgactaagtttccaggaaggaccacgagggggcgg

SEQ ID NO: 24999 - DNA, 383 bp, Zea mays
  Clone ID: MRT4577_122804C.1
ggaacggacccacccaaaactggtttaaaggcccggggtaccccacagggacatactgacatgatttccccaaaggcaggactggtgggatgaaaaatttttgaaacacctggaagcgggggagccccgggcaacccgcaaggccttttttggggaagggggctaggaactccgggaccgtaacttttttgtaaagggcccttcccgccccgttttttttttccgggggaaaaaaccccccgagggggccatacaccctcggggatctcggaatgcccccgttgaaaaaacaccccactgaaacttttgccggggccctgttccggttaaccaccacccggggctccacccttttaaaccccccgttggtgaccaagtggaaa

SEQ ID NO: 25000 - DNA, 536 bp, Zea mays
  Clone ID: MRT4577_122805C.1
gcaaagtatggctcatctatacaacaaaccaaaagcataaagacagttctattacacggaccacaaataacagcgcgctcccaacatagggcccggagacgcccatggatctatacataaacctgcctctgacggaacggggcacaagcgaaccagactggactgactacgccggacgcgggactgaagaaccggacccgcgtctatggtgccggctcctgcggggacactttctcggaccaaggtcgagagaacgtcagacaaatggatggagacccaccgggccatgccccatgcacagggctaatatccgtacaccccgtgccgcccatcctgcactccgggctgctcccggtggactcaacacttgactaaacatgcactctgaaaagtgccttttggtacgcgtacccattgtgtaggatttgtggcatcactacgagccttaaacgctagctggcaagctggagagaacaaacctatggcccacgagtatcatcagacgcctacactttgttcctactgtgctggggcca

SEQ ID NO: 25001 - DNA, 609 bp, Zea mays
  Clone ID: MRT4577_122806C.1
cctcttgtggaacgaagggttccattgttattaacaggtcactcatttaagtacatctctacagataagttacaaatagcagtatatttaccaaaatgaagtacaaataaagttaatcacctacaaattttaatgaccattaagaaggtacagtagagaagggcaggtctggtactgtggtgagagttgtctcagtgagtcatcaggtcacaggttcgaagcagcctccccgcaattgcggggtaagacttgcctcggtttatcctttctccagaccccactcatattgaagcttccaacgttgggtctgccctaacagtagaggctaaagcgaagtgtaaataggacatttagttccaacagcttttttaagctttgtttcggcttctggcagcttctggccaccaaaagctgctgcggactgccaaacgctcagcttttcagccagcttctataaaattcgttggggcaaaaatcatccaaaatcaacataagcacataatcgattcagtcgttgtaatagtaggattccgtcactttctagatcctgagtcctatgaacaactttatcttcctcatatgtaatcgtaatgatactcagattctccc

SEQ ID NO: 25002 - DNA, 243 bp, Zea mays
  Clone ID: MRT4577_122807C.1
atattttttttttttttttatacttttacagggtctgtttttacaattgttgggcatgcataaatgatactgccagcaccattgaacatctgtttaagtataataggttcatctccacgaaaaaatcaacgcgcactccattctgtatacacttattagttccatgggaactgaaccaattacttaccaccaattagcccaatcccatagtagcaatgctttaaacacgtgcctttgcttcct

SEQ ID NO: 25003 - DNA, 515 bp, Zea mays
  Clone ID: MRT4577_122808C.1
ttgggtacctcgaggccggccggggcggacacgtccaccccacagcagcacagatcgctccttccagtgtcccagccagtcctccggaatgcagtccttgcttgcaggaatccccgcgggcggtgccgcggcggcggcagccgtcggtgggctggtcgcagccgccgcgcttgccgagagggccgaccagaagaaccgcctcaacttgcccccagctgttcctggtttacctatcattgggaaccttcatcagctgaaagaaaaaaagcctcatcagacatttgcaagatggtctgaagaatatgggccaatatacactataagaactggtgcttcttctgtggtggttgtcaattctgcagaagttgccaaagaggctatggttgcaaaatattcatccataaatactcggaagctacctaaggcactttcagcgctcacacgagacaaaacgatcgtagctatgagcgaccagtgtgagctatacaaaatggcgaagcgctataatatggcga

SEQ ID NO: 25004 - DNA, 332 bp, Zea mays
  unsure (1)..(332): unsure at all n locations
  Clone ID: MRT4577_122809C.1
gcannnnagttagcacaatagtgtaccaacaatggcagccaaaatattttgcctccttatgctccttggtctttctgcaagtgctgctacggcgaccattttcccacaatgctcacaagctcctatagcttcccttcttcccccgtacctctcaccagcggtgtcttcggttgtgaaaacccaattttcaccctatggatcacaggcatcgagctggatctaccttatacccttgtctcaacatatcagctatacagagtaccttgtgcttattgccaaacataggcacacactacaacactggctagaacctgctgctacttagcacacag

SEQ ID NO: 25005 - DNA, 898 bp, Zea mays
  unsure (1)..(898): unsure at all n locations
  Clone ID: MRT4577_12280C.1
nccacgcgtccgagaactgaaacggaactccctctctgcctcatggtctctgcggcggcggaatccgatccacgcatcttcgctcagacttggtggtgtacgagcagccatagatgtgcagacatccctattggaagaagatccgaacaagaattatcaagaagacaaaaggagtgttgaaacaggagtgcatcaactttcatgagataatgatccagtggacgtgccaatgacaaggtcatagaagaagctatgcttgaggaagctatgagtgactgaaggatttcattttccgtactatcatgtttcaactttcattggccagtcatcaaagaagtatatgatgtgtttggatttggggttctgttagtcaagttgatcattggtcagaaggcgttggattttggaagagtagcaaatcagaaaggtggaatgctcgactaggttaagaaacttcataaagaaaagcagctacctttctttggtggacaaaggcctgggtagcaactaggacagggttgagtcagtaccacttgtctcactggcctagaatgttcgaggtgatcaggtggaaggagacatgctcacacagagatgggaggtgtcgtagaacgtagacacgctagagttcgtctcatcggagctcctacttcaaaagtacatggattttgcagcggacgaatgctcgcttggtgtagaacccatggagctctttggactaaggtgaccatctgatcgatcgaatcggccatcacacaggtcgcataggtgtcttgccatatcaagcctatattattgttgtattacattggacacatagggaagggaaaaaatccggtgaattatagggtgtgaaaaaaaaaaaaaaaaaaaagggcggccaccgactagtgagctc

SEQ ID NO: 25006 - DNA, 1011 bp, Zea mays
  Clone ID: MRT4577_122810C.1
ctcgcaactggggaaggccgcacccgcgaccgcgagccccgcgcagcccaacctacccgaccggcgaagtgacacagcgacgtcgccgtcctttacttaaccctccacccacagcgattccggccgggccgggtcgtccaccagctgagctgcgcccgttttagcgagcgagacaggtccgcgcgcgtgcgccggcgaggattggattggaaccgtcggtcgtcgatggggatccacctggtggcgttcgtggcggcgaggggcttcctgcaggtgttccaggtgtcggcgccgctgctgtggccgctcaacctctggctgccgctcgcgcgccacctgcccgaggcctgcgccgccttctacgacgccctcgtctcgcacgccgcccgcctgcgcgccaccgtccggcgccgccgccgcgacagcggggacgccctcgacgagtacctccgcagcgccatcatgctaaccctctccgactgagactcttgagccgagcgcgcggccaccggccagtgccaggcaacggccagtaccggaggggaggctggcgtgcacaggccggccggccggccggcgcgcgctgtgatgtgagtagccatagctaggatctgtgttatctcgtttgtttgtttgtttgtttttccttggctcgctcttcttttgctgcttttcgatcggtgcctaatctagctatctactactagcactagctagctagcatctcaagactgagcattgaggagctccgtatggccactctttatcttaactggtcggtgactaatctagctatctactactagcactagctagatagcatctcaagactgagctccgtatggtcaatttgtaatgctcgtctgtgactgaactgaagaacaagaccattttaatcggcttcttgcttccagcaacaacatctactatgttctacagtctacacatgtaaacgtctgcctgtgcagtgtgtgtacgtaggagtgcctcaccaaaaaaaaaaaaaaaaaa

SEQ ID NO: 25007 - DNA, 878 bp, Zea mays
  Clone ID: MRT4577_122811C.1
cccacgcgtccgcgccggcgcccccgcgcggcggctgaccccggtctccgtcctggacctgcagcgccgggtgctgcgctgggacggcctcggcggaggctgcctctcgggcgccggcgcatgcggcgccagcgagttccgtcgcctgcgccgctcactgggggacagcggcgagtgtgaccctcgcgccatggtgtttcccggcgatggtggggacgaggagcgggtggggtggaaggccgacatggacgtcgactcgtcgcggcagctcagcccggtctccgtcctggacctgcactccgacgacgacgacgacgacgagtcgctggcgcattcttactggggcgacgagaagccgtccacctccgggagctcacctccgtccgagcctttcctcgggccgacctctccatgcttcagctactacagccacagccctgcacgacaagttccgcgagatggaggtggacgagggcgaggaggagacggcccggaccggcaggtccgtcgaggagcagatctcgtcgtgggagaagatcgcgggtgacatctccaggatccccgcgatggtggagctggacctggcgcggtccgcgcggcagtggcgggagccgaggctggaggccagggaggtcggcgccaggatagagaccctcatcttcgatgacatcaggagggagaccgtgtgcgacatgctcgcctcgcattgtagatcggcggcggcggcggcggcagcagcaacgtcttgttgatcgaggtagtaggaggaggaggggttgttgtgttggtcagaagctatgcagcggatacgggtacatttatcgacagttttcaaaaataaaatggagaataaatagcgtatatatgttgaaaaggtt

SEQ ID NO: 25008 - DNA, 298 bp, Zea mays
  Clone ID: MRT4577_122812C.1
gggtattaaatacatttttttttggcccttgccaaaaaaataaaaacagcagggggaaaccaacctttaattcccccaggccccaaaaaaaaaaaaaaaagggggggggaacggttaaataaaacaaaaagccaaaaaaaaggcccaaaaaaacccccgaaaaaaaaaattaaccacctgggggcaaaaacccgaaggtacaaaacaatattcccatttgacaccaccaatgagaaacctaaccgtttcaaaagcatagcacacgaggcggggggagagcctattgagagctcccgga

SEQ ID NO: 25009 - DNA, 326 bp, Zea mays
  Clone ID: MRT4577_122813C.1
ttatttttgtcgctcaggtctcttttctttattcctttttttctttttttttaaaaactccaggaaacaatacttttttcttttcatttaaattgttcattcagggcattgctcacactgacactgccacccatggtgatgcgtgacacattattactcaatcctccccgcttaatgactcaactagctatctagcccaccggctattctacagcccattttttttttctagtgggggacccccccccgcctcacctttcagggcctggaattccgcttttgccgggcccacatttacctcttttttcttccctttttttcgcccc

SEQ ID NO: 25010 - DNA, 265 bp, Zea mays
  Clone ID: MRT4577_122814C.1
atattgccgggtcgacgagcttatttttcggcggacgcccttttttgataggagggtgttttagaaaacgaaagagatgggtgacatcaatagcggacctgtttacatacaggtatcagacatgagaagagcagattgatgtttgggtcacagaaaacaacagatggaaccaactgctgagtgcagtgaatctcatacacaagacaatgaaggtggtgcgggtaaagacgtaatacaattctcagatcccggaacactcttaact

SEQ ID NO: 25011 - DNA, 140 bp, Zea mays
  Clone ID: MRT4577_122815C.1
gcggccgcgggccctacgggcttttaagggcggcggcgggaagctcctcgccggcagatcatccagatcctggtgatcgccgggtgggtgagctccaccatggggccgctcttctacgccctcaagaaactggcctgctg

SEQ ID NO: 25012 - DNA, 356 bp, Zea mays
  Clone ID: MRT4577_122816C.1
gcggcttttcccaagacctacccggggtccggggcctaaaactgggatcaggggacaatcaacaatttggatgaaccgcacgagcagatcgacacggtcattgccacggcactgagggagagcaagcccgactacctcaacattagctgcaacctccctgggctgtctgaatctaccttgaggcgggagccaatgcccttcttgcttacccccaggacgagcaacaagatggggctagaggctccaacggcggcaactggccaatttctgaaaaaggcggacaattcaggccttgttgccggacacaaaatgcttatggcaaaggcaagaaaggcatctaccgatatgggggaagc

SEQ ID NO: 25013 - DNA, 330 bp, Zea mays
  Clone ID: MRT4577_122817C.1
gacccactctaacacccaggcttccaccctacacccctctcaagtgttccatcccacccacacccatactcccaagaccatttctcaaattctcactgccccaagcacttcactactattccaacaccacctccccaatcttatactaccctccacacgcctacccccccctcaaatctatccttcacaaacgacatccaacaaaatacaaccaatatctacactcacctccatcactacatggatcaaaactacctacataactgctaactccccaactcccatatccttacaataaaacttattcacaatacgcaaacacaacaatca

SEQ ID NO: 25014 - DNA, 353 bp, Zea mays
  Clone ID: MRT4577_122818C.1
cagcaccccaggtttccacagctgtagttgagccctacaactccatcctcaccacccacaccaccctggagcactctgattgtgccttcatggtagacaatgaggccatctatgacatctgtcgtagaaacctcgatatcgagcgcccaacctacactaaccttaaccgccttattagccagattgtgtcctccatcactgcttccctgagatttgatggagccctgaatgttgacctgacagaattccagaccaacctggtgccctacccccgcatccacttccctctggccacatatgcccctgtcatctctgctgagaaagcctaccatgaacagctttctgtagcagag

SEQ ID NO: 25015 - DNA, 409 bp, Zea mays
  Clone ID: MRT4577_122819C.1
ttttctgtctgtagatgagaatcgtccagtgagcggagctccaggacagacttgggtgcatcccgttcctgctcttactgccccttggcccgagaggcgtgcggcgcccgcctttgagttttcgcatgcgttcacacggactgaattgcaatgttgtgtcccactgatgatgatggacacctggcaaagatgatagctgccctacatggcctatagaacgtttacaagctggcccgcccccgtgtgtcctatgggcaacagttcacgcaccactgtgggtactagcaccacatgaacatgtcaccgaaggtggcgtccctgccgggcaagcccacgatggagcgctgggctacatagctgtaccattaggccaatgtcttgtgctacggtctaaactagagaatggcgc

SEQ ID NO: 25016 - DNA, 415 bp, Zea mays
  Clone ID: MRT4577_12281C.1
tcctgtacagcggccgacctgtttgttcttaaggaggcagcgttatggggctggtggctaacttggtggagcggtcggttattatgcccggggacaaaaaatgggcggcccggaccaccaacggccactcccaccagggaccctaccggcaaccggaccgaggggtacaacataccccaaaatttttgccgaaagtcccaaggattgccttttacccccaaaagggcaaaagcctgcacataagggagacttaaaacaaccgcttgttaaacgaacgggggggcaaaagggggggaacccattcacaggatttgtactacacataaggaaaaactccccggctgaatgtatctaccacggaatacttcagtacggggctatttttgttgcaaggacgggggggaatgagccaaaa

SEQ ID NO: 25017 - DNA, 392 bp, Zea mays
  Clone ID: MRT4577_122820C.1
ggggggagggccggggtttttttactaaaaagggtacaacggggggggacagggtcaataccccaacaaccccgggatattgaaacaatcccttttgaggaacccgggggggatccctccaccttctttgggcaaaggcccctttcccgcttctttagtgacaacccaaaaaatcccccttgcagacaccaccaagtttccaaaaacttactccaatgtgttgacaacgggcatttttattccccggcggcccaaaacccaaaaacttattcggcttcaaagaccctttccttggacaagggaccctccccaacctgtttttggccgatgcgccaccaacccaaaccttgtgggcccccttttccggggtaaaaatggaaaacccaaacttt

SEQ ID NO: 25018 - DNA, 1626 bp, Zea mays
  Clone ID: MRT4577_122821C.1
gcaaaataaaagcccccgccaacaaaagcccttgcccacgccatgacgctcagcaagaagcaaggcgcaagcagtcacggcgggaatccatgcggcggcatatggcgcccatcaaggagcaaaaacacacgacaagcgcagaacagcaggtgatgctggatgccgagctccagctgtggaaccacaccttcggctacgtcaagtccatggcgctcaaggccgcgatcgacctcggcatacccgaggccatccaccagcacggcggcacggccaccctcccacaaatagtcaccagggtcacgctccacccgtccaagacaccatgcctgcggcgcctcatgcgcgtgctcaccctcaccggcgtcttcggcgcgcaggaggcgcacgacgacgacggcggctgtgacgacgagctcgtctacacgctcacgccggcgtcccgtctcctcgtcggctcaccggggcagaacgtgggccctttcctgaccctgatgctcggccccatcttcgtgtcgtccttcctcgacctccgcgggtggttccagcacgagacgccggacccgtcccccttcaagatgacgcacgggcgggacatatgggagctggccgcccacgacgccgccttcggcaggctcttcgacgccggcatggtcgctgacagcagcttcatcatggacgtcgtggtcagggagtgcggcggcgtgttcgaggggatcagctccctcgtcgacgtcgccggcgggctcggtggcgccacacagaccatcgcgaaggcgttcccgaacctggagtgcagcgtgctggatctcccaaacgtcgtcgccagcgctcccgctgataccgccgtgaagtatgtcgccggtgacatgttcgagagcgttccggcggcagacgctgtcttcctcaagtggattatgcatgactggggtgatgccgactgtgtcaagatactgaagaactgcaagaaggccataccagctcaaggaggcaaggtgataatactggatatcgtggttggagcaggatcgtcgtgcgaccggaagaacgtggagacgcaatgcttgtttgatctctacatcatgactatcaacggtgtccagcgagatgagcgagagtggaagaagatcatctttgaagccgggtttacatcttacaagatcatacctgttctgggcactcgatccataattgaagtctgcccatagaaaccaaaataattaaggatggcaaccgcctccgatcgcacttgaatacttgaatccgtgaggttttcaggtcacctaggtgtttttactcattgtacgtttttaaacaataactagtcagttgtgcgtgctttgatacggttgttatatatatatatcatataaataaatattaagatatttatttaaatataaaaattgtttatttagaaacggacgcgtgggcctccgatcccacccgcggatataattccaaacccgtacttgaatacttgaatccgcgaggttttcaggtcacctacgtgtttttactcattgtacgcatttaaacaattattagccagttgcacgtgctttgctatggttgttatatatcatataaataaatattaagatatttatttaaatataatttttgttt

SEQ ID NO: 25019 - DNA, 1320 bp, Zea mays
  Clone ID: MRT4577_122822C.1
ccgggtcgactcgaccttcgcgatatgctcccagcaaaataaaagccaggcggcggcatatggcgctcagcaaggagcaaaaactcacaattcctgatcaacaacacacaacaagcagcgaacagcaggtggcgctggatgccgagctccagctgtggaaccacactttcggctacgtcaagtccatggcgctcaaggccgcgctcgacctcggcatacccgatgccatccaccagcacggcggctcggccaccatcccacagatagtcaccaggatcacgctccacccgtccaagacaccatgcctgcggcgcctcatgcgcgtgctcaccctcaccggcgtcttcggcacccaggagccgcacgatgacgggggcggctgtgacgacgagctcgtctacacgctcacgccggcgtcccgtctccttgtcggcccatcggggcagaacgtgagccctttactgaacgtgatgctctgccccatcttggtgtcgtccttcctcgacctccgcgggtggttccagcacgagatgccggacccgtcccccttcaaggtgacgcacgggcgggacatatgggagctggccgcccacgacgccggcttcagaagactagtggaatcccccgggctgcaggcggacagcggcttcatcatgaacgtcgtggtcagggagtgcggcagcggcaccgtcttccaggggatcagctccctcgtcgacgtcggcggcgggtttggtggcgccacacaggccatcgcgaaagcgttcccgcacctggagtgcagcgtgctagatctcccgaacgtcgtcgccggcgctcctgctgataccgccgtgaagtatgtcgccggtgacatgttcgagagcgtttcgtcggcagacgctgtcttcctcaagtcgattatacatgactggggtgatgccgactgtgtcaagatactgaagaactgcaagaaggccataccagctcaaggaggcaaggtgataatactggatattgtggttggagcaggatcgtcgtgcgaccggaagaacgtggagacgcaatgcttgtttgatctctacatcatgactatcaacggtgtcgagcgagatgagcgagagtggaagaagatcatctttgaagccgggtttacatcttacaagatcatacctgttctggggactcgatccataattgaagtctgcccatagaaaccaatataattaaggatggcaaccgcctccgatcccactcgcgagtataattccaaacccgtacttgaatacttgaatccgtgaggttttgaggtcacttacgtgtttttactcattgtacgca

SEQ ID NO: 25020 - DNA, 1663 bp, Zea mays
  Clone ID: MRT4577_122823C.1
gaagctccgggaaaaaaaaaaaaacaatccatgcggcggcatatggcgcccatcaaggagcaaaaacacacgacaagcgcagaacagcaggtgatgctggatgccgagctccagctgtggaaccacaccttcggctacgtcaagtccatggcgctcaaggccgcgctcgacctcggcatacccgaggccatccaccagcacggcggcacggccaccctcccacaaatagtcaccagggtcaagctccacccgtccaagacaccatgcctgcggcgcctcatgcgcgtgctcaccctcaccggcgtcttcggcgcgcaggaggcgcacgacgacgacggcggctgtgacgacgagctcgtctacacgctcacgccggcgtcccgtctcctcgtcggctcaccggggcagaacgtgggccctttcctgaccctgatgctcggccccatcttcgtgtcgtccttcctcgacctccgcgggtggttccagcacgagacgccggacccgtcccccttcaagatgacgcacgggcgggacatatgggagctggccgcccacgatgccgccttcggcaggctcttcgacgccggcatggtcgctgacagcagcttcatcatggacgtcgtggtcagggagtgcggcggcgtctttgaggggatcagctccctcgtcgacgtcgccggcgggctcggtggcgccacacagaccatcgcgaaggcgttcccgaacctggagtgcagcgtgctggatctcccaaacgtcgtcgccagcgctcccgctgataccgccgtgaagtatgtccccggtgacatgttcgagagcgttccggcggcagacgctgtcttcctcaagtggattatgcatgactggggtgatgccgactgtgtcaagatactgaagaactgcaagaaggccataccggctcaaggaggcaaggtgataatactggatatcgtggttggagcagggtcgtcatgcgaccggaagaatgtggagacgcaatgcttgtttgatctcttcatcatgtttatcaacggtgccgaacgagatgagcgacagtggaagaagatcatctttgaagccggctttacatcttacaagatcatacctgtcctgggcattagatccataattgaagtctgcctatagaaactaatataattaaggatgaaaacgggtcaggttcgggttgagttgagcaaaattctacccgggatggcatccttaaagtctacataaacccacccacgatcgtacccacgagtgcaattctaaacccgcacctgaacccgtcaggtttgaggtattgtatacttttaaataataattcaactatctctactactgtacgtcaaaccttttccttcgttcacctctccttgctcccccatatttaaatagtaataaagttaaaattatgcaactcaagtatactgtatgcgtgaataatctgcgagtgaaatcaaaactaggtgtgaagaagtgagtatactgtatgcacgcgtgaataaatctgcgtgtgaaaaactaggtatgatgaagtgttgtgccatgtgcttgctttatttagttgctaaatgtatcgcatgtactcttgtctgttctaaattataataaaatgtaaatttgagccttgattatttgttgtttgatcatgacaaacaat

SEQ ID NO: 25021 - DNA, 331 bp, Zea mays
  unsure (1)..(331): unsure at all n locations
  Clone ID: MRT4577_122824C.1
gggccaaaacccaatccccagcgccgnagcgcgtgggtaataatcgtcccagttcgagcagttgcccttcccgttgctgttcctggcttgcggcttccccaatctctgctgcacatccctatccttgccctcttcttcttcgtcgacttttacccacccatccgtcgcggcgggggtcgtggtgtacaagttattgcttgtgtcagtgtttctttgctcctgccggttcgggcatcgcggctggtattgttcgacacggagatccgggcacacatggatgcgccttctttgtgctcgctccgggacgcggggtacaatatcccactggact

SEQ ID NO: 25022 - DNA, 203 bp, Zea mays
  unsure (1)..(203): unsure at all n locations
  Clone ID: MRT4577_122825C.1
gcntcgccttttttttttccttaagagcagggccacataaatcacttggaactgcccgctaaaatatagcaacaatcagtcattctccggagtgcttggctcacatatgaacttccttggaccggtggtacaacccctgggttttttgtttctccgcaaaaacttccttgggggggggggggggtttttttttcagaatggga

SEQ ID NO: 25023 - DNA, 327 bp, Zea mays
  Clone ID: MRT4577_122826C.1
cgagagagacagtcagacagaaaaagcgagagagcgagggcaaagcacatgagcgcaggctgatgactgtctcccgagacgcgagatctcccgacgtggtcaagatgccgcgtccggggacgaccaccaccgctcctactccggggcgcagatcatgcaaaggcaggagcggccccggcgtcgcgagcgaccgtcggcgcggatgatgcgcaacgagaacgcacggcaaggggctgcacacgccgctgaaggaggaggcgcgcaacatcatcggacgcaagcgccacaaccggctgagggggaagggaatcgagctgaactcgcaag

SEQ ID NO: 25024 - DNA, 578 bp, Zea mays
  Clone ID: MRT4577_122827C.1
gtgcgctttgatctagctcttcttctcgaatccagcccgaggcctttttcttctgcggtttcatccgtacccatcctgcacacgaagcctagaatagccctcccctgctccgccacctcctcggatcccgaccaccccacccccaccccagacaacaggttgatggaggctaagatgggacgcttcttcgagtccgtgagcaatttcttcaccggaggcgaccacatcccctggtgcgaccgcgacctcatcgccgtgagcgctctgggaactttcccctctgtgttttctctccgttgccgtccgaatctttgcagatcatgaggttttgttgctgtaccccgccagttcggtggggactagggttaaatcatgtacttgcaaccgaagcattcgaatgttaagtatagcaggaagagggggataggaggagtcaggtggggatcatcgccagcagttgctgtattttgggggttcaagcgcgtgggtgcctttttcatgcaagcaaataattgtttctgtaatgtgtcctttctgatgatgccctattataatttcttggtaaagggggtggcacg

SEQ ID NO: 25025 - DNA, 355 bp, Zea mays
  Clone ID: MRT4577_122828C.1
accacgcgtacgaacagctccgctcgtcaatcagctctcggctgatcactcatcgccagtgggtgcctgccgaccaggtctcgccgccgccaccgccgcggtagagaggggagggagagggggaaaaaactggcccaaatcgacaggtgcagaccgaaatagagaggcaagatagatccgggaccggagggcgtaggtccggggcctaagaccgaggggctcgtgcgcaagaagatgatgaggttcctgtcgctcgttctcttacgctgcctagctggacccatcgactacgcgccggcggacgtggaccacgccgccggccttaggaggcgccggaggaggagggccaacaggg

SEQ ID NO: 25026 - DNA, 374 bp, Zea mays
  Clone ID: MRT4577_122829C.1
catagatctcctatacttttcacatcaaaacaatatttccattctttacagtttgagatgcgtatgattagactgatgttagacatattcgtttacattaaagagggaaagcttgtattctagattttttgatttcataaatttatttttaaaagcagtagattattcataatgcttatttttttatggtatacatattccgtccaatgtgatcggacagatatttaagttatggtattgggaggtgatgagccaaatactagacatattctgtaccacagtgattttcaaggttctatttcgaactgccgcatcttttgaaatgctgttttattttttccagtttgttttgcaactgttagatggaacaatct

SEQ ID NO: 25027 - DNA, 279 bp, Zea mays
  Clone ID: MRT4577_12282C.1
cggacgctgggcggagcgtgggatttcagccattgctgcgacggcgtgcccccgagtttgatttgatgcgaagcgaagacgaaccagaccagcggcgaggacaggccgcagccggcgatggactcgccgagggcggcgcaggcggcgacgcggcgcaagaagatgacgaagcagctgacggggaagcgggacgacacggcgatgcacgcggcggcgcgcgcacgggcagctggagtccatgcggcagatgatgtccggcaaggacgccgaggagctcgg

SEQ ID NO: 25028 - DNA, 652 bp, Zea mays
  unsure (1)..(652): unsure at all n locations
  Clone ID: MRT4577_122830C.1
aattcggcacgaggccgcggtgagcctcggggatctagggctcggggtagcggcggggaccaggtcgatcagagagaggaggccggcgcccaatgcgttcttcgacgtgggcagcgacagcgatactgagcatgatgatgatgatgatgaggagcaaactacgattgatcaggccaatcacgagagtgctaaaacaggtgattctgtaaagaagggaggaagacccaggaaaatggaagcgggccaattgcatactaggacgcagatttccaatggtaaaagcaacggccatacaaatgggaatcctgctgggaagaagaggggaaggggaagacccaagaaactgacagtagaacaagcgattactaggtgccagttctccaatggtgaaacaaacaagagtggtgccgaggcagcaaggagcaaacagtcaaggaatcgtaggatttcacagaatgcaaagaagcggaaaagagatgaagggaaggagtctatgacaaaaaagttgaacaaacggagtaagatgttgactggggaaaatgccctcatgtgccaccagtgccagaggaaggacanaccacgggttgtccggtgtcagtcatgcaaaanaaagcgattctgtctgccatgcatagaaacatggtatcctaat

SEQ ID NO: 25029 - DNA, 797 bp, Zea mays
  unsure (1)..(797): unsure at all n locations
  Clone ID: MRT4577_122831C.1
cctcgagccggcgggcactcgtcagacgcatcacttaggagaaacaaatcaaacccaagatcgtccactcggcggccaagaagcaagaagatgcaccccggagccaatttctggtcgtacgtggcgtcgtggttatcgtggttttgctcccctacaacggcggtggactccagtcggagcgctgggagcgatggggcagccggaatcactgcggcggctcaacgtctccccagcgtgcatactgtcaagttctgttaagtctttatattatattatcctattataaagcaccagatttgatggtcgacggttcgacaatcgtcctgcgtcataattttataaaaactagccctaagggaagtgacgcgacgctggatcaccagagcgtatgttatgctgccacccacttgcccacccctccccaatgccggctctctctcccacaactctatcatgtctcctctgctttgtcggccgcccacccaggccaaccctgcctgcgtcgatgcccgccgagtggcttcgtccttgccgccggttagcattgcttgagttgtatgtcgtattaagaagttgtatagggtttagtagagagttatgggccggattagtgggccagtaatcaccttgtaactangtatacgttggngggtctttggtcttccgaaggtcctcagaaacacggagtaatcattggtcatcagtatatttgtcaagcattgcaggagcttcagaatcagacgaacttcagtagtacaacgatggaaagagtatgaaggtagcttctatcataacat

SEQ ID NO: 25030 - DNA, 384 bp, Zea mays
  Clone ID: MRT4577_122832C.1
acaactaatatatttgggttatggggatttattattttttgttttcttttttttaattttataacaaaaaaaaaaagggggcttagtatatggaaaaaatgttttggattacattaaaatacttctaggaaacaaaaccaatataacttggtttttcttaatttaggatcaaaaaacaaaaaaaagggggaaaataaaattttatttccgaaacaaaaccattcaattttaaagtatccttgaaacaaaatttttaaaacacaaccacaaaaagatttttaaaggcccctttctttttgaaaaatttctttttgagaaacaaacacaactttttcaattttacccgtaagcaaaggggaaaaattaaaaattgggctaaaaatt

SEQ ID NO: 25031 - DNA, 1466 bp, Zea mays
  unsure (1)..(1466): unsure at all n locations
  Clone ID: MRT4577_122833C.1
gcccagcttgggacattgagaatgggaacgacagagctacagttcccgagttttttttttttttttttttttttttttttttttttttttttttttttttttgatcataaatgggctaatacataaaccagcaatagtggctcatagtttataattctttacaggatgaatatttacataaatgcactaaatacaagaaattttgcatacaaacttgatcaaaatgtttacaaaccatgcttgaacaaatatacaaacccgttgtgggcaggaatcattttagctttgtacacttgtacagcaacaatagcttcaatagagattgttgtaagtgtagagtgttgctgcgatggaaactatgcaaatcacaagggatgggagaagagtgacattcagaaggaggtccgtgccgagataaccggctgcagtaatcgtggcatctgcaactacacgggccaacgtcccggcctctgtcgaaaggagtccaccattgtaggtccctcgggaaagcctcgatgacattactcgtgagagcaaggacagattcactccttcaagcacctcagcaaacacaaatgtgatgagagctgaaaggacatattgcgggatggagtagtgaggtgtgaaacaaaagctcatgattataccgatgagaaccatgacttcagatgccaacaaaatttgcctatcctcgaataaatttgtaatgtagcttccaacaaaggcatttactggaagaaccgttaatccaagaatcgctagaaagatagccacggcacttgtagaccagctaaaatagtatgtggtgacaacactcgattctgatagtagtatttccattgcgtacttgagcatgaagtatatcagtagctgggccttcacagatggagttagcaatctgtatgctgaagcctgttgccgagttggttcatgagagctttctgactctacttcagtatcatcattaacttctgagttctcatcctgccttcgttctataccttgaagcaatggttcagctagacctgcctgccaagttagaatttccttggcggccagattcggatggttgttcattgaccatagttttagtgaaatgttctggctccttgaatgtaagccacagccacaataagtaaataagccaagaaatgcacatgacccatccaggcaatgtgttttaactaaaacncctttgagcgagtatatcttgaatttaatctggagaaaaccagcaagagcagggccacatgccatgccaagagcgctagcactaacgaacccggcagaggcttgtagcctcatcttgagaggcacacagtcactgatatagcgacggttcactgctcttgcagagcctaacctgcacattacatgctggcagctcgatcacagatgcaccgtcagaaaatcaagaaccttaaacaatatagataaattactagcccaaagggaggcccggccgg

SEQ ID NO: 25032 - DNA, 398 bp, Zea mays
  Clone ID: MRT4577_122834C.1
ggttagggatacagagtatgaaaatccggatattaaaccttgagagcaatatctagggctgtttggatccttggatagaggtgtggtgagtagcaataatcccatgcaatatctactgttagctgggtggagccagattatgggattataggaatctgggtggttggatatatatttttttcaatctacatcgtaatgtgagctggtttgatcctttacatatatttttagctggttttcataatgtgtagccttccaaacattgccttagacttccttttccagtcttacccttccttaaatgcatcactagctgatgtcttattgctagcatgcaagcatgtatatatttggtaccatacagtaattgtacacgtttctcctaaccaaataatctt

SEQ ID NO: 25033 - DNA, 455 bp, Zea mays
  Clone ID: MRT4577_122835C.1
gggggggaataaaacaagcgcatcccttcatttatttaaaggaggagggctggacccattacaaggagttcttcgagggaattttaccaattttactaaaaaatcccgcaaaaaaactccgaatgtttaattattttgcgcacgcccgaacctgtttgcccaccaccggggattgcttggactactatgggggaccgtccccttcccaaatgggcctaacacaaaggctaacctttttggccgacagttcagagatcttcgggggtcaattttgccattttgggattttgaaaatggaccaacccaacaaagggcacctcctgaaacctttgcccccccaggtttaccggaaaaaagaaccgggcccaaaaggcaagcacctttggttggggttggcccaaaaatacttgcccgggccaatgcaatttttgaccgatataccgaaccctaaccca

SEQ ID NO: 25034 - DNA, 648 bp, Zea mays
  Clone ID: MRT4577_122836C.1
actcctatgggcgattgggaccctcgaggccggccgggacacagcaagcttcatgactgatatcgacgtgcagcttccatccgtctttgtgccggtcgctgagtgaaatgatcaggactctcgcgctgtccctggaacgacggattatagtgcatcgtgcgcatgcagcgagcgcatacggaacaaccagagtgccgatctagctccccactggtaccgacagacctcgagctccgaatatagacgccgatctctaccaggtatctcgacagaacgaagttctgcatgcgaatgattacttgatagttacaggtacctcatcagctatgtccagggtcgattcgtagcttcacatggtcgactcagctgcaagacatggagctagttgacactagttcaggaatcgcgactgcgtaaataagactacatcttgagtcacgatatctatgggacccggagacgcttgcgccctatattgtgagcctccacatctagctgatgttgaagcatcatgagcaactaggacttgcttacttatatatcagcacacaaagctactggctattgtccagggagccttgcttgatgctaggcgcgtggtcgtataattattattatgtacggccagcgcacgttgtatggcttgga

SEQ ID NO: 25035 - DNA, 206 bp, Zea mays
  unsure (1)..(206): unsure at all n locations
  Clone ID: MRT4577_122837C.1
agacaggaaagaagcagcgacaggacacagcngncaaccacgggaaaacagcaggccaacgaggagaaggccgaggcgccacaccacagaggagcaaacgacaacggacccgggcagncagcaaaagncacgcggccggcggagcaagaccccccacggggagacacggcacaagcggacacacggggagcagcagccgggaaaaa

SEQ ID NO: 25036 - DNA, 406 bp, Zea mays
  Clone ID: MRT4577_122838C.1
gcgcacaataacccgatagacaccatgagggtgttgctcgtagccctcgctatcctggctgtcgctgtgagcgccaccttcacgcatacaagcggcgggtgtggctgtcagccaccgacgtcggttcatctaccgccgccggggcatttgccacctccggttcacctgcaacctccggtgcatgtcccaccgccggtccagctgacgtcgccggtccagctgatatcgccggtccatgtgccgtcgccgggtcatttgacgtcgccaccatgccactaccgtactcaaccggtcatgtctcagcctcatcatgagacacacctatgcccgtgccaacagccgcatccaagcccgagccagctgcatggaacctgcggcgttggcagcacccccatcctgggccagt

SEQ ID NO: 25037 - DNA, 523 bp, Zea mays
  Clone ID: MRT4577_122839C.1
gtcgtcgtctgttcttgcgaacaagcgaggtagatgtctgtgtataggtcgacgacgcggcggaagtttatgttgagcttccttgagaggcccacgttgagggagaggtcgccaggcaccttggactagtggttgtggttgatctacttgatcaagaagaggttttggatcagcagagtatgcacctgcacgaagctgatatggaacgcctgcaacaactttgtgtccacgccggaggccccggcaccttcgaacccggacagcgtcttctctccacactccataccttatcgatctcctcctctctcctgtatgtgatggcagtcatagtaccaatacgcgcagataattataaactcctgattacttgtgctcacgcgagaaccttcaatggcaaaagaacggtaatcattgatcacacaactcggatgatattgagaggctttctgcgataaggaatgaagatgatttagttcacacagtgcgctaattaaaaaaaaatgagtagtactttttaaaaact

SEQ ID NO: 25038 - DNA, 330 bp, Zea mays
  Clone ID: MRT4577_12283C.1
ggattcaacacgccgtccgttgggaagggagcttccaggcggacctccgcaggagagagatcggcggatcccatgacgaggggcggcggatgcgacatgaaatccttcttccggcagcagaagacgcacgccggcgtcgccactaccaagcccactggcggcgtcttcaagaaggcggcggctaaccaccacaagaaggccgtgctcgccaccaacgtccacccggccccagatcacggcgccgggagccgtcagcaggaggaggcggaggcggagcattgggagagggcgggccgtgagttcaacatggaccctccgctgcgggccatg

SEQ ID NO: 25039 - DNA, 434 bp, Zea mays
  Clone ID: MRT4577_122840C.1
aaatatttagcaatgctggcttgtttgctctaggtgaggggagctgcctattttactctttcgaacttcctaatctttgctgagtttatcatgtggaggtgttttttagtgaggaagaagcatcgtcgattggggaagttcacacttttcatgtacaatggcggatgtctcttagtgaattgggaacacatttttcatgtaagaaaagatagggaaggacaattagttgcacttcctgtttacccagacaatgctgtcttgttgtgctgtacaacttgtgtaagatttggcgttggagaggaggcccacaattttaattggaagtggtcttcaagttggatgctaattgttttgctcatttgctgaagtttccagtaaaggcacggggctgctgctgtttcttactttgcttgctcttggaggacagacacatg

SEQ ID NO: 25040 - DNA, 195 bp, Zea mays
  Clone ID: MRT4577_122841C.1
cccacgcgtacgaccacgcgtacgtccacgcgttctcccacgcgtacggttgaccgcgcgcgttgggagcgcatccggtcgtgtgcattagaccgccatggacgacacggagagagaaaaggagaaggagaaggacaaggagaacgagaagcacgactgcgggacggacgtccaggacgaagaataggacgagga

SEQ ID NO: 25041 - DNA, 324 bp, Zea mays
  Clone ID: MRT4577_122842C.1
cacttgcaggtatcttgcctacccttgagacattaccaggagggagtggcctatacagagctctctcaaatgtaactaatgagggacttctgactgaaggctttttttggataccttcatttggccgaggctacaacaaattgctgtttaacaaattgaacagggaatatactggctttctccttttactgatggtcattcaccactaggctgtgtagacacttgagcatacctcgcgttaccagcccttcttgtcatttcacaatacatatcttctcaagtaatgcagccaccacagatcattgatcctagccaacaatgtgc

SEQ ID NO: 25042 - DNA, 438 bp, Zea mays
  Clone ID: MRT4577_122843C.1
gccaaataggtatgtatcatgtgagacaaaatgagatggggctttgctggactcaaggtggtccctagaatcataccaatctggattggctgttgggctgaaacaggcaactactacataaacagagcttaccaagtagcggttatatgaggttgtgctcaatttacacgcagcctgaatcataaaggaaatgaactggcattttaggggagtcacaaaaatctagttctacgtgaatctcaccaataacgggataagaagggcatgagggaacacagtttgataaatgtacagatattactgaacaagaacacactgcctgaataaattccagctaaggatcctcaaagaatcacgatgaaaacctcagccattacctcaagagagaaatgtggtagattagtctgaagttgttgactgttttgatgcaaaaaggaa

SEQ ID NO: 25043 - DNA, 575 bp, Zea mays
  Clone ID: MRT4577_122844C.1
acgaagctggaccttaacggcgcctttttttttttttttttttttttttttcttttttttttttttttttttttttttttttttttttttttttttttttttttttttttggggtcaagctccaaaactttcatttagccaaaaggggcccaaccccccaaaacaaagggggggggtgggaattgggatccatagcaggggcgggtttcatgggtacattaacatggaaattgggggacagggttttataacaggggggggagacccacaggttaaactcaacaaccagacgggggggcgagaagcttaaaaaagggaggggcccttgccctttttggctccaccaaactaaaaaggcttgcatcttttgagggggggctgggagtagggcttgcagctctggcactggagattaaaaacaattttttgggggggcttggccttcttggggaaaacaggcttggcctgaccaacaaatcctgacgggtggggggcaaaacggggctttccctggggagacaggctatccttgccctttttaaactgaggcaccttgggggagggggggcttcttg

SEQ ID NO: 25044 - DNA, 642 bp, Zea mays
  unsure (1)..(642): unsure at all n locations
  Clone ID: MRT4577_122845C.1
cggngggagtcctcctcctcccggagccgcccaagccgtctaccacgggccctcctgacccaccggagacgaaggcggcggcggcggcggcgggcaaagagccggctccggctccgcctccagctccagccccaacgcccgcgcagtccggtaggaggatctctggccggcactccacggggtcagtgcgcgcgcctgggcgtgtcggcccggcctcgcggcggtcggccgacggcggcgtcgccgtcggctgcttcgacggcgccaaggtgcggaaggaccgcgtgctgctggtggagccggcggccgtggtggcagagccagacccggtggcgttcgaccggcggttcgggcaccgcatcctggtgagcaccgcgggcgggtgcaagggcgagacggcccccgcggcgcagcagcggtggagcgacctgcgaccgtccgacctcatgttcgtccgcgccgagttcctggtcaccgacgccggccgccactcctgctccgcggccgtgaactccggcaacgccaggagcgccatcggcgtgcgcagcgtgtcggagctggcgggcgtgcgccgtctcccgcccatccgcgccggaacgtgcgagggcgagccacgaagccgcggcggtggcgccccgcggt

SEQ ID NO: 25045 - DNA, 1904 bp, Zea mays
  Clone ID: MRT4577_122846C.1
ggactgttgacattgacaaaattacaaacccagtggatcggcgagctacacaagatcaaatagcttactttggacaaacaccatctcaactgctgactgtacctcacatgaagaggaagccactggcggaggtcttacaactacagacaatattccgaaatccaagtgaacttaaatcatatgtgcttccacattcagatcgttgcaatgttcctgccagtgctatgcttgtatcaaacgactctattgtagttgttgatgtaaatgccccagcagcacatgtggcacttcaccaatggcaggctaatactccagatggtcagggaacacctttccttttccatcatggtagaaattccacaaattcaaccagtggcgcactcatgcgcattttcaaaggatctgctggttctgcggaagattatgggttcccaagggctatagcatttgctgcttctgcaatccgcagttcagcagttgttgctgtgacatgtgacaaagagataattactggtggccacgttgatggttcattgaagttgatatccctagatggagcgaagacaattgaaactgcttctgggcatattgctccagtgacatgccttgcgctgtcacctgatagcaactaccttgtgacagggtctagagataccacagttatactctggaggattcatcagacaggctcctcacataagaaaaatgctcaagaacctccaccgactacaccaacgacaccacgcagtcctctctctggcagcactagcaccatgagcagcctctcagaaacaaagagacgtcgcgttgaaggtccaatgcatgtaatgagaggacatcttggggaagtaacctgctgctcggttagtccagacttaggacttgttgcttcctcatcaaatgcaacaggcattcttctgcattccttacgcacaggcaggctgataaggaggcttgatgtcgatgaggcacatgcaatatgcttatcttctcaaggaatcattttggtttggaatggaacaaagaaaacattatctaccttcactgtcaatggactccctattgctaactcagttctgttgcctttctctggacaagttagttgcatcgagatttctacagatggccattttgctttatttggaacatctttgttcaacaactacaagtgtgataacagtactgaaactggggatcatgagcttggacccaatggcactgatgatgtatcaaaaaattctgaacaatctgttcacgcgccttcaatctgctttgttgacctgcatacactgaaggtttttcatactctgaagctggcaaagggccaggacatcacagcaattgctctaaacaaagagaacacaaatcttttagtttctactgctgataaacagcttatagtctttactgatcccgctttgagcttgaaggtggtggatcagatgctgcggcttggttgggaaggtgatggcctacttcagtaatgacccgtggcaaagattcaatgttcagctgtccattacttgcttccagatttgctatctactagttatcatagacagtagtaaagtaatgaaaattaaggcatgagatacactgtttgtacaaaattgagggtcacaatgggtgcaaaggctaggtcatttagatgggaaggaaaccaacggattttggtagagtagctttgtaaaaaatctcagatggttttgtagaatgagtggatagtaattgtacacaattttgcagcccattttttttgtggtcttcagtacagtgcggtgcagcacaatccttgaagcactttgtatatctgaaatgaatctattgactgttggccaatcagtgttgaaaataggttgaagttttttccttttttttttttttttttttttcccacgcgtccg

SEQ ID NO: 25046 - DNA, 320 bp, Zea mays
  Clone ID: MRT4577_122847C.1
ataaaaccaatacgacgagctttgggcttttttttttgaagaaaacggaaaagacaaatacccgtcttggggggaccaacattaattgagcgttcacaacataaccaacatgcaaattatttttgaacggttcagaacccaaggtcggaaaaatctggggggcgggattcacaagagggcacccggctctgtgatgcccaacaacaaaattgtggcgcaaaaaatggaaaaaaaagggcctgggggcaaagcaaccatttcccataacaagatacaccggtttttaatttttctttacaccacccgggggaaccccccct

SEQ ID NO: 25047 - DNA, 316 bp, Zea mays
  Clone ID: MRT4577_122848C.1
ctctcacacaaaaaatttattattgagatatcccttatattcaaacttaaaggaggccaccaggcaatgacagctggcaggttaattttttttcccttggtcataccacattggtggggggggggggattgtttaccttgggagacggtgatctgggcaaagcatagggggataacaactccgacacctctgggctatgaaacattagggactactgttaacaccagctagttgtttgattgaaccaagtagttgcatttgacaataattattatagttaaaagctaccagttggattaatggaagaaactgctgg

SEQ ID NO: 25048 - DNA, 306 bp, Zea mays
  Clone ID: MRT4577_122849C.1
taagcggcgcctggtttttttttatgcatagatagtggaatgactgattgaaattatcgaataaagggcagtggagcatctttgttttacgttgctccacgcacactgtcaattaattatacagttagacctgcttgcagccgggattaaaagggtgagctgtgctctgcatttcatcatgttgggaagctgaaaatatttccttggccgctctaatcctcctaggtctggcttgccacaaattgggtttcaacctaacggtcttccaccattgatgattaggaaggggtaaggaaccttctggat

SEQ ID NO: 25049 - DNA, 358 bp, Zea mays
  Clone ID: MRT4577_12284C.1
ccgaaaaaaaaaggggggggtttccaccattttttcattattttgacaaccccctttttgggaaaaactcccgggctaacaatttaacattttggaagcttttcccaaagaaagaaacaatccagggggggcacaagtttacatgaattttaaaacaaaaaaaatgggaaaccttttgcatgcatgcatgcggggaggccccgtgggtcttggaagtttttgacagcaaaaaacttttttgctttactccagcgccccccctgatcgaagctcatcataaaacatggttagatgcttctccccggtcgggggccaaaaaaggcgaggaccctttttttttgctgcatggggaggcctt

SEQ ID NO: 25050 - DNA, 411 bp, Zea mays
  Clone ID: MRT4577_122850C.1
cctctcctctcctcttgctcagtctctcgttggctctgttcttgggagtgccagtgggtgtgctttttggccaggagtaagggaaaaacttcttggacagcatcttcctgctccggtcttatgggcttggtttgcttcttttgcttctcgcctgaagttgtttttttttttaatccttttaattcatattacttttatatttcctaaacctatattaatttctaatttttttttatctaatatttattttttttttttttttttttactgtttttataattattttttttttccttaataattattgtgggtgttgttttttttacattattcatttccttctcatttctttatttataattttttatcgttttttaaaatttttttattatttttttatttttatttttt

SEQ ID NO: 25051 - DNA, 279 bp, Zea mays
  Clone ID: MRT4577_122851C.1
aaacaagacaagcgggggcctttttacggttttacccccacggaaccggagttttttgtttttttaaaggggccctgtgaggcttgaaacatttttttgggtttatgacgtcgcgcacaagtggaaaaaaaccgaaaaccattggccgaaatgacgcttttccttccaacctaccgttttaaatgaacctggaggtagctttgcaaaactgttgttttttttgttcgggcaaaaaggcttcgaggccaattgcgatcaagccgcaaaccgttgcacaaa

SEQ ID NO: 25052 - DNA, 378 bp, Zea mays
  Clone ID: MRT4577_122852C.1
aaaaccgcgtcccacctctaaccccaaccccaccccgaccggctgctggcaaagccccacacgggcctcaaaacatctaacacgccacaacatacctgaggaagcccgcacccctgcccacaaccaatggccaacagcaacctaccacgacagatcatcaaggatactcatcggctgctcaacgaaccagcaccggacatcagcgcaacacccacataggaaaacatgcgctacttcaacagaaagaaccttgaaccgtcacagtcaccctataaaagaggactttataagcaagaacgcgcaataccagaagaatatccaatggcagccccaaaagaaaagaatctgacaaagatctaacaacccaaacatcacaat

SEQ ID NO: 25053 - DNA, 217 bp, Zea mays
  unsure (1)..(217): unsure at all n locations
  Clone ID: MRT4577_122853C.1
cccacaccaacacacacgtttggttccagacacacnaaaaaaaaagggagggcaacaaatgttttggttatgccaaccacaaccatgngaacacctggctgactgaccgacagggatcacagcacacaaactccaccccaaatatcaccaggctaacccacccaacaaacaggaatcatgatgcaacaaacccacccccactgatctcatatgccaa

SEQ ID NO: 25054 - DNA, 359 bp, Zea mays
  Clone ID: MRT4577_122854C.1
ttttacgcgtgcgcccacacgtgcggccttggtaaagaacaagtgcaatgataaatggatcacgagcccatcaagatcttgggagttggtgtgaactggatgctgaatattgctcacagatagttaccgttgttgctagctatcacgatggcactactgtccttcagaggacaattgatagaactttgagtgtgcagctggagaatcatctattggcactgggttggagtattaagttcaaaaaggacaaaattcaagaaaatggtcattataaacacactacaagataacggtacgagtcaccttatgggaagacttatgtttctatcatttcagtaatgtgcactttgatagctggt

SEQ ID NO: 25055 - DNA, 650 bp, Zea mays
  Clone ID: MRT4577_122855C.1
ttgggtacctcgaggccggccgggaaaaataacccaagctctgaaaataaaggtcgatcactcccttcccgcttccacctttggcgtcccgcaggccgcatccgaagccaccgagcggttacccggcaacaacaccgccaaatggccgccggagcgcaccccctggtctccgcgagggccctgaacggcgacatggacacagactccgccagcgaccacgcttccggacgacctccgcgagcccatcctgccgacatcgtccgcttcgtccacagacatcctgtatcgtgcaacacccggcagccgtacgcggagtacctgtccagacttaccaccatacctccgccgactcctgggggactgtgcgcgactagcaccatatcccccacgatgctggcgataataccaaccgcgacatccatagagcctacgataacatgctcctcggcggtacacatcgcttgcgcccaacaagatcaggctccgctgacaccgccgcctcaacattcacctcaagcctgagcgcatagcctctgcccgctctatcaccatcgttccgatcctcgtgctcgcccgtcgccacagtgcgtatcatggcatctagctatctgtcgctatatctaactgctgctagaccattgagaatacac

SEQ ID NO: 25056 - DNA, 2206 bp, Zea mays
  Clone ID: MRT4577_122856C.1
cttgtgtgtgcttgcagcgtcgcagtccttcatgggcatcaactacggcgaagtggccgacaacctcccgccgccgtcgtccaccgcgcgcctcgtccagtccacgaccatcaccaaggtgcgcctctacgggaccgacccggccatcatctccgccttctccggcacgggcgtctccctcctcctgggcgccaccaacggcgacatcgccaacctcgcgtcctcgcccgcggccgcggcggcctgggtcgccgcgcacctcccggcctcgtcgccggccgtctccaccgtctccgtcggcaacgaggtcctctttgccgacgcctcgctcgcgtcgcagctcgtcccggccatgcagaacctgcacgacgcgctgccgcccaactccagcgtcaaggtgtccaccgtgaacgccatggacgtgctggcgagctccgacccgccctcctccggcgcgttcaagccggagctcgcggcggcgctcgacccgctgctggcgttcctgagcaagaccggctcgccgttcctcgtcaacccgtacccctacttcgcgtacctcagcgacccgcggcccgagacgctggccttctgcctgttccagcccgacgccggccgcccggacgccgggtccggcctcacgtacaccaacatgttcgacgcgcaggtcgacgccgtgcgcgccgcgctggacgccaaggggtacaaggacgtggacatcgtggtggccgagaccggctggccgcacaagggtgaccccgacgaggccggcgccacggtggagaacgcgcgcgccttcgtgtcgggcctcgtgtcccacctccgctccctgtccggcacgccgcgcgcgcccggcaagtcggtggagacgtacatcttcgccatgtacgacgaggacctcaagcccggcaaggcgtcggagcggtacttcgggctgttccagaccagcctcgccgagacgtacccgacggggttgctcaggaacggcacggccggaccgataccagccacggcgccggctccggcgccaaccacgtccgccgcgacgctgaagccaacgccagggcagcagacacaggtgactccagcgcagcagggctcgacggcggcagctgggccttccggcatctgcaggccggggccagggacggctacgtcgagagggaccactaccgcttgcgcccaacctagtgctgctgaatcgtctcgcgcttcctcgatgctccctatcattgccggttttccggtcatagctttgctgatgtttacatgacctttttttttctttatgcttttttctgcctaatgtattgcgccacctctcgtattctagtacgtgtttcacgatccaagcacagcgtcaagatttagaggacgataacagcatttgccattggcactttgttaacggaattttttttttttttttaaaaaagcaagcgtccaaatgaatacaaatataatgagattcagtgtcaaagaatgatcagctaaagacatacaaaccaagtttggtggtttgttggcacacaaaaacaccaacagaaaggaaccacgtgcatgcaggacatacacaccgcggactgagcaagggcaacaaaaaacaacaatcgcagaccgagtccagtgctgcaagacccaaaactgtttacaaacctcaaaaacaacagcagtaacaattgtattcacgctcctgagtgtgaaactggtgaagtggtgaactgcccatccttgaaactatggatgtactgttgaggcaatgcatgctccacccaatcaccatcagcgccaccacttggaaccatcacattgatttcgctagatttggcagaagtaattgaagctcccagcgaatctttgcttaagtataattgacatccagatgtgttgtcgattgatattgtcggtgacgtaccctgacattggacctcaacgccattgcagttgacaatctcaaaagctgctacaacatccttgaatacaattccaaacttagtgcatttgtcaacagtgatattgttaaccttgccgtttacttgaaggacagaatccttgcatccatacacatagacagattgtctggaatcacaatcatcaatagcaagggtcttcttgccaacctgattctcaaccacccatctgtcaataatcacaagggatggaacatattgaaacatggacaaaacggacgcgtgggcgaacgcgtggt

SEQ ID NO: 25057 - DNA, 658 bp, Zea mays
  Clone ID: MRT4577_122857C.1
gaaggtttacagggaggagatctgaacatagctcaatcccaaagttaacatcgttggttaccataattcttactgcttgcaagcccttttagaatattactgctgcgaggttcttgcaagtccttgatgaagaagtcgaaggaaaaaatctacatgttgatggcgtggatcagaaaagtgcagtggaaggacaagatttaagatgcactgccatggttggcggtctatttactgcatctcgaagcggcttgcattcaaaggactatattgtacatgaccttgaaggagctgaccatgtgacagaccttgatcataaccatgttgcagagttgaagatattaggactatattaaacattgctgcatatagcatcagacttagaagtcaaacaacatcaaacttatcatcagcaacaacttggtttccgtcgctgcccaaacttcagcagaggcgatctaagaagaagcaagcgtatcggctcatgttctgacggccgtgttcacgtggtgtaagatctgcattgtggaatccttcgcccggacaagagagattggatcctcccgtccagacaacctgatagaacgacagtgtataagatcagggctcttaggacgccttttgtcaagttgggtcataactctaccctgagaattgagat

SEQ ID NO: 25058 - DNA, 187 bp, Zea mays
  Clone ID: MRT4577_122858C.1
atggtgtacaaattcaataagtgggggtttaccgaaccaaaagcatggttccatagcacaagaaaaatacatacgttaacacccactgaatgggaaccagggttggtactctagcaggacaaagattgcaacaacacgaaagggaacacctaacttattgaggttcgctttccctagggaccacaag

SEQ ID NO: 25059 - DNA, 493 bp, Zea mays
  Clone ID: MRT4577_122859C.1
acctacccgctgtcgctgcgaccgtgaagcacggtgaccagcaccggggacgtcttcctggaggggagcatcaccatgcgcaagactgctggcaagcccaaggcaggcgcggacgtcaggccgtggtactgggccgaccgagtgctcgacctgggcccggtggacagacagacaggaagctacctgaccagttagaacacaggctactacggctgtgaaacgttgggctgtccagcgacccctggactcttatcaaaaaccgtataataggagcgatacaatgcctgtgcgtcatgctgcgcacgctagggtgccttttccctgagctgctcgcccgcaacggcgtcaagttcggggagggcctgtgtatcaaggccaggttcaagatcttcagcaagggcggtcttgactaccttatggaccccagcatgatccacgcgcagagcatcctgtcacatctgggcgtaccgggaagaagctcatggtccccaac

SEQ ID NO: 25060 - DNA, 226 bp, Zea mays
  Clone ID: MRT4577_12285C.1
aattagaaaaccactaggggggggttttattgtaaaaataacatgcaggcggggggaaccattacattacataggggggcaaaaggggcgccatctggcgaaaaaacgggaagcaggggcaacatgcacgcatctcgctcgcagggaggcaggacgccacgcatgtcctcccccaagccggggcccccacttcttcaccgccacttcaactgcccggacccggggg

SEQ ID NO: 25061 - DNA, 1255 bp, Zea mays
  Clone ID: MRT4577_122860C.1
tttttatcttttttgagtggaagtccgcgtccgagaggggctcgccattgggcttggcatgggcacagtcatgctgctcctcttctgcggctactcgctggtgatttgatatggctctaagctgatcctggagatggtgtacaccggagccaaggtcacaacatgatctttgtagtcctcactggttctcttttctcaaattgaccatggtgttgtaaatttgatcaatgaagaagattcaagaattaccgttttactggattgccatgggatttcgccattcagatttccaatgcaaatgatgaggtcgtttatcactgtggttcaagaaaactacccgaatcgtcttggggtattgtttgtcatccgccttcctccagttgtcagagttattgcacagacatttcttcaaattgcaatatcacatggtatccgtggagatgaggacgacattgcctccaagtctgctccaccggcatccatcgacggtgcaagatccagcagatagattgatggcaaagaggacgactccatgtccaggcgtactccccgccttgcatcgagattgctaggtcataatcgaagggtttacagggaggagatctgaacatagctcttcaatcccaaagttaacatcgttggttaccataattcttactgcttgcaagcccttttagaatattactgctgcgaggttcttgcaagtccttgatgaagaagtcgaaggtgacgaacgccgaggccgtcatcctgatcgacgccaagaacctcacagcgcacctccttgtgatgctcttttctccaatgtcttctcttatctacatgcaggaaaaaatctacatgttgatggcgtggatcagaaaaatgtggaaggacaagatttaagatgcactgccatggttggcggtctatttactgcatctcgaagcggcttgcattcaaaggactatattgtacatgaccttgaaggagctgaccatgtgacagaccttgatcataaccatgttgcagagttgaagatattaggactatattaaacattgctgcatatagcatcagcaacaacttggtttccgtcgctgcccaaacttcagcagaggcgatctaagaagaagcaagcgtatcggctcatgttctgacggccgtgttcacgtggtgtaagatctgcattgtggaatccttcgcccggacaagagagattggatcctcccgtccagacaacctgatagaacgacagtgtataagaacagggctc

SEQ ID NO: 25062 - DNA, 480 bp, Zea mays
  Clone ID: MRT4577_122861C.1
ctgcaaaccgcctctcctcaccctctgggccctttgccggcactccacccgcggtccactctgatcccagctccggtctcctgcgagctgccctgctgttcctgtccattggaccgttcgacctgtaggttgaccagaacgatctgcgatgctccaatagccgcctgggtttcctttggaacactatatgctaaaccaaagaagaatgcgacgctgtggatctggacgactatcacgacttcgacgaggagtatgatcacgctagactacctaccagcaggaccggtgtgatgccgagtgtggtctgccccacgttgcgttctgaccgtgtcgcgactttgagtcgtacgttcatatcccatatgtatcagaaatggattctagcaatccctgagatgactcatttatctaggtactctgataccctatgctgttgttggctgttcttatgatctgtgcgtgcgctagaaagaggacctt

SEQ ID NO: 25063 - DNA, 2182 bp, Zea mays
  Clone ID: MRT4577_122862C.1
gaaaaactacccgatcgtcttggggtattgtttgtcatccgccttcctccagttgtcagagttattgcacagacatttcttcaagatacaaaccaacctgactacaagttaaagatgctctgtaaaaaggaaggatcagtttgactatatctttttgctggtagattgcaatatcacatggtatccgtggagatgaggacgacattgcctccaagtctgctccaccggcatccatcgacggtgcaagatccagcagatagattgatggcaaagaggacgactccatgtccaggcgtactccccgccttgcatcgagattgctaggtcataatcgaagggtttacaggggaggagatctgaacatagctcttcaatcccaaagttaacatcgttggttaccataattcttactgcttgcaagcccttttagaatattactgctgcgaggttcttgcaagtccttgatgaagaagtcgaaggtgacgaacgccgaggccgtcatcctgatcgacgccaagaacctcacagcgcacctccttgtgatgctcttttctccaatgtcttctcttatctacatgcaggaaaaaatctacatgttgatggcgtggatcagaaaaatgcagtggaaggacaagatttaagatgcactgccatggttggcggtctatttactgcatctcgaagcggcttgcattcaaaggttctgcacctctaaatatttctggtcgtgaagctgtctatgaaaggaagatgaaaattcagcaagttggattgatttatctttcccccctatggctgattcagcaacctgtattaattagtctatttgacatttgatatttcaatgctgttataggactatattgtacatgaccttgaaggagctgaccatgtgacagaccttgatcataaccatgttgcagagttgaagatattaggactatattaaacattgctgcatatagcatcagactttggaggatatgatgacatcagacttagaagtcaaacaacatcaaacttatcatcagaagttatatctgtgatccagcaacaacttggtttccgtcgctgcccaaacttcagcagaggcgatctaagaagaagcaagcgtatcggctcatgttctgacggccgtgttcacgtggtgtaagatctgcattgtggaatccttcgcccggacaagagagattggatcctcccgtccagacaacctgatagaacgacagtgtataagaacagggctcttaggacgccttttgtcaagttgggtcataactctaccctgagaattgagatagatgatcatgtggtgcaagatattgagtccctaatctttgatgacacacataacaaatggtaagcgtctccgtggatggagcctgaagtatattcaaattcaaggcatgccacaaagcatctcgcgtgtgggatgctccggcgtgtggaaagtagaaaagccaaataaatgggtacatgtacagcaggcgtgagttcttaaatactcagattccttgtccataggcaaatgcatagttcatacgaatcagagtacacgatgcacacaacttgatgtctctatcgttgttttcaacatgatgaacatgcgaatttcgtggtattaattgggaccgtctgatttctccggctcatgttctgacggccgtgttcacgtggtgtaagatctgcattgtggaatccttcgcccggacaagagagattggatcctcccgtccagacaacctgatagaacgacagtgtataagaacagggctcttaggacgccttttgtcaagttgggtcataactctaccctgagaattgagatagatgatcatgtggtgcaagatattgagtccctaatctttgatgacacacataacaaatggtaagcgtctccgtggatggagcctgaagtatattcaaattcaaggcatgccacaaagcatctcgcgtgtgggatgctccggcgtgtggaaagtagaaaagccaaataaatgggtacatgtacagcaggcgtgagttcttaaatactcagattccttgtccataggcaaatgcatagttcatacgaatcagagtacacgatgcacacaacttgatgtctctatcgttgttttcaacatgatgaacatgcgaatttcgtggtattaattgggaccgtctgatttctcatggatcc

SEQ ID NO: 25064 - DNA, 278 bp, Zea mays
  Clone ID: MRT4577_122863C.1
attctgttctgtacctttcggtcctatggatctttgatggggcccgagcaggatgaggccgtgctggagaccatctgggacctccacgacaaggtcagcgacgcaaaccacgccctgttccgcgcccacttcctgcgcgccgttcgccgtcgctcctcgggctccgaccccggcctttggacgtgaagggcgggggtttgggtctcggcgcgcgcggaaaaaacgaggtcgtcgccctggctgtcctggctgaggaggccaggagcctgcacgccctc

SEQ ID NO: 25065 - DNA, 398 bp, Zea mays
  Clone ID: MRT4577_122864C.1
accactcctccgcgcgtacgaaaacgcgtttgacacagaaaaagctgaaacgaaagctaaggaaaatgcgatagataaaaaagcaaaaaaagaaaaaaataaaaggggcggacgatttaaagggtccatacttacaaactcttaaatgcgactgaatcactttcttatagctctacttatatatatttcactggccttaattttccaaatggtctacttgcaaaaccgtgtgatacccaacttaatagatttgcctacttgcctatttacccgattggtgcattagcatataggtcaacctctatggccatttccaacagttgccctaactgatcggcaaatggtacgctccttgctacgttgcttatagcgcagcttgtgtcataggttctcgcacc

SEQ ID NO: 25066 - DNA, 591 bp, Zea mays
  Clone ID: MRT4577_122865C.1
ttttgacgataacaaacacacgacttgctgcaaagagtacaaggaaatactcgctaattcagtcatggtttgctgtttcctatacacgatgtgccgccgtcaacattgaactccctcagtattgctcttgcacaatgagcaaaaagaatagcaccaaagatcttatactaaaaatgaacagcaaggaactgcacttttgcaatgccaagctgaatatagggaaaaaaactcatcaaaccataatgaacagtgtgaaatattctacgttatatcttggtactctgcaacataactcaggtttcgtgctagcgtccttcagacatcgtggatgctgttatggcaacgttccgcagaaagcatttcatcttattctcctcttggaattggactgagcactccctcgtcacgtcaggggtgaatttgtgtcatcatggatgttgcaggtcaggcgtgattctgtttattttcatgatgaacaaagcccatgaagtctgttgtccaaatgcccgaaaaaatgagtgtttggtgcatttcatgccctgttaattagtgaatgttgcattccgtcatgaacttctcttcactggtcat

SEQ ID NO: 25067 - DNA, 441 bp, Zea mays
  Clone ID: MRT4577_122866C.1
cgctttttggctttctcccctcttccgcacccgctgctcgctccggtacccctctgctcttcccctaagcgaggtagccatggcggggtaaggtaaggcgatcggctcaggcgccgccaagaaggccacgtccaggcagctccaagtctggccttcagttccccggggcaaggaccgccaggttcgtgggggggggcaagaatgccaagagagtctgctccagcgcccctggataccttactcccctgctacagtatattgctggtgaggttctagcgctgggcgtgaatgcgtgcacgtgacatcaaggaaggccaacatcgtgccagctcacatccagttggccgcgggtcccaccgacatactacataggtggctgttatctaggccgatcggtggtgtgggtgttatgctcgaacatttatagccggggcatgaatg

SEQ ID NO: 25068 - DNA, 428 bp, Zea mays
  Clone ID: MRT4577_122867C.1
ttgctcctggagttgcttcaagcagggcctgtcagaggacagctgcttagaacctagcccacgtgcctgcgtctcagttccacttccagtggccctagccctagagaactttgagcaagagctcggtagaagacgcgctgctgtcgacggttctgagccaggagcaccaggacgccgtgaacagatgtaaccatctgaggggggtccacgtggcgtacttccgcctgtgcatcgaccctacgtggcgaggtccaggcggcttcttcaggaggcaatccaggatctcaagaaccactggggctggctatgcttctggggggcggattatttacctggaacaacaggaacaacaacgacccaattatatcagtcccacactactacggtcattcgggaggcactaaagtggctcagtctggctgatggcc

SEQ ID NO: 25069 - DNA, 339 bp, Zea mays
  Clone ID: MRT4577_122868C.1
tcgacgatcccgggctccgttggcggcaggaacgcctcccgattttgacggtagaactagagagcgatggcgctgactaacttcatcgggacggcggccgcggttggagcggcggtgctaatatttaccaccgacatacgcacgtcaggcaccctattccgccgaaacgcgcgccagctacggatgtggctggaggaggacacaagatgattttttttcaaagcggcaagacaagcaactcctaataaactcgagctcgacgagtccgcacacagaagccataggaagatagtcaactgacaggagcagcataaacgaacgtgataaccactatttgaa

SEQ ID NO: 25070 - DNA, 948 bp, Zea mays
  Clone ID: MRT4577_122869C.1
gcgggaaaactaaagcaaccaaacgagcctaatccaatccttatccgggagcagatcgccctccactccactcggccgggctcccggttttctagggtttaaagagcttgccgagcccgccgtgcgccggccggcacatctccactactttccgccatcgccggagccgaccccttcgtctccgcacgcggcaatggcattctccttcgcctcgccggctgcgtcgaaccctttccagacgccggcgacgccgaatccctttcaaacaccggctccggccacctcgcaggcgccatccctatcgccttcgccgttccagttcagcttccagcagcagccgcagccacagcagcaggtggcgccggcggcgcaacctccgcagccgcagccgcagccgcagccgcagaagctgatgctgtacacgacagatatgaaatctgcgggatacagcaccaagtgggaggagctgcacgccgagtcgcagaaggccttactccagatcgaggacaagatacgggactacaaagacgagtgtgagaggttggaccagtgcagtcgcctttatgactcctcaatctcaaatgccaattttgagcttgatgcgagtcgcattgctcaggaacttggagggaccaccactgtaatggagagagagaaggcttccattcaagagttgatgaatgttgtcaatgaaatgatgtggaacacagaatttggtattaggtcatatctgatgttgaggccaagattcacccgtccaagtgctggagttgcaaatggcggttcttcaaatccttctgctggtgctccacccaatcagccagtggtagatttctaaatgagtcccaaagcgtccttccatttttatgagcgcaagtgatatcttgcggacagtggtagatttctacagtggagtcccaagcgtccttcatttttatgcagcgcact

SEQ ID NO: 25071 - DNA, 405 bp, Zea mays
  Clone ID: MRT4577_12286C.1
caacataaacacatattccatttattcaaagagggtcgccaagctaaccgcactcaccaatctgcttgtaaaaatagcgatctggcaaaaaatccataaaaggtagacaaggcaaggcttttattatgcgcctatcattggccaagatcaccatgaacaccatgcatcccatatagactgtaaaaaagatgcatccctacatgacccttacacaccgtggagaacatgaacagcacacagcacattatgactaaaaacaaactctaaactgaacatccacacacactgtacaggttcacagaccctccagcatcagcagccctggaaagataacaccaccatccgtttcttgagttagaattgggatagtccatatctgccaatggatctcggactcctgcaact

SEQ ID NO: 25072 - DNA, 1383 bp, Zea mays
  Clone ID: MRT4577_122870C.1
ccggggctctgcctcaccatcgacgccgaatccacagctgccagcccgccacatctgccacgcccaaatctgcgtcgtgcgcgagtgagaagaccggatctgcggcgggatggcgacgatccagaacaagccgactccgacggcgccgtccacgacgacgggcggcggactgcgcgccatggatctgtacgagaagctggagaaggtgggggagggcacgtacgggaaggtgtacaaggcccgggagaaggcgacgggccggatcgtggcgctcaagaagacgcggctccccgaggacgacgggggcgtgccgcccaccgcgctgcgggaggtctcgctgctgcggatgctgtcgcaggacccgcacgtggtccgcctgctcgacctcaagcagggcgtcaacaaggaggggcagaccatcctgtacctcgtcttcgagtacatggacaccgacctgaagaagttcatccggggctatcgcgccaaccacgagaagatccccgcacaaaccgtcaagatcctgatgtaccagctgtgcaagggcgtgggttttgttcacggccgcggggtgctccaccgtgatctgaaaccgcacaacctgctcatggaccgcaagaccatggcgctcaagatcgctgacctcggactcagccgtgccatcaccgtccctgtaaagaagtacacgcacgagattctgacgctgtggtacagggcgcccgaggttcttcttggcgccacacactactccacgccggttgacatttggtccgtggggtgcatatttgctgagttggttactaatcagccacttttccctggcgactccgagttgcagcagctcctccacatcttcaagttgctgggcaccccaaatgaggagatgtggccaggagtaggcaagctgccgaactggcacgtgtacccccagtggaagcccactaagctgtccactcttgtccctggtcttgactccgatggctatgatttacttgagaaaatgcttgcatatgagccagggaagcgggtctcggcgaagaaggccctggagcacccgtacttcaatgatgttaacaaggaggtgtactgaagcgacccgagtagtagggttcatcgagagaggatcattgtcaccttattcttcgcttagtgtgttaatatggctaccctgaagcagtacttgaagtatctctgtgttcaagctgctacttttctatttgttgtgccattcactttggttgtgatggataaggcagggagagttttcagcatgagtgagcttatgttgacactgtttcttgcaaattgtagccggaaagcttgcgatcatcttccatttgatttataaagcttcactatatggctctgaagcacaaaattcctacc

SEQ ID NO: 25073 - DNA, 243 bp, Zea mays
  Clone ID: MRT4577_122871C.1
tggaatcaccggcggcctcccgccttccattccaacactctcggaagaaaggtaagaacggggagcgccatggtcacgtttacagaccgctcgccctcgtgctgtacccgtacaccgtgtggcgacttaatgtgaaggagtttacccaggcgcgcgttgcgatcttctcgatgctcgcgctgtagtcccaggccatcctcgcggagctgagcccgatggtgaacatcatcctgaacacgggcg

SEQ ID NO: 25074 - DNA, 308 bp, Zea mays
  Clone ID: MRT4577_122872C.1
acgcccacgcgtccggcgatgaagatcactgcgctcctggtgctgaagcctgggaccattggagcctggagctcctagtccggctgcgagtcatacccagatgcatgaaaactcgtgaacgcaatagacatcagacacttcggctactttcagcgcagagccatgcgtcagttcattgacttctaggctcgcaccatctgtcagctcacccagccatgccagcggcagtcccttcagcacgaaaaatacaaggtgcactcatacaatataaataggctgtgtactttgcattgatggatgatcattat

SEQ ID NO: 25075 - DNA, 408 bp, Zea mays
  Clone ID: MRT4577_122873C.1
ctctgtggttgacggtgacgacgcccattccacgggtgatcttggggatgctcacattcctgccctccgctcgtccacgcgctgggtccccaactgcactggcaggtcagtgccatagcttcgcgtgaccggaaagagagaggaaggggcgtcgaactatgaacgcagcggcggggtcgacgctgctgaacccaaagcaccgatcttcataccgaaggacctactacaggtggaggactattcggcgaagagaacggacctcaattaccaccactgtctgggtactgaaccactgatggccgcgagcgccctcacaagggaaagagggtctagcacacatatcggacggactcctcccattcgacaaggacctcttctaaacgaccatctcgagcagggaacccctcg

SEQ ID NO: 25076 - DNA, 507 bp, Zea mays
  Clone ID: MRT4577_122874C.1
aagctaaggtgagaggggatcatggctctagggagaggggtatgctcctcatgtcaaattccacatatgggaaatttcaaatagtagctcttgctgtccaggtaggtaaccggtatgggttcgcgccaattctgcgccactaaccgaaacttaggtggttaaatggtccgaattttgcgaactgaaggatactttatggatttcccattccaattttggagttttgctcttaagttgtttggcattggtgacttgttgtaggaagtaagatatggaatttcaggatcttgcatggtacttgactagttgtattttagcgatatgttctctagcgcgatatattctcatctttttttgttgtggttctacggttcttggttttcagacagtaggtctgtgccatgaaagcttaagttttttactgttccattgttcagtcccgttaacatgtctgcagttgccctgctagatagctaaactgacaactgagcataataaattatcaca

SEQ ID NO: 25077 - DNA, 359 bp, Zea mays
  Clone ID: MRT4577_122875C.1
cttataagtatgttagtaccataaaatcaacatctcaaaaaaaaaaaaggactacaagcaaagaaagctaagtcccgaagcagaaaacacccttcaacaaggagagggcagtacaaaaccgaaccctatcctcatccaaaaagggaaccgggacacccgggccaaaaattgaaacagaagcagcattttaaacggggacaaacgaaaaaatgcctgggcgaaaaatatgcacgggcccttggccagaacgaagggagaaaacatgtgcaccgaaaccgggcaaaaccttggggggaacacgggcgagcgggaagaaggccccaggaagaacggaccagcacccgccgggaaaccagccc

SEQ ID NO: 25078 - DNA, 192 bp, Zea mays
  Clone ID: MRT4577_122876C.1
gtaccggttgcgtgaattcccggcttcaggcgtggctgtttaatagcaagggggccggataagcccgtcaacgtcaggaaagggaaggccgtccaggaccccaacaagcctaacacggctactaacgctttcttagaattcatggaggaatagctcatggcgcgcaagagagaagaaccctaattacaagtc

SEQ ID NO: 25079 - DNA, 760 bp, Zea mays
  unsure (1)..(760): unsure at all n locations
  Clone ID: MRT4577_122877C.1
tattccaatccaatccccaaaccagcagcagcccagcgaccaccagcatccaaatccaacctccatcgggaggaggccatggcgggtagggaggaggaggaggagaggtggacgatgaggccgtgcaccgccgtcaggtctacgatggccggcgaccatggtccggcgacgcgggttgtctccgagtccaagagggggaaggcggtggcgcggtccagccgcaagaagggtgagcggaggcccgagtgtgcggcggcgggagcaggagatcgggcgttgccggatccacacgggaaggctgcgatgccgaccaagaaggttgtcggcgcggcggcggcagcacaggctggaggcaaagggaagcgtccgctcaagaaaagcgagatcaggaccataatcgcgctgaagccggagcctttccccgaagacgactacctggacggcatggccaagtacttacccgccggagtggctcgagcagaagaagagggagcacgcacaagacgccgcgtatttcgggaagattgacgccgactacgaggacttccggaagaaggtgatcgacggggtcaaggagaagggctacttcgaggtcgacgagggctacatggagaagaagcccgatcaacacccaaagccacaactgcagaaggtcgatttaagtgaactcatgcgctttgctgctacccctgaaaaanagttgcggcggccaggtggtaatggttatcatgagtactctactgatgaaaaggatgatgct

SEQ ID NO: 25080 - DNA, 391 bp, Zea mays
  Clone ID: MRT4577_122878C.1
gagccctcagtcggcggccgccctctttttttttgggtgttttttgtaaagttctgcgttttttcaccctataaaaatggttggcggaaccaggttccggacccccggggccgccaccccaaataaaccagaaacaaagaacggggaaaaaaaccaaaaaccaccaaaacctaaggaaacccaaaaaagaaacaccagcacgggaaaaaagggcgttaacaaaaaagcccatgaaataaccccctaccaaatcggtccacaaaggggccttggggggaaaaccccccggggggaaaaaggcccaacaacaggttcccaaacgaccaaaaaatattgggagggaaccaagaaaacaggggccgggaaaaaatacccggggccccaagggggg

SEQ ID NO: 25081 - DNA, 106 bp, Zea mays
  Clone ID: MRT4577_122879C.1
gcaaccacgtttgaacatggaacaaaatgctacggttatcatgagaatgatagtttagttaatgaaatttctgcaccaacccattcttcacctgttggtgatttgc

SEQ ID NO: 25082 - DNA, 529 bp, Zea mays
  unsure (1)..(529): unsure at all n locations
  Clone ID: MRT4577_12287C.1
cgtccgcccagcgttttccccgcgtccgggctggtagtctgccggcagctagccgcctcctccaccagcggcgtggccgtcgtcgtcgtcttgactgccagggacgaggcgaggggagcagctgccgtcggngaagctcagaggcctggggctctccaacgtcttcttccaccagctggacatcacggacgccgggggcgtcgctcggctggccgttttcttgtagtcccggtttgggaagctggatctcctggtgaataacgccgggtttgttggccttgagtccatccaagatcgttttgatggctcttcatcgacgagcgaggagttttgtggcttggtacatggacatgaggctggagctgctgctgaaatggtgcctccggtagacttgcgatgctgggaaggaatgcctgatgttctactcccccggttcgaagcatgtcacccgagctctcctgcctctggtgctggcctcctacagcgggaggatcgttcatctgtctccttggtgcttgggccttctcag

SEQ ID NO: 25083 - DNA, 289 bp, Zea mays
  unsure (1)..(289): unsure at all n locations
  Clone ID: MRT4577_122880C.1
gtacgtaagctcggaattcggctcgagccggaaagaaagtaagatttgacgcacatgggccaagctaaagggaagcttttgaacacgccaagcgtggatccagaccgcattaaacaaacgaaggcgggcctaaacacgaacaaacccctcctcctgacagacagacccaggaaaattggggggaggaccaggaatctaaactaacccccacagagaggccacgagctgacacaaaactttcngaaccttactccagcaaatgacaattttccgatcacatggattatac

SEQ ID NO: 25084 - DNA, 253 bp, Zea mays
  Clone ID: MRT4577_122881C.1
aaaccatctaaactgggggtaaaaaaagctttttttaaagtggcatttttcctaaccgatcgggggtgccattatttcccgctggctctctaattttgggggcccaaactaaaaaaaacaacttttgtcggccgggcccatttttaattttttaaaaggaaattttcaaaaccccagctccaaactaaaaaaaacaactttgttgggattggcaaacttaaacaaaattgcttggtggccgacccccgggggg

SEQ ID NO: 25085 - DNA, 369 bp, Zea mays
  Clone ID: MRT4577_122882C.1
cggagtcttacgtgcactcgtaccggaaccataatcgggattaaagactgggagggaagctcctacgacatgcgctggacacatacttatatcagacttaagactatacttcaacggtaattgctactgatattatgggaaagatgaaacatactacacatacaaccaaatgtaacacattacagaactcagaaacgaacacacatgtgtgtgcttaatccttcagtcatgttatgaatttgatgaactatagcccagcaggctcctctggccgtggaagtttccaggcaatactggagtgggttgctatttcctactccaaggaaactcatgtacaaagaggcaagaacatacaatggagaaaagaca

SEQ ID NO: 25086 - DNA, 358 bp, Zea mays
  Clone ID: MRT4577_122883C.1
cggacgcgtgggagccaagcgctggttgtgatcctttttataccggacggcctgcaagcgccatattgtggcatccacaccgcatcgtttggatgggcaagccttcatactcacaccgcatctagcggctagcttgtgggcaacacgtgtaccatggaaccatcaaccgggggcagcaagagatatgggtcgctcaagagtgacagatgctggtgcggatacgctcaatggcaatggccagggcgattgtgaccctgcctatgacgggctggagcgcctgcattctctgatgggttaatccgatggagagcaaggccctgcatactgtggaatctaaagcttgtaggtgacggaagct

SEQ ID NO: 25087 - DNA, 464 bp, Zea mays
  Clone ID: MRT4577_122884C.1
ggcatgcaatggcttttgccgcccaaaagcggggcccttgttttgaacatacctttccaaaaatttgtccttggggttagcccggggggaagccttacctgggccacagggcatcccaaccctcaaaactggagaagcccagggggggaaggggaagcaaagggcgaatgctttgggcaggcctctttcccttcatgctggggttcttttttgcaacacctggttattggtggcatcgggtcatcagctgatcgaatttgcatctgcttgaagtgtgcctctccctgggtgcctctttggcctggaactgcgggcttaggggcccgtttcatctcatccccccggctggggatgggctccacctcctttttggccaaccccgccttctttccgatcttgttccgggtggggccgaccttggggccgaccgggcccaagagggcccagcgggggcttccggggcc

SEQ ID NO: 25088 - DNA, 201 bp, Zea mays
  Clone ID: MRT4577_122885C.1
cccacgcatccgaagacacgtgggcaactccatccaagacgaacgaatacatcccactaatcctttttcttttcttttcgtttttatttttaatttcttggttcggttcttgatcaccggttcgggcttaggaccttatccatgaatttatattggcaggtacattttgtctaaggatctacacgcaggaggatggctctc

SEQ ID NO: 25089 - DNA, 530 bp, Zea mays
  Clone ID: MRT4577_122886C.1
attccttcactgcagtgttgctttcgcaccggccaccaccgggcttacgtcgctgttgccgcccgcacctgcagccgccatgtcggatgagcgtgtgtgtcaccggcggcaggcaagggcaggtggtgttggcgatggtgttcgatgacgcgcgcttgggggggattgcctcctccatccgcgtcatccccgacttctccaagtcagggatcatgttcaggacatcacgacgttgctgctcgatcccaaggcggtccgtgacatcatcgacctctttgacgagcggcaccaggaacaaggtatcaccgtgggtgctggggttcaggctagagggttcagttttggtcatccgatcggttgagccaatgacgcaaaatttgttgtgttgttgaagtcgaagaatttgccaagtgtggcgatcttcgaagagtatgctttggaatatggaagggagcagatagaagtgcatgcctcagttgtacgggccacccagcgggctctggtactcgatgagcttattgctacggccg

SEQ ID NO: 25090 - DNA, 303 bp, Zea mays
  Clone ID: MRT4577_122887C.1
tcgggccgagcgacgcgttcacacaaagtgaagagcactatcaacaactctttcaacaatggctaccaatatattatcgggccgtgcgcttcttgcgcttgattgaagcgcaacaaatgcgttcattattccacaatgcttacttgatccataatacattatttcacagttcatcccaccaggtactactaaggcattggaagacccagatgtgcaagcctataagctacaacaagttattgcggcgagcgtcttacaacaaccaattgtccaattgcaacaacaatccttggcacatctaac

SEQ ID NO: 25091 - DNA, 1100 bp, Zea mays
  Clone ID: MRT4577_122888C.1
cattgaggcctcgggccggcggaacaatcccagagcgtaccacatccgtccagaagccgcagcagcgagcaggtcaggtcggcagagagctcgacctctcgctgacggcgacgttcggggccggcggaggacaggaacaggacgatggccgagggaaagaggtggcggttcgcgatggtctgctcctcgaacatgaaccggagcatggaggcgcactcgcagctgggccgcgcggggctcgacgtcgagtcctacggcacgggcacccacgtcaagctccccggcccctccctccacgagcccaacgtctacgacttcggcaccccctacggcgccatctacgacgacctccgccgcaaggaccccgaactgtacaagaggaatgggttgctgcctatgctgaagaggaacacctcggtgaagctggcgcctcagcggtggcaggacaatgccggcgacggggtgtttgatatgataatgacctttgaggagagggtctttgacttggttgttgaagatatgaataaccgcgagccgaggttgatgaagtgtgtgctgataataaatatggatgtcaaagataaccatgaagaagctggtgttggggcaaagcttgctgtagagttgtgccagaagcttgaagcaattgatggtgactgggaggacataattgatgacttgattactgcatttgagaagcagcacaagcggagacttgcatacagcatttcattctactaacttgtatagtcccgtttggacagagatgttgcagtggatggttggtaacttggcattgtagtaagcaactgcataggagtgaagcatcatgtcgtggcagtgttgcttgaattcttccacgcttacatttgcctgtgctagctgtttttttattgcaaggtgatggctatagatatcttccaagtttttcctaactaccgcctttgttgtctggcatgtattcttgaacgacaatgtggttcagagtatcttctgtcttccacctcccgaaaaaaaactaaatatcatgctttatgcaatatagtatcttctgccctcttaaaaaaaaaaaaaaaaagggcggccgccaccgcggtgga

SEQ ID NO: 25092 - DNA, 307 bp, Zea mays
  Clone ID: MRT4577_122889C.1
aaaataaaaaaaaataacataatatctataacaaaaaaaaaaattacattaaaccgagctggaaacataaaactctaatgcttaaaaaacaaaaacaacaactactaaaattcaaccactttactagtttcatccctactaccttatccatcaaccaatattctccgttctaccaccacacttcaattaactctccaactttattaaaattgcaacatttgataacattcaaccaactaaatttaactaacttaccaaccttctaccttttgcccattattgcaattgccataaattatatttctta

SEQ ID NO: 25093 - DNA, 104 bp, Zea mays
  Clone ID: MRT4577_12288C.1
taccggtaccggccaattcccggggtgagcacaatcgcacagcctcgtttccgttttcagaaagagcatttcagaattcagataatggaggtaatctttagcct

SEQ ID NO: 25094 - DNA, 1112 bp, Zea mays
  Clone ID: MRT4577_122890C.1
gaacaggacgatggccgagggaaagaggtggcggttcgcgatggtctgctcctcgaacatgaaccggagcatggaggcgcactcgcagctgggccgcgcggggctcgacgtcgagtcctacggcacgggcacccacgtcaagctccccggcccctccctccacgagcccaacgtctacgacttcggcaccccctacggcgccatctacgacgacctccgccgcaaggaccccgaactgtcagtacgagcacctactgtcatcttccctctccccacctaagctacctcctattgcctcctgatgctcctttttctcccaaccccacctttgttgatttgggggagaagatgtactccagtgtttagggttgtggatggagttctggcgaaatttagcgtgcatttgatggaaacagataacaaccattatagtcttctgcaatttgggatcgttgctcgcaatatctctgtctcctggcgaaaaattatttgcacacttgccgaactgggtctgcagggatgcttgtggcgttgctttcccgtttctttgtgtgctcacattgccttgtcgggcaccctgcacgataacttgaaacgctctgctctcgtggatttctgtggcgaaccatccaggtacaagaggaatgggttgctgcctatgctgaagaggaacacctcggtgaagctggcgcctcagcggtggcaggacaatgccggcgacggggtgtttgatatgataatgacctttgaggagagggtctttgacttggttgttgaagatatgaataaccgcgagccgaggttgatgaagtgtgtgctgataataaatatggatgtcaaagataaccatgaagaagctggtgttggggcaaagcttgctgtagagttgtgccagaagcttgaagcaattgatggtgactgggaggacataattgatgacttgattactgcatttgagaagcagcacaagcggagacttgcatacagcatttcattctactaacttgtatagtcccgtttggacagagatgttgcagtggatggttggtaacttggcattgtagtaagcaactgcataggagtgaagcatcatgtcgtggcagtgttgcttg

SEQ ID NO: 25095 - DNA, 732 bp, Zea mays
  unsure (1)..(732): unsure at all n locations
  Clone ID: MRT4577_122891C.1
ccggccgggagaaaaatggttctttcttagtgtgacacggacacacttgctcgtcccatcccttcctccagccaccgacctcccaaggatgcgctcttgccgccggcctcccaaggatgcgctcttgccgcccctcttctcgcgccgccgctgccatcgccatgtcgaagcgcgctacgtacgctccgtcctccattcgctcccgacgatccgactcgttcgtttgttgctcctttcgcttactgccagacctagccggcttctgcgttgaaatggatgaactgccgcggtctcatacattttctgggatccagaaatttcggacattgtgatcttctcggccccccaggacttcagctcgctcatcctgatgaacgacatcatgattggtttacattgcaagaacttatgtatggcggcctactatccaaagtatgaacttcatcaatacaacctcatattagcatggaacaaattacatgtggtcaaatgtgtattttcatatttagcttttaagtcagctcagataattatatgggcactcatacattctttttgtttctgattattacatcaataatttacgaggagctacacccgttcatttctcgatttctaattatattgtcaacttcttctatacgtaagtttagaaataatgtttcatctttcataaactttatgatttatgctccttctaaaaaaanaaggaaaaaaaaaaaaaaagcggcc

SEQ ID NO: 25096 - DNA, 764 bp, Zea mays
  unsure (1)..(764): unsure at all n locations
  Clone ID: MRT4577_122892C.1
cggccgggccggggaattaacccaaaaccaaatccctatcccgcgccgtgggtctctctctcaccagctctcagcccacccaccgccagcccgataagcgcgccgcctgttcagcgcgccaccgccgcctccgcctgttcagcgcgccgccgtcgccagatcagcgctctgccgccgcaagatcagcgcgccaccgccagcccgcccaccgcgccgccgccagcccaccgcaccgccgccagcccgcccactgcactttcctctgtcgacatcaccatctcgactgtcgttggacagcgggagggccctccaggtttcatccccttcccttctttaagcatcatctgtatatctttaagccagatcaccactcgctcggtcaccgcacccggatggggcacaccgccgccgctgcggccgcggccgccgaacccgctctcggactcaccaagcccaacgccgtcgagccgcctcaggcaagtggacaaagactgtgaattactggaggcggagaggatcatggattacagtcttttggtcggtattcacttcaaggacagatgcaaagataagttaaaacgatgcatgcttctcacacatgcttggagctgcaagatgcatttggagttaggagactgaaaaatctatttggttgttacagcagcaatggtgacaatggttgntacagactgcatttggagcatcanatttctattgtnngggtcaggatacttacctgtttcataagggcttcacatcttatc

SEQ ID NO: 25097 - DNA, 374 bp, Zea mays
  Clone ID: MRT4577_122893C.1
aaaaaaaaaaaaaaaaaaaataaaaaattataaaaaaaaaaaaaaaaaagaaaaaagaaaaaattaaaaatcaattctaaaatttaaacaaattataaaaacaataataaaaaaatgggcgggcccttttaaagttccaaagtttaacctccgttggttgctagtttatagcttttttattgggaaacctaaatgatttctctggcccctttttttaaaacttctgaactgtaaaaaccctgtctttcccaacattaatggccttacataaattcctttttttacatttttgtttattaataataaggccaacacttttcgttttttcaaatttttaccgtccctatttggaaattgtgacccccttttttttt

SEQ ID NO: 25098 - DNA, 552 bp, Zea mays
  Clone ID: MRT4577_122894C.1
gagaacaaataaccagaagctatatgttgatatatacaacggaatcaatagggacgccaattaatacttacatacaatatattgcacactatgaaagtttgtctcaggacgcacaatgtcgaaaagtttcgggcggagatcacacattcctcatccagcataagagatccttagacaccgggacgagctcatgcgctagccatatttgcggagggtgcgcttcaaggccttgatgctaaggggactgtttttgtttaccgagcaagtgccgggtctgtcgattaggcacagggataacccggagggcaacacttgaggtggtccttgcagttaggtgggacctaccatcttgacagaagccccagaccaaggagacgttcttgaaaccaaacgcacagcacatggtgctgaacgcttcgcacgacaagttctaatggtagacattgttctggacaacctgcaggagcttgtagagttggaagggtaggagaccgatctggagggtttgctcccttattgggatggtatgaagcaatcatatcaattcggcac

SEQ ID NO: 25099 - DNA, 400 bp, Zea mays
  Clone ID: MRT4577_122895C.1
gggaccgggaaagatctatttccacgactaaggggggaaaacattggggtaaaagcccccccccattaaaacaaaggggggggccccagacagaagcccccacgggggttaaggccaacaaacttgggggggggaaaaaggcatccaaccaaaaaacaccgttaaaaacgggggaaacaattccaaaacaccaaaaaggcggccccgggggcccccccgggaattccccccggaaacccggaggggaacccggtggcccaaaagggggcccaaaaaaaggtgggaaaaaacatgggcaaaaccatggccaggggaaaatcgtgggggaaaaaaaattcccccaaaaaatccccccaaaaaaaaaaggggaaaaaacaggggggaacacgggggggccaaa

SEQ ID NO: 25100 - DNA, 256 bp, Zea mays
  Clone ID: MRT4577_122896C.1
aaggaaacagcgaggacgcacggaggggaaggaggaagacgaccgcccgggcgccaacaagaacccggcgcgccagaccaacggcacggaggcgcagggcacgagagacaacgaccacaaagagcccccgccggggccgcgcaacgagaccggggagaccaaggaccggagcccacgaccgcgccggaaaccccgagaacggcgccaccgcccacgaccgcgacaacaccagacgcacagacaggcccgaaaaaca

SEQ ID NO: 25101 - DNA, 277 bp, Zea mays
  Clone ID: MRT4577_122897C.1
ctcaatcagttctgagcacttatctaaataaacgggttcttaaaaggggcgtgacgacggatttctcggacctcctacaacaacgcgtacttacctaaaagcttaacggtgacctccatgctcttgccaatcgtctacggcaggaacaaatacatgaacacccaccctgcagcagcgatacaagcgtagaagttgaagctcactgagatggtgatgatgttcaagagcgagaggaatgacatggtggtggctccgatcatgatacggataagccccc

SEQ ID NO: 25102 - DNA, 569 bp, Zea mays
  Clone ID: MRT4577_122898C.1
ctcttaattccattatgttaagagaattacagcaagacaagaagaggccgtggtcacatgctcacatacatcatgctgctacagataacacagcaggaagcaggaaggtttgcaagaacaggtttcccctccacggattacatgatgagttattcacattatcacaaagagtattaccgaatcttggcagtggtaaaaagaaaaagagagagagagagagactaaagaaagaagcagtggccaaaaaaagaaaaattaaaattatcaatttctatggagagagatagcacgatagcacttgttgggctggtacgcattgctccgccggatcatcatcagccacacgaagcgagcagcacgatcctgcagtaccagttcggggaggagtgctcgcggttggttggttcgcggtcgcggcggcggcggcggctagaggtgcagcagcgtgtcgcagcgccagtccatctcgtcggccgccgggtccggcacgttcagatcgaacggcagcgggttcggcggcggcgcggcggcctcgtcggcgcagcccgggccggacgcgccgtcctcgc

SEQ ID NO: 25103 - DNA, 379 bp, Zea mays
  Clone ID: MRT4577_122899C.1
agaaggctgggctgccagcacgggccgggccggactggcgggccggccgccgcttcccgtttttttttttttttttatccattttttctatttttttgccacctacaacttatataagttggcaaaccacctgtattaaaggaaacatcttttcatatggggatcaaaaacaagataaaccctactgcttcacgcctttcaccgctttaaaaaatagccacgatctttaaggcccccaaatctcatcccaccagttgtcaacccccttttgaactcttgtagtctgaaaaagtcttttcactttggtataccaaatgacagcctccggtacaatttatttacccagtatcaccataacaacttctccggctcgccctat

SEQ ID NO: 25104 - DNA, 426 bp, Zea mays
  Clone ID: MRT4577_12289C.1
gacaagcatcgttcttcctttcaggtactgtaataatgtaatggagccgctggctagctacctagctcgctagtttactcatttaacggccatgagtaacaaagggtcacccatgaccattggtgagcatggcaaccaaggagcggggtgagcctacgaaatcggaaggacgaatatataaggaaaaaaggagcttggaagctagccagcggctccataaaattattacagaacctgcccgggcggaccttgaaacgggggaattaccacgataagggcaaaactgggggcactgggggcctgcactaagggggcccaactcggcccaagctaggcgtaataaaggtcataggcggtccctgtacaaaattgggatcgggaaaaacctgacacaacctaacatactgaactttaaagagaaaaccc

SEQ ID NO: 25105 - DNA, 468 bp, Zea mays
  unsure (1)..(468): unsure at all n locations
  Clone ID: MRT4577_1228C.1
cctcgagccggcgggananactttgtactgctacggagnngaagttgcaaaagaggtgcgatccaatggcgccgtcgtctaagttgacgacgggcatttatgcgcgcttcggggtcgcacgcgtaccatcgccgagggttgcgggccatcaaggccaagaacgggggcgccttccccaaggccgacaaagccgccgccgccgcggaacccaaagtctaccctgccgacgacgtcaaggccggggttcccaggacccgcaagcctaaggctaccaagctcaggtcgaggatcacccctgggacggggctgatcctcctcgcagggtgcttcatggggaagagagtggtgtttctcaagcaggtctggggcgggctgctgcttatctctggggctttcaagatcaatggagtaccggtccgtcgagtgaatcagacccatgtaattgatacatcaaccacagttgatatc

SEQ ID NO: 25106 - DNA, 345 bp, Zea mays
  Clone ID: MRT4577_122900C.1
acccactcgtgcgcaagatcactttgcgtgcagcattctattttccgaaatcgagggtttggttagggagaggtccgcttgtaacagttgacagggacgagatggacgccagcggacgcggcgtctaggtcgccgttctctgcatgctgctggtcttcgccatcttccccctcctcctctggcgccgccgctccgatgccgtcacctccgataaccaccgcgtcccgctccagcccctccagtaggatcacgtgctgcacggtcgcgcgtcggcgcgaccgatgcttaagatgcctgaagctgccggaacatgctcctatactgcgtcaactactcgcaatgctg

SEQ ID NO: 25107 - DNA, 736 bp, Zea mays
  Clone ID: MRT4577_122901C.1
ctctcccgccgccgcccctcttctcttcctctgcccacaaaaccctagccgtcgcctcacagctcgccgccgacgcagcgagctcttcctccaccgccgcaaccatggcgacccagatcagcaagaagaagaagtttgtgagcgatggcgttttctacgccgagctgaacgagatgctgacccgggagcttgccgaggacggctactccggcgtggaggtacgcgtgacgccgatgcgcacggagatcatcatcagggccacgcggacgcagaacgtgcttggtgagaagggccgcaggatcagggagctcacctccgtcgtccagaagcgcttcaacttcccggagaacggcgttgaactttacgccgagaaggtcgtcaaccgtggcctctgcgccatcgcccaggccgagtcactccgctacaagctcctcggtggccttgccgtccgcagggcatgctatggtgttcttcgctttgttatggagagtggtgctaagggttgtgaggtcattgtgagcggcaagctcagggcccagagagccaagtcgatgaagttcaaggacgggtacatgatctcatctggtcagcccgttaacgagtacattgatgctgcagttaggcacgttcttctcagacagggcgttcttggtatcaaggtgaagattatgcttgactgggaccccaagggcaagcttggccctaccaccccgctgcctgacctcgtcaccatcca

SEQ ID NO: 25108 - DNA, 107 bp, Zea mays
  Clone ID: MRT4577_122902C.1
ccgaacatccggggtggtaactataacagaggggcacctacattaaatacactggccctcgacatacaacgccatgactggcaaaaccctcacagaacctaacttaa

SEQ ID NO: 25109 - DNA, 549 bp, Zea mays
  Clone ID: MRT4577_122903C.1
actcctatgggcgattgggaccctcgaggccggccgggattctacgcctgcgccacgacccagaaatacagtcaatggcaatgctgggaagcagccaagcacgtccgccgtgtcagtagtaccagatgtcattgagatcctggatgacgacgactgaggtatttctggcgtgggcctctattgttattatccttttcgagagacaaaaatttctagtgttttatggtcacgcaaggcgttttggagatggagtgctatctcgagcttggcaagaatgcgatttacaattagataccacttatttgacacagcacccggcgtttcgggataggtcccttggactgcatgttacatagaagacgagaggttctctcttgccttttcaaaagaaaagggaaaaggaagagggcatggggagatgatggatgtttacaacctatctaggctacagtacacagatctgtatatattaaacgtgctgggtctgccaacataatacataacgagcttgttctaattaccaaaaaaaaaaaaaaaaaacccgcggcc

SEQ ID NO: 25110 - DNA, 220 bp, Zea mays
  Clone ID: MRT4577_122904C.1
caacaacacaaccaagatgagatcagccgtcaccgttgctttccttctcgtgtgcgttctcttcgcctccttcaccgaggccaagaagatcaagcctgctgctccccaactcaacctttgcggagtctgcattgactttatggatgaagcccttaacgaattaatcgaaatcattgccaacggaggtgttatcggaacttgcggtgctctctgcagtgct

SEQ ID NO: 25111 - DNA, 271 bp, Zea mays
  Clone ID: MRT4577_122905C.1
tctgtttccattgcatcttttcgattctcttaacaatagggacatctcaatcattaatgtttttatctaattaaactaaattatatttctttatacactttaattcattcttcacaatttatcttctctatctcaatcatgcttttcaagaactataactgcatcaatcaatcacactataactcaatccactttaaattgcatatcttctacattaacaatgtctacatttcactttactttacaatattttctcatttattcactcctt

SEQ ID NO: 25112 - DNA, 390 bp, Zea mays
  Clone ID: MRT4577_122906C.1
gaacttccggccagcgcagccattttggcttcctgaccttgggctacggctgaccgttttttgtggtgtactccgtgccatcatgtccgtcctgacgccgctgctgctgcggggcttgacaggctcggcccggcggctcccagtgccgcgcgccaagatccattcgttgccgccggaggggaagcttgggatcatggaattggccgttgggcttacctcctgcttcgtgaccttcctcctgccagcgggctggatcctgtcacacctggagacctacaggaggccagagtgaaggggtccgttctgtccctcacactgtgacctgaccagccccaccggcccatcctggtcatgttactgcatttgtggccggcctcccctggatcatgt

SEQ ID NO: 25113 - DNA, 1536 bp, Zea mays
  Clone ID: MRT4577_122907C.1
cccacgcgtccgatgcagtaaggttactcttatgggcattcttgctttcttcctcaactgcagcccaaagttcaagtccctctctctgtccaagtgcatcgagatcaaggacatctgctctgcacctgcacaacttccggtatgcaaatcactacgttccctggccatcaaggattgcccaggcttcaccgacgccagccttcccgtggtgggcatgatctgccctcagctggagaacgtcaatttgagtggccttagtgcagtcaccgacagcggcttccttccactgataaagagttcaaacagtgggctggtcaacgtcgatttgaacggttgcgagaatctcacggatgcagctgtttccgccttggttaaggcccacggcgcttcccttgcgcacctcagtctcgagggatgcagcaagattaccgatgcaagcctgttcgccatctctgagagctgcagccagctcgccgagctcgacctttcgaactgcatggtcagcgactacggcgtcgcggtcttggcagcggcaaagcagctcaggctgcgcgtcctctcgctgtccggctgtatgaaggtcacccagaagagcgtccctttcctaggcagcatgtcttcgtccttggaggggctgaatctccagttcaacttcattggcaaccacaacatcgcgtccctggagaagcagctctggcggtgcgacatccttgcttagaggaacacggcggttattcgtcgctggagatgctaggtcaaccttctccggatgcaaatacacgaccgaagcagtagtttagtactcaagtctatgctctgtagttgagtctggtttccggctcgtgtttgtgtcatggtgggtcttctgttcgtcgtcgtcctagggccagttgttttccgaggggggtgtttttttccggaggctcatttttttgcaggaatcctcctgtgaggatctctgtttcttgagcctttggcagccattgctatggcactctgcccccttttgtcccaaactaagccctcgtgatcagtcgttccaccatgcagtttctcaagttgtgtttgaaacccaagtatctgtgtcaagtgtgtgttcttttccggtattcctggttatagagctgcagacatcaacactcttttgattgcaattgtagcaagtccagttgtcggtggttgcaactctccatccagaattgcagacatcaacattcttttgagtgcaattgtatcaagtcccaactgtcggtgtctccattcagagaaacttagctccatgtctttgatgtctgggtgcctgcaatcttgccgagtgcagtgtgttgttggccatgggcggaagtgtcggtatggtttgcctatgtgcttggggatctggcctttgcaaggttcattctacagagccttttgccttcacagccctgtgtggttgtttttcttctgcagagacctgattttgacaggcaggtggtttaaacactgtaatatttgcaaccttcctctgaagataaataaaggttgtgtttcggttct

SEQ ID NO: 25114 - DNA, 816 bp, Zea mays
  unsure (1)..(816): unsure at all n locations
  Clone ID: MRT4577_122908C.1
accaaaataaccgaaggatgcatcaaattaacaacgagattgagtccatcttgcggggcataattgcaaaaaggatgcaagttattcaggaaggagaaagaacaaaagatgacttactcggcttattactagagtctaacatgacagacacagatgaaaatggccaatccaccctaggaatgtcatcagatgaagtcatggaggagtgcaagttgttctattttgcaggaatggagacaacatcaatattgcttacatggacaatgattgtacttagcatgcacccggagtggcaggaccgtgcaagggaggaggttcttggcctatttggaaaacacaaactcgagtatgagggtgttaatcggctcaaaattgtgacaatgattctatatgaagttcttcggttgtacccaccggctactgtattcacccggaaaacatacaagaagattgagattggaggcatcacgtacccagccggtgtgatgtttgagatgccagtgttgtacatccaccacgacacggacatttggggagaagatgtgcaccaattcaacccggataggtttgccaaggggatctccaaggcgtccaaggacccgggcgcatttttcccattcggttgggggccacggatctgtatcggccagaacttcgcgttgctcgaggccaagatggcattgtgcatgatccttcaacgctttgagtttgagctcgcaccgtcatacacccatacgccgcatagcgtgatgatgttgcgtcccatgcatggtgctccgattangcttcacactatctcttcgtaatctcatgctc

SEQ ID NO: 25115 - DNA, 117 bp, Zea mays
  Clone ID: MRT4577_122909C.1
gcgtaggcacatgatgcgcagcatgaggacagttataccggtgttgtcactggggattgcactgacggtatgtggctgataagaggcagcagacaccttggtttagcagatgtctag

SEQ ID NO: 25116 - DNA, 466 bp, Zea mays
  Clone ID: MRT4577_12290C.1
gggttgtttttttaagagagataaataaactctagaaagcattatgacgatttataagagcatgttaccaagaatgtgtcaacatgctatatgatgaaaattatactcatgtacaacaacacaaaacaaacctgaagcttggctaatgatctgggggggggggaaatatcattttaattacatatgtagagagcaacgatgtcttacgaataggattccagtgtaaccggaacatgtaaatttagaaaaaatattatagggtttactaaggtagatcgagtattatatttataagattatagagtaaagatctaaaggtttctattaaggaagataaagacaatggttatagaatgctagtgaatagtgaaacaattgacctttatagttcattggtaatagcttggtgaatagactaaaacatgaatcgtaatctgaaagactgttgaattgctatggtacttct

SEQ ID NO: 25117 - DNA, 349 bp, Zea mays
  Clone ID: MRT4577_122910C.1
ttcccttgcagccggttgtctgaggagctcttcctgatcgtcgccggcgtgctgcaggtctctgtagatggcaggctgggctccaggctgcaggtcctagcttcggcttcggcttcgacttggccatggcgtcgcgcagattgtgcctcttgttcttggctgacctcttgctgacagagttgggtcaggcccagctgagagtagctgctcaccaggctggagtcaccatcctcgtcacgttctgatggtgtcaacagcacgtcagcatcatatacattcctctccttgaggaagttcatgaactccctggaggtctggtccctccgcccgtcactgcccgctttgaggt

SEQ ID NO: 25118 - DNA, 139 bp, Zea mays
  Clone ID: MRT4577_122911C.1
cacgacctgctttcaccctctctactaaacaatccactatcgttagcctcaagcacaaactaattttcatcaatcccctcaagctcacattcctgacataatatctcatcacccagatctactcatgcactttctcaca

SEQ ID NO: 25119 - DNA, 311 bp, Zea mays
  Clone ID: MRT4577_122912C.1
gacaactggataccctgccgcctacctacaactactctgatgtaagccgctcccaatgggcaatgcacctacaaaccttcaacaacctgtggtgcctcatattggtccacctctgacttagacacatgcagcaaaccctgctgactactcacaacaagaggctgccattcaaccaacctcatgtgtcaaactctgctgcgtacctacaacagcgacaacagttacttaatgcactgacagtggctaacccactggagcctaccttactacagcagcaacaacaatagctgccatacaaccatggctatttg

SEQ ID NO: 25120 - DNA, 294 bp, Zea mays
  Clone ID: MRT4577_122913C.1
ctagggttggttttttttttttggaacgacctcaattattttttatttaccgggttttagttcaagaatgaactatttgtcaacgacaaatactcgataatgattcgcgaatgaaggtttgcatgacaaccatgggcctggtgctatacgtcttttatcctgcgatcgacccccacggatacatatacgggggagcctccatcgcttgccgccaggcgggggaggcgcgtcgctaacctaagtcctgttgtttgccaaggaggtcgtaaaacaccggcgggttcttgtacccct

SEQ ID NO: 25121 - DNA, 384 bp, Zea mays
  Clone ID: MRT4577_122914C.1
agcttcggccaacgcttcggcgtccctcttcatgtcggcctccgcttcggccgcggcggccctcaacccgcattgcttcggccgcggcctcccggttgacggcttcgtcccctgctcgctcttcagcttctatggccgaacgggacacccttcttgcaacccccgcagggtgttcaacaagatggagggtcccccggacctggcctcctgcaacgcactgctcgacgcgctgtgccacgccggggacctggacggtgccggggacttctttgagcggatggcggtgagggaacccgtgtcgtggacgacgctcgtgtctgggctgtcgcggggcggacgccaccggtgcgctctcgaggtgttcaagggatttttgctgggtaa

SEQ ID NO: 25122 - DNA, 568 bp, Zea mays
  unsure (1)..(568): unsure at all n locations
  Clone ID: MRT4577_122915C.1
tgccaaanaacataacatgccggntgcttttcttngagatgtcatcaacgaagctgatcaggacaatgtaagtcttactttaattaggccacaaacatttaatttatataatggcatatcttttttatttcttactcaccttcgttaaacctatatgaaatgtacaatcaatgcaagtagtgtgatgcaatngaaaacacatacagcttgccaataaaggcagacacattttattgatcaacatagttcatttgatgctcaattaatcaatgttgccaatgctttcaagtgtaacggttagctcccaggtgagagcagccggccagggatcaaacaccagtggcacaaaaaaaaacgcccctctgtggtggccatgaaaaaagtggcaagacactgatcagtggtacaacccaattaaatgaggtgtcccttgactaatctttaggaggctaagtgattttttctctctacacgactctcttacatattgtatcctgactacatttataatttagggactcagatttgtatcatgcaatctcttagttgtcttttatatttgaaaaac

SEQ ID NO: 25123 - DNA, 525 bp, Zea mays
  Clone ID: MRT4577_122916C.1
ggccgccccttttttttttttttttttcctcatggtacagaaacaaatgtcacaccattaatatataacggagttctgtacaaaatagataaatgattacatcatacgaagaccacaatccagcaaccatagttgactagcagatgacggcctagacctctcacgaacaccatcacgacatccttcatgcgcctcatcctgtggtacctgtccttaaccgtgattctagtagcgcaaatgccttggccacgacgtgcgacggacctgcggtggagctccaccttcggcgaggaattcatctatcgaggtcgccgttttttgcctgatgatgccacgcacacctttcccgattaccagcgaataccctattgccatggccaggtccgcgcgacggcgtgtgcgcgtgtttagccatggtggcggacggcgggtctccctgcctcatggcccccggtggcgacacaatcagaggccttggcgcccatgggacaaagaacagtgctcggttgattggatcccggccgg

SEQ ID NO: 25124 - DNA, 213 bp, Zea mays
  Clone ID: MRT4577_122917C.1
gagatcaacgcggttttctaaatacacaatatacaatatcgaagacctagagacacggtatctgaagcgggtagtgatggtgagcggagtcctgaagaacgggaatgggatccttcgggcggaggtgaaccgggggctgtacgagcaaaacctgccggaatctagtctagcgagggaatgtgcgaagtcttaagaacggaaactgcgacgcga

SEQ ID NO: 25125 - DNA, 243 bp, Zea mays
  Clone ID: MRT4577_122918C.1
accactctccacccgcgcctccaaaatccaaatccgatcgggctccgcggactccagatcccgccggcgggcggagacggcgagctccaggcggccaagaagcccccccctcgcagcgctcctctcctctgcctctgcgaatcccttaccagggggaaataacattgcctgaaagtttttcaggccctggtgtagcagctagaattacccagtttaatggctgactaacgagcttttgatggt

SEQ ID NO: 25126 - DNA, 389 bp, Zea mays
  Clone ID: MRT4577_122919C.1
cacacataattgttgcgattactaatgcagactgatgactgataatgtctggctaatgaatcgctataatgcaatccatatatagctgagatgcagtatgcctaaaatgaatatctgctgcactatggagcacagaaataaaagagcaaaaaaagtaacatatatgaaaagaaatcataagatatcttattaagcctatcctgaagccaaaggaaatgagatcggaattcctcggagaattccaattccacattttcaagaaataaggaggcccagatgttcatatatgaattggaattattggttttcttattaggcctatcctgaagccaaaggaaatgagatcggaattcctcagaggtaccgagctcgaataccctatagcgagt

SEQ ID NO: 25127 - DNA, 1058 bp, Zea mays
  unsure (1)..(1058): unsure at all n locations
  Clone ID: MRT4577_12291C.1
gtgggatactgtggctgctgattcacttcctnaagtgcatgagatcatgctantaaggccctccacaccgtttacgaacgagatcgcagagattgcccacaaggaagcatggatctgaccctatcaatcgtctcaggaaagcatgggcggtgctgtttgacggtttcatggttgaggcgagatggctagcgaccgaccnaggtccctatggcggaggactacctacgaaacggcgtcatcacatcaggagtgccactcacatttctgcacatattcagcatgctagggtatgatgacgatcgaagcaccgaggaagaagaagaagcgatcatcgaccacatgccctcgatcatctcctgcccggccaagatcctcaggctctgggatgacatgggcagcgcagaggatgaggctcaagaaggattcgatgggtcgtacagggacttctacctcatggagaaccctagccgcagccccggcgaggcggaagcgcacatgcgcagcctgatcatgagggagtgggtggagctcaacagggagtgcttctgcaggaggaccttcccctcggacatcgcgcaggtctgcttgaacaccgtgaggatggtcagcgtcatgtactcgtacaacaaggagcagaggcttcccgtcctcgaggactacgcgacgatgatgttggtggtttgatttgaagcatgcatgcatgcaatgctctctccgatccgcggatatgaaagtaaagtccttgtcatgcagataatgatttgttttgagaccagagtagtctagagtagagattaggctctgtaaaattagatagctaggattagaataactgggcaaacgaatatatggtatatgtccatatgtaaagatgcaatatatagcaacatatatggtaccgtcgttattatctttttttcaaaaaatgtaataatattcaaatatgcaatgcaatgtaaaacccctgtaggaggcgccacgaccggccggttgcatgccgactacaagattccaatacagataggaagctgcaccttgctgctccgtcgcatggaaag

SEQ ID NO: 25128 - DNA, 234 bp, Zea mays
  Clone ID: MRT4577_122920C.1
caaccatataacccacgcgtcaagggggactttttttttttttatgacaaacccacgcacaaacttacacaaaacatccgccaacttttgcatacaaagcctatcggagaactaaatgagactgaatacctattctagtttggtcacaccttaaaaaaaaatcaattggaaaccagacccaactcaaacaccaaaaccccccagaaacccaaatctgaatagacacaacgcccc

SEQ ID NO: 25129 - DNA, 273 bp, Zea mays
  Clone ID: MRT4577_122921C.1
attggtccaatatgcacaagagataacccaacattagttttcatcgaaccgaattcaccacaggggactacgtccaagctgaaccccgctcaagaggcatacatacgctcaggaaggggcgcattggtaggttgctagaactagacctcattcacggaagggaacaaaactgcggacggtgaactcacattgaagaggatgacagggaagggggggcgacattgtgaggatggaaatccaaaaacagggcaccaaggtatgaaaccatttgtc

SEQ ID NO: 25130 - DNA, 1605 bp, Zea mays
  Clone ID: MRT4577_122923C.1
attgggtacctcgaggccggccgggcggctcggcaaacaagcttctcttgtcactcatcagcacggttagcatagctagcaccatgaaggtagagcgcgatctccacatgagccggggcgacggcgaggacagctacgcctccaactcaaggcttcaggagaagtccatactgaagacgaggccggtgctgcacaaggccgtggcggcggcgcacgccttgtcgctctcctcaggaggacccggcggcggcgccatggtcgtcgcggacctcggctgctcgtcggggcccaacacactgctcgtcgtctcggaggtgctagcagcggtggcgatggtggccggcggcagcgcccaaccgcagcacgtgcagttcttcctgaacgacctccccgggaacgactttaacctcgtcttccggtcgctggacttgttgaagaacaagaagctggccgccaaggacaggcgggaggagtcgctgctaccgccgtactacgtggccgggctgccgggctccttctacacccggctgttcccggaccactgcgtccacctcttccactcctcctactgcctcatgtggcgctccaaggtccccgacgagctcgccggtggcgcggtcctcaacgagggccacatgtacatctgggaaaccacgccgccggcggtggtggccctgtacaggaggcagttccaggaggacatgtcgctgttcctcaggctgcgccacagggagctcgtgcccggtggccacatggtgctggcgttcctgggcaggaagaagagcaaggacgtgcttcgtggcgaggtcagctacacgtgggggctcctcgcgcaggctctccagtccctcgtcaaacaggtcccttctcttaatttctcttgtgcatgcatgcaagtgcaacatcatgtcagcttgcttcttgatgcattgcattgcgtttgcgttgcattgcatgcatatgtatggcatgcagggccgtgtgaagaaggataagctggactccttcaacctgccgttctacgcaccttcgatggacgaggtgagggacgtgatcacgcggagccaggcgttcgacatcacccacatccagctcttcgagtccaactgggatccacacgacgacgacgacgtggagatgaagatggaagaagacgtcgccgccgtccagagcggcgtcaacgtcgccaggtccatcagggccgtgatcgggcccctcatcgcccgccactttggcgagcacatactcgacgatctcttcgagctgcatgccaaaaatgtcgcagtgcacctgcagaaagtgaagaccaagtaccctgtcatcgtcgtttccctccaggcgaaatgagccgcgcgccaaataaaggaccaagctagctgatgcaaaatctggcgtcaagttagctattagtaccgctactattatatgcatgcagaataattagtcaaacaatcagaaaaataaagtgcctcagagactgttagtggcagatccaatgtttcgttaattatatgtagtgtaatggtaatggtaatggtaatggtaatggtaatggtagacatcaggtttaaaaaaaaaaaaaagggcggccgccaccgcggtgga

SEQ ID NO: 25131 - DNA, 1792 bp, Zea mays
  Clone ID: MRT4577_122924C.1
ctcgagcggggcccgtcgaggccggccggcacccaatggatccgtccgccgtcggctcctcgcggcggaaggcggagcagtggttgagcgtggctgagaagctcatggtggcgcgggacattgaagggtgcaagcagttcgcctcgcaggccctggccgccgatccccacaccccgggcgccgacgacctccacgccgccgccatctccctcctggcagcccagcagcgccgcctccctaacggtcagcctgatccctacggcgtccttggtctggaccccgcaaaccccgcatcacgccgaccggatgccatccactcacaatatcgccgcctctctttcctcctcaatcgttcccaccaggaccgcccctgctcgctcgccttcgccgaagccgcccggctcgtcgctgatgcctgggcttttctctctgatcccgttcttaaatcctcccttgacgtggacctcgatgccgccgccgcagctcgcgcgtaccactctcctccaaatctaccgcagccgcactcgcagccacatctgcctgcacggctaactccgccggtggctgctccctccccgcggtcgactccgccgctggtttctccccttccgcgggcaacatcaccgccggctgcttcccctccacggcaaactcagcggccggctgtcccccaaacaaggtcaacaccgccgccggctgcttctgctccacgatctactccaccaccaccggtttctcctcaaacactgtcaacaccgctgcctgccgctcccgctcccgctccacggtctacaccaccacctgttgttccccaaacaccgtcaagtacgctgcggccgactactccccaaacgccggtggctgcaactgtcccagcagcgaagtccggtgcggcaccttcatcaacgttctggacagtgtgctcggcctgctgccacattcaccagttcgactgccaatatgagacgtgcaagttactgtgccctagttgccgccagccatttgtggccaaggcaatggctgagccaccgcctattgtgccaggcaccgacatgtattactgcacttgggggttcttccccgttgggttccctgggtgtcctggctttgaaagaatggtcaatgcacagccatcgggagtagatcagctgaatgcgccatggcttggaagcgcaggtggtgtgcatggtaatgctcagaatggggtgccaccagttagtgccccagtggtagaagtgccagtcaaggatcccatagaggtgcctgcagtgacaccgccagcgaagccgatgcgagtgaaggtgggtgcgaagaagcgtggtcgccccaagggtagcaagaacaagaagaaattatgaatgccaatgatgaacatgatggttatcatcatagatcacatgaattaactgagatatgcattcaatcacactgccattgtagtcaaccgaagcactcgtctgctggttgaattctcacttgctgttgccaggatctctaatgtggagcaagcaattttattgctgaaagacttctttttcaatggtagaattcttccttttcgagattatgatgttaatctctggttcgtccccactgccgtatttgacattatgctttagctgtaactattgtatttgcatattcgtctaatttctgcttccctgaggacagttgtattgatctaaatcgataggtgtctagttactgtttattgtacgttttgagtttggtgctactctgctctagtgctctgtgtcgtaatgctgcaataaatggaatggtttaaagctct

SEQ ID NO: 25132 - DNA, 653 bp, Zea mays
  Clone ID: MRT4577_122925C.1
attaccagcagcacagttatccacactaacgaacgaactcttgctccgatcacgatctacctgaggtccaccatggcggctgtgctgaacagcaggaagacgccgcaggaggtggatcgtgctgaagaaggtggcgctgctggcttcttcctcctccgaggtcatcacctgcgtgaaggtggagtcgtcgctggatccgtacatcccttacgcaactgcgagggacagcgatctcccctcagtactagctgcagcggccaccaagagcctcaacagcgctccgcgaaccagcgcggacgcatcaggcagcttgcctctgcctcaagagacacgtcaacattccctaaaaatgcaacataggtaccctccccaccatccccggacaagtgcggtctctcccatcgattccccataatcatgtccacccactgtaataagatcacctaacttacgacgaccatatgctaatgaagcctaccgaacatacactgtacgatcccgcgcactgcacgagagatgaatgcagagaagaaattcaataaagctagatgcattgccatgaacatcatgcatgatcaatctatatatatactgcactcgaagactctattatatatgtatgcggggacagcagtgctagttgattcgatgca

SEQ ID NO: 25133 - DNA, 165 bp, Zea mays
  Clone ID: MRT4577_122926C.1
aattcggcacgaggcagctctatcgacttatctaggttgggttgcaccaaatctgagctgtcatgacaaaaatcatgatgcaatacaagcagaatatgcttcctgaaagacaaagtaatcacaaagttgaggcagataaaatggttgagccaaccaatcaatctg

SEQ ID NO: 25134 - DNA, 669 bp, Zea mays
  unsure (1)..(669): unsure at all n locations
  Clone ID: MRT4577_122927C.1
ggtacgcctgcaggtaccggtccggaattcccgggtcgacccacgcgtccgcaaaatctgtgagcacgagatgaatgaaatcgaagtctgtccagaatgttatcttgcagcttgccaaaaacgagacaactggttctgtgagccctgtagcaatccgcaccctttggtctgggcaaaactgaaaggatttccattctggccagcgaaagctctgagggacaaagacgggcaggttgacgcccgtttctttggacaacatgacagagcctgggttccagtcaataattgctacctcatgtctaaagaaatccccttttctgtgaaaaagactaaaagtatcttcaacagcgccatgcaagagatggaagtttacgtggagaacatacggaggaagtttggggtttttaattactccccgttcaggacgccctacacgcccaacaaccagtaccaaatgctgctggatcccagcaaccccagcgcgggcacagccaagacagacaaacaggagaaggtgaagcttaattttgacatgacagcgtcccccaagatccttctgagcaagccccttctgagcggnggtgccggccgcaggatctccctgtccgacatgcctcgctcccccaccagtacgaactcttccgtgcacacgggctccgatgtggagca

SEQ ID NO: 25135 - DNA, 344 bp, Zea mays
  Clone ID: MRT4577_122928C.1
gccactcgtacgggcacaaggatctcctgtacggtgatctatagctgaagcagcgtcttgggctgcgggatgcgttcatcaccagcctggacgactgccaggcctacaccctgaaccggatccacgacccggactaccatgtcgagctgtgcacagagctcatcaactagatcatggactcgaccaaggctgcggaggtgctcgctaagctgaactatggaagcgaattcgcacacacgctggtggacaccctgatcctgaccatgaacggcataccaaacagccttcaaaacaccggttaaaccactaagaggtgatcttgattattctcctgatcattggct

SEQ ID NO: 25136 - DNA, 196 bp, Zea mays
  Clone ID: MRT4577_122929C.1
acctcgataaaactcaaaccctaatattgtgaagctaattaacggttagtctttatttcacatttatttttaggacctacttacatacggacgatgtaataagaatgataagaaaaaaaaaataatagtctttgcgtagtgtagtggtgtgtcctctatgtaatttgcgtgaggtactaggttcgagccctcttcc

SEQ ID NO: 25137 - DNA, 448 bp, Zea mays
  unsure (1)..(448): unsure at all n locations
  Clone ID: MRT4577_12292C.1
gtaagcatggatctaaccctgtcaatcgtcttaggaaagcatgggcggtgttgttcgacggtttcatggttgaggcgagatggctagcgaccgaccaagtccctacggcggaggactacctacgaaacggcgtcatcacatcaggagtgccgctcacatttatgcacatattcagcatgctagggtatgatgacccaagcaccgaggaagaagaagaagaagcgatcatcgaccacatgccctcaatcatctcctgcccagccaagatcctcaggctctgggatgacatgggcagcgcagaggtcgtcgttagttcatcgaaccatacactacatatactagcttgttaattaaatgcttttacctttaaattttgcaatccaatcgtacttgatgtgtgcatgggctttgcaggatgaggctcangaaggattcgatgggtcgtaca

SEQ ID NO: 25138 - DNA, 657 bp, Zea mays
  Clone ID: MRT4577_122930C.1
ggccgcttttttttttttttttttcttttttttttttttttttttttttttttttttttttttttttttttttttttttttttttggcgggggaaatcttattaccaaattttacaagttacaaaaattttactttatacatgatcggggggattacaaaagggattcaaagaaataactttgaactattataaattatttgtagttttgaaatatatgctagctcaagggaccatcctcaataagaaggtaaagacggggtatacttatataagaaggccgagcccaccggcacttaacaccatcagcagcagcacaaaactaaaacctggataacactaggttagtgttgttaggcgatgtccacttgacgattatccctcggtcgagcacttgcttgatttaaccatcttcaggttgattcgactgacgacgtcgtcttgcggaaatgtccaatctctgcattatcctgggtcaacttggggtcgtcttccgcatcacgtgattaattatcgcaccatacaaaccttatgggattttctctcctgggcgttcactgctggcgaggagacatgtgacgacgtcgcggtcgcgtgaaatataaacgagcagcgtgccgatgagcccgacgacccgggaggggttgtgctgacatcc

SEQ ID NO: 25139 - DNA, 249 bp, Zea mays
  Clone ID: MRT4577_122931C.1
gacggggaaggaggccacacccgccgatcctggccgaaccacccactgacgagccgggggggacggctgctccagtcgcaagagaccacaccatggccgggtctggaacatcggatgcgccaaaacgctcgtgtgctcaagcacgagcaccgcgcgagggctggctatagactgcctgagcacgctcgaggcatccattagcgcacccgagaggcagaggcaatgactgcacgctgatgatagtgggat

SEQ ID NO: 25140 - DNA, 489 bp, Zea mays
  Clone ID: MRT4577_122932C.1
caccccgaaaaaaccaactttttttcttaaccaaagggggcgcacgggtcttcccccatccgttcctcccctttgggggcagcccgggggccccccaaaagcgggatccttcctttttccaaccgacccagtttggggacacttgggaggttcgcctgcttcccaacaaaaaatttcaaaaaccaagccctggctgggttgtttcacaaaaaacccaaaccccaacccccaattggggcccttttaaataaacaaccccaaaaccaattcccccccaaaaccccgttttattcttcaagccctcccgcttttccccccaggggatccttttcctccccccaggaaaaaaaattcccccctttgcgtcccttttttgtaggagggggagccccctccacgtttcccccgtaaaagcagggaaaaacaaatttggccgaaggagccccccccctttcagctcccaaaaacccttgttacccaaggagcccc

SEQ ID NO: 25141 - DNA, 449 bp, Zea mays
  unsure (1)..(449): unsure at all n locations
  Clone ID: MRT4577_122933C.1
acataaccttggttataaatggctgttacatacactgcgacagggggcgaccttcaacacaaaagggtccaaccgcgtaattacacacccaggagcacgaagaaagcgcataacgggaaaagccaggcggggaacagcatgaaacgggcacagccgaggagagggcagcgtacagacaccctagttgtgagggcaatcggctgacaagcgcaggggcgtaggggcatcagcggacaaggcaagggggggggagcagctagtcaagggaagaagtgtcgcgggctagaataaacagggcgtaaagagacagggaaaaagggtcgataatagcagcaccttaaaaagacattgtagaaatatatggcctagaatttggcgacaaaagaagcatggatgggagaaactgggacaaaanaggtgtcgaagggactgttccggggcacgggggg

SEQ ID NO: 25142 - DNA, 329 bp, Zea mays
  Clone ID: MRT4577_122934C.1
gaagaactcggatctcaaaagctcacttgatgatgactggatccggattcacagcgacgaaggggcaatagtaaggtcttagacttaaatatacaatcacgttatatatgcactctattacctcattgattatttcttgaatacatctggctattcttgtaccacaagaaccatgatgtataacatctaaaattcaaacttctccttcgaataaagctaccaattccacacaaaataccctgacctagatgacacaatcaccgacgaccaggccatcttaatactactggtagccatacagaacaatgccacccccgagttcatatatt

SEQ ID NO: 25143 - DNA, 442 bp, Zea mays
  Clone ID: MRT4577_122935C.1
ctgctgacatcgacgagaagagcatcaggagggagaatcccgatgacctggtaatggtcctcgcggaggccaaggctgatgctatcatgtccagattgaacattgatgattatcagaaagaaggcagtcaaccaacactcctgatcacatctgacataggattattagagaaaaaccaaccaccaaggaagaagcacggcaattcctgaaaggtttatttccacgatataccagatgaggtcatcaagagcttgatcgatgagggagtagtatttagggtcgcaggtggtttgctgcttgaacatccattgacgctgccgtttgtcgaagcagtggttggttctagtgacagtgtcatggggctgtcaaaggaggttgcaaacaagttaattcacgacgcacttgtctacttagcgtagcaatttcaacactactggttctg

SEQ ID NO: 25144 - DNA, 755 bp, Zea mays
  Clone ID: MRT4577_122936C.1
ccggccggctgcccactctgttccagcagcgctgccagcctgccaccgtcttcccggaaccccaccgagccgacgaccgaagccgacgcgaccttcctcgcgtcaccgcgcgcaagagtcccatggccacggcgggttcgtcaccccctgccagccagcagcccttcaagctgatcctagggtcgtcttcggtggcgcggaagcacatcctcgaggagatggggctggagttccaagtcatgactgctgacatcgacgagaagagcatcaggagggagaatcccgatgacctggtaatggtcctcgcggaggccaaggctgatgctatcatgtccagattgaacattgatgattatcagaaagaaggcagtcaaccaacactcctgatcacatctgacatagtatgtctcgattacctctgcattcctaattgggtggaattattattccatggttgtggtggaatgtatcttctcatctgtttttgctagaatgttatcattcgtatgattgcatactgaattgtagttgactttgaggtggtcgtccatgaagggattattagagaaaaaccaaccaccaaggaagaagcacggcaattcctgaaaggctattccggaggtcacgtgtcaactgttgggtctgttgttgtaactaatcttacaactgggaagagacttggaagtttggacaaagctgaggcaattttcactttttagccaaaagactctttcatcaaggctacttttgttata

SEQ ID NO: 25145 - DNA, 176 bp, Zea mays
  Clone ID: MRT4577_122937C.1
ttccacgcttacttgcacgcgctggcgcgtgcgaatcaatgagacctaatcagaagacgcgaaatagctgcctgagcaggaggtggagcgggtatcccgttgttgttggagacgtactcaggtgaccacttgctgggcgacatctaggggcagaacttcagagccgttggtattgt

SEQ ID NO: 25146 - DNA, 1101 bp, Zea mays
  Clone ID: MRT4577_122938C.1
gaatgtgatattcattggtacctcgaggccggccgggactctgttgcgctgccagcctgccaccgtcttcccggaaccccaccgagccgacgaccgaagccgacgcgaccttcctcgcgtcaccgcgcgcaagagtcccatggccacggcgggttcgtcaccccctgccagccagcagcccttcaagctgatcctagggtcgtcttcggtggcgcggaagcacatcctcgaggagatggggctggagttccaagtcatgactgctgacatcgacgagaagagcatcaggagggagaatcccgatgacctggtaatggtcctcgcggaggccaaggctgatgctatcatgtccagattgaacattgatgattatcagaaagaaggcagtcaaccaacactcctgatcacatctgacatagtggtcgtccatgaagggattattagagaaaaaccaaccaccaaggaagaagcacggcaattcctgaaaggctattccggaggtcacgtgtcaactgttgggtctgttgttgtaactaatcttacaactgggaagagacttggaagtttggacaaagctgaggtttatttccacgatataccagatgaggtcatcaagagcttgatcgatgagggagtagtatttagggtcgcaggtggtttgctgcttgaacatccattgacgctgccgtttgtcgaagcagtggttggttctagtgacagtgtcatggggctgtcaaaggaggttgcaaacaagttaattcacgacgcactgtctacttagcgtagcaatttcagcactactgtttctgatcaaattcttactgcactcacctggagatgtgatcaagcagagagcatatctggggatacccatagtgattcatgtatttttaaacgttaaaccaagacaggcgcacctggcattgcaaattgtgatcaggttgtacttgccttctgtttcacttgaaggatacgttgatgcttcttttagtgggtcagttggtatgatttgtaatatactgatatacataatctcgtctctgatatgtgactgttaaaagcaattgctaaagaacaaaaaaaaaaaaaactcgagcccgg

SEQ ID NO: 25147 - DNA, 345 bp, Zea mays
  unsure (1)..(345): unsure at all n locations
  Clone ID: MRT4577_122939C.1
ctcggccnctccgagttcatttggacgcatctactgcttttctggaagacagacctgacggagagactggcagacattatgcgagcgcatcgcatggcaaccaggccggcttttgacgggaagccttggtagctggatgcgcaccagacgatgtccaaggacaagactgttgtcaaggtcgagctggacaggtggggcgaggcagtgacctaccccttcaatggcatacacgtcgtcgacacgcccacgcttgacgtcctcaagcaagaaggtccggagagatagaggctcatcaatgctcaccgcacggttgcggcgctgtcgactgactactacgtggggaac

SEQ ID NO: 25148 - DNA, 655 bp, Zea mays
  unsure (1)..(655): unsure at all n locations
  Clone ID: MRT4577_12293C.1
ccggccgggaacgttcaaagcctgagcaagccacaattctaagcatcgtctcatccctggtctccctgctcactgctctcgccgaggctcaggatgaaatcctcgaggctatctctcgtaatgctaccgtcacccgccttctactcctgctcacctcggacgagcttgccagcaaccctgatatcgtttcgttgagaagtgatgctcttgcttgtctcatgattctctgcgaggataacgagcagctctccgacaaggtcatccacacaaaggagcaccgtacttatggtactctgctgtcactacgcaaaacggccaatgggtgacggtgtcctcgcctgtggtgtccttcacaacatctttgcctctctagaggaccaggatatcgccctcggagccgacaactcggttctcattcccaccctctcacaggccctcaaggcttatgagccaggacaaatgtccgacgccgtaggatgggccaatcccttcgagtatcaacagctcgccctcgaaatcctcgcgtccattggaacaacactcaacacagcaagtgaggtcgagccccaggaagaagacnagcccgaggccaaggacgatgaagagatgggcgatgctgatcaagaaatctccgacggcgaggaagagggaggcg

SEQ ID NO: 25149 - DNA, 138 bp, Zea mays
  unsure (1)..(138): unsure at all n locations
  Clone ID: MRT4577_122940C.1
cggaaattcctcgggtcgtacccacgccgtcctgaagncgacgtttgtacannacgccttttgatgagatatttnnngttcttgagcccttcttcnngtttttgcaccctaaaagaacgnnggcaggnnnatgtcttg

SEQ ID NO: 25150 - DNA, 560 bp, Zea mays
  Clone ID: MRT4577_122941C.1
gagccggcctaacctggtcccgaatctaggaagcataccaaagaagggcctcgtcgccactgatcaacgactagtactaccaatggcggctgggacacttcctcctacggatcacagtcacaagatggggcggcaaggatgccgtcgctggaacagcgtgcgtccccgatcgcgaggttcaacctccctaattcgtgtagtgggccacgcaggatttctccgacgtgaacctgatcgggaatagatgcttcgccgcaactctacaaccgcggtcatgcgtcacgcgacgaatgatgtggagtacaagcatcatccacaccagctgcaattcggaggaggccgacttctctgaggggactccgcgtgctgaagtcgctgctgcatgataatatatgaccggctgaaaggactcttcggtcccatgctaaccaaggaggcatcatcacctaccatttcatggcgaacgaggagccactctcgagatctcgacatctaggaaaaacatatggatgagggcaccgtcctcctcaactatactacaacggttttcataaataaag

SEQ ID NO: 25151 - DNA, 596 bp, Zea mays
  unsure (1)..(596): unsure at all n locations
  Clone ID: MRT4577_122942C.1
aaagaggcaaccgacgatgggctgctgcggcgggcggatgatggggtctccggagggacgggccggcgccctggcggtggcggggcggtgccctctgcgcggtggcgggccatgggcggcgtgcgctgcagggcgtgcgaacgtgccgggcgacggggccgccgtgggcaactccggcggcagaacggggtgggagcctgaaccgcgtgaggcgcgtgcctgcgccacgtggggacgccgacaagcgcgctgtcgtggcgtgcggaagcacggctggaccggccttctgcgggcccgccgggctgaagggccaggccgcctgcggcaagtgcgtaagggtgaagaaccgtgcgacgggcgcgtccctcgtggcgcgggtcgtgggccagtgcngcntcggcggcctggacctggcctacgagacggtgttctcgatgatcggcaccaacgggcaggggctcctgatgggcgcccctcacgtcgactaccaggtcgtcgcctgctgggcggctgggctcagccggatccttcctgtgtgtgtgtgcgtccctgcctgcctggctggcggtgccgggaccgacgtcgttgtaaaacgc

SEQ ID NO: 25152 - DNA, 270 bp, Zea mays
  Clone ID: MRT4577_122943C.1
agacaactggaaccggacgacgtggaggcgagcgctatattcggttcgaggcctcctttttactcttgtccctcccccagaccatggtcacgtggtagtatggcatttttggaactcggttgatgatacatggcttgtacaggacatgagcagaggccaagaccgaggaatagagggagcggacatgaaatacatgctagggaccagagtgctggcctgctggctcaggacgggcgtatgcgggatggagtatcggggttacagttaagg

SEQ ID NO: 25153 - DNA, 643 bp, Zea mays
  Clone ID: MRT4577_122944C.1
cctcgaggcggcgggatcctcatccttctaactttcaccacacctttttgttcttgactatttctattccccgatcccgagtttaattacttaacccccctttaaactcaagatgattgccaccatgtttcttgctgcccttgccctttccaccggtgtgattgcttctcctgctgaggccaatgccaacgttggagctgcttccgccatccaggccaccacagccactgctcaggtcggtacccaaacccaaactggtgccaatgctaagacattcggcccgtggggtggctacccatacggcggagcatactactatggtggatatccttacgctggttactcctacggcggctaccgctacggcggttacccttacggcggttacccttaaggcgccgcttgctgctgttgccggtgtagccggtgcagctgatttattttacatggcgcatgagatagccaattattgtcatgcatctgacgaaccactgtgtggcccatcagctttatcttttttatattcgactccatcaccttttcaccctatagcttagcttacctcgtctgttcacgcaattcaaatgatggaaacccattcttttgctcatataaaaaaaaaaaaaaaaaaaaaaaagcggcc

SEQ ID NO: 25154 - DNA, 182 bp, Zea mays
  Clone ID: MRT4577_122945C.1
tcggctcgagggacgcaattaagaacaccattgagatgcgaactgaaatgctcagttgtgcaagataaccgggagttaatttggcccatgtccacatgtggggcccagaggcttatacaaagcatatgtaacagcatgtgcaaaggccctgaggaatgtaaaggactagtcctttccaggaa

SEQ ID NO: 25155 - DNA, 831 bp, Zea mays
  Clone ID: MRT4577_122946C.1
ataatggagcaagtttcagtgtcatctcgcacagtcgcactcgcactcgcacctcgcactagtcttgccaattaagctaggtatagacaagcatggctgctgctctcaagatggctgccatatgcatgctgatactgaccacgggccagctgatagcaactgccggtgcaaaggcgccgatggtgcaggcggacgccgtgcctacggctcgccgtctgctctcggcggaccatgggcgctcagcctccgagaggacgagcaactgcccctgcacctccatgactccgtggtgttgctttggtttgcagaggacggcgccggagaactgcttctgcacccccgcgactccgtggtgttgctttggtttgcagaggacggcgccggagaactgcttctgcacccccgcgactccgtggtgttgctttggtttgcagagaacggcgccggagaactgcttctgcacccccgcgactccgtggtgttgctttggcgccggcagcactgccacaaactgaaatcttcatgagaagagcatgcatgcagatggatgtggcctctaattaaatgcttgcgtatcatccctgccgtgtgtctttgttctccaacaataagtacgtacgtgtagaggggatgcatgctgctacatctgcatgcaccgtagtacggctttgtttgctgcagatgctctgcaggcttacgacccgagtacgcgtataggcggtgtacgcctgttttgtaatgtaccaagtaatgctgttttgctttcaataatataagaggccgcgcatgcaacagttaaacctttaaaaaaaaaaaaaaaaaaggccccta

SEQ ID NO: 25156 - DNA, 287 bp, Zea mays
  Clone ID: MRT4577_122947C.1
agcgaataaaattcaacaatctggagctcaaattcattccatcggcaacataacctttcacatacgtgatttcgcccatgccgtataaactcctggcatgtaatgcacttataagaccaagctggataacctctatagttctaatggtgcgcaacccctaccgttctaggaaagcgagcccgacacactacaagtttcagacattcatccccttacctctgacgcatggcttgtgatctgcgaatcacttggggcaagcatgctcaccgtgcacgacgacgcagtca

SEQ ID NO: 25157 - DNA, 762 bp, Zea mays
  Clone ID: MRT4577_122948C.1
aatcaggagatatacgaagtgcttaaatttttaataaaaatgtagttcatatacggtatcagcctcatactattaaatccactggcggttactcctggaaattactcctcaccatgcagcgccccggaagctgaaacaaacttgttagaaaaaaattgaaacaaaaaagagaccccatgactcctcaccatgcagcgccccggaaggatagagaagccgacgatatgccgggaaaattggggcgtgtgtttgcgactctatgtttcgccggctctatccgttcaactcgcctaggataaggctagcctatctcagctattacaacttattttagttacacacttataccatataagcatgtccaaatgagctgatatttgtcatctaatagatagccaggttagaaagctaaaacttacttaaaatacggaagtctagcgccatgagcagccaggctcctaggaattggacatcgatctcgtttctgtggagccagactaagaaactaaatttgcacgtgcacactctggcgactacttaaataccgggaagtctagcgccatgagcagccaggctcctgggaattgaacatcaatctcgttttctgtggagccaggctaagaaactaaattttgcacgtgcacactctggttccccgatcaagctaggcgacgggccatggcggcaacaccccttggatgatcgcaagaaagatgggagatgtaaaatgattttgattgacccccctagagaacgagaatg

SEQ ID NO: 25158 - DNA, 353 bp, Zea mays
  Clone ID: MRT4577_122949C.1
attcggctcgagcgcaagccggaggaatgaatcccaggccaggtgatagctggaggggaaggaacacgatgtgtcggttggatcgaccatgatttccgggagacagacggctgggaccgcggcacacagccgatactacagcctggactaccaggagccggcgccggctccactggatgagccgacagagtttacatcatggtcagttatacagaacaggtgtcgcaaagtttgaggccactgatttacttctgtacaagtacggtcttatccgttatggtaggtgccggtgctgtatatatctgtaataccgtttggacacatggagtatcttgtaccttcagtgccatgat

SEQ ID NO: 25159 - DNA, 333 bp, Zea mays
  Clone ID: MRT4577_12294C.1
cagggaaggcacattcacttgagtggcccatgggaaggtggtcactgtttccgttgacccacaaattatggggcgcgtgaaaaagcaaactgacacgcatgcatcgagagagacgacagcggccgtgaacaaaggaagaaacctaaaggcgaaaaaatcgtatgttgatagagaaacatggactgtacctcaccaaagaacaaggaccgagggtggatggtcgacatccagaagagggggacgtgagttgcattcatagtggatgtccattacactactgcgcacaacaagggaggagccaagagtaaggtacagggccacaatacgagaaca

SEQ ID NO: 25160 - DNA, 256 bp, Zea mays
  unsure (1)..(256): unsure at all n locations
  Clone ID: MRT4577_122950C.1
cggttccatgcgggaatatgtatagtataggaatccatgtcttgatgctacgtcgtcgtcgctgtgctccgacggcggggtaggactgtccggngtcggactgggcgacttcggcggcggacactgcactatggcgcgagaaatcgcctggctgtcgaactcgtcgagttcggcgcggctggtctccgtgctccggaagcatgcagcacctggacgatgctggtgcatggaggtggctgcgcgctgggggcgcgac

SEQ ID NO: 25161 - DNA, 229 bp, Zea mays
  Clone ID: MRT4577_122951C.1
gggaagacgcctgcccgtatctgtcatggcctgggactcgctgggggcacagcgctcggtgacgaatcttccccgtttcccacatactcggaaattccgagaagatgggataggaccacgacgtgcggccacgctgtcgatcacagccactagctggccagtgtctggcgtgagaaaccatggcgatccccctattatttcttgatccaaacgtgcggaaaggggaggc

SEQ ID NO: 25162 - DNA, 312 bp, Zea mays
  Clone ID: MRT4577_122952C.1
cccacgaatccgtattttgaccctaactatagacgctatgctctcaaaaaatcacaggtacatgttgacgaatatttcacttattatctcggaatttctggtgctacgtcggctgagagtttttggcggttgtagtgaaattatgcatcttcatgggggctatccactacttgtaaggtttacatgcgaatgtcaccgccttgacaatgtggtatacccagctcgaactctatatgcacacattgccggtattttggtcctagtggataaagtcagcaaagggtatgctataactagctttcaatgggaaag

SEQ ID NO: 25163 - DNA, 667 bp, Zea mays
  Clone ID: MRT4577_122953C.1
acatctcccaatctcaccgatagatgcctgcggttgtcccctctatgacttcactgttggcctgtccctctacgaagcctcgaccgtcgggcctccattttccctcccggtgctggccactccatcgcccttccgacgacgcctctcctccgcctccgctttgtgtatgagggatcacacaatcactgacaatatggccggttcctcaggtcgggcaccagatgctccgaacctgccatatcatgctcggctatggcgggaacgagacgatcgcctgggccacctcccatggtcctcggaagctccaaataagaggtgagaaatcacgcgcacctgtatgtgttcgatattgtgtgcaatgatcatagtggattcggcatggagaggggtggagcttctgggtctctgatcatcacagacgtcaacatgacaggcaggacagacggcgtaggaaaggcgcgcgaccgagagacggccgccttcggataacaagacctcgatgttgccatggcagtcagacgcgtggtgcgtccggcaacgcgccgtcactcccagacaactcgcagccgttctctgacgacgacgcttacggcttgccccgccgccttatgcaagcctcccgccgtcagcgtgcggaggtcgctacggccccggctaccttgcgccc

SEQ ID NO: 25164 - DNA, 748 bp, Zea mays
  Clone ID: MRT4577_122954C.1
aattcggcacgaggctgccacagagacatcagagagcggtcctccttgtgagtctgagctgaagaggaggaggaggaggaggagaagcagcagcgcagccggaggagggagagcgaagatgcgccgcgtcgcgctgttgctcgtcgccgccgtgtgcgcgctggcggcgccggctgccgcggtcgtcactgacggtgagagctctcggacctaagctttgtcatataccgttccgttatgctgttttcttcactctagtccagtcgtagatgctgctactctgctagggtactgctcctagagtggacaccccagtttacagcttccaattccagctgcccggaatagctcagctctgtgagccagccgtatcaaagcaaaactcccgcttttgtccatacgcacggctccgctgtatacgttcgtccatcgtatcactgacaccatgcataaaatgattcgttttagactaaacctatatttattaatcaacttatatgtctacattcattgtccttaatttgaacgtagatggaaaaaaaagagggatagaaagaactatattttttggaacggatggaatgttcttttacgtagtaaaagaaatacatataaaaaagataaaacgttactgaagttagaacggatgaaggacggaggatacggtggcccctgaattattaccagccgatcgagcgacacaggactgtgcttttctcgtcggcatcatacatacattcatgcacgt

SEQ ID NO: 25165 - DNA, 437 bp, Zea mays
  Clone ID: MRT4577_122955C.1
cggccgcgtgggcggccgcgtggggccgcaaagactccaaggcggcctcttggagtctgagctgaagaggaggaggaggaggaggagaacagaatcgcagacggaggaggagagccaagatgcgccgagtgccgctggtgctcgtcgccgccgtgtgcgcactggctgagccggctgccgaggtcgacactgacggtcttctacccgaacggtaactaccaggatggtccgaccaacttggcgctggagaacggcacgggggtgtccggcgcccacgccatcccggggtgggagacgtgcggtttcgtcgagtacatccagtcgtggcacaatcagggggacatgctgctggtggagccgcaaggcgcgcacgcggtgcggctgggcaacgaggcgtatatccggcagatcctgaccttggcgcgcggtgcctacta

SEQ ID NO: 25166 - DNA, 178 bp, Zea mays
  Clone ID: MRT4577_122956C.1
ctacgatgcgaagctgtgcagctgaccagcctgtggaccagtcgaccatcagcctgcacatgagcaccaactaaggagccagccaggctggcgatgactgctccagggaccaagcggcagatcactgagccgaggctgggcatggagcactgctgacacgctcaatgtcagcctgcag

SEQ ID NO: 25167 - DNA, 568 bp, Zea mays
  Clone ID: MRT4577_122957C.1
cacccgtccgcatgtgatatttaagatgaattcatgagcctaaagaacctccatagttgatgcggttttctgttctgggaccagcagacatcaaaggacttgaacatctattttgatccaacaaggcatccagcttgtgtgtgtgaccaacattatttggagtgttggccaacattctagcgcaagctcagcatatacattactggcgattcaatgttttaaagttgtgttctccttgaaaagattgtggcttttggaatttatcatgatgagatcttctcaacaattttcctggacagggaatattcatgctggtctctggctacttcagacttccatacgacatcccgaagcccttttggagataccccatgcagtacatcagcttccactactgggcactgcagggccagtgccagaacgacatgaagggcctcgtgttcgacaaccagtacccggaccaacccaagatccccggggacttcatcctcaagtacatctttcagatcaacgtggaccgttccaagtggatcgacctgtccggcattttcagcatgaacttcattta

SEQ ID NO: 25168 - DNA, 430 bp, Zea mays
  Clone ID: MRT4577_122958C.1
gcataacaaaattaaatggatcaaccatatacacatcatttgtcaatcttttgggtgatctggcatgtcgcacacgctagcaagcattgtacttaagagaaatccctgtctttcctcatcattaaacaatgatacatgttcttccatggatcagtatgttgagatgttcatattgtcgaactcagtgcttgacaatgtatcagaatagtctccataaatatcatcttgggcttccatcttcatttactctttgagttcttgaacactaacgttgatgcttttaaaggttccagaataagtatcttcaccaaaacttatgcgataaagaagttggacttgagcactcacaactttcagcacttgtaatacttgctcattcagttgttcgagtgtcgagttgatcaactttaatctcgacttatgatttcct

SEQ ID NO: 25169 - DNA, 492 bp, Zea mays
  Clone ID: MRT4577_122959C.1
cacctgcaatatgaactgcaccatgtcctatgtcatggtcaatattgcgttagcattgtttcagttatgctaatattgtttggcataaagattggcctacaaaattccacaccacatatttctaaaatagctaatttccagtttttagcttatatttgtttcatgtgatttcagtattattttgttatttagatgcagaaggtgaacatgtggaataaaatattattatgtccacatattataaaaagaacagtattgtaaattattatatggtacgctctaccttttgtcatattctatttataatatggtccatgatgctgctaacaagttggcagtcttatatttacaaattttacctgtggctgtatagctgttctccgtctgtacaattttcatttagaaaaattatagcagctaagaaaatatcttccctttgtggcaggaactgatggttattgctggtagatactcttttaatcctttattatt

SEQ ID NO: 25170 - DNA, 252 bp, Zea mays
  Clone ID: MRT4577_12295C.1
ccgagagccggccggcccagatgatggcgttcctcgccaagctctccgacgacccgggcctcgtgctgcgcgccatgctcgccaagaaggatgagctggccctggccgacaaggagtcgtaggcgcagccgccaagaggcggcaggatcgctgctgaagccgtgaacctggacacagcaggggcgccgtgccgttccgtctgttctcgcaagtgtctactaggtagatcggcaggagatgtgatatatgact

SEQ ID NO: 25171 - DNA, 314 bp, Zea mays
  Clone ID: MRT4577_122960C.1
ccccccttctggagcttggggggaggcactctgcaccttcgtcttcgtcttggcgtcctccagcggtgcagaactggatccaggttgagggcgacaagttcaagttccccggtggtggcactatgttcccgcgtggtgctgatgcctacatagatgacatcaataagctcatttcgttatcggatgggaagatcaagacggctgttgacacaagttgcggggttgcttgtttgggagcttacttgcttaagagaaacatcatcgccatgtcatttgcgccgagagacacgcaccaagctcaagtgcaattcccg

SEQ ID NO: 25172 - DNA, 2741 bp, Zea mays
  Clone ID: MRT4577_122961C.1
ctacctgtacttggcctttgtgctcctaatgctgatcaggtgaactcatcagggaagtcggttgatcctgttgaaaatcctggaccctaaaattcggcacgaggccagtggtgacattgtcaaacaactgtcaactcctgctgaccattctaatgtgcatagaaacgaagctcaatcagcttctgataaggccatctttcctggtgcatctgaggaggctttgcgaagaataagtaacatgattccagatagttattttcccttcagtcatattcctcctatatcagggaagggggttgatcctgttgaaaatcctggaccctccattgcatcatttcaagggaatctgggtcttccaaacttcagtctggaagacaacgctccacttaagcatattaagcctatacctgatatatttcctagcctgtcactgggtgctcataaggattatattcgtagttctgtcccagagttgccagatggttcattgctgccaaacttcatggcagatattactggtacttcgaagcaaaagtcatttatgtctggtctacttcctgggctgggtcttagcccagggcaaccaatacattcggctatgcctgataatcacaagaaagtcttggacaatataatgatgcgtgctcagtatgcgtcaaacaaattcttgaagaagagatcaaaactagattattggtcagaggatgaacttgatgctctgtggataggagttcgtaggcatggaaggggaaattgggatgctatgcttagagatccaaagttaaagtttttgaacaaccgaactagtgaagagctggcctcgagatggattttggaggagcaaaagattatagatgaacctatgtctgcagccacaagacgttctaactcaacagcatttcctggaatatctgatgcaatgatgtctcgggcgctcaatgaaagtaatttatctaagatgaggatggagcagcctaaattgcagtcccacgtaactgatattcagttaggttcgagtgatatcctatccagatttcctcatgttgaggctcctaattacattaactcaggggagggtggcccacctcagataccatggcaggatttcaagcatagatcaagttatggtggtgattttcctggcggtgcatttgacaagttggagaaacctgatgttggactgatcccgccatttatgcctaatcctttcatgactgatagcattgattcacttcccataaacagaaaaaacaatagttccattccgcgtagtgaaatcagatcaagttctcgtgagaacattcttttttctggtgtttcggatggacaaatcaacttgcttcatgagatgcagcgtcatgtgaggtcaggcaaacaacccattgagataaagctcaaccacatagaccactcaaatcctcagcttggtaatgctagtgacctcggaggtttaaaatcaaacaagttacctcattggcttcaggaggctgtacgtgctcctgcttcatctaagccacctgaacgtgggctaccagcaactgtctcagcaattgctcagtccatgtgccttcttcttggagaacaagaaccatcaatacctccattcttgatcctgggaacccctctttctcccccaaaagatccaaggattaattcaaagaagaggaaactccgcaaagctcatcaatctacctctcatgtaggtgattgcatcgctacccaagcacccccatccgttaaagcttcagctgctcctcttgctgtcgattgcaatgatggtgcgccttcactcaacttgaactctgcattgctgtcatcttcagctgtaagcaagaagctagatgagttacctcccacatttaaagaatcaaaccaaaccatggatggttcagaagctgttgcaggcaagttggaggctcctgaaattggttgtcaggtaactggttcctctccagtagatgacaaagctagagaatcttcaggatcaccagtgaaggatactcctgatgctggagtcagattgcaaggatcagataactcagctatggcattttctgcactcccacttgaagcacctgtgacaagcagcagagcagagcctgtggcatgtgatggcagtgacatgaaagaggatattccactagacgctgaaagcaacgggaacctggaggagcgatgaactggctcctcttgtgaacatggatgcatcacatcaagtatctgctaaaacgtcaacggagattggatgaaatgttctcagatgagcattagacttgagccagttagctcgacattcctttctcttccgttgagcagaatactgggattttccctctcccaatgtttccagtgttgatgatctcatgttgtgtaatgctttagtgcagagtgcagataggataaaattcaacgacaagtggtgcttcttagcagtagttgggcactagtccgtcgggagcaactcttggaaacctgtatacaagaaatgtatatttttgctaacatggtgttggttgggtgtgtagactgtagaccgctattcatttatttatgcgtatatggttcagtaatttgccgtctgtctagcggtcgctgtaagagtagacatggtgatgataatacctcgccttgagtggtggcctgatagaacatgaaactcactttccccagctgttattgtttgataattgtagcggatgcctttatggttggactaaagagaaagctgagatgttgtgttt

SEQ ID NO: 25173 - DNA, 1137 bp, Zea mays
  Clone ID: MRT4577_122962C.1
tcgaggcaccaagccaaaaagcagcaaggagctgctcccctctgaaccagcaactgaagcagcttcctcgtctcatcatcgagaccagtagtacagtaagcacaatggcgactaatctcaagtgggctcctgttctggcccttctcctcgttgctgccatggttggcagcaccagtgctggcaatatcgccgtgtactggggccagaacggcaacgaaggcaccctagcggacacctgcaactccgggctgtacgcctacgtcatcctggcgttcctcacgaccttcggcaacggacagaccccggtcctgaacctcgccgggcactgtgacccgggctccggcggctgcacgggcctgagcagcgacatccagacctgccagtcgcagggcatcaaggtgctcctctccatcggcggcgccaccggcagctacggcctgtcgtccaccgacgacgccaacagcgtggccgactacctgtggaacagctacctgggcggcagcgacggctcgacacgcccgctgggcgccgccgtgctcgacggcgtcgacttcgacatcgagaacgggcagtcggcgcactacgacgacctggcgaccgcgctcaagggcaaagggagcgtgctgctgtcggcggcgccgcagtgcccgtacccggacgcgtcgctgggagccgcgctgcagacggggcagttcgacaacgtgtggatccagttctacaacaaccccgggtgcgcgtacgccaacggcgacgacaccaacctggtgaacgcctggagcacgtggaccagcagcgtcacggcggggagcttctacctcggcctgccggcgtcgacccaggccgccggcagcgggtacatcgaacccggcacgctgacgggcacggtgctccccgctatcaagggcgttggcaagtacggcggcatcatggtgtggaaccgcttctacgatgtgcagaacaactacagcgcccaggtgaaggacagcgtctgatgagcatacgaagccagcataggtagccatacatacagtggctattcattcgtcaagttactatcggactagataaaataagagcgcgcgtatcatacagtttgtgttatatatacccaatgaataaaacttgaccttgcaatat

SEQ ID NO: 25174 - DNA, 438 bp, Zea mays
  Clone ID: MRT4577_122963C.1
tggcttggaacctttgggctgatttatgtgcttgcccttacccaagcggacaaataagccacgccaagaaggcccctacgcgatcgtaacggtagtactaggtaactgacgggtcacagctacgctttgtagcgtcggacccctcgagtaggccgcggagccggatcctccgcatttgagtgagggtacttacagatgtcgggataacggtccttgcaccatcgtaacggtcgttatgacggactagctcgtgtcgacttcaagtaagttaaggtgctgtttaagagatgagatataagagatctcgtggatcatatagccctttagctaatacgctaaggataagcgggttaagaactctcattccgtcgggacacgtcacgggtgaattgcggttcaatactgcatgccgtcgattcaagtcgcgcccgacgcaca

SEQ ID NO: 25175 - DNA, 398 bp, Zea mays
  Clone ID: MRT4577_122964C.1
gcgcccaataccgtcatatagatgtgggggttcgacatggactctgtgatggccgaggtgcaggggcggggtgtcactcacctctgttgcgtaccgccggtcatgatagcgctcgccaagctcgggagcgttgagaaatatgaactcagctagctcaggttcatggggtctggcgcatcaaacggtcgacaaggacgtgatggagggagtggccaataattttacagacactgtgattgcccacggttacggaatgactgaaacttgggggatcaatatttttagagtgacccataaaaaggacaaattttaacaattaggggtcagtaggtcctcttattgtcaagagttgaatcaaaaatagttgatgtagaaacattgatatgtgtggcaccaaa

SEQ ID NO: 25176 - DNA, 302 bp, Zea mays
  Clone ID: MRT4577_122965C.1
gcctttctttttctgttgtgctgccactgccaggggggtcggtcctcgtttcgccagcggaaaactaaaccacgggccacatagaccccatttctatcatctcatgagctacagaaataaccgctccctgtgtgccatcgagtacagccagtaggaacggctctccgtcgagacagcaatcttgagcgcggtctaccttctcgatagaataacgagctcgctctacacacgccttgtgcacaagaagcaggacccctacctgctcagccccccctagagccacatcagctcaaacgtcacac

SEQ ID NO: 25177 - DNA, 285 bp, Zea mays
  Clone ID: MRT4577_122966C.1
tgaataataagggggaacaagctgtgctctagttattatctttaccaagggaaacgacaagttatctgaaaataaaataaaagaagactatagaaaagaggaccttacaagacggtctctttgagtggctgattccacagcgccagataccaaaaaacttgggaccgtcctaggaactaacggcggggaaaaaaggttgtcgattgacgataagaaaaaacatcctagcataaagattaacatgaacatactggccggcataatgaaggagaaaagccagagtgg

SEQ ID NO: 25178 - DNA, 442 bp, Zea mays
  Clone ID: MRT4577_122967C.1
aatcttcacacaagtgcagagggcgggtgcacacacctttcccttgccctctatcgatcccatattcttgccagaaataaatagccgcagcttccctgtatcaccttctcaccctgctcaaagtgtgagcgtacgtcacacggacgtccttcatcattagtggagatagagggagagatgctagaggtaccgcacgccttcttagatgatgaccggcgagatgtatttgcatgcgcctcgatagctacgcgtccatcataccccacgctgctccttttccggcatggagcagatcttcgggcacctagtaaccggagccatgggcagcggagagtgcggatgctccaactccacacttcagagggatggtctacataggatgcctcaccctttctgcacatgccgatatcgacagtggaagcagagatctccgattactaca

SEQ ID NO: 25179 - DNA, 614 bp, Zea mays
  Clone ID: MRT4577_122968C.1
ctcgaggccggccggggatttttcccccccgcgtatcctcaagcaacgacgacccagtccgaccggagagctcacgatgtctaacaaggccaaggctagtaccaagttccgaatgaccctcgccctccccgtcggcgccgtggttaactgcgccgataactcgggcgctaagaacctcttcattatcgccgtcgtgggctgcggtgctcggttgaacagacttcctgccgcctcgtgtggtgacatggtcatggctacggtcaagaagggtaaacccgagttgagaaaaaaagtccatgttgccattatcgttcgtcagcggaagccttggcgcagacgcgatggcatcttcctttactttgaagacaacgcaggggtgattgtcaaccctaaaggtgaaatgaaagggtccgccattgccggtccagtcgccaaggagtgtgccgatctgtggccccgtatcgcctcaaacgccggcacggtcgtttgatcaccttgtgtctactttgaacctgcccattccacttgaccttctgccacctgtattcccttcgcaaaaaaagaaacgacgctattcatgctacgtaatccaaaaaaaaaaaaaaaaagcggcc

SEQ ID NO: 25180 - DNA, 190 bp, Zea mays
  Clone ID: MRT4577_12296C.1
tctcactcttccgcccactcctactcctaacaattttctttatttcatcctacaccaccaaacggaagacttacaattcttttggccttttacaacacacatatctcatcaactatactacaaatttctttcttcactacactactccattcccctactctatctacttctattatccacactaaataaa

SEQ ID NO: 25181 - DNA, 577 bp, Zea mays
  Clone ID: MRT4577_122970C.1
tgtggtttgttctttttttttttgcaaataccattctctattgctctttcatcccaacgctctcccgagagtccggtttagtttttcagatgggggaacgatgactctagttcggtaggattcccatacctgcttagctgacacaatctccttcaaatcgattggctctaaattaggcactactgtcccgtctggagagccgcgattctcttttttttacgcttccgtatctcactctatgttgatttctatcatattcataatctaccgcggacctctgaattttccatagcttaaacttagggaagtgctttaccaacatttgttgggaaaacaaaaaattgggattgatccccttgatgctgactataactagttagtacgactcctcactgggctgttaaactataacctcctctcttattattatctagcacacgtatcgtattatgtgactagaccagaataaaaaagtctttcttttggattctaggagtcctagactcttttccacactagggaccagtccttttcttggtcatagatattcgagagagggtgacactgtgattcaaag

SEQ ID NO: 25182 - DNA, 964 bp, Zea mays
  Clone ID: MRT4577_122971C.1
tcctccgacggcgccgacaaaaccagaccatcaaacaagtgccagcgccctctcgcagtcgccgcaatggagagcaccttcatcatgatcaagcctgacggcgtccagaggggcctcattggtgagatcatcagccgttttgagaagaagggcttctacctcaaggccttgaagcttgtgaacgtggagaggtcgtttgctgagaagcactacgccgatctcgcctccaagcccttcttccagggcctcgtggactacatcaaccccctggcttctgagcccggcaccatccgtggcgactttgctgtcgacattggcaggaatgtcattcatggaagtgacagcattgagagtgctaataaggagattgtcctgtggttccccgagggccctgctgattggcagagcagccagcacccctggatctacgagaagtaaacatggaaagtttcacatcaaaccttgagagccagaggaagcatgtcaccatttgtgctttagcaatgttttcgaaaagattatgatctgtatcttggaaccttatttcaatggaccaaatttctttctttgccatgctattggttgtcactttgcggtatttgattccactcgcatatagaactatcatatatcctgcgataaccctacccttctgagaagggaagaggatcagagttcaactgaagaggagggaagatgaatagatgatggtaggggtcgcgtcacgaggaaggaggggcggtaggtcattattgtgggatgaacaatgatctaaatagtattgttcattggatttgaataagagtggagaggaggttatacaacgatttaatttagtgtgttaagtctggatgtaatttgtttggtggatttagtggaggttgagtgggatgatttggttgagtgtgttttatacaatttaaaataatgagttatttagtggtataagattaaaaaaaaaaaa

SEQ ID NO: 25183 - DNA, 453 bp, Zea mays
  Clone ID: MRT4577_122973C.1
cccacgcgtccgcccacgcgtccggcagatccttccagcggctgtcgctgttcctgttccaccttccgttgatcataagcaagcagcttctgtgatgctcaagggcatgaccgcccatgttctgcttcgccgggtattcaaggtacaaacaaaccctaaaccctaaccactacttaattgattgatttttagccctcctcttacagtatccactcagtctgggatctcagcccttggctaactgaatgtgattctgacgaccccttcttattactttgcgcgagcgttctgacaattgtttatttgaacaatcaattggatatgtaaacagtaagcaaaaatgacattgtatatttatataagtaatatataggtctatttatatacatggaaagcagattatagtatgaaaattgtgattaggaattttgaaagttttttagattgattcag

SEQ ID NO: 25184 - DNA, 206 bp, Zea mays
  Clone ID: MRT4577_122974C.1
ataacaaagtaggaacttgactagaacttatcggtcttggcacataaaatacaatggaaagagtcactttatttggcacagctacgaggcaaagactacaggcttgctgttgaataccggtctacatctagcagctttatagacgatgaccccatgacacggacacgcttacattcctgttgccgtacggcttcttctggataagg

SEQ ID NO: 25185 - DNA, 411 bp, Zea mays
  Clone ID: MRT4577_122975C.1
accgcaccgaatcggaggcggctgtggttccgagcgttgtgttacgaccaagtgagcgagcggcgtgtcatatgatctcgccagcaatgtgacgtgcggggcaccgtgcggccgcgcaggttcggcgtctactagtttctgacgctctgctgcagcacgctcggagctgtcgtgcgtgtgctctgtatcgcgcacaagcgcggtcactacattctccatgatccgtgttacatgaaggatactgtgttccccatgaccgagcgtgatcggctcgctctccacggctagctaccggcgcgtgtcatgttctgcgatcagcagtgcgagcgatttataaactctttccggtcgctggatcacaatgctcgaggtgagcctgactccatctgacgcgctggctagatggaggat

SEQ ID NO: 25186 - DNA, 374 bp, Zea mays
  Clone ID: MRT4577_122976C.1
cggccgcccgtgatctataactgggctctttgtcgctcgagccgctcgttattcctactcccaccggcggctcggacctacgctccccttctgcccaacccttccacgcttgcttctccgggagggaaggcacacggcaggtcgccccgccactcattgtagaagccacgcgccaccaaactctttttttcctcacccagtcgctttcgcgtttagcgcgagctgatccagccagtgagtcagtctctggaggcggaaacataaaggcgttagccacccgagtatgatgagcggcagatccggctgcagggacgccgaaggcgagtgagaggttcggcccggggggatgcttgtgcattgcatggacggtgagg

SEQ ID NO: 25187 - DNA, 610 bp, Zea mays
  unsure (1)..(610): unsure at all n locations
  Clone ID: MRT4577_122977C.1
cagcggcagcggaggaggaggaggacgngacggngcgcgagnncgacggcgccagcgaccgcgaccgcgccgccgnggagcgccnggagcgcgccngcgaggncggccccagggagancaagcncngccncnncaccgaccnccncggcgacccgctgngccgcgnccggcactccccggccnncctcatgctcgttgccgagtccggcgcgggcggcgaggtcgtgggcgtggtgcgcgggtgcgtgaagaccgtggcgtgcgggcgggacgacgagctcgagctcttctccaaggtgggctacctgctgggcctgcgcgtgtcgccggctcaccggcgccgcggcgtggcgcgcgcgctggtggcgcggatggaggagtggttccggcaggcgggcgcggagtacgcgtacgtggcgactgaccgcgccaacgagccctcggtgcggctcttcacctcccgctgcgggtacgccaagttccgcaccccgtccgtgctggcgcacccggtgttccggcacgacctggccccgccgcgccgcgccggggtggtccggctgtgcccccgcgacgccgagctgctttaccgcgcgcggttcgcgggcgtgga

SEQ ID NO: 25188 - DNA, 1220 bp, Zea mays
  Clone ID: MRT4577_122978C.1
cttactgagtgaccaggtcgtgggttcaaagcatttatctctttctagaccccactcatgtgggaatctccagaagatacttgaagagtgcaccaatgaccaaaggacacacatgattcgtgaaatcactaaagcacccataaagcttcataaagcttcttgcaatgtgcatgggacccgcgttgtgcagaaggttatagacaccatgaatacccctgaccaagtgtcaatgttagtgtccgccttaaatactggaatgatgtgtttaatgactgattcttatgggaatcatgttgtggaccactgcctgcagaaattgttacctgagcacaaggcattcattcttgaggctgctgcatcatgctatcttcaattagcaagagatcgtcatggttgctgtgtcctccagaaatgtattggtcattcaagtgatgaacagagaaacaacttgttgtgcaagataacatcaagtgcccttacactctcagaagatccgtatgggaactatgttattcagtttattctggacctcaatatcgaatggataacagtcagagtagtggatgagctggcaggtcactttggaaatctatccatgcagaagtgtggttcccatgttgtggagcattgcctgaagctagcgccacggctgatctgtgataggatcatcaacgaactcatgcatgatcctaaactgttggatatcatccttgatcagtatgggaactttgtgattcagacagcgcttaaacagtgtcagggtgaacatcatgctgcttttgttgaaactattaagccgcacactgctgtaatgcaaagtaacatgtatgggaagaaggttctttcaaggatatgcttgaagaacaagcactgccgatttgacctccattaacctagcatttttttttggcgaacgtgtcttcagagacagcagacgggacggaacccttgtacaattctgtgataacttgcagatcttacagatagtgtgtcttggcgaaaagggaaaaagatcttttctttcaagggaaattttggttggttaggggaagcattttgtcgctgccagtttagtgtaatttcgaatgtagaattagtatagtttcatctgcgtgtgatgatggtggtttacattgccggcgttgttatcagtactgtagtttaatgtacctgtcgaactgtgatatcagtaacatcgtgtaatgtgttagttgtccgat

SEQ ID NO: 25189 - DNA, 458 bp, Zea mays
  unsure (1)..(458): unsure at all n locations
  Clone ID: MRT4577_122979C.1
gggaccggcgaaggcaaaaaataacttttggggtttgggtaaaaacccaaacttgggcccaggttgggcggggtttaaacacggttcaccccttgtccaaaatgaccgcccttttgttaaaagtgcctcgaaagggccctaaaaaaaaaaagggccttttcaatcggggttaaaaaaaaaaaaaaaaacaatttttttttacaagcccaacaaagggcttggtttgtttgcacaaagggtaaaaaaccatttgtttggggccccacccggaaaaaaaccaaatttggttttcccttggctaaaccgagggaaaaaatttttcgccctgttcaaccaaaatttaagggggcttaagggttcgccctttttttaagccccccaaaacccaagagccgtntnncgccaagaacattttgcccggaaaggaaaaaaagccgntggtttttnaaattttttta

SEQ ID NO: 25190 - DNA, 435 bp, Zea mays
  Clone ID: MRT4577_12297C.1
tttcgggacgtcaaccttcaaaaccgcggtatcgtccaggaaattgatgtggcccaatgccttttaacccttctggtggtggcagcatctatgttgacgaagcttatgggacagcaaagcatgcaaaaactgcttctgctgctgctgctgcaaacaatgtcgcctgcaatgtatacagctcaattacaatgcctgtgcacccaatgccttggcagcagcaaggctatgagaacttttatggggcttatggctccaggatgtatagctcttacatgggatatagggtgccctatggagataacatgtgctcaggctatggaagaggttatggcggttcgtcatgaggttccagaatgtatggtggatcaacgtatatcgctggaatgttacgaccctatggtggctatgggatggtcatgagtccttataatcagg

SEQ ID NO: 25191 - DNA, 237 bp, Zea mays
  Clone ID: MRT4577_122980C.1
ttggttacaacaacctcgaccccagcccgggggccgcggaacaaaagcggggcgagaacaaaacagcacggcacggaacgccgaccggcaaaaaggaggccaaggaagcaatgccgacccaagaaatccccagcagcaacgatggggacgacgcggccagctgcccggtctgcctagaggactacgccgccgcagagcacccccgccagaagccctgcacgcacacgatccacagca

SEQ ID NO: 25192 - DNA, 592 bp, Zea mays
  unsure (1)..(592): unsure at all n locations
  Clone ID: MRT4577_122981C.1
aattcggcacgaggaactaataggatttatcaaaaaaataatgagtccactttcgtgctgggctgctagctgttgggatgctatctgacccacagcctgccaacctcccttacccattagagttccagtagcattaggaataaatgtgcatccagtttcagttccaaaccatgaaacttatacaattccttattgcaaagttcaatcatcagtgaagcaaatccatatacatcatgcaaatgccaagtgaaacccaatacacttttgatgcagaggagcctcatgccctcatgtaacattattggtcctacacattttgtacacaaactattttgctcatacagctggttatatatcataaatattcatgcaaccggagtgctctgcattgtgtgcaattggtgaaacacaatggtattttccaccttgtactgcatcttcttagggcagttgaagtctgtaacatatcaaagcatagatttttttagtatgcttcttcatgcttggagtaactcatttttttatattggaataagaatagttaccccagttcaggagccatanattcttggcaccgatttccctccttttg

SEQ ID NO: 25193 - DNA, 224 bp, Zea mays
  Clone ID: MRT4577_122982C.1
aaaatatgaccttcaatgcccccccaccaaagtttggaccccttaagaggggccccccttttttttttttttttttttgtgacagttaatccttgacggttgaacaccattttatatggggtagcgcataggaagggcgagcgcgcagtcatggattcttgcaccctgaggtctcggctaggccctcaaaaaaaaaggggctaaggggtggggggggggggaca

SEQ ID NO: 25194 - DNA, 183 bp, Zea mays
  Clone ID: MRT4577_122983C.1
gggacaacacaaattgaacacccactgtttttttaaaaaaaaacatcctaatacactttctatataggtgggaagaagggttttaaacacttgtggacaggtaaaaagagacttattttatccctagcttgaaaaaaatcatgccacacaacggaggtgaagacataggttttctattgagca

SEQ ID NO: 25195 - DNA, 516 bp, Zea mays
  Clone ID: MRT4577_122984C.1
gaagggtggctgcatccaatatgcttcagaaagatgatcctattgagcattctgatgtgatgcaaaatgtaagatggcagatgagagaactctgcaatgaatatcaagcaaccggaccattagctaagttatctaacacgcgtgggagctcatgggactcaccaggtgctttaatcaatagtatgactggcagatggaattggtctaatgactctacaacacctactggaggagccacaagtgaacactagacgctgaagtcacgtcgatggcaacgaccctcgaacagaaatgaggagctttgatgggagcactgtcaggtcatatgcacttgattctgagcacaatgatgaacgatcatccatacaagacgtactacctgatccatatgatgcagacactacggatgtacacttaccaggagcaaagcttatatttgatggagccgaatcacacccctttgatattgctgcatgcctctaagcacgtgaggctctatgggttatatcggaggca

SEQ ID NO: 25196 - DNA, 308 bp, Zea mays
  Clone ID: MRT4577_122985C.1
cttgttcttctctgttatgctggtgccttctcgccgtcgcggtttcgttaacgagaggctgggccccgcggcggcgcgcgccgcctccgacgcgttgaaccggaacacgccgccctcaagcaccctcacccacaccatgtccgccgccgggggggggggcatcctcccctccggcggccccgcggcagcagcaggggcagtcccaccgcaccacctgagtgtacatcggggacacccgccgtcatcttatgactcttgggcccggttggaacagtagacgcaggagcaaaacgtgccgcccgaggcgg

SEQ ID NO: 25197 - DNA, 865 bp, Zea mays
  unsure (1)..(865): unsure at all n locations
  Clone ID: MRT4577_122986C.1
cattgggtacctcgaggccggccgggaagaagcctccagcaacacacctcgcacatctccaagtacaatttatatcgcttacacactataatccgcgctgcgcagtccgctccattgccactcgtcggccttcctgcacactatcacaccaacaaggctccctcgtcgaatcgctgggaccggtcgattgcgctccaatcacatcgctgctcgcaagacaaccctacgtcacctcgacatccggatttcgcggccccattgaaagatggcagccctagccttgaaggccatcagcgtcggcgcagagaaggttcccgacaagttcttcgaaaagatccccggaggctacttcacacccgcagaacagaaagaaatcaagaaacaccgtaaagaacgcagcgacagacacgaaagagaacgacaccacagcgaagaaagatccagcaagcgcagctcacgacaagagcgcagcccgccgactgagtactccgactactacacggacgacaccgactacgagcgcgaacgagagcgacgaaagagagagcgacgacgcgcaaagagcactggaacgactgctagtagaggtctgagtcggggacgacacggtagacatagtagcgactttgacggacagcacagccctccaagagacatggctcaaccacagcagggacagccctacttccctcctccgcctacatccgagtataagccgtataatccacaggagtatgctcctagccccgtgcaggatcaccgcccatctgctactcctgcctacggatactctcctcagccagcacttgcagagccacgtggtgtcaccctagactatggncagcgcgatgctcccagaagctct

SEQ ID NO: 25198 - DNA, 427 bp, Zea mays
  Clone ID: MRT4577_122987C.1
gggcgacaacccgggtcaacaatatatagaagggcgaattaaagcattacagctggctgcaaaccctggtcaagaaccaaaagcaacaaaacatggggataaaacggctggggaagggggctctatatccctgcagataaaaataaaaccagacatagcaaaaagccccaagccgcacattcagagaacttatgccttggcagcaacctgggcaaaaaaacccccccccccctgccccccgaggaagccgagcttgaaacccttgcccttgggcaggcccacccacgggttggtgcccttgccaaaggggaacaccttgcccatgcggggggcaaactgggggcccatggagtccccgacggggatgggatcaaaaccccccttgggcttccccctgggcttgaacacacctacacccccgggggtc

SEQ ID NO: 25199 - DNA, 315 bp, Zea mays
  Clone ID: MRT4577_122988C.1
attcggctcgaggttgtagaagctgatgtgaggggagtacgtccatgtccgttggtcccaccatcacattcatgggcggttcggtcacccacccctccacccaaactggcatgtccttgctccctggtgagtttgtctcttgacctatcttctttgctagttgttttcggcgttgtcaaaatctcaggtgccacaatggacgaaagaacaacatgaagaattggattccaaaggactcgagggctacttcatcacaacctgtgactgaagattttgaataactgactacatgaccatgcaagactaaagtttttg

SEQ ID NO: 25200 - DNA, 331 bp, Zea mays
  Clone ID: MRT4577_122989C.1
agccgtcgcaccatccacactgtacatatgaagtgaggccgcctatgtcatcggaagcagcagatgactccgacgcggcatccctaacatagaggcagtagatgaagacagtgagtgctgtcactgctagccatcggttgtactgcacgcggcgctctgatggatcgctctgtatatctaggccaatgatcagcatcttcatgtgcgtgacttcttctatctagaggcgatgatctacttgccagcccaacagcagacggtgacatgacaataggcagctcaatcacatcagctaatcccgtgacatctgttctgatcctgctgggtcgac

SEQ ID NO: 25201 - DNA, 505 bp, Zea mays
  Clone ID: MRT4577_12298C.1
aaaaaaaatatatgtattgaagaagattacagctttgtgaaaccgtcgatatcagtgctctggacaagctcctcgatggcctccatcttctcctggatgtcgtcgacgctgaccttagcatcctcgacgtggcaagagatctggagcttcttgattccgtatccgatgggtgtcaactttgaggccttccactcaagaccgtcaaggaccatctctctgacgagtctctccatctcaaccatatcggtggtatcgtcccaaggctttacgtcgatgacgatggcagacttgagagactctgccttctttccagtggcggccaacttctcggccttcttggcggcctgctccttggctcttctggtgatctcggcctggtgctcctcatcttcctcatcatctccaaagaggtcgaagtcgtcccccttcttttccttcttctcctggtcgtagaagtgattcttcctgccgagaaggctgtccaggagccccctatccgcacggg

SEQ ID NO: 25202 - DNA, 275 bp, Zea mays
  Clone ID: MRT4577_122990C.1
tttttttttttttttttttttttttttttttttttttttttttttttttttttttttttttttttttaggaaacaaggggatggggtttttgctgttttacaggggaagactggaagctcgaaaaatattaattcacagcaagttttttggtacacgagtttttcgtttattaaacaacctggacatacattctttcagacaccccaagaaaaaaaaaagagaacttgcaaatcccagcaaagggggtccttatttcaaatgtgacaagccgggc

SEQ ID NO: 25203 - DNA, 414 bp, Zea mays
  Clone ID: MRT4577_122991C.1
atgaagttaaatatcaaaatagagaggagacggctccacatgatgatcaataatcatcccactgtatctgaagttgtgatagggagtggggagaagcaaccaaaagcctgcaacacaaattacgaaaccaagtcaagttctattaaggaacccagttctagcagcaagctagcagaggagcctttgccaaagaaggagcgacagatcatcaaagaagatggaggcggcgaggatgaagcttacccatgcggcacatgtggagggatgtactcggaaaatggagtattctggattggctgtgacatttgcgacaagtggtaccatggtgactgtgttcgcatcacacctgcggaggcaacgcacatcgatcagtacagttgccccgcttgcagcaacaagaggagcagagagtga

SEQ ID NO: 25204 - DNA, 322 bp, Zea mays
  Clone ID: MRT4577_122992C.1
aacgggcggaaaacaccttcaggggaaaactgttggtttagctgaccagctcaaccttaaggggggactccaactttcataaaaaaaaagttaaaagggtacccttaaaggcgttaactgacaggccccaaaattccaaaattaacaaattttttaatttcacgggcatattctacgtttgggatacccaagggacgaattcccagtttaataaagggcgccggacccgggcggacacccctcggcgttcggcggcccgggtttttaatcggaatcggagcccttcccgggggtccaagggggcaaccccgggataaaaagg

SEQ ID NO: 25205 - DNA, 674 bp, Zea mays
  Clone ID: MRT4577_122993C.1
ctcgaggccggccgggccgggaacgtcctagccaatcgatctcatcttccgagagtgtgccagaaacacatagagagagagcctcgctctcagtgttcgtcctcccacgactccgaagctgaggatatgaatcaccagaatcaagctggctgtgttgagatccagaatacgcaggatgatctaccagaagaaggcggctgcgtccatgagccaggcatatcagacatctacgaatgacaaagtggtcctcctgatgttgctggaatcaatcaccaagattgcgagaatggttgatctgtcgacaatcatcgctatgttgctgatgaccattacaggataaatcatcagctctggtctactaagatgaaggatgaagtagagaagccctctttctctttgcgtgcgccgtcaatatgtaaagactctgtatgcagtaaccttacaaatatgactgcctccatttgatcgattgtactgaaattttagtcacttaaagcggccggtgtatctacagcatgtgcatattgtagagcgtgcatgcataggctgacaaaatagtctcggagaccggccttgctgatgcaaaaagatgaaggtaacggcctcctagggacctcgagctctttttttgcacactttgaagatagtctcttgcgagcttaggaaagtcgtga

SEQ ID NO: 25206 - DNA, 211 bp, Zea mays
  Clone ID: MRT4577_122994C.1
cggcccctggggttaaagaaactccggcttttccgcccgcaaggggaaccttagccacaagggccttgttgaagcccgccgggatcggggcccggtcggtcccgccttcaaccagcggaggggtttggttgggcgtcccgggtgggcccaagaaggccggggtgtccggttcctggtcgtctgggctggcgggcgctttttttttggtgtt

SEQ ID NO: 25207 - DNA, 790 bp, Zea mays
  unsure (1)..(790): unsure at all n locations
  Clone ID: MRT4577_122995C.1
ttgggtacctcgaggccggccgggatcatctcttgcgcatcttcttcgctcatcatggcaagagtgacggcatttcttttgggtctctcccagtttcctgtttgggctgctgctggaagcccagcggttatccagacttcatcgggcaaggtcaagggtttcactgatgacataacaccgaatgttgcgcagtaccttggtattccctttgcagagcagccggtgggagcacggagatggttgcccccgacttcagtgaagaggtcgaacaaactcatcgaggcgaatgtcttgggtccttcttgtcctcagttcgaggtcgataggccgaatgtttggctcgccgatgcgccggagtttattatcacgccacgcctttttcaatctgaagaatgtctgaaactcaatatttgggcgcctttggctcagtgtcaggatggaggccgcaagaaggaattgctgcctgtgcttgtttggatccatggtggaggctttgtgactggcggacctactgttccgtatcaggttccttcaagatgggttgagaggactggagagcacattgttgttggaatcaactaccgtctgaacatctttggctttcccaactcgaagagcctcaaggccgacgaacagaaccttggcttactngaccaacgcgtggcttttggatggatccgggataacatccgcaaactttggtggtgatccatctcgcatcaccccctttgggacagtctgcgggcgcttcttctgtcgacactacaacttcgnctaccctaaagaccct

SEQ ID NO: 25208 - DNA, 688 bp, Zea mays
  Clone ID: MRT4577_122996C.1
ctcgagttttttttttcttttttttttttttttttttttttttttttttttttttttttttttttttttttttttttttttttttatccaacgagagagggcccctttttctttttcttttgggtggggggggaagcagcccccaaatcccgttttaaaaaatccaatggatcaactccaccccgccccagggggggcaaaaccgatcaaaaaaagtgggggccccccggggggaggagggggccggatccccccacccgtttcccggaaaatttacgggggggtttttttatttttcaacgggggggggggggggggggatggctcaaggaggaggacaaaaacggggggggggggtcaaaccggggggagggggcgcccaatggggcgggggcagttgtcgggggggttttggaaaatcctgatgatgctggaggggacaacttcaacgggaggggaaacggaaacagggggggggtaggaggaggaggtccaattggggccaccttccatgggggggggggggcccaattaggatctttttttgaggcatccctctcatggggggggaaaaaaaaggggggaaaccgagggggtaaatgctcggcccccacaaaatggggggggaacccccggggggggcggccccccaacaacagttaaaacggagcattgattttggtttttt

SEQ ID NO: 25209 - DNA, 652 bp, Zea mays
  unsure (1)..(652): unsure at all n locations
  Clone ID: MRT4577_122997C.1
ttccgcccgtcgccttccacctctcgcactccctccctttcactccaactcaagcgcagcgcggcaccgtacgtccccgactccccccttcttctactccactcctcgccgcactatccagtccatgcccaccccgtgaagcgaagcgaaacccaaaaatccctttgctacatcactttactagctagtcgtccccgttctctccttgggtcgcggcgccggaagagggcgacggcattgtgagatatggataaggagaggaaacagggtttcttcgccgcgctcaaggaggaggtcgtacgggggctgtcgccgtcgaggtccagggggaagtccccggcgccgccgcggagcgcgtcgccggcgaggatgctgatcccgcgccggcgcaagacgcccgcggctccgccgccgccgccgccgccggagaaggtgctggagcagtacctgggcgagcagctcgtcgcgcgctccggcagcctgcgccccggcggtgaggctctggcgccgctcatcgaggggcccgacgccgagcgcctcgccgccggcgaccacgacgcggaggactccggccgccgcgaggggttcgggcactgggtccgcggncacctgacgcgcacgccgtccatggnctcctctgccgcangtggtg

SEQ ID NO: 25210 - DNA, 853 bp, Zea mays
  Clone ID: MRT4577_122998C.1
gtacgtacgtaccgacgaggcagcgggcagagatgggaggcgtaggcgaggcggtcgaggtgacggagctggagcttcgcatccagttaatggacggcggcagctacaacatcaacgacaacgcggacctcctggcggagatcctggcgcggctggacgggcggtcgctggccgcggcggccggcgtgtgccgcctgtgggccgccgtggcgcgccgcgacgccgtgtgggaggcgctgtgcctccgccacgtcggccccgcgccgtcggctgcggcggcggcggccgtcgctggtccggccacccgcgccgtcgtcgccgcgctcggcgggtaccgccgcctctaccgcctgtgtctcggcccggcgctcgaccggctggcgcaggcccaggcccaggtccaggcggcgcgggcgcaccgcctgtccctgtccctctccctgtcgctcttctccatcgactgctacgagcgcctcggcagcggcggcgggcccagcgccggcgcgagcgcgcccgggaggcggcagcagccgtcgtcgctgctgttcctctgcaagcccgtcgacgtgtcgtgatggcagtgatcagctgtcgtcgtcgctcctctgctcgtcctttccatgccgtcgcgtcgtgcttggcgtacgctgccgggactttgctgcctgctagtacctgctgcaatgcttgcccgactgactgccgccgccgaccgcccgccgcttgacataatcattaattagggttcgtttcgtcgattagtactacggacgaacaaataagcaaacgagaggtcttgaatcaattcaagctgtagtaccgtaccggagagaggcatattgaattccaatcc

SEQ ID NO: 25211 - DNA, 259 bp, Zea mays
  unsure (1)..(259): unsure at all n locations
  Clone ID: MRT4577_122999C.1
nnnnnnnnnnnngntataattaatcacttccgagcttttttttttttttgggaaaaaaaaaaacaccccgagcaactttattattatatgtattattacaaggcgcaaggggccatacatacagggatccagctgcaatatacatgaacacccttgggctcgctcctgctttatctaagcaactgctggcatgcatgcaaaaaaccccttgggagataaaacccctgttattctggtagcaccgttgcatgcccgggca

SEQ ID NO: 25212 - DNA, 399 bp, Zea mays
  Clone ID: MRT4577_12299C.1
cggggattttttgtgtgactctgataaaagacatgtaactgatcttttcttttatacttataccatttgaaccgtgcttttagaaaaaaaaaaaaaaaaaaaaaaaaacaaaaaaaaaaaaaaaaaaaaaaaaaaaaaaaaaaaaaaaaaaaaaaaaaaaaaaaaaaaaaaaagggcccccccctaaaaaaaaaaccaaactaacaaccccctctcatcccacttaaaaaccctccaaaattctccccaaaattaaattaacctgtccctctttttaacaaactacccaactttaaaaaacctttgccctttccccaactaaactccccatgaaaaaaaacccccttcccccaccttataataaacttaaaagacccccccctatccccctccccaaaa

SEQ ID NO: 25213 - DNA, 462 bp, Zea mays
  Clone ID: MRT4577_1229C.1
ttttttttttttttttttttttttttttttttttttttttttttttttttttttttttttttttttttttggtcccccccaaaaaaaatttaggggccccgaaatggtttcccaaaatttcccccaagggtgggggccccggggtccctacctgggcccccttcctgcttttggggcccccctgggaaaatttttccccccccctcgccaaagggtgggccccaaacccatggcctgttacaacctttcccttgccataaaaaaaacttggggtcccaagggttttcacccccccccccaagccttttactttcaacccctttgggaggaaacgggatttttcccagaggacccccaaaaattggggggggccccttgtttcaaaattaaccctctttttaaagagggaccccccctttgggaaaaaaaaaaaaaattttttaaccttacccccggggcctg

SEQ ID NO: 25214 - DNA, 230 bp, Zea mays
  Clone ID: MRT4577_122C.1
gctacacatgttcttgcatcttctggtgtccttacgacgactgataaagcatcagcacggttaaagggtggtgcaaagaaagctgtgatatctagaccatcagctaatgctcacatgataggagatggtgctaatgagaatagctatcatccatagatgaatgttgcttataatgcaagttgcactaacaactgccttgctccagttggcaatgatgaacatgacgaatt

SEQ ID NO: 25215 - DNA, 296 bp, Zea mays
  Clone ID: MRT4577_123000C.1
acccacgcgtaccgcccacgcgtccgcccacgcgtccgcgcatgacataccaccctccgccccccgccgggcgtgcagggtggacgacaccacggccggccgaacgaacaccgccactgcacgactccacgcaagaccgcaatcgcaagagacgagcgttgcgccgcgcaaaaaccgggacgtgacgaaagccgccattgacagcatggccaaaggcacctcaatggatgatgatgatatcgagaagaccgatgcatctgccaagaaaagcaagaaaaagaagaccaaaaccaaag

SEQ ID NO: 25216 - DNA, 411 bp, Zea mays
  Clone ID: MRT4577_123001C.1
ttttcttttttatccctttttttttttttgggcttttttggatttttttttttttcttaactccccctctcccctttttttttaaggtaaaaaccaaacaacatttacttatgaataacccttttgccgccccaccaaaaatttgggaaacaaaaacacaactggcccaaaaaaccattttaagcccaactcacgacacaaaccctacaaattcttttaaaaacacccccctcccttggcaaaggccaaaacccttaataccccaaatacaacagaacctttaaagacttaaggcttaaaaacccccccaaaaaccgaacccccgggggggggggccccccttctgaaaattaaaacctccaaaggggcccccaacctccacctggttgccggaaaaaaaaaaaccctttt

SEQ ID NO: 25217 - DNA, 380 bp, Zea mays
  Clone ID: MRT4577_123002C.1
gtgttgcacagcggaaggaggcgaacaacccgattacattcaaggagattgattcaaggaagcatctggggcagggcatggcaagagcgatgatatatcagggagagttatacatcatcgaatacggcgacatgatgtacactgcctcacgggcaaaatcgacccttcattctctccaccgtgccttggtcgccatgcccgaccgcgaatcgcttccctcaatcgaatttcatttctccgccgacgattttgtctgggacgatctcaaagcaacaggcggcccggtgtggtcatactctaaacgcgacagcgtcgatattgacgaggaaaatgtcgatgatagcaacatatggctgatgcctgatttcggatactgggcc

SEQ ID NO: 25218 - DNA, 314 bp, Zea mays
  Clone ID: MRT4577_123003C.1
aacacttaaaaaaaaaggttgggtttcaaaatgaaaaggaaacaaaaaactctgggcttttttacccacttgcttacaacgtcaggttattttttacaaaacatgtcgctggccccggcaaaacggcttgtgctgacaacttaggaaaaactaagttgaagatgcttccttaactcaattaagaggaaacatatactttccacgtggtgcaaacaatgttgtgccttattaactgtatgaatggaatggctggacaaaaaacactggggtggggtctaattgtttcaaagttccggaggggggggggcggggaa

SEQ ID NO: 25219 - DNA, 389 bp, Zea mays
  Clone ID: MRT4577_123004C.1
aacaaaatccaattatcgtaatgtcgtaattccaaaattctccttgtcaatagcaaatgacaaaacggttggatagagatccgcctcgttgatcagaggccgtccatcgcggaaccaacggtggatgctccttcacgcggttttgaacacttcagcccgacgaattgttcggttcgtcgacgacaacctccatttgttccacaatccacaattccccaccccccacggcccccgggcccacccaccctctccctcttcttcctcactcctctctccctctctctctctctctctctctctctcgtcctgcgccacacgccgcggccgtctccgggcaggaaggaagggggcgggaagatgatgatgacccggggcacgatggggcccat

SEQ ID NO: 25220 - DNA, 1346 bp, Zea mays
  Clone ID: MRT4577_123005C.1
agtagacttcagtgtgtttttgaagctcacacccaagcagaaggacattgttcacaagttggaaatgcatgataggttcaaaagaagtgcagtagggagtgcactgtacatccatccttgtctttcaggactttcagaggttaatgctgagaacagggctcacaccttgagagatgattcagttgatagtctgatggattccatcaatgtgagagacggcgtgaaggccaactttttcatgaatatcctgtcacttgctaattccgcaggagagaaagtacttgcttttagccaatatatacttcccatgaccttctttgaaaggctgctggttaagaagaagggctggcatgtggggagagagattttcatgatctctggcgacactagccaagaagacagagaagcggcagtggaccgtttcaacatctccgctgatgcgaaggttctattcggttccatcagggcatgtggagagggcatttccatcgtcggcgcgtcgagagtcgtcattctggacgttcacctgaacccatctgtcacccgtcaggcgatcgggcgcgcgttcaggcctggccagcagaagaaagtgttcgtgtacaggctcgtagctgccgactctgacgaggtgaaggtccacgagacggcgttcaagaaagaagtcatacagaagctgtggtttgaatggagcgagcagtgtaccacggaagacttcaagctcggtcaagtcgatatcgacgactctggggacgagctattggataccagagcgatccgccaggatatcaaggcgctgtacagaaggtaacaaacttcgtggccgatggacaccatgtaaatactggcggtgctgatcaatgagaaatactggcttctctacagacctgagtttgctctaaaactaggacttttcaagctatatctgtggaatggtttcttttcttttgtattatgtgccagcttcggacagcagtcagctgatcctcgactcatttcttgactcgtaggccaggattattgaggattaactgctatggtgtttagacttcttaagggctagtttagaaccccggatttctaattttccaaggaaaattagttcatttttcattgaattcctcgggagaatggagttttcaaactaatccttagtaaatatttccgtcggcgataataaacaccacccagtagaccctaattcgtctttggttcgtgttggttgctcttgagcgttggaacttacctggtgccccgtttataattttatatatactccatcagttgtaaaatatagtttttatagcctatttttttgcccgtgaatgataataaatggtcatgtagac

SEQ ID NO: 25221 - DNA, 329 bp, Zea mays
  Clone ID: MRT4577_123006C.1
gctccatatccatccatgacaggtacgctagcgtacagacgaataatactttgcttaacctcactagcataacaccagctatgcagctcgactcgctcggccctgcagataactggctcgctcgctcctcctcccagcagctggccgcggcggcggccctggcagcggcgctgctgctgctggccgcgggggccgggacggagtcggcggcggggagctgcggcgaggtgacctcgcctgtggcgccgtgcctcgagtacgcgatgggcatcgcggcggcgccctccgcggggtgctgcagtgaagagcgctcgctcaacagccgcgcg

SEQ ID NO: 25222 - DNA, 758 bp, Zea mays
  Clone ID: MRT4577_123007C.1
gccggccgggtcgggactcaaaatcgagttcccgtttagctctcccagtccatctccctccccccctccgtcccaagtcctccccgctcgtgcgcggtggatgcgagcgattttctttgtcgccgcatcttatcgggcttaggagcggagatgagcatggcaggcattgcgcgcggcagatcgcgatggagacagggcgacgggtcgtcgaatcggaatgcggcacactccactgttcctaaccccgatcaccaaggggttgtgtcctctaggaagcaagcaacttaccctgggatgctatctgattcggtgtttgctacagtagacaggcaaagtaaaacaagaaaagccattgctgtaccaatgaaaatactgatagaagaagaattttcaaatgatgtcaattctaggcatatttcaccaggtgctgtaggaaggctcatgggtcttgattcgttgccctcatctggaatccataataagcatagacataccaaaagtcatgcaccaaagacttcacctagtagttttcatggtcgaactggtttgcatgacattccacacaggaggagtgtagataccattaatgtttttgaaggtatggaagccacaaaaacaaatatgcaccggagtccaagatctaaaattggaagtacaacttccagatcagacaaggttgttagtgctgatatcgatttcataaggcagaaatttatggatgctaagcgtctttctattgatgaatcccttcacatatc

SEQ ID NO: 25223 - DNA, 193 bp, Zea mays
  unsure (1)..(193): unsure at all n locations
  Clone ID: MRT4577_123008C.1
gcgtacgttagttttgggtcctnntanacggncgggctgtgtttttttttttttgagganaanataatggtatgtacatattattnaaatgttgtggattaaaaagggtatacaggtggtgataaggttgntagatgtaaatagtgtgtngtatgtttagtatgttaaanatattannttatagtaggggggg

SEQ ID NO: 25224 - DNA, 379 bp, Zea mays
  unsure (1)..(379): unsure at all n locations
  Clone ID: MRT4577_123009C.1
ccggccgggtgacgctgcctctgcgccgaaggaggacgacgtatgcgccaatgtcgaggacgactcatccagccagcagcccaagggaacctagggtccttgagctccctcccgcatggcggtcccgtggagcctctcggatccggccgaccgtcccgcctgtggcgtccgcggcgggcacctttggggtatccgcgtataccaccggcctcgcgcgtgagacggttctcgccgggaagaggggtaataggagtaacctcatagggctgctcggacaccgactaagagaagattatcatacgatggcccatanattatatatacactggggagagaccaaagtcggagaggacacctgatatctttactaaaatcagac

SEQ ID NO: 25225 - DNA, 643 bp, Zea mays
  Clone ID: MRT4577_12300C.1
ggtaccggcgccctcctcgagtttttttttttttttttttttttttttttttttttttttttttttttttttttttttttttgggccaaccaaaaaacccttcccctttttttgatggacccccggcgggcccagcacttaaaggaccaacaagaactaaattttaccctgggaaagggcccgggtctaaccataaaaaacaaatcaccagggggggaagccgcaaaggggacataggctcctattaacccctcacaaatattaagagttctcaaaataagcagaccccaaaagagctaaaacacgtaaaaaacgggtttatgtttcccttggggccctccgacgggggccgggcccccccttttaatcctttttctaatccttggcaccactggttccagcaccgtccgtctccggggccttgggctttttcccctcagctgcgggtttcacaggggccacgggttttttgcccccaaacaggagctggcagaaaacgggaacgaacccgaggaccacggaaaccaaaatgccaatagggaggttggggtgtttttttccctttcggaaaccaacaaaaatctgggtcttggggggggccaaaaacggaaatcagcatttttgcacgggagggcaaaaattt

SEQ ID NO: 25226 - DNA, 147 bp, Zea mays
  Clone ID: MRT4577_123010C.1
cccactcatccacccactcttctctttttagtcgttaaaccaatacataaaaactttgtaggcaatataataatattcttgcgaacactcataaaatctgaccacctaaatgatccaactcctcctcctggaacttgttcaccattt

SEQ ID NO: 25227 - DNA, 275 bp, Zea mays
  unsure (1)..(275): unsure at all n locations
  Clone ID: MRT4577_123011C.1
ccgcaagcgcggatcctctatagcgcgcgccctttttttcccccntgcctaattccccnnnntttttttttaacctattggggttttttttggggacatttttttgaaattttttttccaaatcacatttacataggccaagccaaaattgacccgattgcccttaagagatccccccctcttaaaatcaaaacccacccaaaacccgggggtacaaactggtggcttcccttacacgcaaaggaacccaggccgggctctgaaaaatatgaggg

SEQ ID NO: 25228 - DNA, 692 bp, Zea mays
  unsure (1)..(692): unsure at all n locations
  Clone ID: MRT4577_123012C.1
ctcgnagccggccgggaatatattttatcatcccacagaggaggcgactcctcacatctctaccttccctcctgatctgtccttcagagtaacagaccataagaagcttttccctagctcaccacgagataaacgagctcgatctcctcatcaccctaatgccagcaactgctttgagtgctggcacattcatgtgacccctgtgatattattatccgacgacgtcctagctctctttcaccccttatgacccatcaactggctgtcatgcttctgctacacccctgtttagttcgctttcagtctactatgtaacgtcatctcctccctgaccttcctggccccgattcctacctctacccaactacacagatagcgcgaagcttcaggcactccctacgtgcctgcctgttcagcgacatgctgtagatcctctacgcactgatcaagtcctacgagaccttcctcatcaccatcaacgtcgacgaatgcgtcatccagaccatctacgtcgccatgttgttcatctacgcgtcctacaaagcctagctgctctcctccatgatctggtcctcctcaatgccggcgtctttacagcatacctcctggtcacccttctcctcttcaaggaattaagcgcaatgggctgcttgactggatctgcgtaggcttctccatcactgtcttcgtcg

SEQ ID NO: 25229 - DNA, 1479 bp, Zea mays
  Clone ID: MRT4577_123013C.1
cattgggtacctcgaggccggccggggatctggccacccgagcacggccaaaaaggcgctcgcccagcgcttcaccagatagagcaacacagctcagctcagcctcggctcgacctcgacctacctctacctcccgcttcgcgcctggggtgcggtgtcgtgccgtgcgtgcgccagaacaggatgctgcccgccgggtgcggcctcctctcgtgcctccggctccacaagcagggcgacgagggccgaaccgacccccgcgtcgcggacgagcccgccgcgtcgtcgtcggcgtcgctcggcaagggcagcgggtcgtcggccaggcggttcgcgtgggccgagatcgagtccgtcacggcgggcttctcctcccgcgtcatcggccagggcggcttcagcaccgtctacctggcctgcctctcctcctcccgcctcggcgccgtcaaggtgcagcgcagcagcgagcgcctccaccgcgccttccgccaggagctccacgtgctcctctcgctccggcacccgcacatcgtccgcctgctcggctactgcgacgaacgagaggaaggcgtgttggtcttcgagtacgcaccgaacggcgacctccacgagaggctccacggcagcggcggcaaggcgacgctgccgtgggcgcgccgcctggcggtcgcgttccaggtggccatggcactggagtacctgcacgagagccgcgacccggcggtggtccacggcgacgtcaaggcctccaacgtgctgctcgacgccagcctcgacgccaagctctgcgacttcggctccgcgcacgtcggtttctcggccgcgctgcagccgccggaggccgcggcggcgtccagggcgtcgtcggcacgcgcacgccccgaccccgtcgtgggctccccgggctacgtcgacccactcttcctccgctccggcgtcgccaccaggaagagcgacgtgtacagcttcggcgtgctgctgctcgagctcctcacggggcgggaggccatatgcgccgacacggggtgccgcctcgccgccgcggtgggtcctacgctcagcgaaggagaagtggccgacgtggtggaccggaggctcggagacgagtacgatgcccatgaggccgcgaccgtggcggcgcttgcgctgcggtgcgtcagcgagggctccgggatgcgcccctccatgacggaggtggttcgcgtgctccaggagaagacgaccgcgctgatctcagccgcggggtgcaggccagccggcaagatggattcttgagctgtattgttacttgttagacgaagactgtaaatactagctttgtttagagagagtataaggtgaagataatggctcttttcttttttactcaaagtggattagtagttgttgaattggattacgttgaaaaattgatgtcagagttcgttgtagatggtctgtagtgtctcgttaatccaatcgccaagttaatctttcccc

SEQ ID NO: 25230 - DNA, 1479 bp, Zea mays
  unsure (1)..(1479): unsure at all n locations
  Clone ID: MRT4577_123014C.1
gggataattggaatgcatgtgagtggtctcaaaaatcgcgttatgggttatgcagagacgctaacacaagaggcattgatggctgctgtggacacgttaaaggagcgtgctattgttaggatgccactgaacgagattttcgaggagctacctgaacactgcacaaagcactcagtcaaaattgagggaaagggcaatattggtttgattggagtccttcctaataacttggttccaaatgtgccaacaaagacgaccatttgcaaaagtgtaatccatggaatgttgggaccagttaggacggaaccctcggtgctttctgcgtgggacaacagattgccatacccaaaaggcgagtgggatccaatggtgaatgctgtgctcaagtatggtagtcgtatagtccctttttccaccgatgctgtgcttgccgttgaaatgcacctgaaacagatgttcagaaaatttgataattcacggagacaacggcaagtaaacgatcttgaagttgggattaatggctacgatcagtctgacttttggcagcccatagaaatgaaaacatcaccaggattcccgtatgtgctcacaagaccttcaagagcgactgggaaatcatatcttttctctcaagtgggtgagtatgagagcggccgaccaaaatgggagttcaaggacgagttacttatacacaattatgaaacaaaacttgaagacattaggtctggtcgatgcccgcagaacctgactatggagtgcttgaaagatgaacgcaggaaattagacaagatctatacaaagcctgcaacgagaacgttcacaatccttccccctgaaacgaacattttgttccgacaatattttggtgattttgctgcaatggtgatgcataccagagcgaatcatttttgtcaagtcgggattaatccggagagtatggagtggtctgatctgattaacaaattgctcatgaaagggaagaaaggctttgctggtgattactcaaagtttgatggaattggatcaccggcaatataccattcgattgtgaacgtcgtgaatgcctggtatgacgatggagaggaaaatgccgttgctcgccactgtctcatcaactcaattgttcatcgggatggaatttgtggcaaactccttctcaaatactcacaaggtatgccatccggcttcgctatgactgtcatatccaactcgttcgttaattattacttcatggcgatggcatggatggacattgtgggaaggagtgcattgagtcccaagctgatctgcgctcatttgacacattcacaaaactaattgtgtatggggatgataatngtgtggggcggtcaacttcggaattccttgacacgtacaatttgcaaactgttgcggcatattttgagtttgtaacggtgtcacatacacagatggagccaagaatccgatccccttgagcgttccctatgaggacataac

SEQ ID NO: 25231 - DNA, 420 bp, Zea mays
  Clone ID: MRT4577_123015C.1
attcggctcgaggcatgtgtgacatgtaagtttgctaagagctccttgatgccccaaccgtgaggatggctaaagctgctgtacctatgccctaggctgactaccctgagagagtggcgggtccacaggccggcgacactgcgcgcgcagcaaagcagacctggtacagggcagtaccaatggccgcaaatgcctgattggtgtacagacctttctattactctctctcagtgttggctacctggcaaaaagaaacatgctgtcttcatacagagccggcacacaggacagaccccagactacaagcgagctcgatcttgcagaactgatacgatgagcttgattcctgtagaccatctatgacacactgtaactagcgtcgaagtccatgtatcatactgctctatgatttgctacaca

SEQ ID NO: 25232 - DNA, 2008 bp, Zea mays
  unsure (1)..(2008): unsure at all n locations
  Clone ID: MRT4577_123016C.1
aaaagggaataataatacgacacaacgtgtagccaattcacaaagggcaaccggttcaactttcaagcatgctcaatacttgcactttacaatagctgcagctcttcattattagatattgtacatggggagaaaggtctaacagcggctaggctaaaacggctaaaccaaatatatacatgaaccatttgtactctcccagttgcctcttgtgggagtagttactgttacaccctcctacagggcatagatcctcttctcatgatcagagaaggcttccagatctgaaaacccatcatggattgaccaggagaaggatttgctgccgcttgccctcttgatgcggcgctgtctgtcttcgccgaacttgaaccgtgggcgcaacagaagataggctaggaacaggaaagttccaatcatgatcggccctccgatggctgatgccgtgaaggccatccaggcatgctgcgggccaactacaacataggccagcgagataaaagccacacccgtgctaaggcatgccgtccacatgagcttattcacgatcttgataacttgcttctgggcaccagtttcccaggcaaccaaggtgatctgcaccacgaccaccgcgagggagatgaagagagcagtagcgttcagaaggcagaagacacggaaaccggtaagcttggctatttcggcctcaccaatgtctcccccactattcacatcctggaagtattgacctggcagattgaatatggcgacgaaggcaatggaggcaatcagggtcgctaccaaggtgactgaattgatggtgttttggatagcttctctatgcagtttctgcaactctttgcgaatcccagtcactcgtttgttggttttagcattctcgctaagctgtgcctgaacattgtgcttgatatcgctcacagttctcctcagttctgatgcctcatcaattttcccaacatttctggcattctttgcaccagcttctgtcagccactctattatttccgttttagactcaccataaggaactttgtcagccaaatccatagctgtttcattttgactgttgatagcattaacttcaagtgattcatagctaagaagaagctgtaccatctgaaaacaatagtgactagtaaggtaaaataaagttggcaagtcagagcaaagcatgtttggaatcaagtatgaacaattcccacaaataatataaacatatgttcggagtttgagagtaaggtaacttagaagttagaacactaatcgtaaatactccataaaatagaaaagcaccccatcgttctgtgagtttctggatggctatttttgatcttcctttaacacacaagcatcatttatataatactttaaggccttgtggggtgggctggactgctagaatagtgtgttgagaagtcagccacacttccacaatagtgataccgagatattagcatccagatacattcctgcgccgttgcaatgacttagtaagactagtgtcagacagttaatagcagcagcaactaatgtctttatagtgctttataagatggtcgtgtgttcttagatatatggttgctcttcctatagatgctctgctccactaagaaaccaccatggcttacatacgacatgtttttcacattgagatattctgcaaaaaaatattaatgcaaaaatcggacaaaatttggggaaaaaattactactgttgggcctcaaggctctaacaaaaagaaaattgagtttctagctccactcctgaaaactgagcatggcattctaaaggctctaattcatatattactctataaaaatactatgtttacatttgataagttgtgtctaacagatgcataatatgattgatctcgggctaccgtctgcatatctccatgtactggtatactctcaaagatctaagcagaccangaagtcctatcacctagcatgcacatcatgataatagtcacagtcttgccttcaaaggatgtcaaaaccc

SEQ ID NO: 25233 - DNA, 485 bp, Zea mays
  Clone ID: MRT4577_123017C.1
cgttgctgtcgcaggagtcaaggacgctgtcaaggcctgtatgtctgccggtatcgtggtacggatggtgaccggtgataacatcaacacggctaaagctatagccaaagagtgtgggatactgactgacggcggcgtagcgatagaagggccagagttcagaaacaaaagcccagaggagatgagggacctgatacctaagatccaggttatggctcgttctctgccgcttgacaagcatacccttgtgaaaaacctgcgaggtatgttcagggaggtggttgctgtgacaggcgatggtaccaatgacgctccagcattgcatgaagcagatattgggcttgcaatgggcatagcaggaacagaggtagccaaggagagtgccatgtgatagtgctggacgacaacttcacaaccataataaacgtcgcgaggtggggccgacagcacggaattcagccgtacccgggatcccagagtcaccg

SEQ ID NO: 25234 - DNA, 475 bp, Zea mays
  Clone ID: MRT4577_123018C.1
cttttaccagaacttgggacctgctaagttgacacaacataagcgtagttaattaacaatattaataatagtatgaaaacttcagatgtaggaaatgatgaatgattaggaccgtaaagattcaatacttattctattttactactccatttcaaactgtaagttgttttgtcttttctaggtacatagcttttgctatccctctagatacacaatatacttagatatgtagtgaaacttatgaatctagtaaagccaaatgacttataatttagaattgagggagtaataattgctaattattgaaccaccgacactgaggtgccattataattatactctcgtgagctcctctaccttcagccagtaaacgcttaatttgagaatttgtttactggaatatgattttcttgtgctgatgcccctcccctaaaatttgcggaacatcttgggtctgcgcttatctgctctgttt

SEQ ID NO: 25235 - DNA, 1988 bp, Zea mays
  Clone ID: MRT4577_123019C.1
ggtcatatacttgcactttataataggtgcagctcttcattcttagatatagtacacgagaaggtcccaactgcggctcaccacagacctaaaaggttaaaacagctaaaccaaatatatacacgaaccatttgcactctcccaattgcctcttctcatgcaagagtaattactgttacaccttcctacagggcatatatcttcttctcatgatcagagaaggcttccagatctgaaaaaccatcatggagtgaccaggagaaggacttgctgccgcttgccctcttgatgcggcgctgtctgtcttcgccaaacttgaaccgtgggcgcaacaacagataggctaggaacaggagggttccaatcatgatcggacctccgatggctgatactgtgaaggccatccaggcatgctgcgggccaactacaacatatgccagtgagataaaagccgcacctgtgctaaggcatgcggtccacatgagcttatttacgatcttgataacttgcttctgggcaccagtttcccaggcaaccaaggtgatctgcacgacgaccaccgcgagggaaatgaagagagcagttgcattcagaaggcagaagacacgaaaaccagtaagcttggctatttgagcctcaccaatgtctcccccgctattcacatcttggaagtattgacctggcaaattgaatatggcaacgaaggcaatggaggcaatcagggttgctaccatggtgactgaattgatggtgttctgaatagcttctctatgcagtttctgcaattctttgcgaatcccagtcactcgtttattggtcttagcattctcgctaagctgtgcctgaacattgtgcttgatatcactcacagttctcctcagttctgatgcctcatcaattttccccacatttctggcattctttgcaccagcctctgtcaaccactctattatttccgttttagactcaccataaggaactttgtcagccaaatccatagctgtttcattttgaatattgatagcattaatttcaagtgattcgtagctaagaagaagctgtaccatctggggcctccatttccgtgtagctatgtgcaaagcagtatttcccttcttgtcccgcacattgagggctagtttggcaaccaaggttaattaacccggagataaattccactccatgtaggattcatctttgcaacttcaacaatgcattctcggcaggtaagctatgaaagtttcaacttttttatatcacagtcccaacaaaaattcctgacaactgtaatccattctaggactagtagatttagagtcacatgctcatagcacctcacacctgccaatcaaaccaaacgaattgaagcttacaacagagaaaacaacccattgaatcctacagtaaagtaaagagtgagggtccctctcgtcccaaatctgcagacacgtaaacaacccattgaatcctacagtagcaatgcaaacaaagagatgcctgaatcgtatatcctataataacactcttgctaggtttcacactcatcttctgttaatagaagaagcgtgtggtgcagccgtgcagggatctggaagcaagtaaagtacaaaagagaaagacgaagcagatctgatccgaatttggtgacgccatggtgcaggatggcgacagaagggggatcctagctagaggcggaggccgccaaggcgaggttgtccggcagggcgtcatcggtccacacccggtcgtccgtgtccttggttcacacgcagtgcaagcggctaggagcagcgccagaagtggcaaggcggatagatcaaacatcaagcagtgcccccgcgtggatttgtggggagaaggtgtcagcagtagcacgcaggtggggaagggagcggtcgagcaaagggtgggtgtcaccagcagcaacacaaggttgctggtgatgatgtcccgcggaaggcgatcggtggaggggccgcggcaatgag

SEQ ID NO: 25236 - DNA, 594 bp, Zea mays
  Clone ID: MRT4577_12301C.1
aataccctttcttttcctttcgctgaccctcgccttcgcctcaaaacccttgttcccctttccttctccagcggcggcggcggcaaaggcggaggcggaggatcgaagatgatcatcccggttcgctgcttcacctgcggcaaggtgatcgggaacaagtgggaccactacctcgatcttctccaggccgactacactgagggggatgctctggatgccttgggcttggttcgctactgctgccgccgtatgctcatgacccatgttgacctcattgagaagttgctcaactacaacaccctggagaagacggagacaagttgaagttaattgaacccattctgcctcgaaacctttgttcctttgtactttccaagatgctgtttcttgcgtcagtgcttaggaggtgcaaagtgaggcactgaaatgaagttggtttgttcatgaatctccaaggactgttagtgtgaccatgcgtttctactatgtgatcttcaaggctatattaaccaacaagtctatgcattctccagtttcagacttattaagctcccaagcgttgaacatgttattcctgtgctttctgttggatgt

SEQ ID NO: 25237 - DNA, 654 bp, Zea mays
  Clone ID: MRT4577_123020C.1
ccctcttcgagtttttttttttcttttttttttttttttttttttttttttttttttttttttaaaaagggaatcataatacgacccaacgggtagccaattcacaaagggcaaccggttcaactttaaagcatgctcaatacttgcactttacaatagctgcagctcttctttattaaatattgcacctggggaaaaagggctaacagcgggtaggctaaaacgggtaaaccaaatttatacatgaaccatttgtcctctcccagttgccttttgggggagtagttactggtaccccctcctacagggcataaatccttttctcatgatcaaaaaaggcttccaaatctgaaaacccatcatggattgaccaggaaaaggatttgctgccgcttgcccttttgatgcggggctgtctgtcttccccgaacttgaaccgggggcccaacaaaaaataggctaggaacaggaaagttccaatcatgatcggccctccgatggctgatgccgtgaaggccatccaggcatgctgggggccaactacaacataggccagcgagataaaagccacacccgggctaaggcatgccgtccacatgagcttattcacgatcttgataacttgcttctgggcaccagtttcccaggcaacca

SEQ ID NO: 25238 - DNA, 337 bp, Zea mays
  Clone ID: MRT4577_123021C.1
ttttgtttttgctctgtgtggtttttatttctttgtgtctttgtccgccccagatcttttggaactacatttacggaccttttttttgggtcatgggcttcaaccgggtccacgaaagaaaaccgtggttttatgttgccgggggggccaccccaccggttttggggtggaagtacaacgtgcaggaggcgatggcaaccacgctgccccagccaccattagaaggaagagtggggccctggggtgccacgggcctatcttccatagtgctatgctcgccacccctcccttaatcagtggggggggctgttccgggtccatcaaggggcccccttaa

SEQ ID NO: 25239 - DNA, 300 bp, Zea mays
  unsure (1)..(300): unsure at all n locations
  Clone ID: MRT4577_123022C.1
tgcgtctcgtgcgcgatccactctcacatcttccgcgtccgatcccgtgagaagctcaagggccggaggccntcggagcggttcaggctcangtaggataggccttctgatgtacaaggaggcccccgacctggtcctagtgctactgctacagctccatctccagcatctattgcttctcgcccatatgctttatcttttccaccgtgttaagtcttctggccactcactttctgagttatcccctgtgcgtatctgaagctcctatattagaggtacttattatctaaagtctcaaca

SEQ ID NO: 25240 - DNA, 192 bp, Zea mays
  Clone ID: MRT4577_123023C.1
ctcagaaaaattattcatttgcacaaatatcttggtatggtctaaggtggattttgagtttccttcttatggaaggcatgacacactttttccactacaatgcctttgtagtaagccggctatggcagcagttatccccttttgaggttttcatcatcagttatggggtgttaaactttatgtgggtgaaat

SEQ ID NO: 25241 - DNA, 214 bp, Zea mays
  Clone ID: MRT4577_123024C.1
agaaaagggaaaaatcggagttctccctcgtgtcgtcttcctctccgccgcttctcctgtccaccctcgactgcttgcgcgtgacctgagccgccgccgcctaaatccgttcatcccggggcccgcctaaaccacgccgccaccgaccacgtataatcctgcctccctttgggccggtttcaaggctcgtttccttggggaccgttcgtttgcc

SEQ ID NO: 25242 - DNA, 312 bp, Zea mays
  Clone ID: MRT4577_123025C.1
atccgttcatccaccgacggcgacggctgcttattttgttgacaatttttgccggggtggggaaattgggctcaaaaaaaatggtgccccctttttgaactcttcgcagtgggcttgggtgtccgtctcgcgcagtttcggaatctgggctcctttttcagctcgagatcgactgttgtgggaagatctcttgctgcgttgcctggtctgggctaatccgtgtgaactgtgaaaattttaagatgtttttacataaactcgcatttttccttgtacgttttttgcgtttttgttgagacttttataaaaagt

SEQ ID NO: 25243 - DNA, 361 bp, Zea mays
  Clone ID: MRT4577_123026C.1
atgttatataatcagacgcctcgagattggcttcacggcggctagctgccaaaataagaggggggtatttttcaggaccttggtgtattaccttaaggagctagcatcggccaaacactcgcatacttgcttaaaaagctaagtccatgtggaaaaccgaccaacaatacactcgacagtagagactctggtcatgatgcataattattccacatacctgcagtacatgccgtcatggatagcaattcccaaatggaactactccagtggcacacctaaaatgccaacgataacccaaacataattcattcatatgagatatcgtcatctggtattatacaagctattggacactttaatc

SEQ ID NO: 25244 - DNA, 266 bp, Zea mays
  Clone ID: MRT4577_123027C.1
cccaccctataatctattttttaaacaccggcccaggtttaaacaaacaaacccggggggaaaccccggggaatttttataaaacctagtgggggtcctttagtttggcccaaaatccacatgtttggggggggatgggggggtaccctaaactaatttacacataaatccacctaaacatagggggattggggtcaatcctagagtcccaaacaaggcctaaaggggatgaccagcggctacatacaaaaattttaaagcgatac

SEQ ID NO: 25245 - DNA, 260 bp, Zea mays
  Clone ID: MRT4577_123028C.1
ccaagaactccaggtccagtcctctggaattagtaaatgccagcttacaactcgtcaatattgttacagctgttgtgacctgctcacccgattccggctcgtcagagatggtgccgtccaactatattgcatgcgtctcagttggctcaccatcagaagagaagtgtcaggcctggatgcagatgatcaccctggtcagccttaagagtctccatctaggtgacgacgccttcaacaagggatgccgtgcgatctactgc

SEQ ID NO: 25246 - DNA, 767 bp, Zea mays
  unsure (1)..(767): unsure at all n locations
  Clone ID: MRT4577_123029C.1
tccggccaaatgaaaagatgtactctattttaatttatggatggtgcaaggtgaatcggagggacatggcttaagaagttcctaaaagatatgcttgttcatggcatagaaccaaacattgttacatacaacatccttctaaatggtatctgcaggcatgcaagcttgcaccctgattaccgatttgatagaacagttcatgcagcagaggatctcttgaaggagatgcgtggcaggggaattgaaccagatgtaaccagttattcaatcattctgcatgtttacagtcgtgcacataaacctgagttgtgtctctgcatgttccgctcgatgaaagaaagaggcatttgccccacagtggcaacatacacttctgtgataaagtgtctttcctcttgtgggagattggaagatggtgaaattttgcttgatgagatggttgctgagggagtatgtccctccccggctacctacaattgcttcctcaaggagtatcggggaagaaaagatgtgactgctgccttagaactgtataataagatgaaggcacctggttcactgaccgcaccagatattcacacttacaacatactgctgggaatgttcagcaagctgaatcgacatggaactgttatggacatttggagtgagatgtgtgaaagcactgtgngtcctgatcttgattcatacactttgttgatccattgcttttgtgatagtcagaagtggagggaagcatgttagttcttcatggagatgatcgagaa

SEQ ID NO: 25247 - DNA, 439 bp, Zea mays
  unsure (1)..(439): unsure at all n locations
  Clone ID: MRT4577_12302C.1
ggcattctcgacggccttcacagaccgtctcaaactcaaaaaacgatgcccttccgctcccgccaccagcgcctggcgtcgctgacgaagctgctgaccacccacgtgaacgccggccgccaccgcgacgcgctcggcctcttctcccgcatgctctcggccccggacctcccgccgctcaccgacccctccttcgcccacgctttcccgctcgcgctcaagtccgccaccgcgctccgcgtgcccggcgccgacgcctacttccacgcgctcgccgncaagtgcggcctactctccagcccctttctcgcctccgcgctcgtcgcgtcctacggcgcgcgcgtcgtctgcggtgcctgcggtgcctnctacgaactcacccgccgcctgtgcgacgaattgcccgcccgcaacgccgtcgtttggagcgccatgatct

SEQ ID NO: 25248 - DNA, 300 bp, Zea mays
  Clone ID: MRT4577_123030C.1
agataagatccacaagttcaaaaagtttagcttacaggtgtcctaaaagtttacagaatggatccaggcgcgaacggatccaaatagaggtagactcatgaccacgacggtccaaacgagtcgattttattattaacgctaaaactgtactaggatacaagtacagacgtcaactatatactacgcgtctacgctgttacatcatcctcccctcgttcatatccgccgccgccacgacagcctcggcgacgccgtcgccggcccccttccccacgttgcgcgccgcggcagccgccacct

SEQ ID NO: 25249 - DNA, 300 bp, Zea mays
  Clone ID: MRT4577_123031C.1
gcaaccatatcagttatgggggtatagcacccaaatgaccgctaaaccgaagcattgtaaaccttcaagacacggcatattttgaaaccaacaccctagcaagtgcaaccaactgatagggacaggcaccgggcgaatcacgcggagcggcctcaaaattgcatggaaaaaggaaacaggaaacatggggctgggagcgccaggttttaacaaacggggctggggcctgataaccattcggaacaaccaatgaaacaagggctctctccgccaacgaaggccagaaaacattgttcatcc

SEQ ID NO: 25250 - DNA, 877 bp, Zea mays
  Clone ID: MRT4577_123032C.1
taagggacaaagccgggtgcatctcatacatgcgctaaagaagacaacatatataataacagagtgtctagagataaatgtcacaataatcagagtacttattacatagcggaagtcttacaaaataaaatataaatatggatcgaactaaaatccatccttggcgccagaaagtcaactgggagacaccacctagatcgaatcaaactcctcgatatgtggctcctcttgaaccacatgttcttctcctggcacttgagattccagttagtagggtgattcttcagatcctcgtgacctcacgagaatcgccgcacgatcgttcttggccacggcggagtgcggcacgccaagctcggtgagaatttgtcgcggcctcacccttcgcaagcccccggcgaggccaccaatcgcgacgacgcaacctggtgacacaccctggcccagagatcgatggataatgttgtcaatctccggatccacaaggcagcaccgaccgcaccccttttctcttcacagcttgctgcttctatgtgagactacccggtgacttcgagatggcaaggaagggtctgcggggagcaccgtggacggtccttattgcccaccccgacgtggattagttggcgagattcccggagggtcgccgaggtggccacggtatgctagcgcgttcgttacggtgagagggggatggatggagtcggcgcatcgatccatatatccagggggctcccttaacgggtcaaggtcggcattgggggaagaaaggtgggatttgcacgagtacgccacaacccgcggaggcgacgatgcgcatggttagagatccggtcattgcggaccgagctcgaagacattctgaccggcaggtccc

SEQ ID NO: 25251 - DNA, 533 bp, Zea mays
  Clone ID: MRT4577_123033C.1
aaacaaaaaaaaaacagggcaaaaatgggattccagttttgggcgaattccaagggttccaaaatttggtttttttttcccaacaaccgttaaaaaaaaaggggcggaaaaactgcccccttttatttagggtactacggggccggggggaaccattccaaaactttgtgtttggggctcacaaaacccttgggggggataaaaaccaaaacccggttggtggacccccccttggtgtaataccaaaaaaaaatttttttgaagggaaagcttaacccaatcccccccttgggaaaaaaaatgctggaccttgtaaacccaacaaaatttttggaaaaaacttcctttgttggggaacaaaaaaaacctttgggggccccccttgaggcgcctttggagggggttttaaaaaaaaaaaaaggggggggttttttttaaacgcggggtgggaaaaacccaaacaaaaaaattttggggggggaacctctggggggccccccccgggggttttttttatttgggttggggggggg

SEQ ID NO: 25252 - DNA, 391 bp, Zea mays
  Clone ID: MRT4577_123034C.1
ggggggggttttttttttttttttttttttttttttttttttttttttttttttttttttttttggccaacaaactggggggccccctttttttttaaggcatcaaggcaaagcaaaaaatttaaaaagcaatgcccccaggggtcccccctaaaaaaacccccaaaataacaggcccttgccttggacttttacaaaggcccccaaaaaaaataggctttttttgaccgggttgggaaaaaaaacccccccggcccaaaaaataatttggggggggggcggcccccccttaagggttccttccccattgttccccccccccaaaattccccggtttattttatgggaacaaaagggggtgggacgggccctcctgaaaaggcccccttta

SEQ ID NO: 25253 - DNA, 1126 bp, Zea mays
  unsure (1)..(1126): unsure at all n locations
  Clone ID: MRT4577_123035C.1
aaaacctgtacgagaacttgatagagaaggatttcccgcggcgcagcagttcttccctcatcacaagctgncacaaactcagcacacaatcacactgacacacagtgacacacacacaccacaccacggcaccgctagtgagaagcagagcgggaggacacgcggcgcggactgcgatggctcgtgcgctcggcgcttgcgtgctgctcgccgtcctgctcggtgccctggcgccggcgccggcgccggcggcggccgcgcgcgcccacgacgaccagggcagcggggccggcatacggcagccgagcggcgagtaccgcgggaggaaggtgggggccaggaccgaggtgcgggacgtggagggcgacggcgaggtgcaggagctcggccggttctccgtcgccgagtacaaccggcagctccgagaaggtggcggcggcggcggcaggctcgagttcggcagggtggtggcggcgcagcggcaggtggtgtcggggctcaagtactacctccgcgtcgtggccgtggaggagggcggcggcgcggggaacggcggcgagcgcgtgttcgacgccgtcgtcgtcgtcaagccctggctcgactcgcgtaccctgctcacgttcgcgcccgcggccgccaagtaagcgcggcgctaccgccggtgtagtgtagtatctctggtctacccttctcggagaccatggacgctgaataaagtcttgtgtgttttgtataagcgaagcgtactagagagtgaagatggacgaactctgcgctgccgcgcgcagatcgatgtttttttttgaaaggctgttccataaatagaggagacaagagtctgagactgagagagaataattaaatcgctgtgcttctataacaaatcatgctgttttgttcaccagagatcccgaattatgattattcagtttctaaaaaaaaaaaaaaaaaaaaaaaaaaaaaaaggggggccccccgacaagggaccccgccgcccgggaaataattccgggccgggaccctgggggggacccagtttccccaaaggggggccgtataaggcctgggggaaaccagggccaaggcggtccccgggggaaaatttttacccgcccaaattcccaca

SEQ ID NO: 25254 - DNA, 415 bp, Zea mays
  Clone ID: MRT4577_123036C.1
tctttttgctggaaatcacttgaagaaggacaacagactagctgattacaacatcatgacaaattcttgtgtccacctttatgtaactgatgggatacatatatgtcagtatccccatgtttgggatcccatagtgtttgctaatgtcaaggcggtgatcgaatagatagggggagttcttcttgatgaacaaatcttgatgcatggatgccaaaagcttgaggacaacaagttgctgagtcaatgtagtttgagcaatggccacacactgcatgttttggtctaccccactaaaaagatgcatatttagtacgtgaagcactgcaaccgctacaagaaccccattgtcctgtgctaggtccgcgagatgcttagctgctacgacctcgccaagttcgagctctgcacgctcgac

SEQ ID NO: 25255 - DNA, 2021 bp, Zea mays
  Clone ID: MRT4577_123037C.1
gtgaccccccgcccgctgctaacccaacccaactcgccccctctcgtctttaactcgcgcccgggctcgggctctctctctctccctactctatctctcttcgtctacaagagggacaccgccgcgccacctttcagtccccgtgcgccacgccacctgccagtactagctcgcccgctcgatcgcgcccatcaatcaatcaattctcgacctcactactcgatctcgtctcatcagtgtgagtgtccgagcacggcagcacgcgcaatggacgctctgctcgtgactacgaccttcctcgtccccgtggtggcgctcctcctcgggtccgggtccgggtccgcggcggcgctgccgcgcgccttcttcgtgttcggtgactccctcgtggacaacggcaacaacaactacctgatgacgacggcgcgcgccgacgcgccgccctacgggatcgacttccccacgcacatggccacggggcggttctccaacgggctgaacatccccgacatcatcagcgagcacctcggctcccagcccgcgctgccgtacctgagccccgacctccgcggcgcccagctcctggtgggcgccaacttcgcgtccgccggcgtcggcatcctcaacgacaccggcatacagttcgtgaacatcatcaggatcgggcagcagctgcgcaacttccaggagtaccagcagaggctggcggcgttcgtcggcgacgaggacgcggcgcggcaggccgtcagcgacgcgctcgtgctcatcacgctcggcggcaacgacttcgtcaacaactactacctggtgcccttctccgtccgctctcgccagtttgccatccaagactacgtcccctacctcatctccgagtacaggaagatcctcacgcggctgtacgagctcggggcccggcgcgtcgtggtgacgggcaccgggatgatcgggtgcgtgccggcggagctcgccatgcacagcgtcgacggcgagtgcgcgcgcgacctcacggaggcggccgacctcttcaacccgcagctggtgcaaatgctctccgagctcaacgccgacatcggcgccgacgtcttcatcgccgccaacaccaaccgggtcagcttcgacttcatgttcaacccgcaggactacgggttcgtgacgtccaaggtggcgtgctgcgggcagggcccctacaacgggatcgggctgtgcacgccggcgtccaacgtgtgccccaaccgggacgtgtacgcgtactgggacgcgttccaccccacggagcgcgccaaccggatcatcgtcggccagttcatgcacggatccaccgaccacatcagccccatgaacatcagcaccatcctcgccatggacatcaggaactaggcgctgcgcgttcgttcgtccatctctgtgctgccatggatccgtccgtacactggcagctatcatattacgggaccacacatagcttctgcatgcatgcgtaatactactagtataagttcgtgtcattggtaattggttatgttcatgaagcttcttttttgtggtttagattgacgtgaattgatggtgagaaattaatcctttattagagatgcatgggttcaatataatacagctgtatgtcaagtttctttgaaagcagattgtttggcggctagctatagggacttcaggaattagcaagtactggcacctacaatccattaattcaagaaatttcggatgtgtcatccgcttcacagctgcctgatcagcttcgtgggtcgccattgccacatgtcagatcagttttgtatgggtgtgtaggaaagtccctagctagtgcatcatgtgccaccagtttccggatgtggttttttgcagggtttcgttcgttcgttcgtgtgtgtccccaggcaggtgtttaattgtgtgaaagtgacgcccgtatcctgtcaattgtcatatagcaggacagcttcttgtaataatttatataaattttcaggcgattcataatttctattttttggcctttgctt

SEQ ID NO: 25256 - DNA, 440 bp, Zea mays
  Clone ID: MRT4577_123038C.1
ttacgagttttttttttttttttttttttttttttttttttttttttttttttttttttttttttttttttttttttttgcccccccccaggggatgctttttttaatcctcaaaattatgggggacaaactttgtcaacccaataaaaacaaaaataaagtttgctgggagccacacattatcagctaaaagtttcagccgcaaaaaacaaatatgccagggggcaaactaagggctaaatatacagttgaaccggccgatatggccctttttttttccgggagaacaggccccatgcaaagctccgtttgattagcgggggggtatggaaaacatgggaacatgggggccaacaggggggcgttacatacccggtttatacggggcagctagctttcctccatcaccttttacccttcaatttgagggttgacctctg

SEQ ID NO: 25257 - DNA, 647 bp, Zea mays
  Clone ID: MRT4577_123039C.1
ggccgcttttttttttttttttttctctaataaaggattaatttctcaccatcaattcacgtcaatctaaaccacaaaaaagaagcttcatgaacataaccaattaccaatgacacgaacttatactagtagtattacgcatgcatgcagtagctatgtgtgtcgtctcgtagtattatagctgccagtgtcgggacggatccatggcagtgcagattggcatctcaatcccagccggctagagatggatggatcgaggtcgaggcacgccacgcgcagggcctagttcctgttgtccatggcgaggatggtgctgatgttcatggggctgatgtggtcggtggatccgtgcatgaactggccgacgatgatccggttggcgcgctccgtggggtggaacgcgtcccagtacgcgtacacgtcccggttggggcacacgttggacgccggcgtgcatagcccgatcccgttgtaggggccctgcccgcagcacgccaccttggacgtcacgaacccgtagtcctgcgggttgaacatgaagtcgaagctgacccggttggtgttggcggcgatgaagacgtcggcgccgatgtcggcgttgagctcggaaagcatttgcaccagctgcgggttgaagagggcggccg

SEQ ID NO: 25258 - DNA, 239 bp, Zea mays
  Clone ID: MRT4577_12303C.1
ctcataaagattaccataacttgcccacacataaacacaagggggcgatccaaagaacactttcaacattctaccgacacaggggacatgaaccccaaatgccaacgcatccggagtaccgataacccttatcgcaatttaccctttaacgggagcaggatgatgcctataaggttcgcgtagggtcataacaacactatctaccagggtgacatttatgcaggacgattctacctggc

SEQ ID NO: 25259 - DNA, 213 bp, Zea mays
  unsure (1)..(213): unsure at all n locations
  Clone ID: MRT4577_123040C.1
attnnaaaaaagcaaanacannnnntngggaacgagggggggttgtactaacttgttcgagattcaagtacccccctagatcctcaagcacatggaacatttcactgtacagctccggatgatatataaaatgacctggcctacaacactaaaaatcatctatatatgtcccatattaggagataggaatcgcctgacaaggggtaagaacag

SEQ ID NO: 25260 - DNA, 359 bp, Zea mays
  Clone ID: MRT4577_123041C.1
atggacgacaccgacaagagaggaaagacaaccaacgctgccgacaccaaacaatctcctcacatgcccgggctacatcatgcggcgcgcaccgtcccgtgtacgctgcgttcctacacgatgccgccggcattcttcttgctgctccccttcctcctccatgtcaccgcgctccgccagggtcccaccgacagtagtactgaacggcatccctggcgccaacaccggctgcatgggcccagccaacaatgaggccaccgaggccttaaacgatcatcaagggctgaaatttgacggggttttttttttttcacccccccccgccgaaaggggagacgtggccagagatcccacaggag

SEQ ID NO: 25261 - DNA, 193 bp, Zea mays
  Clone ID: MRT4577_123042C.1
tggcttctctcttccccttcccgttcgggtctcgggcttcgtgtaggttcttccggggcttcgcgtttcgtgggtgagtcgggtcgcgtatggcggcgtcgcgttgtttgagtaccgtctggcttcgtgcggcgtgcctcgctcttgggcctcgggtcgactcatctcccttccacaagtcgccttcagctac

SEQ ID NO: 25262 - DNA, 209 bp, Zea mays
  Clone ID: MRT4577_123043C.1
aattcaggggaggggtctatttaataccccaattgccaaaggttttgcaaaagccataccccctccaggattgggtaacacattggaactctccgggtgctggaaaaggaaccttactatagggggggcaactcttgcaccattttgtgctttgccgaaatgggggaaaataaaaaaaaccagggttatgcccttggcaacacaatccc

SEQ ID NO: 25263 - DNA, 816 bp, Zea mays
  Clone ID: MRT4577_123044C.1
cgggaaaaaacgaggatccgccatccggctccgcttatgtgatagcccggcccaacactacaactgcctctcctcggcgtcgccactactccttgcctcacgccgccgctcaaacagcagaagggagaagagaagcacgcccaaaaattccaaggtttttcacctcttggagcgcaccaacaccacccggagaccggagcgactcgccaccggcgcggaaaaggagggcggaggctcgatggcggatgagaatcaggctggaaagaaagaggaggaggaatttagcacaggccctctgtcagtcctaatgatgagtgttaagaacaacacccaggtcctcatcaattgccgcaacaacaagaagctacttggccgtgttcgtgcttttgatcgccactgtaacatggtgctcgagaacgtgcgtgagatgtggacagagatccccaagactggcaagggcaaaaagaaggctctgcctgtgaacaaggatagattcatcagtaagatgttcctcaggggcgactcggtcatcatagtgttgaggaacccgaagtgatcgcccaaccagtcaccttgcagcagttatgccctttctctgggttcacggaatccgtgcctctgttgaaaaaactgtagcttatgtgtgtcttggcggattagctggttatcttgaactgacgttcatgtgacatggcaatggcacatgaacatacgtttcatgagtttgattgttaattggcgcttgcagcactttgatccctgaatgttgagattgcacttctgcttattgtcaaaaaaaaaaaaaaaaaagcggcc

SEQ ID NO: 25264 - DNA, 197 bp, Zea mays
  Clone ID: MRT4577_123045C.1
cgacccaccgtcgccaccgtccgaattattctctgttctaacaacgcaatgcagggcacggaaatttcaaggctgaggctatcaagcatggtggctggctagcgcatgaaagatactacatatcctgaactaaaaatgagccccacagtatacaccgctatgactcagcactatcccctcaagaacatgctataacc

SEQ ID NO: 25265 - DNA, 1220 bp, Zea mays
  Clone ID: MRT4577_123046C.1
gcgggggcgacgccactactcctgcctcacgccgccgtttaaaccgcagaagagagaagagaagcacgcccaaaaattccgaggttttcacctcttggagcgcaccaacaccacccggagaccggagcgactcgccaccggcgcggaaaaggagggcggaggctcgatggcggatgagaatcaggctggaaagaaagaggaggaggaatttagcacaggccctctgtcagtcctaatgatgagtgttaagaacaacacccaggtatgcaatttatcctgtttccctccagttattttgctagaaacttaagtgcattgtgctattaatttttgttctttgggttccatacaagcttgaggataccagattgagattaagacacctttcgattaagacaccagcttgaggttatacatgactcagcttctgttatgtacacccgtttctgtcattttactcccaatcaaaaaccttaataatagtcatcgttgcattgaaaaaaaaaactgtcttgtgtatctctgtgaatgctgcagttaattctacagcttagaaatgctgtatccaacgtagtagttgtttctctgtacatcttctgatcttattccggggaacaatttgatgcgtaaccatgttcaccgttttgatgtcctacagctctactttgtttgtaattagtcaacaaaggctaatactaatctcctgatgtgttcaggtcctcatcaattgccgcaacaacaagaagctgcttggccgtgttcgtgcttttgatcgccactgtaacatggtgctcgagaacgtgcgtgagatgtggacagagatccccaagactggcaagggcaaaaagaaggctctgcctgtgaacaaggatagattcatcagtaagatgttcctcaggggcgactcggtcatcatagtgctgaggaacccgaagtgatcgcccaaccagtcaccttgcagcagttatgccccttctctgggttcacggaatccgtgcctctgttgaaaaaaactgtagcttatgtatgtcttggcggattagctggttatcttgaactgacgttcatgtgacatggcaatggcacatgaacatacgtttcatgagtttggttgttaattggcgcttgcagtactttgatccctgaatgttgagattgcacttctgctcaaaaaaaaaaagtggatgaaaacgctcaagaggcatctcatgagttgcagc

SEQ ID NO: 25266 - DNA, 173 bp, Zea mays
  Clone ID: MRT4577_123047C.1
ggagttagagagagaggggatctgcgacgtgttttgctctgcggctgcttgtctgtgggccctattgaggctatgtgcacatttacaccgaggtcggtggttgatcatcagttaattattacatgttacagtagatatgaacagattgtgatgaggttgaatcgatgactaaa

SEQ ID NO: 25267 - DNA, 494 bp, Zea mays
  Clone ID: MRT4577_123048C.1
agcaaagggggaaattaaattaatttaccccgacccactcgattaaaacacccccttttgcccccccccccgggggattaaaaaaaaacaacgcccccccccggccggaaaacgcccccccggtctcctacatcgagtaggcccccccccccccaaaaaacgaggagcggtgctaaaacacccccaggataaagaggagcatgagccccacccccacgggggaccctcccaccccggggaccgcctcgggggacccccccaaagcaaaaaccttggcaaaccccccggccccccgctcggaggaaaagaggccgataaaaaacaccaagcccaccgggaggaaaaacaacccaaccgggcttaaaaacttcgccacgggctccgtaaacacctagccgccgttgcccaaaaaaacgggcccgccaccacgaggccaaccaccaccccctgcaacaagccttgtggggcaccgcgcggcccctgcccctatcccg

SEQ ID NO: 25268 - DNA, 181 bp, Zea mays
  unsure (1)..(181): unsure at all n locations
  Clone ID: MRT4577_123049C.1
ccaacggctactccatgctggacttcacccggttcatgcgcgccnnctacgggctcccgcncggcgacgtcgctnnncgtccggnnaggtcggcnnaggtctgcttccgccacgtccaggtggggctcaccagccacgccgacttcagcacgaggtggcgcccttcgcggacgtggccaac

SEQ ID NO: 25269 - DNA, 693 bp, Zea mays
  unsure (1)..(693): unsure at all n locations
  Clone ID: MRT4577_12304C.1
cctcgaggccggcctggccggggttgctcgataggtggccgcgatccacgattgccgctagtgctcctgctcctcctcataccttcccgggcgccgagatagtttgttataatgattcttcatctgggaagcctgtgataggagacatcttcatgtacgatgatgtacactgatgtcctcaagggtgatatgtcatgaaagggctgcacccaagcgcctggaaaagtgctacttcgagagtgnaacgatctcgaacacacttcgacataggacctacaaggatcaatagaggagaacatgtcaaaggcgaatgtctattgctgaagacgttctctccatacaggattccacacgtcctttaacaagacctcatactggtaggacgaagccacatacctcggacaatgtcactgctgcagaagacgaagaaaatcccaataacgtcaaaaaagcggctcctgctgctcccaaggttctccatatcaccctaaacgaacttgacttctgagctgcacactataatacactcgcttgtgatgctgtattcctgtaacacctagatcttaaatctagaaatacatgcctatagatctcgcatggcatcaaggacttgacgggctagcaagtgactataattatatagccatgaacgatgacaccgagggagtatgattatcgctcagaaaaacaaca

SEQ ID NO: 25270 - DNA, 280 bp, Zea mays
  unsure (1)..(280): unsure at all n locations
  Clone ID: MRT4577_123050C.1
accaccactgggnacagagacataagttttatctactccagagcgcagaagaacccgancgacaccatgagggtgttgctcgttgccctcactctcctggctctcgctgggagcgccacctccacgcatacaagcggaaggatgaggttgacagccaccgacgacgagaaatataccgacgacggagcatatgccaccttcggggggggggccacctgcggagcatgtaccaccggcggaacacctgacgacaccggaacacctgccaccatcaaaccat

SEQ ID NO: 25271 - DNA, 596 bp, Zea mays
  Clone ID: MRT4577_123051C.1
attgggtacctcgaggccggccggagcgaactccatactagtcaccgtcggcgtctgtcaactctctcttgctgtcgcaggcgccatgcgggtgcacgagtatgggtgggaactatggacgaggaagcagacctacatgatgcggtttgtgcagagagggtgctgctggaagaactgggaatagccggacatcgtccacctcaccaggaccacccgccccacacgaggaccgtcccactcaccgtaccagggccagctggcatatggtgactaccacgtctgcgtgaacggtgaagctaccgaaaaaggatgtgcccaacgtcattgactatggaaagatcaaccaccacccgatcacccaggtcaagcacctcatgaacaagagggattgctatgaggaaagaggtgaacctatcctcgccgaactgagggactcttaactcctactgtttgaatgacgataacacctacaatgactttgagatcatccttgtggacgatgaccacacactcatctaaaacgacccgaggatgcaactgtctatgcaaccctgtgcacaaacactgtgagctccgtagcttctactgagcacgca

SEQ ID NO: 25272 - DNA, 842 bp, Zea mays
  Clone ID: MRT4577_123052C.1
gttgggcattgggtacctcgaggccggccgggacggacatcactcccagactgcttccacctacgttcattatttccgcaatgtacaaccgagtatgatatgcagtcgtagtatcatggataaccaccttatgtcgtccttcgccatcctactgctttcttcttttgctgcaatggttgcatatcctgctcgcagtgaattacagcctaaccagatgaaaaaccaccattctgtatcatcatacagcccacaaccgaaggattttccaactgagcaactctacagcgcctacctagtaatccagcgattcaagagcaccatcactagcgaccccaagaacgtcaccgccacctggattggtcatgatatctgcggagaaacgacctacgtggggttctactgcggatcgccggccggaggagataagaagttgacagtcacgggggttattttgaatggctatagtctacatgcaccaacgttggaaggtttcgtcaatcagctccctgatctagctcttttccatgctgcttccaacaattttggtggcgatataccccagctaaccgcccttgggtacatgtacgagctcagtgtcgccgctaaagatgtgccattacagactagggatgcggatgattttgtgggggggaggggcatcggtcgcgtgcaattaggtagatgcgtaactgctgattttgacttttcatttaatgtcggaattaataagggtcacaaatttcctggttttacgcatgccaaggctctccttctcaaccgcaacaatttgtccggtccacttccgtcaaaactcggtttctcaaaactgagctaccttgccc

SEQ ID NO: 25273 - DNA, 577 bp, Zea mays
  Clone ID: MRT4577_123053C.1
ctcgaagccggccggggacggaattctctaccgagaaccgcgggcaacattcacaccgcgcttctcttctccagcgatgcaaactacggggctcgcgcggatgcggtatgggcgtctggcccatcgagcgacacctcgtcatccgacctcgccgtccaccttcaaggagggggatgagacaacggacatgagggtttgtatcgcgcccagcattgatgcctcctcctcgcccctgggctgtcgacggatgacaacacgtgtataaagatagttgccagatctcgaaacctgttatctagctatccatggtactgactgaaatgggacatgagtgcatgacgatagcaatcttatgtcagaaccgcctagtcgcacggtggatggatgccatacgggaagaacgctgctggaaatggatgtgcccgcttgactcatgatgatgatgcaactgaacagctcctgatgagatgatatccaagatgtgagtgagccattgctgatagacacatgtgctgagatgaactagagaacattgaacaggcacttgacgagatgagtgcatacctatggtgacaca

SEQ ID NO: 25274 - DNA, 730 bp, Zea mays
  Clone ID: MRT4577_123054C.1
taaagacatcactcccacactgcttccacctacgtccataatttccgcaaagtacaaccgagaatgacatgcagtcgtagtatcatggataaccaccttatgtcgtccttcaccatcctactgctttcttcttttgctgcaacggtagcatatcctgctcgcactgaattattgccataccagatgaaaaacccacaaccgaaggatttcccaactgagcaactctaccgcgcctactttgtaatccagcgcttcaagagcaccatcactagcgacccgaagaacgtcaccgccacctggattggtcacgatctctgcggagaaacgacctacgtggggttctactgcggatcgccggcaggaggagataagttgacagtcacaggggtcattttgaatggctatagtctacatgcaccaacgttggaaggtttcgtcgatcagctccctgatctagctcttttccatgctgcttccaacaattttgatggcaacataccccaactaaccggcctagggtacatgtacgagctcagtgtcgccgcaaaagatttgccgccattacagactagcgatatcgatggtatagtgggggggtgaggagcgccgctcacggaaaattttttcactgcataagtgctgattttgacttctcatttaatgtcggaacagataagggtcacaaaattttctgggtttacgcatgccaagggctctccttctcaaccac

SEQ ID NO: 25275 - DNA, 183 bp, Zea mays
  Clone ID: MRT4577_123055C.1
gtcgagacacatatcacatcattatttacgttccaaatatccgtcccaacaccggggagagtgttaatttcatacatcaatatttttacaaatacctctcaattcacacacatacacatctcttaattcaaccaaaacatcatcctttcatacacttacttttttttttttataaccaccaaa

SEQ ID NO: 25276 - DNA, 1823 bp, Zea mays
  Clone ID: MRT4577_123056C.1
cggacgcgtgggcggacgcgtgggcgacttacagggttcccagactactgcttccacctatgtccattatttccgccaagtcgagaacgacatgcagtcgtagtatcatggataaccaccttatgtcgtccttcaccatcctactgctttcttcttttgctgcaacggttgcatatcctgctcgcaatgaattacagcctaaccagatgaaaaaccaccattcttctgtatcatcatacaacccacaaccgaaggatttcccaactgaacaactctaccgcgcctaccttataatccagcgcttcaagaacaccatcattagcgaccccaagaacgtcactgccacctggattggtcatgatctctgcggagaaacgacctatgtggggttctactgcggatcgccggcaggaggagataagaagttgacagtcacaggtgtcattttgaatgggtataatctacatgcaccaacgttggaaggtttcgtcaatcagctccctgatctagctcttttccatgctgcttccaacaattttggtggcgatatacccccaactaaccggccctagggtacatgtacgagctcagggtcgccgttaaagatctgcaattacaggctcggccaaaaagggatatccctccggatgattcagtgggtttgggcggcaacactcacggtcacgggcatcttggtaactgtataattgcagattttaacttctcatttaacgtcggaatcggtaagggtcacaaatttccaggttttacggatgccaaggctctccttctcaaccacaacaatttgtccggtccacttccgtcaaacctcggtttctcaaaactgagctaccttgccctcgccaacaacaaactcaccgggccaatcccaccgtcaatcagtaatctggaagactctctcttcgaggtactccttctcaacaaccagctctccggctgcctcccccacgagctcggcatgctcaccaaggcggccgtgattgacgccggcatgaaccagctcaccggcccaatcccgtcatctttctcgtgcctaatcagcgtcgagcagctcaacctggccggaaaccgcctctacggtcaggtacccgacgcgctctgcaagcttgctgggcccgctggccgcctcgccaacctcacgctgtccggcaactacttcacatccgccgggccggcatgcgcggcgctgatcaaagacggagtgctggacgtgaagaacaactgcattccggggctcaccaaccagaggcgcccggccgagtgcgcggcgttccagagccaaccaaagacttgcccggcagcgagcactcaggtgacatgccccgccgccgcagcttccaggaacgcggcggcgccaggggagaggaaggtcaaggattactccagctacgtgacgtacgctactctgcatgactgagccacactggcatgcagtaggagacagagtgccttgctggctatgtgtctcttgtattcagcatgagtgtaccctagcgtgtgttgttgtgattgtgattgctgtctatttgcattattgtacgtgtgttgctgtcacatctagatcatcccattatttgtacgtccaaatccattttatggaaagtattgttggtgttttattgaaaaaaaaaaaaaaaaaaaaaaaaacaagcaacaaaaaaaaaaaaaaaaaaaccaaaaaaaaaaaaaaaaagcggcctgttaatgtcacatctagatcatcccattatttgtacgtccaaatccattttatggaaagtactgttggtgttttattgaagttcaaaaaaaaaaaaaaaaaa

SEQ ID NO: 25277 - DNA, 263 bp, Zea mays
  unsure (1)..(263): unsure at all n locations
  Clone ID: MRT4577_123057C.1
gggggtgggtttttttacacttgaggattacatttaaaaaaggcagtntttttttatttacagtctgtttttgttctactttcttctgaacaactgcgtaaccctggggaaaatgctggtgcgcaaacttgactgtctcatctgccaatctcttggggggggtgcactgaccacatgcttgctgtggatgactggaccggaatgggttggtgctgatgaggtcccttttcgtgcttttggttggtcatggggtggtgtgcgcg

SEQ ID NO: 25278 - DNA, 483 bp, Zea mays
  Clone ID: MRT4577_123058C.1
ggaccggaaatgccccattcatatccaggttacaggcttacaaaaaacaaccggggggggggggcatacaagggcttattgggaaactaaaatgagaccgaatagtttttttcaattctggtcacaccttaaaaggcacattgttctggaaaccaggggaagctcaacggggaaaaccccctgtaatccacttgggtataaaactgggtgggccccattggttttccaacctttcaaacttttccaaaaatttcaatatctggtctgaacttggttcgaacacctgtccccccgatattattttatccaaaaaggggggcaacttgttgaaattaaaaaccaagtcaagctcgcatacatttttgaaacatttgtccaaagtttaaacaaacacttttaccaaggcgaacatgggaccccgctctggtaaacctgttaccaaggggtgctgccaagggcgaaaaaaaacaccgggatactttg

SEQ ID NO: 25279 - DNA, 998 bp, Zea mays
  Clone ID: MRT4577_123059C.1
atctagacaaaaaggccgaaagcaaacataatgcgatacaagatttggcagtggaatgttctgttccaaagggaagttgcttaggctcacagtcaatagagggaatgcagaggtcaaagccaaagatttctgcagaagaggtgatagaagcaatcttcactgtacctgaacgattggaggaggagccaaaattaaaacgatatggattgggcgcaaaccgaaacagagtcccacatcagaaaccagtcctgaaacctcttgaggacgttccaacatattctactgagtttcccatcaacattatcataggtagcaaagcaccgtctatgaatgaggacgaataccagaactaccgcagggctgcaaagcagcactggtttatgatgaagcagtactatgagaaggctgctgatgctttcagggagggtaaccagaaagaagtcgattatcttatacaggaaggcaagcgctattatcagatggctcgactcgctgatgagaaatctgctagggagattatcaagcccagggaaacagagtcaaaaaatgaattttgtcttgatctgcgcaaacaagatgcaggaaatgtatctaatctcttgagactccatcttaaacagttggcaaacattccatcttttgattacctgagagttattattggtattgacgacagcagtttcaagatgggacaaagaagaagaaaggtgatgaagtatgtggaaaagaattcactccagtggactgaagaagacctcgctctgggaacatcctcatccggattaatcaggtggaaaatcggcagggataggttcatgtatacaaaggtggcgtgacacaaggtgacagaagatggatcgtagatcttaataagtgccgttttgaatcaaggtgatgttctttcggcacagggagcaattaactcgaaacgtctgcaatgtatgcaccaaaagaataccattcatggcaacttgaacatgtggacaatggtttctgag

SEQ ID NO: 25280 - DNA, 421 bp, Zea mays
  Clone ID: MRT4577_12305C.1
gggggaaaaaaaagggggggggttgggggggcccaaaaaacaaaggggtgggtgggtttttcccaaaacacatgggtggggggggatggaaaaaaattgggaaaaaatttgacttggtggggattaaaacccatccaatcccgctaaaaccaaaggggtggggggctaacccaaaaagccctaaaaggggggaaaaaaaaaaaaaatataggggtttaggcccttagctttaaaccaaaaataaaaatcatgggtaagggggccgggataaaccggacaaaaaaaccttttggttccccccgggaaaacccgtggaaaaaaaaaagcccttaaaaaccaccagccttaaagggcccactgggtccttaaactaggtaaaagccctagcacaaaaacccccccccccttgggaccaaggggg

SEQ ID NO: 25281 - DNA, 207 bp, Zea mays
  Clone ID: MRT4577_123060C.1
gaggattctcgcctcgccgagatcgagagggagtaggctcttgcgcgcgggggcgcaccaaccgagctcctcgacgtgctgtgggaggcccggcgcagctccgtgcgcctccgcgcgctgcagcaacgcaaggaggccgcgcacgtactcgagctcgagaggcggttcaggctcttcgacaaccttatacagcggtcagttccgtct

SEQ ID NO: 25282 - DNA, 767 bp, Zea mays
  unsure (1)..(767): unsure at all n locations
  Clone ID: MRT4577_123061C.1
gcaggctgctgatgctttcaggggggtaaccagnaagnaagtcgattatcttatacaggaaggcaagcgctattatcagatggctcgactcgctgatgagaaatctgctagggagattatcaagcccagggnaaacagagtcaaaaaatgaattttgtcttgatctgcgcaaacaagatgcaggaaatgtatctaatctcttgagactccatcttaaacagttggcaaacattccatcttttgattacctgagagttattattggtattgacgacagcagtttcaagatgggacaaagaagaagaaaggtgatgaagtatgtggaaaagaattcactccagtggactgaagaagaacctcgctctgggaacatcctcatccggattaatcaggtggaaaatcggcagggataggttcatgtatacaaaggtggcgtgacacaaggtgacagaagatggatcgtagatcttaataagtgccgttttgaatcaaggtgatgttctttcggcacagggagtcatgtaattgctgcattgctgacgtaatgtaaccagcaatgcagcaattaactcgaaacgtctgcaatgtatgcacaaaaagaataccattcatggcaacttgaacatgtggacaatggtttctgatatctcaagggtcctttgcagtttcgaaaccggtttcttctttctaggttcaccattcagaacctggttttcaaaaaaaaaaaaacgaaaaaaaaacgctctgagcgccctagcgtacgcacg

SEQ ID NO: 25283 - DNA, 290 bp, Zea mays
  Clone ID: MRT4577_123062C.1
gctcgcgccctcctgctcctcgtgcgctcttctctggttcttcctggtgtttgccggagcgaggctaggcgcaagggtagggatcttcgcgcagccagagctcgtcggcgctacgcgagcgcgcggcctggggtgctgcattggcgaactatcaggggaaaacactgaggtaatggagatcagcttattgcatgatggatctgatgcgggaagcaccagtttgctaccgctgccattgttgtcatgtggtccaagatcaattgttccgatacaagtaccaccatcatcgg

SEQ ID NO: 25284 - DNA, 440 bp, Zea mays
  Clone ID: MRT4577_123063C.1
gggccaaaaaaatatatatcaccttattatttggctaccccccccggttcatttttcccccagggtaaaaattaaagcccgggagcccaggagcctccctccaatcttaacccacatccccccaaccttaacccaataaataacccctgcttaacaccccccaaaccaacatgggtggaaggggccccctccttcaaccccaaaatggttcattaatacctgggaaccaaaataaaccagaccagggcctaaagtttcaattctcttaaaatagcataaaaaacagtcccggaatcccaaaaagggagtgcccttaatctgctccggattgaccccccccggatgaaaggataattccaacaatgaaaccctacaaagcaagcccttttgccaaaagaggatgaggatcatccccacaaaaagcctcgggtggggggcat

SEQ ID NO: 25285 - DNA, 392 bp, Zea mays
  Clone ID: MRT4577_123064C.1
ggggcagctgtgagtggcaccgatggtggtggaccttacttctggtgtgtcctgttcagtgacgggaagcctactaccagcttcaaggtggatggcgaagtgcccaaggcggccatccatccagggtgcttcactggcaacaatgacgactgcatgggcgcgacgaacggcgccttttcgaccggtgctgaccgcagaccgtcttggctcgcccttactttctttgggcatatcccggctctcgtcgacggagaccaggtcctctactagtcccgcgccttcaaccggtacatcgcgaccatgtacgcgtcgtcgggcgcggcgctgctcccggcgactgcgtctgcgatgctcgtggtgtggctcggggtggagtctttccacttctaccc

SEQ ID NO: 25286 - DNA, 638 bp, Zea mays
  unsure (1)..(638): unsure at all n locations
  Clone ID: MRT4577_123065C.1
tacttcctcgccttctgagagganatgattgtcaacaagnagattgtggtggaaacaagcgaatgagaaaaaattgagtccatcacagcgaagggtcttcacagggctgctgggattcatgtgtgtcgaatgccccttgtgcagaagctttgcggagggcgggggtngtcagtgtggccccgtagaacactttcgaaacaacctaatatcatttgtgcaaaaccagcatattnnnttgtggagaaggcgtagggnnttgtgtatttggtgatacctttgacaggacnnttaccnnnactaaccgtgatnngagaaatatgagtgatnnaaatcnnnctgcggttgagtcacttgacgctttcanngtaagttattcctaatttcaaagnngagaagtctcaaggtgttggacccctcaatatgcgnnagacaaagttatctnnattcatcnnnccaaattttgagtcccaaagtttntccttttcatttgggtccacaaagacccacgagtgctttgctgacttanatnngctggtgcttctcacctnntgaaaactgagtctcaaagggagaacatctaacagaaaaaactgttagtcaaggnannnaacttcgattgtgtttgtctcgtgccaaaa

SEQ ID NO: 25287 - DNA, 255 bp, Zea mays
  Clone ID: MRT4577_123066C.1
gcagattatcagaatcatcttcgatcttatctacatggctgctgctaccatggctatcacctcccgttctctcgtctgcatgccggcggtttgcactagggacgtcatcgtcgaggtccgctatcactattctcaagaccgtcgtcaattccaattctgctgcgtccggcatctcattgtattgttccgaccgcttcctgtaccttttctcgctttttggctcgccctcttgctatttgatctgctatttccccg

SEQ ID NO: 25288 - DNA, 321 bp, Zea mays
  unsure (1)..(321): unsure at all n locations
  Clone ID: MRT4577_123067C.1
aacaccacgcatcccatccaatcacanatcatctttatcttcaatacatacacattatcgcggggcttttcatcataaagatggtcatcctactcatcaagtccctggctctctcaactaccagctcctcttctatacaaattcccttcccctgcacgaatctgcatatcttttacagctctcactccaaccttacaactatgataatccccatccctctttacccctactacaaatacctaatccattctcatttcatcccactttctgatgctccctactactccccttattttcacactaacgccatttaccactctc

SEQ ID NO: 25289 - DNA, 1208 bp, Zea mays
  Clone ID: MRT4577_123068C.1
tcggcgggccgcgccagttgccgctgaagctgtttccagcgggggtggcgtcctcctacctaggggtccggtgggcgccggggtagcggccaacggatggagtggtagcggcccagggctccgcttggctcgaaggctctgcacctacgacgagagagatgacagggcactagaggaagaagttgagaagaaatttggatggatattgaagataatcttcctaggaactgctggcctagttggttaccaattctttccatacatgggtgataacctgcttcaacaatctatctcgcttttgcgtgtcaaggatcccttgttcaagcggatgggagcttctcgtttagctcgttttgcagtggatgaccaaagaagaatgaaggtggtagagatagggggagctcaggaactgcttaatgtattggaaggtgctaaagatgataaaacacgaaaagaaactctaaaagctcttgctgcgctttcaaaatctgaagaagctgcaggatttttggacaaggtcggcgcctacgctatagtcagttccactcccgactctcaagaatatgctgagatccaaacttacaagaccagtcttctgacggcatttgatcaactgaagtcatgatgtccaaatgccaatgggtatattaagcaacattttaactctgcactttgccgtggcggttaatgttctagtttcttgaatcgacgcaatttatctctagaacatgctggacctcctttgttgaccaagtgggttgctgatggaaatgcatgtctggttcatttgtttcaaacaggacagtacattctttccttctgtgggccaataacaagagctttaatttatttattttcttggtataaagtgggttgcaatccaaacagattgcatttggacagttgcaactgtacactcatttaggaaggataggcctagcggcaattgtgagaagccttttcactgagtcaaatgacctaggttcgacagtctctatgcaaaaatgtaggaataaaatttgcctcggttttttagaccgcaatcgacatgtccttgtatgtaccctcagttgtgtctgtacgtaccctcacatttggtgcatttgactttctgcaaacagtgatgcaaagcatgcaatatcatgaacaaaaccattttccagtgaaaaaaaaaaaaaaaaaaaaagggcggccgccggacgcgtggg

SEQ ID NO: 25290 - DNA, 255 bp, Zea mays
  unsure (1)..(255): unsure at all n locations
  Clone ID: MRT4577_123069C.1
gttggcttctcctccccctccggttcgggtccgggttcgtgaggttctgctgtgtgcggtgcncccggacgccagatcgagatggcggcgtcggatgttaagtaccgctgcttcgtcaacagcctcgcctagaccactgactaccactccctccacaacgccttcagcacctacaccgaggtcctcaagtccaaagtccgttcccatcccagatccggccatggctccgtccacatctgacccgtcctgacacac

SEQ ID NO: 25291 - DNA, 491 bp, Zea mays
  Clone ID: MRT4577_12306C.1
aattcggcacgaggcaggttggagctccagcagcttcattacaagctcaagcacctggaatcaatcaaggtttggtcagtggaggcagcatgggaggatctgtcggttggcaaggttggcaaggcggtaatgctgcctcagtgggaggcattccacaagctataccaggagctgctccttcacaggcagcacaaggtggatttggcccaggtttacctagaacaataggtgtggcgctggtacaacaggtacaagcaatgtctccatcgacattgcctacgcagagcaacagtgccggtttgcctcaggattcaaaagctttggtaatgtctggaaatggccctgccatcaactctggatcaagcacagacatcttctctgcacttacacagcagaagccaagcatatctgcacctgcacctgagacaagctcgattccgagctaatacagttgtatgcccacgccaactggctatcaagaccctgactaa

SEQ ID NO: 25292 - DNA, 228 bp, Zea mays
  unsure (1)..(228): unsure at all n locations
  Clone ID: MRT4577_123070C.1
cctccaacgaagaaaagcaaagccaaagcaatctcaagtgaatcaaaccgcagacttcgcagtcctcctcccactaacagagcatgcgcgttagcgcgacccgagccgncgccgncgctcaacctacgagcgctttctgctactctgttactctcggttgcgcgtcctcgcgatcgtgagagcagcatggccggcacgtctcggcgcgtgatgagaaccagcgcggca

SEQ ID NO: 25293 - DNA, 470 bp, Zea mays
  Clone ID: MRT4577_123071C.1
gagaaagtgaaggcacttttgaatacggtaactactataaagaagtggacgatttacgtgatgtgatcctacatttcaaaaaacacaaacgtgacacccatgctattgctggccacagtaagggtgggaatgtggttatcctctatgcatccatatatcatgatatatctaaagttgttaacctgtctggaaggtttaagctggaacgtggtattgaagatcgttttggaaatgattacatggaaaagattgatcagcatggtttcattgatgtggaagacaaaacaggacgtatcatctaccgtgtgaccaaacaaagtctgatggaccgtcttaagacagatatgcactctgcatgcttgtctattgacccaaactgcagggtgtgactgtacatggtgctaatgacgatgttgtgccatcagaggatgctctagaatttaataagtacataagcaaccatgaattgc

SEQ ID NO: 25294 - DNA, 417 bp, Zea mays
  Clone ID: MRT4577_123072C.1
cgggaagccttcggagaaaagaaaagggcaaccgagaccgtgagagaggggaagcggggagccttgtccgatccggtgcagcccgcgcgtcaaactcccggataactgtggcatatgatcccaaatcttgatccacttgaagtgttcagtacattctgtaggttagtaccaaccttttgtgtaaatgtcaaatgaacatattaattatgtgcttcaggtctctgtttttttcttgatctgtcatttccttttttttgttatataggatgtgctcagttaggccattttttacagtaaacctactttatcatttttttccatgccattgggaagctaatgtgaactttcacggaatgacatttccttgggtacaagcactatatttaccttgtataggatagtcttatttaatgttgc

SEQ ID NO: 25295 - DNA, 540 bp, Zea mays
  Clone ID: MRT4577_123073C.1
aaccccgacgcgagcgagcgccagagatgcaccgatggaacggggcgccgctcgcagcggtcctcggtggcgaggcggctgacgccggacacctccctggcgtggcgcccaatgacagacagaagaaaagatccactgattggcgaaggggaaaaagcgggcatccacaaagacgcgacaaggctactggtaggacggtgtagcctgtagaagacaacatgaaagaggacagtgcagagaaggtgggacaagcgctgcgtggggagcggatcgagaactgtccgtaggtgctggagacgggggagcccaagatgcgccagatgatttgcaaaacaaaaattgatgataaacaaacaaaggagctcaaggaaaagatagaggatgagcatcgggtgaacatgattgttgacaacctcccactagttgaatgtattgcaaggcaggataggggtgctactgtttaccaggctggatatcatgtgggaggtaagggccaaaatgctgggaacaaggacgagaaaacgcttatacacaaacact

SEQ ID NO: 25296 - DNA, 542 bp, Zea mays
  Clone ID: MRT4577_123074C.1
ctcaggggatgtcgggagcgactattcctgacactttcctttttgagccgtcgccccctacagcggggccgggggggttctatcggtggaaatggaagttggtgcttcttcgttgccgccccacgctcccttgccttcgggcattgtggtgacaagtgaccaatctgggcagcatctaccatacgagattagattccctacggtctgcgccttttcgcgcggtctgtggctcgagcggaagtgctactggtcacctagtgggaggtggatcaactatgtgctcaggccatctgttctgaggagagggagcacaagttcgatgttctcaactccgaggctgacatggccttcctgatgaggctgcgcgcttgtgcaaagagcgcgacaacgtgtggggcgatgcaaagcgtcttctagaagcgaggtcccagctttagaaggaccttcacgaggctaatcttctaattgaggagggtgggtccatcctcagggaggtctttgctcatctggagatggcagatgtaaagcttctgaaagagcgc

SEQ ID NO: 25297 - DNA, 158 bp, Zea mays
  Clone ID: MRT4577_123075C.1
tgaatccttaacgaacacatcttggacgaagatatttaagcttaagtgggcgctccttgcctttggtttgagcataacatattcttttttcaccgaggaaaagataaaacttctggatatatagaccctgttcactcgaattcactaattcagtttcc

SEQ ID NO: 25298 - DNA, 404 bp, Zea mays
  Clone ID: MRT4577_123076C.1
ctctaatttactcgctaacaattgatgtcgtaatacatgtgtcggcgagcacaaaatgttcaaaggccatgttccttcactagactagtccaataattcattatatcccaatcatcacttgctgacaaagtagctcacagaccttgctttcgctattacatagttatttatattctggtctactcttttcacaacaccgcttattgtaacgtctgtactttttatggcctctattataacatattcactaaagaacattctataattatatattgaaacattatttatagtcactcgtatatcttctaatgcaacacacgatgtcgtcactcaaatggactcttaaagttattgttgatggagaacagtatctaccctatatcaattagattacactgttttga

SEQ ID NO: 25299 - DNA, 350 bp, Zea mays
  Clone ID: MRT4577_123077C.1
agcaaccagaccatttggtttggccactttacaacatcaacgatcctgtctccatccccagggatccggaccgtaatgggttcggctacagcttatctgtgtgggcacctccatacgctcggtgggatgatgctcgttctgcacactcgccactttacaggcacgctggaacttgaagtgggagactggaaagacaacacaaggtaccggatctctgcctttgatcacgacctctttagctttgcagatgtaacctttgacaagtggccgtagagtcttatcaccaatcctaagtcactcctctatagttgtgctaagcatgcaacactaaaggctcttctattcgacac

SEQ ID NO: 25300 - DNA, 339 bp, Zea mays
  Clone ID: MRT4577_123078C.1
atcactcttccggtttattggtggggtatcgaggaacatgattgttgctaatgtcttcgcatcgttcatgttgctagttgtcatggtattgggaggatttattctagtaagagataaagtgaagaaatggctggatctggggctactggatctccccaatgatgtatgcacaaaatgctatttcagtgaatgagatgttgggccacagctgggacaaaatattgaatagcactgcatccaacgaggccctaggtgtgcaagtccttaagtcgcgtggagtattcaccgaagcaaagtggtactggattggctttggtgctatggttggtttcaccatac

SEQ ID NO: 25301 - DNA, 781 bp, Zea mays
  Clone ID: MRT4577_123079C.1
cggccgggaaagcacttcttgtgcgagagatgaagacctgcttcttaattctctgcgatgtctctagatactccactacgccccaatagttctggttcctcctttcgtcgagaagcgattctggagcaatggatgaagatgagggtccggtgatgggcatcgacctcgacaccatctactcgtgcgtcggggtgtggcacaacgaccgcgtggacatcatccacaacgagcagggcaactgcaacacgacgtgctatgacgcgttcatcgacatcgagctcatcatccgcgacgatgccaagaacctcgccgtcatgatgcccaacatcaccgtcttccttgttttttttgttgatcggcaggcggatctctgtcccggcggagcacagggacgtgaacttatgcccgttccacgtcatcccagggcctgtcgatgaacccatgattgtaatcaactacaaagaccaggagaagcagattgctgctgaggagatctctcgtccatggtcctcatcaagatgaaggagattgctgaagactaccttggctccgccatcgagaacgcagtggtgacagtgcctgcctatttcaacgactctcagaggcaggccaccaaggacgacggtgtcattgctggactcaatgtgatgcgtatcatcaacgagcccactgctgctgctattgcctacggtctttgaaagaaggccaccagctccggcgagtaaaacatgctcatcttcgaccttggtggtggcacgtctgatgtgtcgctccccccatc

SEQ ID NO: 25302 - DNA, 670 bp, Zea mays
  Clone ID: MRT4577_12307C.1
cgcatggttcctcttccgctgctgccgtcctgcgatcgaccgggttggcgggcggtccggcgcgtgcctgcagtttatctcggcgcgtacgacgacgaggacgcggaggagcgcgcgcacgacctggcggagctcaagtactggggccccgccggcaccgtcctcaacttcccgctgagcggctacgacgaggagcggagggagatggaggggcagccccgggaggagtacgtcgcgtcgctgcggcggcggatcagcggcttcgcgcgaggggtgtccaagtacaggggcgttgccaggcatcatcacaacgggagatgggaggcgaggatcgggcgcgtgttaggcaacaagtacctctatctcggcacttacgcaacacaagaggaggcggcagtggcgtatgacatggcggctatagaacaccgcggcttcaacgcggtcaccaacttcgacatcagccattacatcaaccactggcatcgacattgccatggcccctgcgacggcagcctcggcgcgatggacgtcgcaccgaacgtctcgctcgaactagacctactcgagtgcccagtcaccgtccggctcagcctcgaggagaccacgggcgacgatgaattccacaaccgcgaggactacctggggcaccttttcggcgtgcagcagcttc

SEQ ID NO: 25303 - DNA, 210 bp, Zea mays
  Clone ID: MRT4577_123080C.1
ctggcatgtgactgactactaggtcctgagcgccagcaacgccaagcggatctacttcctccgcgtcgaacggggatgatgtgaaacagaccaagtgcgggttctctatcccaggtcaacgagatgcctatggctcgtgacacatcacaagtgatatgatggtttatgggcaaaacctctgtatgcagaagcagatcaagctccgagcta

SEQ ID NO: 25304 - DNA, 404 bp, Zea mays
  Clone ID: MRT4577_123081C.1
ggtgtagatgttggggcacgcgtacctcgaccagcaccttttttgttttcatccaaggacagcatctcaccggggccgggatcgtcggtcacgacgggagcgctcgctcgcacctcgagagctttccccattaaagcctgaggaggtcgctggaatcataaaggactttgatgaacctgatactcttgcaccaactggtcttttcgttggaggtacaaagtacatggtgacccacagtgaacctgaagttaccatgcgccgaaagaaggccactggaggcattactatcaaaaaaaccggcatgtccctgattattggggtctactacaagccaatgactgcatggcaatgcaacatggcggcggagaggctccgccattacctgatcgagcagggcttctaaa

SEQ ID NO: 25305 - DNA, 735 bp, Zea mays
  unsure (1)..(735): unsure at all n locations
  Clone ID: MRT4577_123082C.1
ggtgggcagagtgacacgtttgcacngcctctccgccccgctccgctccagattgcgcgcacccacccatggcgctcgccgcttcccaccacggcttcctgcccttcgcccccgctgccacgcctaccccgtcacgggggcacctgcgcttccgcgccgcgcgccctctgccccgccccgcccggagaatttgttgccaatctatcaactcagctaatgtgttgggagcttcttcaacgacatctgatgaggcagtcccagtcccagttgtccagatagatcaggactcagaccgtgatgcgaccattgtgcagctaagttttggagatcgtttgggggcgctacttgacacgatgaaagcactcaaggaccttggccttgatgtcacaaaaggaagtgtgacaactgactcagctgtcacacaaacaaagttccacatcatgcgatttgggcgcaaggttgaggaccctgacatgttagaaaggattcggctaaccatcatcaacaaccttctccagtaccatcctgaatcaagtgagaagttagccatgggtgaattttttgggataaaacctcctgagaagaagatgctgttctgtatcgtgttatctcggtttggccatctttttaactatgatctgtagatgttgatattgcaacacatatagttgttgaagatgacggaccaaaaaagagcatactttacatagagaccgccgaccggcctggcctact

SEQ ID NO: 25306 - DNA, 935 bp, Zea mays
  Clone ID: MRT4577_123083C.1
ccggccgggcccgctttccgttccgtccccggccggcgccaacgccaacactccagtaagccgaagcgaggaggtggagacggtcacggtgggcagagtggcacgactctcgattccgccccgctccagattgctgtgctcgcccactcactcacccatggcgctcgccgcctcccaccaccgcctcctgcccgtcgcccccgcccccgccgccacccgtaccccgtcgcgggggcacctgcgcttccgcgcctcgcgacctctgccccgaccccgctcccggagaatttgttgtcaatctatcaactcaactaatgttttgggagcttcttcgaagacatctgatgaggcaatcccagtcccagttgtccagatagatcaagactcagaccgtgatgcaaccattgtgcagctaagttttggagatcgtttgggggcattacttgacacgatgaaagctctcaaggaccttggccttgatgtctcaaaaggaagtgtggcaactgactcagctgtcacacaaacaaagttccacatcatgcgattcgggcgcaaggttgaggatcctgacatgttagaaaggatacggctaaccatcatcaacaacctgctccagtatcatcctgaatcaagtgagaagttggcaatgggtgaattttttgggataaaacctcctgtgaagaaggttgatatcgatattgcaacacatatagttgttgaagacgacgggccaaaaagaagcatgctttacatagagacagccgatcggcctggcctacttcttgagataatcaagatcatcgcggacacaaatattgatgtggagtcagctgagattgatactgaaagtttggttgcgaaggacaagttccatgtgagttacagaggtgcaaaactaaacagctcctcatctcaggtgttgatcaattgtctgc

SEQ ID NO: 25307 - DNA, 486 bp, Zea mays
  Clone ID: MRT4577_123084C.1
cccccgtgcgggccccggcccggaataattccgtgtcgcgcgctatgtgtcggggggcgccctttttttttttttttcaaaaccattccagtttaaacacatatttgccggaccaacaactgcatgttttttaacatgtattcacgcccttgccagaagcggcacaacacccggccggctaagggacaagcataactggccggaatggcccaagcctgtctaatgaacccacaagcctatcctgtgggcccgcctgggactggaataacggttctgtgacttaaatatggcagactgaaattacagaagtgggtgcacacgaccgtggaacccgagctacataaaaacatggggagcttgttgatcttgcactgcagggactccttgaacctgttgaccttgtacttgggggggttcttgtccggaccaggttggggttgagccccacgacgagcttctccagtaggtccacgaacatcggccatg

SEQ ID NO: 25308 - DNA, 2250 bp, Zea mays
  Clone ID: MRT4577_123085C.1
ataggctcggtcagcccaccccagacctttccccttccgtccccggccggcgccaacgccactccagtgagccgagggcggagacggtcacggtgggcagagtgacacgccgcacgcctctccgccccgctccgctccagattgcgcgcacccacccatggcgctcgccgcttcccaccacggcttcctgcccttcgcccccgctgccacgcctaccccgtcacgggggcacctgcgcttccgcgccgcgcgccttctgccccgccccgcccggagaatttgttgccaatctatcaactcagctaatgtgttgggagcttcttcaacgacatctgatgaggcagtcccagtcccagttgtccagatagatcaggactcagaccgtgatgcgaccattgtgcagctaagttttggagatcgtttgggggcgctacttgacacgtgggcgcaaggttgaggaccctgacatgttagaaaggattcggctaaccatcatcaacaaccttctccagtaccatcctgaatcaagtgagaagttagccatgggtgaattttttgggataaaacctcctgagaagaaggcaagtgcaatactgtaaggtgccgtttggttcacatattggtaacgtaatgggtaaccaataagtcaataatgttacatcatgtttgtttaagtccaaccgtaatcatatatcacactaaaaatggataccgtccattcaaacttgttaccgctggtactcgaatgtgaatcattattattactatttatgttacatttcgtgaaccaaacaacacttaaagtgtaatgcattcccattctgtaatttcagatgctgttctgtatcgtgttatctcggtttggccatctttttaactatgatctgtgagttatcactattttaggaaatggaaatttataaacagttaggctacaaatttactttgttatgctattggtttgtgcttcgacctttgatacattattaagcctgaatttgcattctttgatttatgaactggtaggtagatgttgatattgcaacacatatagttgttgaagatgacggaccaaaaagaagcatactttacatagagaccgccgaccggcctggcctacttcttgagataatcaagatcatcgcggacacaaatattgatgtggaatcagctgagattgatactgaaggtttggttgcgaaggacaagtttcatgtaagttacagaggtggaaaactaaacagctccttatctcaggcgctgaccaattgcctgcgttattacctccgaaggcctgagacagatgaagacagctattgattgttgtgtttgtcgaaccttcctatagtgcattagaatcagaaactttggcttcagttccttcgctatgagccccttgtactgctgcaaatggagttttccattgtagctgataaagtgcaggcaaggtgcatgcatatgtgcataggtggcattgaaattgggctcactggaccagtttgatattgtagtaatatatatacagctgggagcaacataatttaggtttcgatcatcattatcccatttggttcctgttataagggatcacattggaagaccctcacatgattgatgttgtctgtattctgtaagttggtgcaatccatttgcatgtaaaactcagctgcgtactgtggcgttctatgtagtggaataaataaaagagcattacgaaatcaccgaatcggggctcactggaccagtttgatattgtagtaatatatatacagctgggagcaacataatttaggtttcgatcatcattatcccatttgattcctgttataagggatcacattggaaaaccctcacatgattgatgttgtctgtattctgagttggtgcaatccgtttgcatgtaaaactcagctgcggagtgtggcgttctatgtagtggaataaataaaagagcattacgaaatcaccgagcagcttgctcctgctttccaaaaaaaaaaaaaaagggaaaagagtcaaaagctccgggaactccaaacggcaaggcttctgcgagcctatctggtaaggcttcagccttttctaaaggtgagggaaaagcgtacagttgtgactggaaagggctcttcgtgccttctgcactagcttgagctttcccagttgccatacttcagggtccaatttgctttgacaaacaatggaatcggaaatcgtgcttgttaattcgatgaccccccctgtttccaggat

SEQ ID NO: 25309 - DNA, 463 bp, Zea mays
  unsure (1)..(463): unsure at all n locations
  Clone ID: MRT4577_123086C.1
attaatgtctttttttatttttggacaccccaccgacctcaaggcaaaaaatttatttaaaaaaaattaggcatatgcgatgcactgcagggnaccaccctgcacgggttcacgcacgcaacactgttgtacagagacacctatggtggccgaaagtcagcactcgttgcacctatcagacgggtcagcgaccaggcctagcctaatccttgaactggcacaactgttaacaagttaagaaggccgcacgccaaatatgagataactagttctatggtactcggtggggttgctgccaataagccccacaactgaatgctcttagccggctgaatggaaaacattgctggaggaaggcacccactacttgcctgaatgggaattgtggctgcatataagccccacaggacactgcatgcaagtggtcgaatggaacaaactgatgtcgctgagagtataccac

SEQ ID NO: 25310 - DNA, 1230 bp, Zea mays
  Clone ID: MRT4577_123087C.1
cgagcagcaagtggacattacagctggtgctacatacggcttcttctccctgtctctgcactcactgcaaaccgctgatcctggatatataaaattcaccttctgagccttttgtacagatcaagagattcatccggctccgagcggcgagctccaccaaacggcctcattctcaatctcaactctgaagcggcacctacttcttcactgcagtgcttccctccttttcttgcagtccctcctctcctctcctctcctccctccctccctctgtctctgggctagcagagcagagtgccagtgagtgcgcagtgcatgttcgccatgtcaagcgccggcggcaaggcggagcctggattgttggtgaagcaggggagcaagctccacgccaagatgctctccaaggaggcggcggcgcagctcgcggtgccgtcgttccgggtgtactactccgtggcgtcggccggcgcggtgccgttcctgtgggagtcgcagccgggcacgcccaagcacgactcgtcctccgcggccgagctcccgccgctcacgccgccgccgtcctactactccgcaggccggggcggcgccggcgccggccgctccaggagccgccggcccggcctcctcgccgccatcctccccaggatcaccctccaccggtggcccggcagcagccggacgacgtcggcgtgcccgtcctggtcctccacgtcctggtcgtcctcgagttccaacacgtcgtccacgatgtcgcccgtgttcaccgtccagtcgtcgcccgccgtgcacgtgggggcttcccgcggccaccacgggcgcgcgatctcggccggcggcgcctacgacgaggccacgccgcggtgcttctcggtggagcgtgagtgctacgagaggcgggtcgtgaaggggtgcggcgtcgcggtggccttaaggaacgcgctggccacggtcgtcgtcggcaagcccggtcggcgagctgccaccagcgccgcagcatagacaggatttgattgaaattgatatggctaagaagctcagggtgtgctttgcattttgccgcagcatgtgtcatgtaacgtactcccaccgtcctaaaataagtgcgtaacaggtttatgtccaagttttttttaaaaaaaaaactaagtatatagaaatactattaacatttatatcttcaaataactttattataaaagtatattcccccaaaaaaaaaaaaacccaccc

SEQ ID NO: 25311 - DNA, 283 bp, Zea mays
  Clone ID: MRT4577_123088C.1
ataccattaacagacaaggtacagctaaggaagacagtggtgtggagccacaagaggagaacgttgtggatccagatcaaggtgtggatgacttttctgtactagatgagggtaatgtggtggcacagtgcaccagtgatcaattgagaacaaccatggaagataatgctgcagagatgcaagaggtggtggagcaagaaggtgccatttttgaaaagggtgtgacctcagatggcattactgttgaagatcaagacaaggaaatggacaatctgcaggcgat

SEQ ID NO: 25312 - DNA, 412 bp, Zea mays
  unsure (1)..(412): unsure at all n locations
  Clone ID: MRT4577_123089C.1
tcgccgtcccgcgcgctntccgttccccgcggtgttcttcccttgtcgccctccttccttccccgtcaagaagcgcacaaagaacgttcctcnacccgnccccttccccctttcgngctcttcccccccgcgcgngncccttttccttcttttcttgcccccgaaaaagaaaaagnggngttgtttcccttccttcgggcgcttccttcgtcccgcncttccgcttcgtccccgcccccnggtcgtcgcttcccccgccccccttgccgcccttgtttgttttgtgngccggttccccctttttcttcttcngcgtcttttttgcttcttttttttttgcngcgtcttttttttntttgtgcctttttggtttgtgctttttttgtcncgcttttccttttgtttgtcgttt

SEQ ID NO: 25313 - DNA, 163 bp, Zea mays
  Clone ID: MRT4577_12308C.1
gggaatttggtgagatatgctaatttacgttcgctacttaaaaaaaaaaaaaaaaaaaaggaaaaagaaaaaaaaaaaaaaaaaaaaatttaggtgaccctttaaaaggttaatttgcgcgcccctcttaaaggtgatcttgacgctcttgcctgagtcatgg

SEQ ID NO: 25314 - DNA, 115 bp, Zea mays
  Clone ID: MRT4577_123090C.1
gcctttcgtactacatatatgtgctgcatcaatcagtttgttcgactaggtattattctgggtcggggaaatacctcacggggggaggagtataacaagccgatctataccgcac

SEQ ID NO: 25315 - DNA, 368 bp, Zea mays
  Clone ID: MRT4577_123091C.1
gtcactaacagtggatttgttccttctctaacattacacacgttcagatagacattataatataataaatagagtattaggaagtttggcagtattaataagacatctaaaacatgcacgccacgtgtcaacttaatgtgttttagtttcatgccatcttcctttttcttattctttttatgtgttgtttctacttttcactctgtatgtctttttttttattgtcacatttatttctcttttctttatattttttagctctttatatttatttttttttttttttaatcaaatttttgtagttgggtggtctttggacttcgtaaattcctatcggtttggtggagattttaaaatctcttttttta

SEQ ID NO: 25316 - DNA, 744 bp, Zea mays
  Clone ID: MRT4577_123092C.1
cctcgaggccggccgggccgggatcgtgtgcttgttaactctacgcgacatatctcacgatccactcaagcaccaagccgatggaagtgacgagcgatcgcgcgcggcgcggtgtcggcgaagcggcgtggaggacgcgaacatcaacaacgagacgtcttccttcacgatcgactgcaccaagccagtggaggacgagattatggaagttgcctctctcgagaatctactgctagagcgtatcaaggtcctcggcgataaggctgggaacctcggtgactccgataccatctctcgagagaataccaaggtcaccgtcacctctgacggacccttctccgataggcacctgacagtacttgacacaagaagtacttgaagagccacaacgggcgggattgattacctctgcttgctgccaactaggaccgaaacgtctatgagctccgctacttctacattgctgacaacgagggcgaggaatagtatgagattgcgctacgcttatattttaggattgaactcggttcattatgatacctgtagccgtatcttcaactatgtcccatgttatggagaggaatggttaattcaaagaatccttatgaactgaatctctgctaaaacctatggtgtgtgacagaatgtaacgtgccgtatttcttaccagatttatgatgtatacggctctatggccctcgagcttcaggtggtgttcacctcagcgaggcttacttgtgagat

SEQ ID NO: 25317 - DNA, 263 bp, Zea mays
  unsure (1)..(263): unsure at all n locations
  Clone ID: MRT4577_123093C.1
aatttcnagctcgtttttggtttgancacacaanaacaccgtcaattgtcagattatcagttatggcaccnaaaaacagaacctgcaaccgtactcggtgatgatcagtgttttaaagtctgttgtcccaagtcgatttttgtagccctattatggattaatttggttaaacatagcattgatatggattaaaggagtattaacgtgtattgaattgtaacatgaacataattaccttttctaatccctaaaatacatattta

SEQ ID NO: 25318 - DNA, 404 bp, Zea mays
  Clone ID: MRT4577_123094C.1
caaactgcattcattctattcggttaatgatttacaaaatcactcagcaatttcctcctcccttttagctgccccccccctccactaaacatcacaaatttaaactacacaacccctcccacttaaaaacccctattggtcttacaacaaaaaaaaaattttcatctgaagatgaaaaactacctaaaacccactcttctcccctaccaaaaaaataatatggtgatcacccttcttcccacccggcaaagccacctaatcttcatccataaaacacagcccgcgttaaacatcccctaaacaaaaggcgcggactccccctccccaatattcgccaccacaacatctgaaggcccgaaggtcttgtccaccgacacaaccttctacaagcatcatctcaccac

SEQ ID NO: 25319 - DNA, 214 bp, Zea mays
  Clone ID: MRT4577_123095C.1
attcggctcgagatgacgcttcagagtttttcttctggtgagccactcccgccgggaatttatggcttaccgacgcctgctggcatagcggctcctggtagaactcctggtctgcatgctctagcgctacgaagctcacgacagagaagctgtgaaaatggctaggcacaacaacactcatgcatcgttcttacatgaagacgttaccgtgctg

SEQ ID NO: 25320 - DNA, 606 bp, Zea mays
  Clone ID: MRT4577_123096C.1
gagatctcgacttggggaactctcacaagaagacgcccagacgagaggagaggatgctgctgaggagctcctccacgccattcctgcgctccttcctctcctccccttcgcccccttcctccctccagctccggcgggccttctccgacggccacctcccttcgctcaacccctcctcctccggcgacaacgacagcaacagaaccaccggcctccacaccgagctctccttctccatctacaacaccttcagcaaagccaagctggagccccaccaggagcaggagatggaggaggagcaggagcagacggcgcagcctgagctgccggagctgccgctgttcctggcgaggggcatgggcatcgaccgcctcgcctccggcctcttcaccgccggcatgggctccgaggctgccctggctaggatggccagcggggtggaccagaaggcggtgctggcgctggacgcccagtacaaggagatggtcgacgagcagcccggcaacgccctgttcctgcgcaactacgcgcagttcctgcacgaggtgaagtgcgacccgagaagggcggaggagtactactcgcgcgccatgctcgccgacccga

SEQ ID NO: 25321 - DNA, 611 bp, Zea mays
  Clone ID: MRT4577_123097C.1
agctcttctctgctatggaggaggatctggaggtggacgacgaggactcgtgggacctcgttggaagggaccttcggctaaaggccaccttcctgtacattgacctcagccgtgtgatcaccttctgcgagggcgaagagcataagaaggcgctcactgtccttgccaacaagttcttctactccatggatgagctgagcgacgcagtggagagcagaagcctccctctgacgcaggtgcggtacagcgacaccgctgacgcgctccgcgaggtggtcgccgtcctcgcgccgtccctgctgcaggtcggcccgcatgatccggaggaatagagagatcagtctcagatgcgccccctgcctggcccctgcagtgcaaacgcgatatgtcgtcgtgacgcgggcgagagctgggagctgatagagataggatagctcatatatagctcgaaacctgcaggacagtggacagacgtacggtgagacgggtgaggcagcgtgacagaaaaatgccgtgtgcgatcaccttcacacctgtgtgtggctgtgtatacatgtctcagatttgggttggcgtctcttcccgccccctttgcgtttcgcgtgctgccg

SEQ ID NO: 25322 - DNA, 155 bp, Zea mays
  Clone ID: MRT4577_123098C.1
gcctgctgcctgctcagtcagtcaggcactcagctcgacacgctcgagcgtgacgtcaccgaccaggcaagcactccgctccaccagcgccgcctcgcctgtactgtcgatccacacacgtactggagcgcgcgtactgaggtcggtggagaggg

SEQ ID NO: 25323 - DNA, 306 bp, Zea mays
  Clone ID: MRT4577_123099C.1
ggaaaccgaaccaaaataccggtttacttaaaacgcgggccacgataatattggtcaccaacaaaaggttttaacggggatacaccgggacgacgacgataaatcgagcagggactgggccagccagcccctggagcagacacacgagactgacacaaaccgtttagtccacctcctcgatcttggggccagggcttggggggtacctccggggggtcggcttgggggacggaggcttggggcttggagggaaccttgggggggtcggcttatgtgtccgaggcttgggagaagggggtttacctc

SEQ ID NO: 25324 - DNA, 207 bp, Zea mays
  Clone ID: MRT4577_12309C.1
cgacccacgagtcagctcacgcgtctcaacaacactgtctcgtctcactgtgcttcgaccaattgtcgtgtacgccagtcttctcttgtctggacacctctgtacgcctggcacgctggcatacagctgtctgcacgctttatggcctggtgtgcagtagtgagcctgtgcttctaccactactactattgatctgcaggttggcac

SEQ ID NO: 25325 - DNA, 312 bp, Zea mays
  Clone ID: MRT4577_1230C.1
tttaaattttttcattctttacacccaccgtcgaataaaatgctgtacttatatgcacacacgtttgaaatgcattaatttctgtttgatttgatcttgtatcattacgctctcatcttcatttgctctgttaaattctctattattttttcatagtctgtaaattttatgtatgatatcttttctagattatactctatttttttcctaaaataaaaattaaatctgtttcctttctaatttatccatacttactttcctctattattttacatcataatcttttctatagttttattcctaaattttatt

SEQ ID NO: 25326 - DNA, 418 bp, Zea mays
  Clone ID: MRT4577_123100C.1
ggaagaacaaatcacagcacccctttaaaagaatcccacagggggaccttaaccacataaggggatcttcaaagctcagggcacagacccacagggtcacattatggtccaaaactctcatccaggcccaaagcagttttcaaaaaacaaaagacccctatcacataacaatggggggcaaaaactaaagagatgaggaaaaggggggcccacaacaatcaaatgaccgggaaaaggctagtccatctcctggaaaaaggccccgggggcgggcccaccagcgggggggggggggacctcgtcggcagaaaacttgcccttaaccttggcgggggggcggccccgggccttgggggcgaggagcgccttacgggccttggcgagcttcaacttggggaccaacaccttggaggggggg

SEQ ID NO: 25327 - DNA, 438 bp, Zea mays
  unsure (1)..(438): unsure at all n locations
  Clone ID: MRT4577_123101C.1
gggtagcaaatagtagcaaacaggagtaattggaacctatgagaatttgacctttatatttctcatattgtctctaaatacttgtatacttctataattgtgtcctaaaatgtaggatggatcaggacttagatcctggaaacagattgagtaggatggtccangttttcactaggtggtgagcaaatngcttgcactgaatttattctgtaatctgaatcacatgttggcttccttttggtgcgagccatggctacgtgattcagttcactttttatatatgttattttgttgctgatgtagcatcatgcatttttatcataattctattccatngttctcaggtcgtccgactaattgcgattagtcgcgattagttgggctgattggtactcagngctcgataagggggttcgattcgatcaggtgatctgatcg

SEQ ID NO: 25328 - DNA, 403 bp, Zea mays
  Clone ID: MRT4577_123102C.1
gaaacacattgtaactaaaatggggaggatctgttttgaaccttaaaaaaccagcccttatgaaccgaacttacggaaggcagactggccttttttttcatttccgagcaagagaaaaccacacttgacgggaacggaacggggaaacgcacacggctggtgcacaaacggggcgggctcatgtgctacacaacccaaaaggagatgcggggggaaatgccattgacaggcgatcccagcggggtttcctttcctgcaggaggtgggggggtaaagcatggggtaggaaaactcatgcgggccgtttcagtccttgaggaaagggcccgggggtatggggacaactcctttcttgaaaccgggcactcgcgcgcaaaaccgtttgaacggcgtactgcacttt

SEQ ID NO: 25329 - DNA, 464 bp, Zea mays
  Clone ID: MRT4577_123103C.1
cgcccgtggtccctgagccgacggtgtaccaccccgtcaccattcaccacgcccccgggcacactcacccaattgtgactcgccgtgcttccggtgtccttcggcctgttgacatgctgatcctagccgccgacacgttcgctactccaccggacgcctccccggtccccttctccgtctgtaccgccctcgccgaccctcactggcgtcgagccatggaggaggaatatgcggccctgctggccaaccacacctgggacctagcgcctcgtcctcctggcactaatgttgtcactggcaagtggctattacgttacaagctgacttcgaatggctccctcgaccgctacaaggcccgctgggtccttcggaggtttcacccagcgccccggcgtggtctaacgacgagaccttcaaccccgtcgtcaaattcgccaccgttcgcgccggccttttcctcgccc

SEQ ID NO: 25330 - DNA, 327 bp, Zea mays
  Clone ID: MRT4577_123104C.1
atggtgggaaacaatgggccgaaggcaggcctattcctgcgtcatggtccacccgtttggacatgtattaacaagcggcacaaaatatatacggagtgtcggggggattagcacaccaacctactgtgttaccgagctagaattctaccaaccacctgtctacacaaaaccgcttttgccaagccttccctttcagataaatatcccgggggttaaaacacctcttacaatcttgcggaatcttttcctacaagtccatttgaaaatgattttgttttataggtttaagtttcaaaagaccctattttataaccaccctcttttttg

SEQ ID NO: 25331 - DNA, 153 bp, Zea mays
  Clone ID: MRT4577_123105C.1
attattttttttttttcatgttcctttgcttatactttagcacttccagagaaagctagactttacttacaggcctggttgggttttctctaaatcacatataattgtatagagatcaaaaaaattcaaaagaagctctatttgcttgggatt

SEQ ID NO: 25332 - DNA, 1267 bp, Zea mays
  Clone ID: MRT4577_123106C.1
ctccatctcaaagcatgtcatcctcagctggtagtccgagagtgacagaaaggaaagcagacagagacagccacgagcaccacgacgatgacgacgacggcgagaagggatcaggtttctttgacaaggtgaaggatttcatccaggacgtcggcgagaagatcgaagaggtggtaggcttcgggaagccgaccgccgacgtgaccggggtccacataccccacatcagcctggagaaggcggagctcgtcgtggacgtcctcatcacgaacccgaaccccgtcccgatccctctcgtcgacatcgagtacctgatcgagagcgagggaaggaagctcgtctccggcacgatccccgacgccgggaccatccacgcgcacggctcggagaccgtcaccatccccttcctgctggtctacgacgacatcaggagcacgtacagggagatcgagcccgggagcgtcatcccctacaaggtcagggtggtcctccacgtggacattcccgtggtcgggagggtctcgctcccgctggagaaggacggcgagatcccggtgccgtacaggcccgacgtcagcgtcgacaggatcaagttcgagcagttctccttcgaggagtccaccgcgacgcttcacctgagcctggacaacaggaacgccttcgacctggggctcaactccatggactacgaggtgtggctcggcggcgtgagcatcgcgtccgctgagctcagggaggctacggatatcaagagacgggaagtgaccaccatgaacttgcctatcagcttcaggcctaaggatttcggctctgctatgtgggatatgatcagggggaagggcactggttacaccatcaagggacacatcgatgtcgacactccgtttgggcacatgaaaataccaataagcaaagaaggggggacaacccgtctcaagaagggggatgatgacgacgacgatgacgacgacaaggactagaaacgaagggatgagctatttagctttcctgaagcagataacaaatatgaaatatttccctgccagtttagtttgctacatatttaatttaagctatcctaccagcttataatctctagttagctttacttcctccactatttggtacatctgttttatctttatttcttatcttggaattcatttatatccttcatagtgcttctttaatctgtgtatgaccatatatagtcatgcatcaaggacatcaaagatgagcaaatgagacaagattactctttataccc

SEQ ID NO: 25333 - DNA, 245 bp, Zea mays
  unsure (1)..(245): unsure at all n locations
  Clone ID: MRT4577_123107C.1
atggtgagattatgtgcgggagagcacacatcctccagaaaatacaagggtatggatcggacaaaactctggcaagggcgagcgaaaacccccgcggggggagttttttttttaccgggggtggcagaaaaaggcacacaacgaactagccaccatgggaagctcgaaggaacggggggagagctgaaatcttacatgctataaaaagctggggccagggcanccgggtttaactcccacgcaaa

SEQ ID NO: 25334 - DNA, 373 bp, Zea mays
  Clone ID: MRT4577_123108C.1
cacaaaacaagtgtggggggagttattgaatccaaagggctaagcgtttttaaattacagcagcacccaacacaagagcatggggggttacaaaacttttacaaaatacaaccgggggggggggtgcacaacctcatacgtacacgtaagtaaccccagcccccaggaccaacaccttgaaaccccacaaaaatttaattaaaaacttccacatcaaaaaccccccagcttttcccgaaaaaaaaaaaaaaaaacccaagaggacccgttaaaatacccccattaaagcccgctgacaacccccatgattcactttcacaacaaaccccccccggtaagtttcatcggcaccggcaaaatcgggaggcttgtc

SEQ ID NO: 25335 - DNA, 506 bp, Zea mays
  unsure (1)..(506): unsure at all n locations
  Clone ID: MRT4577_123109C.1
gggtacctcgaggccgngccgggccngggagaccagagtctatacacctggctatcgatctcttcgcatagagagaggaaagtatgtatgtatcatagtaggcagagcaatagagctttgcgcgttgacgccggagctagcatgattctcgtcctgctgatacctgccacgactgcgaacgatgcgcctcctgcttgctgctacctccaacagtgggtggactaggacatcatcgctaggcatattgtccatcccgtgagaggcatccgctgaggagaatcctgtgccttcctagcatgctattcggcagccgagactcgtccatgtctcggccaaatccgcgtgaggtgctatctggactatagctatatggctgtcgcgctgccacagactgaaagatggtacagtgtcgttcaactaattgcatgcgtatgctcatctaaaaaataaagtattattagaagggatatgttggctgtatactatctgctcccggtatgccccta

SEQ ID NO: 25336 - DNA, 291 bp, Zea mays
  Clone ID: MRT4577_123110C.1
gcaaattccaaataaaagggccggaaaattttcctgtttgaaaatgtatttttccccgttttgctttaattttttttggggaacgggcccccggtcccaaaacgtgccagggcccacaagaaaaaaacttttttttttttttttgtccaaaatccttctgcattttaagtttcccacctgcccccaaaaatagttgttaaagtttgttgaaatttaaaaggcggttgcataagtttttttcaaacgggttccccgtttgaaaaaaacccttgttcccccccccaatttttt

SEQ ID NO: 25337 - DNA, 283 bp, Zea mays
  Clone ID: MRT4577_123111C.1
tggagagagatgttatcatgagggaattccggtcagggtcaagtcgtgttctgatcactactgacttgttggctcgcgggattgatgtgcaacaagtgtctttggttataaattatgatctacctaccaatcgtgaaaactatattcacagaattggcagaggggtcgatttgggaggaaaggtgtggctataaactttgttactgaagacctccagaggattcttcgtgacattgagactttctacaatactacagtggaggagatgcccatgaatgtggct

SEQ ID NO: 25338 - DNA, 478 bp, Zea mays
  Clone ID: MRT4577_123112C.1
cttatacggcgccttggtttggtgtttataaaaaaaaggatacttaaaacatacttagctcgattgcaaactagaacagacctgagaaggtgttattcctgtgcgcggttagatcagctgttatattgtaaagccgctgtttggtgggggggggggggctggagcggagtgctaccgtttttcagtgaaccggtgatcagtagaacgcccggttgccgtagaacaccttgggagagggctttttctgctgcccggtggcggtcggttttttaaccgtggtggtgttggaaccagtggagtctgtgctgggtgtggctgttggaggactgttttttttggtgataccgtagtctatgtgcaagggtggaagcttaattttggccaaggaatacgggaattggtgcatacttttcatggtcatgttcatgatttggttcccgttcaagttcatctgctgttggatggtgacgctgttcac

SEQ ID NO: 25339 - DNA, 232 bp, Zea mays
  Clone ID: MRT4577_123113C.1
caaaacctactcaacagcaaagacgcaggaaaagccgtccatacatggctccatgcgtggcttccgggctggttcccgaggaggccccgctagagaaggacatcctcaaggaaatgctcccctgaggcgaacacctgtgggtacacccgtgacttcttccgcaacctattcgggccggaggctcctcggcacactgcttgaacgacggcgttgacgaccgccatggcgaccg

SEQ ID NO: 25340 - DNA, 298 bp, Zea mays
  Clone ID: MRT4577_123114C.1
cccacgcgtccggcacatactgtgctgctgttaccattagaaatataataacgtatgtgaggccggtgcatatatatatgcatcatccatctacctgcgcggtgcaaaattctgaataaaacctgcataaaacctgattgagcacaaacaacagcagctgcagctgcaagccccacgagcaagaggatcgccctggtgacggtagggaacaacggcatcgggctcgagacgtgccagctgctgtcttccagcggcgacatggtcgtactgaccgcgaggaaccaggcgaggggattgg

SEQ ID NO: 25341 - DNA, 683 bp, Zea mays
  Clone ID: MRT4577_123115C.1
tatgaaaagcttcaccaatgaatatatacaaaatggtataattgtccatccattcgttcgtatataaatcatttttgagagttgactgtcttgagttgctttaggttcgatcgaatttatataaaacgatatgaatgtttatgataataaattaatattatcagatacatcataaaatatgatgtcattagcgtaatagcactgtttatttggtgtcatatatgtttgtttgcctacttgacgtacaaatgcatccgtatgtcctgcggtgacaaatagattgttatttgattcatgacacttgtgaaaggaaggctctttttttttcaaatggatagatcgccgagcaacagggtgcaacggacagaaactgcctacttgtcgatcccttccggcggcagatgaaactgctttcggctttccgatgacagcaacggtttgatttctttttttccacggaacaaaggaatggggttgcttggtttggttgacgacgatcactgagtcagttcagttacctactttgctgtaaattaggaaaggagataacagttcttttatttactttttttctatcgtttctataccctctatataactcatcggttgaaacatcactaactgcacacaatagattacctcggtcaaatcccacctagagatggcaatatgtcagctggtgc

SEQ ID NO: 25342 - DNA, 427 bp, Zea mays
  unsure (1)..(427): unsure at all n locations
  Clone ID: MRT4577_123116C.1
atatgggtaccctncnaggccggcccggtactatcctcctttataggaactgtcctcatcacgtattacgctcagccacatcgagggggtgcatcctagcaggactacagttccctagcatggatgaggcaggggcgcaacgaagtgactctacggtcgcctaagaacgagcaacaatgcgcgggacctcggctacaccgaacgcgggggtgtctgcgaggctgtgctacggctgcttacgcgcgttaagtacgcggactccctcggtatggtgaggccccgcaagctatggtcacgcggccgaacttcctgtggctagctactgactcgggacacctggcgcgggatgctccggctaccactgagacattggtgcaagaacacgcgagctgggaggtgataccacttcccgattgggccatagctc

SEQ ID NO: 25343 - DNA, 823 bp, Zea mays
  Clone ID: MRT4577_123117C.1
ccgggtaaactgattgatctcatcagttggattatgattttaaacgcttatatggctcctggtgacgttatgttggagacttaagatggtcttttctaaggttaaggccctgtttggatgcaaattaattttttggactttagtcttttagataaatactttggttttagagtgacatgaagcgtttggatgccaaaaatgatttttaataccatggtaatatggtattgctaaaactgtagtccttttggagttttaaaaactccactctatacctcttttctaaaccatggttttgcacatcaatgggttctaaaactgtagtttcttaatactacaacagtacaacatccaaataagggctaaagggtagtatgtgagctatgaaagatgagaattgtagcgatggtttccaaaaacaaaaaggggaagacatagtgtcggaggctcccatctgtatgggatctggggaaggaccctgaaaatacagagaggttgctttgaatccgcgacctagtgacttagtgagatagctctcaccactatttccaaaaacaagaaaaacataaataatgtgcttggttccccctctttttttgtacattggctttgagttgtgttgatagcaagaggaagcatgttgacaaccatgagcatgcaccatcaagcatgtactatccatgtaaagaaatgttttggaactcaggaaataaattaccgcagtgttgagaataaacactaactgcatattagctcataaatatttttcatttccttggtgttaactatatgctgtatatgaaaaccttaaatgatctgcatg

SEQ ID NO: 25344 - DNA, 652 bp, Zea mays
  unsure (1)..(652): unsure at all n locations
  Clone ID: MRT4577_123118C.1
ccggccggggaagaagccggaagcgatctccccgagattcagggcaccgagtccgcccccttcaagtccctcctcgaggcctacttccgccacggcgccgagtccgagtaccaggtcaagaagaaggacgatgaggagtacaagcccgctgccaagtcagccctgaagaaggctgtcgcttacgctgctggacaaaagaagaagttagatgctgctgctaagcgtgccgagaaggatgcccaggatgaggccgctcgtcttgctgttcttgaggaggctaagaagatcaagatcaccaacgacccttccttgcccgagcctgtttcgatcagcctccaccagaccgattcttctgtgattggcactcttcgaaagagcaaggatgagcctactgagggcgtcaagcgtgtttccgttcagggccgtgtcaaccgtgtggccaagcagggtggtcttatctttgtcactctgcgccgtggtgtcaactacatgcagtgtctcctttctggcgatctttccaagacttacgacgctcttaccctctcccgagaaacctctcttgagattattgntgagctttgggaggttcctgctggtgctcacgctcccctcgaccgcgacttcgcgcagactacttccgagtcatcgccaa

SEQ ID NO: 25345 - DNA, 436 bp, Zea mays
  Clone ID: MRT4577_123119C.1
agctcggaatacggctcgaggcgggagggggaaaaacaaattcgatttcggacggcagacaaagacaaacgggtcggggcgcagcagcagacgacgcaaccccctggacacaaggacaaggagcgacgcgacccacgcaagtacagcgctcacggcgctggcagacccagacaagacactactaccagcgaggcatggagacgaacgaagactggacaaagacgcacgatgccacggcacagggcatggcatgacaaacgcggcgtgagaagaaatgtacaggcgcggaacaagcggacaggcgaaacgcaacgaaggactcaacgagcgcaccgaaaggcagacgaggacttagcacgagaagcactgaagcggggaagaacaaaagcggacagagcaagctccttaagataccagcaagatcagccgaaagaag

SEQ ID NO: 25346 - DNA, 454 bp, Zea mays
  Clone ID: MRT4577_12311C.1
agagcactcaactttatgctgttattactcttggaaggcacgattatttagccacaagcatgcttgctttctattctacttctaattggtggtcacttggttgttggccagtatttgcatctgataagcctttgtattctatattgttgaatataattgcccattatatcccttgtcctacggtacttctaggattcatcattttaggccaccagattgttatttttactgttaactgcagtcacatgacacatgagtttcttcaccaatattgatttttattaggtttaactacaaatgaactgcatcaacaaggattaggttttctacacatattgtttatagtctgaccctgtttgattgatttcatatctgaaagacttcaaaagtgtaatgagggatatgtgattgacacccgcaataggtattttcttatgtgatattggaccacaca

SEQ ID NO: 25347 - DNA, 1355 bp, Zea mays
  unsure (1)..(1355): unsure at all n locations
  Clone ID: MRT4577_123120C.1
ggccgggttaacccatagccgaagcttgatcatcgtgctcaaacgaagcaccgctttcgattctgcttcgtcacaagagaaagaacttcggagaaatcgagaaagtaacaacttcaaaaatttaaaaaattataatcagatggcaagagtgcgttctactgccaggattgaccgtgagggagatgagaccgaagctactgaaactgttctaatttccgaagcaatgaggcggtctgggctggcaacatcgggggatatacctgccaccgaagcagaacggtctgatgttgaagaaactgattccgaagatgattacagcagtgccgagcaaacctagccacctggacttcggaaaatccaccatctccgaagctgatcttcctaagatggtgaagttgggctattttagtgaagcgaagaaggagttgattcgttttggtggaaaagaaactatcccgaagccgggaaagaatgaagtagtggttttcaaaagtctttttaaagctggtttaagattccctttgaacaagatgattgttgatttactgaagaaatttgggatctaccttcatcagctgacctctaacgctatcgttaggctaattgtttatatcgaggctctccgaagccagggggtggaaccattcgctgaaggtttctgctgagtgcacgaactgcactatcagatcaaggctagaggagatggtcttcatgaaaattttggctgctacaactttgcttaccgcaagactacanaagtttccagtgaacagttaccgaagcaaatggccagctggatggaaatctgagtggttctacgtcagagttgacgaagatgaagataagttggtccaaagtccgttagaattgatcttcggagagacccgnacccccgtgcaaaatgttaccagggagtccaggtcaaattgctctagctgaatttagagtgattgcagatcatattggcactagggacttagtgcaggaatttctggccttcagagtattcccgactttaaaagagtgggaaatgccgaagctagaggggaaaataagaaaggggaacttgttcggttgccctaccatttcaaattcaagaaacttttcaaagtaccttgccaagagtggctggacacaatcaaagtaatgtgtaatgaaatactcggaaattattctaaaaagaagaccaattgatgactgcggccttcggcacccgtccgaagcgaaggctaaaccgcgtaagtggatgccctgggttttgaatatcctgactatgagcggctagataagggtgctgaaggccaaaagagaaaaagagtagctgatgttctgaacaaagacgatgaagaacaatc

SEQ ID NO: 25348 - DNA, 781 bp, Zea mays
  unsure (1)..(781): unsure at all n locations
  Clone ID: MRT4577_123121C.1
tgctcctgacgagcctgctgctgttcctgccccagtgcctgagaccgaatcagttgccgagcctgctgctgttcctgccccagtgcctgagaccgaatcagttgccgagcctgctgctgttctcgccccagcgcctgaaaccaaaccagatgccaagcctgctgctgttcctgccccagcgcctgaaaacaaaccagatgccgagcctgctactgctccagtgcctgagaccaaatcagttgccgagcctgctgttgctgctgctgctccagtgcctgagactaaaccagttgccgaatctgctgctgacgctgttgctgtttttcgcctgaaaccaaaccagatgccgagcctgctgctgctgctccagtgcccgagaccaaaccagttgctgaatctgctgctgatgctgttgctgctcaggcacctgaaaccaaatcagatgccgagcctgatgctgctccagtgcccgggaccaaaccagttgctgaatctgctgctgatgctgttgctgctccagcgcctgaaaccaaatcagatgccgagcctgctgctgccgctgatccagcacctgaaatcaaatcagatgctgccgccgctgatccagcacctgngacccaagcagatgctgccgccgctgatgccgcgcctggagccgagccagacgctgctccactagaggacaccgccgccgacaaaggcggaagcgaggagagcagccagcccgtgaacaacgggccactcacgtgaagtgcatctggagcccgaacggaacacccct

SEQ ID NO: 25349 - DNA, 2092 bp, Zea mays
  Clone ID: MRT4577_123122C.1
aaaaaaaaaaaaaaaaaaaaaaaaaaaaaaaaaaaaaaaaaaaaaaaaaaaaaaaaaagagctgagttacccctcgagccggccgggaaatccgcacgcggccgtcgtttgccccctccctccccacctgcaccaccaccaacaccaaccaacaggtggcgagagcgagagcgagagcaaagagctgagcgggacggagcagctagcgctagggataacgcacacccaccaccatggcgacgcccggagagcagccggcggaggtcgtgtccgtcgagatgcccgcacccgacgggtggaccaagaagtttactcccttgagaggggggagatctgagattgtttttgtttcaccaactggcgaggaaattaagaacaagaggcaattaagtcagtacctaaaggcacaccctggaggccctgctgtttcagagtttgattggggaactggtgataccccaaggcgttctgctcgtattagcgagaaagtcaaggtatttgatagcccagagggcgagaagatcccgaagcgcagcaggaactccagtggtaggaagggtaagcaggggaagaaggaaacccctgagaccgaagaagccaaagatgctgaaactggcaaggaggcagaggaggccccaagcgaagatgccgcaaaggagactgatgtggagatgaagcctgctgaagaggtgaagggggcctctgctgaaacagaagatgctgacatggctgatgctcctgcaccagcaccaatggaagaagataagaaacaaactgaagaactggcagaagctattgcagctcctcctgtgccatcggaggagaagaaagatgtcaagccagctgagcctgaagctgcagcaagcaacccaactgaggattcggcccctgctcctgctgaacctgctgatgttgctgctccagctgctgagaccaaatcagacgccaaacctgctgctgttgctgctccagtgcctgagaccaaatcagacgccgagcctgctgctgttgctgctccagcgcctgagaccaaatcagacgctgagcctgctgctgttgctgctccagctcctgagaccaaatcagtagccgagcctgctgctgttgctgctccagcgcctgagaccaaatcagatgccgagcctgctgctgttgctgctccagtgcctgagaccaaatcagatgccgagcctgctgctgttgctgctccagtgcctgaaacgaaatcagatgctgagcctgctgctgatgctgctccagttcctgagatgaaatcagagtccgagcctgctgctgttgctgctccagcgtctgaaaccaaatcagacgccgagcctgctgccgttgctgctccagcgcctgagaccaaatcagatgccgagcctgctgctgctgctgctccagtgcctggaaccaactcagatgctgctgctactgatccagcacctggaaccaaggccactgccgccgatccagcacctggagctccagcagagaactccaccgacaaagacggaagccaggagagccagcccgtgaacaatggacagctgccgcactcgacggtgaagtgcacctgaagccgcaacgccggaaaaacctgaaccccttccggcgccgtgtatctcatttaggaacaaacattcgcattcgcattcacattgttatcagttaaaaagtctatggaacggtaagcatgttaattagtcagtctgacgctgctgggtgacaggttggtaattaggctctgcatttagctgttttgtatggctgctgtcgccgccatacatgtatcatcttcttgtggttgtatggtacctaaccgcgtaaacatgttaaccttaggccatgtattaattactccgctctaatgtttgtatgtgtattgtcaaacttgcagaaccagttgcatgcatgaaaaataataagtgtctgggtatctatgggtgcggggtacccatctccgcaccagcgcacccagccagaaacagcagtttgtttggatctaatcagaacaaaaaaaaaattgctggcccatagcatttctggctagcatagacccttctgtggggctcacatacgctgggcaaac

SEQ ID NO: 25350 - DNA, 740 bp, Zea mays
  Clone ID: MRT4577_123123C.1
ggcccacgcgcccgtctgtttgccacctttccccaccagcaccaagcggctatagcgggacggggcagagcaagagctagggataaccctcgcccaccatggcgacgcccggcgagcagcaggcaccggctgcggcggagtaggtcgtgtccgtcgagatgcctgcacccgacgggtggaccaagaagtttactccccagagagggggaagatccgagattgtttttgtttcgccaactggcgaggaaattaagaacaagaggcaactaagccaatacctaaaggcacaccctggaggccctgctgcttcagattttgattggggaactggtagatacctttgactaccactccttgttatttcttcaaatctctggctctaatagaaatgtggatggctttagaaattttgtcttctccatctaaaatgctttgcaaacaggtgataccccaaggcgttctgctcgcattagcgagaaagtcaaggtttttgatagcccagagggcgagaagatcccgaaacgcagcaggaactccagtggtaggaagggtaggcagggaaagaaggaagcccctgaaactgaagaagccaaagatgctgaaaccggccaggacgccccaagtgaagatggcacaaaggagactgacgtggagatgaagcctgctgaagaggcgaaggaagctcctactgaaactgatgacgctgagaaggctgcagacaaagcggacgatactcctgc

SEQ ID NO: 25351 - DNA, 1232 bp, Zea mays
  unsure (1)..(1232): unsure at all n locations
  Clone ID: MRT4577_123124C.1
agttttggcctctcacgaanaggcgccgggaaagaatgactggtggaggagattctaatccccaagcaaacaattggtggcaattggtttgttccgtttcgtgctccatgagacatgcagctcaccttcgtcgtcgctccctccgtcaaagctttgctccactacctatggcaaataggtggataaagtgactggtcaaaagagctctgacagatggaagggttctcaaattagagctgctacctcagatatggcagaattatcaaaacaagcacttggctctacggaggattgtctgctcgagtctctgatgggttgcttggcatctccttctcctcttggagctggcgggaggggcccccacatacagggaacttgagctacctgcctgttgattgatatcttacttccacagcaagtttgagaaagagaggaagccgctttgcgttttgcatggaatcattctttaccgggggaaccatttcacatttggcagtgttccagcaagacaacatttctgcacaagagaaagtacgcatcaaccccgcatgttggtcgggcaaacatgtgagatcgggtgttttcatcagacaaagcagtgaaaacgatactggtatacaggcaagcgtgtgcaagtccttacagcatgctaggcatacggcggtttccaaaagaaagcagtgaaaacttctggcgcatgctgggtcacagctgatgttctacttcaaaattgtgggcttgaaatcgagtatggctccctctgcattcttgcctgatgttctacttttgcagcttgagacttgagagattggtgatagaggcgtttcattatttgtttctctttggcgaataggagacgcactgtgttgttgcaatcaaaattgtgggcttcttggggcacattttgctcttgatttcattagtacgatggtgaatggagggcacattgtgatttttagatcagaattgtggttccttgggctgccttaatgtgttgatttcttttctttatacgatgatagatatagaattgtctaattgcaggtacaaggtgctaaagccatcatgtttaccagtttgctacatgttctctcaatttggtagtaattttcagtttggaacatgtaatctgagtgttagtcagtttgctacatgtttctgaatttgtgtcaatctgagtttggaccatgttatcaacttttgtcaatttgccacctgtaagtggcgctgca

SEQ ID NO: 25352 - DNA, 708 bp, Zea mays
  Clone ID: MRT4577_123125C.1
accaacaccaaccaacaggtggcgagagcgagagcgagagcaaagagctgagcgggacggagcagctagcgctagggataacgcacacccaccaccatggcgacgcccggagagcagccggcggaggtcgtgtccgtcgagatgcccgcacccgacgggtggaccaagaagtttactcccttgagaggggggagatctgagattgtttttgtttcaccaactggcgaggaaattaagaacaagaggcaattaagtcagtacctaaaggcacaccctggaggccctgctgtttcagagtttgattggggaactggtagatacctttgactaccattctgttatttctttagatctttggctctaatacaaatgtggatggctttagaagtcttgtcttctccatctaaaatgctttgcaaacaggtgataccccaaggcgttctgctcgtattagcgagaaagtcaaggtatttgatagcccagagggcgagaagatcccgaagcgcagcaggaactccagtggtaggaagggtaagcaggggaagaaggaaacccctgagaccgaagaagccaaagatgctgaaactggcaaggaggcagaggaggccccaagcgaagatgccgcaaaggagactgatgtggagatgaagcctgctgaagaggtgaagggggccctctgcttgaacagaagatgctgacatggctgat

SEQ ID NO: 25353 - DNA, 361 bp, Zea mays
  Clone ID: MRT4577_123126C.1
ccgggccgacccactcgtccgcacgcgccagagtgcactaccccatcaggttcacattcaccaccggccgcaccctccaccagcttcggatccttccaattgatgctactctcccgacagcatgcacgcttcctactaatccgcctcgccttcctctgccagccgagaacgccccgaagagtcacggcccacacgccagccgctaaagacctgccgtacaccgacgccgccgacactactgggacgtccactcgaaacgcggagactaaccccaagtacaacaactaccacaacgcgaccctcacgacgtaaatgctgcatcaccagctgaccggcccgatcgacaacgagatgaccatca

SEQ ID NO: 25354 - DNA, 787 bp, Zea mays
  unsure (1)..(787): unsure at all n locations
  Clone ID: MRT4577_123127C.1
attgatgcatttgaatctaagatgctaaacttttagatgtacggtacaaagatacttctaggtacaatggataaagtagcttgttgataggtttaaatcccatcgcacaagtttagatacatgctaacgcattccaccaaacaggcacataccaaatgtgaaatggttcccccggtaaagaatgattccatgcaaaacgcaaagcgacttcctctctttctcaaactttctgtggaagtaagatatcaatcaacaggcaggtagctcaagttccctgtatgtggggccccctcccgccagctccaagagaaaagggagatgccaagcaacccatcagagactcgagcagacaatcctccgtagagccaagtgcctgttttgataattctgccatacctgaggtagcagcgctaatttgagaacccttccatctgtcagagctgtgggctgtaaatatgtgacgccttgtttagatgaataagtagacacttcagagttgaaatatatgggtagaccaagcacaaacttgtgtcatagttaataacaccacgtctcttttgaccagtcactttatccaactctttgccataggtagtggagcaaagctttgacggagggagcgacgacnaaggtgagctgcatgtctcatggagcacgaaacggaacaaaccaattgccaccaattgtttgctagaagcaatttggccgtggaaattccataagcaaaagaagtggcacacaattaggacatggngtatgaaatccattgggcaaaactaaatagaat

SEQ ID NO: 25355 - DNA, 1901 bp, Zea mays
  Clone ID: MRT4577_123128C.1
ggccggccgggccgaggctatggagcagttttttagtgtttcgctgcacggaagtgactctgctagcccctaatcatatgagagtgattttgagtgtgcgaaacgccccctattgaaattcccacgcgcccgtcgtttgccaccttccccaccagcaccaagcggcgagagcgggacggggcagagcaagagctagggataaccctcgcccaccatggcgacgcccggcgagcagcaggcaccggctgcggcggagtaggtcgtgtccgtcgagatgcctgcacccgacgggtggaccaagaagtttactccccagagagggggaagatccgagattgtttttgtttcgccaactggcgaggaaattaagaacaagaggcaactaagccaatacctaaaggcacaccctggaggccctgctgcttcagattttgattggggaactggtgataccccaaggcgttctgctcgcattagcgagaaagtcaaggtttttgatagcccagagggcgagaagatcccgaaacgcagcaggaactccagtggtaggaagggtaggcagggaaagaaggaagcccctgaaactgaagaagccaaagatgctgaaaccggccaggacgccccaagtgaagatggcacaaaggagactgacgtggagatgaagcctgctgaagaggcgaaggaagctcctactgaaactgatgacgctgagaaggctgcagacaaggcggacgatactcctgctccggcgccaatggaagaagatgagaaagaaactgagaaaccagctgaagctgttgtagctcctcttgcgcaatcggaggagaagaaagaagatgccaagccagatgagcctgaagctgtggctccagctccagtaagcaacccaactgagaactcagcccctgctcctgccgagcctgctgctgttcctgccccagtgcctgagaccgaatcagttgccgagcctgctgctgttctcgccccagcgcctgaaaccaaaccagatgccaagcctgctgctgttcctgccccagcgcctgaaaacaaaccagatgccgagcctgctgctgctgctgctccagtgcctgacaccaaatcagttgctgagcctgctgctgctccagcgcctgacaccaaatcagttgctgaacctgctgctgctgctccagtgcccgagaccaaactagttgctgaatctgctgctgatgctgttgctgctccggcgcctgaaaccaaatcagatgccgagcctgctgctgctccagtgcccgagaccaaaccagttgctgaatctgctgctgatgctgttgctgctccagcgcctgaaaccaaatcagatgccgagcctgctgctgccgctgatccagcacctgaaatcaaatcagatgctgccgccgctgatccagcacccgggaccaaggcagatgctgccgccactgatgccgcgcctggagccgagccagacgccgctccactagagaacaccgctgccgacaaaggcggaagcgaggagagcagccagcccgtgaacaacgtgaacaacgggcactcaacgtgaagtgcatctgaggccggaacggaacaccccttccagcaccgtgtatctcatgtaggaacaaacatttgcattcgcattgtaatctgatggatcggtaagcatgttgattagtcagtctgacgctgctgggtgacatgttggtaattaggctctgcatttgagctctttttttttgtatggctgctgtcgccgccgtacatgtatcctgtatccaccaccatcatcatccccttggactattggttgtgttgtacctaactgcgtaagcatattattatcaatgttaggccatgtatactccgctctaaaaaaaaaaaaaaaaaaaaaaaaaaaaaaaaaa

SEQ ID NO: 25356 - DNA, 466 bp, Zea mays
  Clone ID: MRT4577_123129C.1
aaaccaaaccccatgcctggggatttacagatgattctggtcaaacgatctttacccttaacccccccttcaggtgaggggcataccagtcactcctaaacccttgctccctttaaaccatgcctgctttggaacacggcccgaatttggcccctccagatgggttaacacacacaaactggtccaaaaaggaacttaagggttaaatggttgtcttccagtccatttcagctcaccagggagggatcgttttcctcctcgaccttgactaaaccggaaaagggctggatgatggggttgtgccatgggtcaaacaggtgctgcaacaggttgtcaaagggccccttgcccgggaccttgtgctggatcaggaagcccagaaaccccagcattgccagcctcccgttgggaaactcctttttcttggccttaaacgtgggccccaaattttagcgggttgaaaacc

SEQ ID NO: 25357 - DNA, 351 bp, Zea mays
  Clone ID: MRT4577_12312C.1
caactacttcatttaaccattggccgggctgaaccccgctgcttatttggagcggcgaatacgtactaccattaagccaggtagctgcagcaaaccatgcttccttcttgacacagcaacaggttgctgcctttctaccagcaatgggcggataaccacgcaaccctcttacaactacaacaatggttgccctttgaccaacttggttagacagacccagcggcctcctaccaacaacacatcattggtggtgccctgttttagattgcttattggttgtaatgcaataataaagctcttaggatgatgaatgagaccaaccagaaataagaatgtacattaacagatttc

SEQ ID NO: 25358 - DNA, 1431 bp, Zea mays
  Clone ID: MRT4577_123130C.1
gctcctcaacatctccatctcggcgcgggaccaggtggcgtcggccccgggcgtgctggacgcgctgacggccgcgctgcgctcgggcgacgccgcgcaccacgcggcggccgtggtccacagcctcctctgcggcggggagccgcaccgcgcggcggtttgcgagcggcgcccgctcctggccgcgctggtggcgctcctccgcgcgccgccgcacaggccgggcgccacgcgcgccaccaaggacgccctcagggcgctgttcggcgccgcgctctacccgcccgcccgcgccgcgctcgtctcgctcggcgccgtgcaggcgctcttcgcgctcgtgctcacggacgcgcgcgccggcgtcgtggaggacgccaccgccgtggtcgcgcaggtggccgggtgcgccgagagcctcgaggccttccgctgggtctccggggtgcgcatcctcctcgacctcgtcgagtcggggggcgccgccacgcccagggcgcgggagaacgccgctgccgcgctgctcaacctcgtcgtggccggcggggaggccgccgcggcagatgtggtcgcagtcggcggcgccgaggagaccgtgcggttgctcgccgaggacagcgccgccagcccccgggggaaggccaaggcggaggcgctgctgcgcgcgctcgaggacgccgccgccaggaggcgcgagcaccgcctagctgatttcctcgacgggctcgtgcagtccgatccctacatctcgtcgccggcgtcggcgtccacgcacggctagtcaaaggctgatgattctggtttgagtttggtttgacgaccgacaacttcctcttctttcttcgttcttcttcttcttccttgtatataaaaaacaacatcttttatgtagtgtagcttggctagaaaatactaatcgtatttgttgattgatgcaaattcttcctgtgctgcgtgtcgtcaactttgtgtaaaattcgcccaaactctggctacattcaggacttcagatgagagcaaccgatcgattaaattctgcatcacatcatggccactagcatctccgttctctgactgcccatctctgcatcacaccatggccactagcaaatcacagggtaaaaagagagatagagaagagaatgtatggtcgcaattcaaattgcaaatactctatatttagtttaaggggtcgtcgagactgcttcaccccatattgttttaagctccactttatgttttttagttaaacaacattacgtaattctggtctatgaaaattacaaaaccatgagctcaagaggcgttctctataaactctaaactttttttatgaagctgctctgaaccttcttcttttttttaaatggagcagttccaaacaactcataattaattattagattgaatagcaccgagaattttgcaggtgct

SEQ ID NO: 25359 - DNA, 226 bp, Zea mays
  unsure (1)..(226): unsure at all n locations
  Clone ID: MRT4577_123131C.1
atttcgacttgcgtactcaatcaaggcaactttctcgaccactcaaatgctgccgacaaccgcggccngtgttcgcgccgccgtcgaccacggccggcccctgcttctgcccgagcgagccgcacgccatgctcatcctggctatgacctacatgcggctgcgctagctgatgtcctgcactcgcacgtgcagtggtatacgagaggccgtcacgacggacccgct

SEQ ID NO: 25360 - DNA, 114 bp, Zea mays
  Clone ID: MRT4577_123132C.1
gacgattgtgcgcccaaaagtacgcacacttgtgctgacaaagggccggcaaatcatcgctaaccattctataagctcaggcggttgacactcttgactgcccaacaacgccac

SEQ ID NO: 25361 - DNA, 548 bp, Zea mays
  Clone ID: MRT4577_123133C.1
taaaaaaaaaaaaaaaaaaaaaataaaaaaaaaaaaaaaaaaaaaaaaaaaaaaaaaaaaaaaaaaaaaaaaaattataaaactttatttgttaaaattttttttttcttttttccctttttgggttactttttgggccttttctccccccgttgggggggtccccttttctttttttggtggccacttttcccttttttggtgggccctttttatttaactggggcgacgtttttaaaccttggggtttttgaaattctttgggcttttcccctttttttcttttttgggcttggtgcccttttcctaagggccggtacctttcgaatattccccccatttttactttttttaataactttttttccccctttgtttttggggtttaccctttgggggttctttttttccgcccagtttgagggttccactccccaggccccttccccttttttttttccttttctcccctttttttgtgttttgccttcccttttccccccgaatgcgggttttcccttccagcttttaggtttggggtttctttt

SEQ ID NO: 25362 - DNA, 1489 bp, Zea mays
  Clone ID: MRT4577_123134C.1
atggattcggagaacgaaaagctccgtaaagcactggctactctgctcagagttgttcaaaagcgtagttgtgacatcgttgatgtcatcacatcagccttccagcctttcaactcacctttggtcgacgaattgaaccgagcactagttgagattgacgacctcgccaaggatattgtagacggagtagtgcaaactcactggcaggtggaaaatatggttaagagtcctgtgaaagaacaaccacgccgagaggaaggaggaaaggaccttcgaatcgatgatgggtaagaagacgagctactgatagactaagagtcaccagttaactatgaagaccttgtggcctaagaggatggtcgtgactgctcacccgacgacacagatccagagggtagtgatggaaacgaggtgatgtctcactatcgtcgcctacttcgccagattgaagaaaagccaattgctagccaatgttctgaatttccagttgtcgggccaccgaagggctcaagcacaccaggtgtttctgaaatgcctgcacaaagaacaaagctagatatcttcgctgctttagaggactcaaggtgtaccctttttgctggatacatgatggcagtccttcgacagaatcctagtggactcagtgacgcagacaagacatcactggcagcttctaggtttgcagcaattgagaagaagcctttccactttttacactgttgggctattcttaaggaccaaccaaaatggatggacaaccacatgggtcaacaacaacagcaagccaacgctaatcccacacattccaacactgtcgatttggatgctgaagaatctgtaccatcaagcttcacatcgaagaggccccttggtcgagatgcttcgaaggaaaaggcaaagaggactaaatctgtggacacatcttcatcagattctgagtttatgacacgcatgggtgatctttctttggagcgcctgtcagtgtacaaaacagctgtttcaactgaggaaaagaagttggattcaatgaacagaaatgtgaggcagaaattgctcctagaaaagaagcagttgaacctggagaaattaaggctcgaaaggcagaaactaaaggaggacaaggaagaggagataatgatcttaagcatggatttgagcaaatgtaaccctctactccgccagtactatgaagccaagcaaaaagagatactggcaagggttactgggtctacttcatctggccagtgatggttccttacttaatatgtttgtttgtcatttatgaatgaggcgtagtcggacttgtttctgtgagcttgctgtcgtcagaccctaatctggtttgtacaagattttttaggtcttctttgaactatttgttttgaagtatttgttttgaactatttgtcatggtttgtacctgaatgttttactatatgtgttgaactatttggtttcattaactgtgagcctggtgcagtttttgttt

SEQ ID NO: 25363 - DNA, 389 bp, Zea mays
  unsure (1)..(389): unsure at all n locations
  Clone ID: MRT4577_123135C.1
cctatgcctgcctccgacgcctctaccgtcgcttataagccggctaatacagcgatggatataaagatagatacgtctgcaccatcctctgcgccgtcttggtcaccgtgtcgctcaccgtggaggtgcccgctgcggctcccactaggggttcctccagggtctcctccgcggtcgcagccgccgtcgtgggctccgtcttggcgtacttctttgcgtgctccgttggctgaggcgccggatccggggccgttccggcggcggcgggggcttggcctgggggcgcgtgtggtcttctttgcgtcgtccggtcgcgtgggccgtcgcgtgttcggtggcctggttcgtgctggcgtncctgctctggttcttgtgggcggtcttgcttt

SEQ ID NO: 25364 - DNA, 245 bp, Zea mays
  Clone ID: MRT4577_123136C.1
gagtactaaggctagctatctagggtacgcattaagagacgtgtaacggatgagtgcttggtccgtatacgctgtcagggctcaactaggtaaagcggtacctcatcaaccagaattggtcctaccagattgctctccacggctcgtgtctgctcgagctatgccataatcgaaagccctttcatacagtactgtagctcggtcgaagatcagcacctgtcatggcacagggtctactttagagc

SEQ ID NO: 25365 - DNA, 466 bp, Zea mays
  Clone ID: MRT4577_123137C.1
ctagtccttgatttatactcttctagagatgaaaaagtgttgccgctgccggagtactttaacctggtagatacggagacgacgctcaagacgatcgaacgttcccgatgaggagtcaaggcacctggatgagcgcctcatcgatgtcattgttggtcactcattcctcctctaacacggtgactgcacggagagcttcaaggagtttgacaacgacaatatttgtggcactgtctacgttctcatgtagatgttcgtcgtgctcaccttcggcacccaaatgcccatggatcgtgatcaagtaatcccattgtgaaacccaattttacaaaaaatgtataaattaattaataaaaatgcattgcatttatgttgaaaaaaaaaaaaaaaaaaaaaaaaaaaaaaaaaaaaaaaaaaaaaaaaaaaaaaaaaaaaaaaaaaaaaaaaaaaaaaaaaaaagggggcg

SEQ ID NO: 25366 - DNA, 330 bp, Zea mays
  Clone ID: MRT4577_123138C.1
tgcaggtctccttccgccggcgcggaccagctggagggagtttatcctggagccgtcttcctcctcgcctccttttgcgagcgcaggcgcggaggccggagtcgcttggaggcccaactgcgtcagtggtgatttagccttgtatatgttctggagccataatgaatacgaccggagtagagatcattcgcaacgaccagggtaaccagaccacaccctcgttcgtggccattaccgactccgagcgcctcatcggagatgcggccaagaaccaagtcgtcatgaaccccatcaacaccgtctttgatgccaagcgtctcattggcagga

SEQ ID NO: 25367 - DNA, 431 bp, Zea mays
  unsure (1)..(431): unsure at all n locations
  Clone ID: MRT4577_123139C.1
cgagtacaagcttttttttttttttttttttttttttttgttttttttttttttttttttccttttttttttttttttttgtttttttttttgtttcctttcttgttttttgcgcgtcccccctgacgcctcttcctctctggtcctccgcgcggggccacgtttgtccttccgctcgcnttggtgtcccttggttgctcccctcgcaccctttttgaacccacccgctttctctggctccaacccagcaccgagattcttgatgcattcttctgtgcgggacacatatgatctcttgccaaatggaggttgctcctgttgacggnctgtgtccgccttntccccccccttcgcggctgtgtcatcaacgctttcgtcctcaccccctgggcgggtggattgccccaatgtctacctccccagaccttggg

SEQ ID NO: 25368 - DNA, 342 bp, Zea mays
  Clone ID: MRT4577_123140C.1
aagacgagctcacaggactcaatcaaattgaatttcaagctgtaattgaaattgaaaatgattcattttaaactgtattaaaaatggaatttcgcatgtttgagataaattatgaaaaaaaaaacaacaacaacaaaatgacaaaaaatttctcttttgaataacaccaaaatatattgaataaactttaatggaaagcagaacaaagaaatgaaaaaattaatgtaaagtagacatttacatgtctttagtatcattgcaaataaaaaaacaattccgaaactttttaaatcagaaatgtaacacacaatttttattaagattaaataaatcaccgataag

SEQ ID NO: 25369 - DNA, 720 bp, Zea mays
  Clone ID: MRT4577_123141C.1
cattgggtacctcgaggccggccgggatggaagaagcgcatccgccgtgccgtgctcgccgcccccattttgaagccgtcgctctctctcgcggtctcacactctcacccaaggccggcatcccgctcggtgactgtgccgttcatttccgccgcgtacacatatctaacagggaaccactttgaaacttgaatatattggcgttgctatagtggagtaacatggccttctgcactatgtataccattcatctgtccgtcatagttttgttggcagtcacctacatgcatgtaccagttactgctatcatcgttgttccaacctctaattgttatacatttgataatgaaagccgtcttgttgattttacacatctgattggaaatgttttcgaatataaggaacagggctcacctcgctctgatttggttgtcgaattctgcaaagatgtgcagaaaagatctcaagagggttaccttgaatttggacgctttgttagtcctcactcttttctaactggttcaggtcctattgactatattcagaaaatgcataatgggagatttagtgcactgtgaaactacattccacaagatgggtcgtacagcacaggtaaacatcatatgtggacattgctcgaacaaagtgtgcaaagatgaacaaggatgcatttgcaacatatcttaccatgaacgaatggtgcagggtgattgtcgaact

SEQ ID NO: 25370 - DNA, 494 bp, Zea mays
  Clone ID: MRT4577_123142C.1
ccgctgtacgacccatgcatgcctgtatttcagcagaaagcattatttgaatcaacggagatctctggacaagctgttgtacgttacacagcacacaaacgacatgttacgctttagttacaatatcctatctccgctcttttttatttatggacgccgagctctaaaataaactagcgggcgacagctattggacaaaacggagggggaggtagtacaacgcaaccatggaacgcacatgatttacggggtctccggtgctccggatgggggtccggcagacctgacccgtaccagctgatgggatcgctggaaccctttttggaaggctgcccgcccttctggaagtactgctggtgggactactcagtaggataggaacctctggccggcaggacctccgtgacaaaaggacagctgccactgcttgtagcttctcgactgcgatttgcgcgccagcgtctgttgctctgccctgtagttctggatacccg

SEQ ID NO: 25371 - DNA, 943 bp, Zea mays
  Clone ID: MRT4577_123143C.1
gccgcggtgagttgtctgcgcccctcttctaccgtcgaatttgtgtgcttctccggctccccccactccggccgttccgttttgccgaagctagaaggtagctctcctggtgagtgcgagtctccgtcgccccccaaagcccaagccaacccatcgccgcaatgtccaacacgacggtcgacgggtccgacagcgacgccgacgccctgcgctccgcgtccgccgttccaggcgaacgaacctctaggtgacgcgtttgccgtcgaccgacgtcgccggcggtatggacggccatggccttgtgtgcatggacgataaagcccatttggccacatccatgcatggactccacggctccaccccaggcgccgacgagcaaccccgctccgtgcgaagctccaccttcgcacgttcgatttccccttggtttgctgtgttgttttgagcgtacacatatctaacaggccttctgcactatgtataccattcatctgtccgtcatagttttgttggcagtcacctacatgcatgtaccagttactgctatcatcgttgttccaacctctaattgttatacatttgataatgaaagccgtcttgttgattttgtatccatacaatcacgctcttcactatgcaccatgtactttgaaactagatgaaattctttcatgttgctctcctaagcagctttcagacacatctgattggaaaatgttttcgaatataaggaacagggctcacctcgctctgatttggttgtcgaattctgcaaagatgtgcagaaaagatctcaagagggttaccttgaatttggacgctttgttagtcctcactcttttctaactggttcaggtcctatcgactatattcagaaaatgcataatggagatttagtgcactgtgaaactacattccacaagatgggtcgtacagcacaggt

SEQ ID NO: 25372 - DNA, 291 bp, Zea mays
  Clone ID: MRT4577_123144C.1
gcaaggttatttgggcccctcatgttccatgacagcgggatatttaagttcattggatcagtaccgagcctggttttttcaagaaaatttggaggtttacgatcgacactgactcattaaatttttcaggtcccggaaaaggaccttttctgaggggtaccacaaataagccggggtttttctaaggccattgggatcaaaaaaggggttcaaaaccaacagggggtggattaccgttgggacaagggacccttgggtttaccctggaatttcggaccggttcctgggggg

SEQ ID NO: 25373 - DNA, 355 bp, Zea mays
  unsure (1)..(355): unsure at all n locations
  Clone ID: MRT4577_123145C.1
tgttatatttttttgtgggggggggggtggatgttatanaaaanaattttgtaaggttatacaactgctcgcgtttttttacttcggctttggcggacagaccacgacgccgtcgggagctgcagccagtctctgatgctgtgagagaggcagaagccttccatgtgagtgaccaagttcctaaaaagggccggccagcaagacctagcgaggctgggggaccacgcgaggagtgctgcagttgtggctgctggtgtgctaggtctgtttgtgggagtgcctggggttttgcgggaagccggggggggcgtggccgntcttcggggaacccatgtttagtgcctttggcaccgaa

SEQ ID NO: 25374 - DNA, 252 bp, Zea mays
  Clone ID: MRT4577_123146C.1
tgaattaggaaaggctggatctgatcttctagcgtcatgttatatgtgtatggaaagaaagtgtaaaggcaaccatctgcctccaccttgtggcccatcgggttgaaatttgcatttgttatcagataatttgcttagagttgaggggatgtgccttctaaaacatgctactttctgtcctggataatgttgtgggcttgtggcggatattgtcaactttggcagctgaaattttaagaatgttatcctgtc

SEQ ID NO: 25375 - DNA, 607 bp, Zea mays
  Clone ID: MRT4577_123147C.1
ctagcagtggtaacaacgcagagtactttttttttttttttttttttttttttcctttttttttttttttttttttttttttttttttttttttttttttttttttggggtttttttaaaaaaaggcccttcgggcaaagaatacgttcttccccgggattcaaggcttcttcaaacattttttggaacagaattagggggcaatgggcggggggcgacaagcaatctcagcagatccccatcgggttcttttcctataaccgggggggcaacaaaggtctctacccaatcccagaacaaattcgtcttccacattctgggagcgaattagcggcataaccccggaccgaccctctctcgggctttggggccgcatcttggccccggcacgtccattggaattcccccgggggcccgggctcccccccggggggccccggggcccccggcccccggcccccggggaaccccctgggggcccggcgccctggccttgccccccgcccgggacgccccccgcggccctgggggcggcgccccgggccttggccgcggcccccggcggggggcccccccgcggtttgggggcgccttctccgcccccccc

SEQ ID NO: 25376 - DNA, 405 bp, Zea mays
  Clone ID: MRT4577_123148C.1
gaactcttcacgaacagaaaggagaacggcgcctgcctacccgatcggatcccagactctcacttgcccatgccagggagtgtgtgaagcgtgcagatgaccacagccgcggccctcacgaagaccaccgactctctcggtgcgggcgactggatctgcggcgcccccaagaacgagagctgcttgatgaagtcagcgcagcatatcaagacgtgcctccgcggctgctacatgctcgagccttccggggtctactgttccgacgaatacgaccgtcgcaggcgcttgagtgaccctcgacgttctcgctgtcagctcctggctcgctgtcgaaggggacgacggacgcctcttaccgacactacgccttcgagctctacactccgggacgagatgtgcaattca

SEQ ID NO: 25377 - DNA, 141 bp, Zea mays
  Clone ID: MRT4577_123149C.1
cctctatgggtgggggctctagcaccgcgagtgatagagagcacgcgtttattcccagatgctttgccattcccttttctcaattctagctcgtcctatgcgagagacggaatgctctgagacatgacgaatagctccccc

SEQ ID NO: 25378 - DNA, 562 bp, Zea mays
  Clone ID: MRT4577_12314C.1
ggttcaccatgtaccattggctggtcagggacattgttgggccattagcacaggaatactgagatatatctagtgtttgtagttttggggtgaactcagagaagttgaaggtaacgacttggcttgcgaatatcagctgatctgcactcgggaaatatcagagagcttgtgcagaaaaggtaacagttatgggcttatggcagatgcagtagcatgagatgtcttcataattgttgtgtacatcaggttcagtggtacccccatcgtcaagctggatacgagtttggaaaaggtaactgtaaatcgagaaaattgtaaattgattagtgagctcactgcagcaatagttgttttcctacgtttcatctggttattgttatgaaccacggaaaggatttccggttttgcggtatgggcacctcagttatagttggtctagttatggtactggcggtgcatgatcgtgtaagtgcttcagagtttaggatatagttatgaagcaagaagtatgttatatactgagtaaagattcaatgattgatgcaaatgaagcagtatggtt

SEQ ID NO: 25379 - DNA, 471 bp, Zea mays
  Clone ID: MRT4577_123150C.1
aaaaaaaaccaaccccttttatttgactgccgctagccattccaaaggctaccttttatattctcaagccgcaaaaaaacagaatcctcggcaattgggtgtggaattctttcttcagagtcctggattggttactacgcttggacctggacagcttcacggcacaaaggttggacgtggaatctactatccagtcatgggggagcggtgcccagtgaccctcctgcctcaccacctatagtttctgccattaagcccaacgctctgccagggggggggcttccaacttcctcaccacctcccacatctttgatctctccaaccgggacccctgcgtgcagaggacggccacctgaataaggttctccacctcgatctttttggaggccttctggggagctgggtccaccaacatgaacacctttttgttattgagcctccctttgaccctttcaagaggcataacataat

SEQ ID NO: 25380 - DNA, 323 bp, Zea mays
  Clone ID: MRT4577_123151C.1
ggtccgacattcccgggccgcgccgaagccggcagcgcttcatggtcgagcgcggattcttcaggcagtgcgccctgaacgtcgtcgcctgcgagggcgtggacagggtggagcgccctgagacgtacaggcagtggcaggcgcggaaccggcgggcggggctcaggcagcttccgctggatccggacaccgtgagggcgttgagggagaaggtgagggagcagtatcacagggactttgtaatagatacggatcgagattggatcctgcaaggatggaaggtacgcatactatacaccatgaagacatgggttgtggatgac

SEQ ID NO: 25381 - DNA, 303 bp, Zea mays
  unsure (1)..(303): unsure at all n locations
  Clone ID: MRT4577_123152C.1
ccgggcaccgaccacccccaccgacacgaacccgccagtagtccccaaccacggggggggccagccgagatcgccaacgcggcggcggaggcagaccacaaccccaacagcacccggcaccgagccgcgctgtcggcgcggcaagaccacgagcggcacgagacgcagaacagctgccggagaggcccgccggaggccaagaagaagcacaggggcggggacctcggctgtggcgncagcaagcgcaagctccacagggcaaccgagaggagcgacgacacagaagcccagagagggaacgcc

SEQ ID NO: 25382 - DNA, 455 bp, Zea mays
  Clone ID: MRT4577_123153C.1
aaaaggggaaggggccccccacttttatgggcctttattaaaaggccagtttactgacaaaaaaaaaccccaaaaaaaagacaacccggtcccaggcccaaaaaaaaatgcaagccctttcaaactttaaaaaaaggggggccaaagcccaaacaaaaaaaaaggttgtttggggggaaactgtacccaaatttttaaagctgcttacaaaaggcatcactaaaatttttgggggaactggttaaaaaacaagggaaaaaaggcttttcccattttggaagtggaaatgcaaaagggaacagtgggactgcctggccaatttgttgactggcccaacggggggtttggggcggaacattaaaaaagggcctgaaaacgccccatgcccccttgggtggttccattttaaaacccattttccagggaaaagggaccttgattacttggaaaatttt

SEQ ID NO: 25383 - DNA, 429 bp, Zea mays
  Clone ID: MRT4577_123154C.1
cggacgcgtgggccgtcccgcatctaaggcaggaagatggtggccgcaaagaagacgaaaaagtcgctggagtcgatcaactctaggctccaactggttatgaaaagtggaaagtacgtgctggggtacaagcagaccctgaaaatgatcagacacggcaaagcgaaactggtcatcctggccaacaactgcccggctctgaggaaatctgaaatagaatactacgccatgttggccaaaactggtgtccatcactatagtggcaataatattgaattgggcacagcatgtgggaaatactacagagtatgcacactggctatcattgatccaggtgattctgatatcattagaagcatgccagaacagactggtgaaaagtaaatcatgcaaaatttttctttaataaaactggccagagcttgtttt

SEQ ID NO: 25384 - DNA, 118 bp, Zea mays
  unsure (1)..(118): unsure at all n locations
  Clone ID: MRT4577_123155C.1
cccggggctttctttctggggaaaaccaagnaagcaaacatanaagcttgaactgagnaanatgtaggtaacaactgggaaaaaaataggcctgatatgcagtataagatgaagaaca

SEQ ID NO: 25385 - DNA, 420 bp, Zea mays
  Clone ID: MRT4577_123156C.1
aagcagtggtaacaacgcagagtacgcggggttcagatattcatttttccatgaaaaaaaaaaaaaaaaaaaaaaaaaaaaaaaaaaaaaaaaaaaaaaaaaaacaaaaaaaaaaaaaaaaaaaaaaaaaaaaaaagtcctctgcgttgttaccactgcttaagggcgaattttggggagatacatcacactttttgccgttcgaccctgcatttagggggcccatttccccctatcttgagtgggtttcccacttaatggccgtccttttacaaccaacgtcctgaataaaccgtggctttacctaacttaatgggcttgctgaaaatacatctttttttagcgggcggatttatgaaaaagcctgccccgaccgcctttccttccttttcctcaccctgaatgaaaaaagaaaggccc

SEQ ID NO: 25386 - DNA, 525 bp, Zea mays
  Clone ID: MRT4577_123157C.1
cttcccctcgcgcaccgttcctgagtcctgtccaccctgccaccgccgacgccgcggcggcgcagcaattgtcaccgtacgctatggcccgtatcaaggtgcacgagctccgggcgaagagcaagacggacctgcacgcgcagctcaaggagctgaagtctgagctctccctcctccgcgtaggcaaggtcacccggggtgtaccccagaagctctccaagatcgaaggggtgcgcagctcgatcgcagcgtgctccagtgatctctccgaaacataaatcggggttgcgggaggcggacaataacaagaacctgctccccctcgaactccggcctaagaaggacccgggcatccgccggcggctgatctaggaccagatctctctggagaacgagagggaacacgagcggggaaaagacctccccctgggggaggatggtaaccaggcctagggcagaactgcgaaatgctgcgcttaacataacatccgctggggtctaatatttggcctggatggacatttg

SEQ ID NO: 25387 - DNA, 276 bp, Zea mays
  Clone ID: MRT4577_123158C.1
caaatttgtggccttttaggcgggagttaggcgaccaaaccagtgagagccccaatccctgcagttttgtggcttcaagtgtgggtcgacagtcctaatggggatctccagctccttcctgtgggctgccacagacagctacccccagaagggtcaatgttgggagtggttgtggctctgagctgctctacagagcttcagtgtgagaggatcgagccattgaaagctcattaccagtaggacataatttttggctctccctattcacaaccagtg

SEQ ID NO: 25388 - DNA, 1805 bp, Zea mays
  unsure (1)..(1805): unsure at all n locations
  Clone ID: MRT4577_123159C.1
ccgttgggttagcttcactcatagatggtcggaatggtcttcagaagtgagaggcggcagaaagatcgcatgtgagttggtctccccacattatacactcctgacagccattaactctgattgtctggacaatccaatattccggaatgtttgggtgggaaacaaaatggggggggagctnanatagggggagggactaatccttatgaagagtgatggaggaatcaaaaggggcaaatatctgactgactggaggttggtgatattatattgatatgagataggacagcgttttctatccaagttggcaagactgaaggaaaccttgacattgctgaaactcgacggtcttgagatcaattgttcttaggtcactacaccgagctcaagaacaattgatctcacatgctgcaatctcattaccaacaatgcgcttgattcaatagctgacaactgtaagatgcttgaatgtttgcggttggaatcatgctctttgataaatgagaagggactagagcgaattacaacttgttgccccaaccttaaggagatagacctcactgactgcggagtagatgatgcagcacttggctaaatgctctgaattgcgaatattgaaattaggcctatgctcaagtatttctgacagaggcattgcatttatcagttcgaattgtggaaagctcgtggagcttgatctctaccggtgcaactctattactgatgatgggttggcagctttagcaaatgggtgcaagaggattaagttactgaacttgtgttactgcaacaagatcactgatactggtttgggtcacctaggctccctggaggagctcacaaaccttgaactgaggtgcttggtccgcgtaacaggcattgggatctcctcagttgcaatcgggatgcaagaacctgatagagctggacttgaaacgagctattcggttgatgacgctggcctgtgggcccttgactcgttatgctttggaaccttagacagcttacgatatcgtactgccaatcacggggttgggcctgtgccacctgctgagctccctgcgaatgcctccaggaccattaaagaaggtgcactctcatgggtctcaaaangaagggtttgagaagggctctgcngagcaacctgcggggaaggctgnaagaaactgaaaaagcccacgcgtccgaagaccgtgctgtcccctgaactcatccagatgctgcaggcgtgtggctgccgaataagatgggtcaacaagcctcttgtctacaaggactagaccacctgttcctcatcgtttgtgcagtttcagcgctgccatggattgccaagagcccaagacctaccaggtttgccctgtgagccatgtgagatgttctgcaataatccttgtgagatattccgcaataatcgttgggggcgtaacatatctagcggcgtttgtcggctctgctccagtgtatgtacactgaggcatcggttatgtacatacacggaagtgggatgatccacttcctgggatttgtttagtgtgtttgttacttcattccgcatggtttgggcctttgaagttaaaagaatcagatatgatccatgctttggttctttcttacttttggctgacactaccttatctgataatatgtatatggtgttctgtttcatgttatgaggtgttcaaacagcagtgggtctatgaagacattgtagtctttgtcgaatggtccatgttggggacttgttctcaaatgctatgagataagaacaatgcaacacaaaaaatgttaaacgttaaaaaannaaa

SEQ ID NO: 25389 - DNA, 268 bp, Zea mays
  Clone ID: MRT4577_12315C.1
ttctctttggtatacgcggcgggtcagccgcatatgatcctgtatgacgtcgagactcactttactcggagccggggcacattgctaacagtggagcgttaggcgaccaaatggccggatggtgctactgccttcttaggctgtacgacatcgggcgatgttgtctatgaacagccactggtcaagttacgcgcaccagataccacatggcatgatcagttgattgttcttgagatcctcaaccatgtccatgacatagttgaacacc

SEQ ID NO: 25390 - DNA, 303 bp, Zea mays
  unsure (1)..(303): unsure at all n locations
  Clone ID: MRT4577_123160C.1
ggtcnttttagtattaaagatgttttctatatttttatgaccccgcaccacaaacgccggcgggtttacattcaaaagttctacaaccttctttattgacgagctgcctgccaatgttgctgaccttctttcatcaatttcaagaaaaaacaaatcaaaaaagggttgtaaggaacctcgtaaagcttgattttgtcgaaatacccttggaaaaggggttataaagaccgttgggtttctatttttaaatccttgtcatccacaatttgtgattttttatcctttataccatgttttggaatt

SEQ ID NO: 25391 - DNA, 553 bp, Zea mays
  Clone ID: MRT4577_123161C.1
aagaaccggtgaatgcaatgcatcgatcataccccttatgattctttcatctcaagattcgaatcatgcgaaatgaggtaacaattacacactaactaatcccataaaatgggatcattctactgcacgctatatacacatgaacattaccggtgcctccgtttgcatacacagatacaccggagcagagagtgacaaatggcgcaagaagtgccccaaaggcaccataaccacatcttggggacgggagcttacgcccccaacgattattgcggactcacaacgtgagccagggcaaacctgcaagatcttgacaatacatgctgatgctgacactgcacacacaatgaggaacacgagtctgtctagtccttgtagacaagaggcttgttgacccatcttattcggcagccacaagcctgcagcatctggagcctaagtgacctaaaccagtatcagtgatcttgttgcagtaacacaagttcagtaacttaatcctcttgcatccatttgctaaagctgccaatccatcatcagtaatagagttgcaccg

SEQ ID NO: 25392 - DNA, 193 bp, Zea mays
  Clone ID: MRT4577_123162C.1
agttgttttttttttgctccagcaccaccagcagcagcggcggcaccatgagctcgtatagttacgacccgtattacactccgtacaagcgcagggtggtggagagcagcccccgggttcacatcaggagcagctatgtctctcccagcagaaccacttactctccgctggtttccaccactatgcgccgaag

SEQ ID NO: 25393 - DNA, 589 bp, Zea mays
  Clone ID: MRT4577_123165C.1
ccggccgggggcgaaggtctcatctcacggtctgaatcaggttccagacaatgtgatgagcacagagagcagccaccgtgccagtgtcagggggttggcttatcgcccacaacctggccagtcgtcaatgcccaattacgatctctttgccggtatctggagtatattttctcaaacgtgatgtcgagaatcatccatgcaagttgcaactatccccaagagctacaagaagcggtgaatataaacttttgggcgactgcaacgagcacgattgtccatccaagacactgatcaaggacaagatattgtaaagacagtgcgtctttgtgtcccgcaataattagagttcagaggagcaattgagaagccttcgcatgctttcaagggagagaagtgatgatgcaatacaagatgcagcgggcagattaaggaagccaattatgtcaatgtcgctcgcactaagcagaagggtagctaaaactgcctcgatctagccctcccatttgcattacaattatgaaaaaactgtcttttttattgtcaaatgaggaggttaatttcgacgaaaaaaaaaaaaaaaaaagcggcc

SEQ ID NO: 25394 - DNA, 1454 bp, Zea mays
  Clone ID: MRT4577_123166C.1
tacccattgggtacctcgggaaaggccggactttattttgcgaggagggggcacaacatctcaggcctccagtcttcgagtcctcgttgtgcctctcttgatctcctcgcgtccatggctcctgtgcgaggtgccaagaagaggaagcggccggagaagcccgccccggcgcctactccagggttgccgctgccgccgctgccggacggtagcgattggtggggcgtcttctaccgaagggttgcaggacattccccttttccaagagaacaccagaacatggagtctgtcctgaagatgtcaagaagaaccttcgactacatctgctcacttgttaagaaggacctgacaacaaagacatacggtttcagaaacttcaggtttggtgacaagaaagtccttggggtggaggatcaggtggcggtggctctgatgaggctgactactggtgagtcgctgcagaacataggaatgtggtttggcatgaaccactctgccatctcgaacatcacatggcggttcatcgagtccgtggaggagcgtgccatctgccacctgaaatggccgagccctgaggagatggcgaccatcaagacaaggtttgacaaggtttacgggctccctaactgctgcggcgccattgacaccacacacatcctcatgtgttcctcggctcagcccaacagcaaggtctggctggacaatgagaacaaaaacagcatggtgctgcaggccgttgtggatgcagacttgcggttcagagacgtcgtcagtggctggcctgggagcatggacgacacgtgcatccttcgcacttcaggcctgtacaggttgtgtgagaagggcctcaggcttggggggcagatggagcttcccggaggttccgcggttagggagtacctagtcggagatgcaagctacccgctacttccctggctcatgaccccgtaccgggaacatggcctccaggcggccaaggtggaattcaacaagcggcacacggccgcggcggcggtggtgcagaccgcattggcgacgctcaaagggaggtggcgtgtcatccagggagagctgtggaggcctgacaaacaccggctgccacggatcatctttgtctgctgcttgataaccaacatcatcatcgacatggaagggactccaagcagagacgaactggtttcaggcaaccatgaccttggctacaagcagcagttcagtgacgccgcagatgacaatgcaatcaagcagagagacgacctgtctcggcatgtcgacaatgcaatcaagcggagagacgatctgtctcaccatgtcaccgccggcgagtaaacactcaccgtcaccctttgctttttgcacccattaatataaaaacatggatacaaaattgtaaggtgaatttttggcagattccaataatgttttggtttcagggagacatattaccatctttt

SEQ ID NO: 25395 - DNA, 364 bp, Zea mays
  Clone ID: MRT4577_123167C.1
cttccgttcttcaatgctgaacatgctctcaatctcttttgggggggccatggccgcctacggcaaggggcgcttcaacgtgcgcggggtcgccctgaacttggttgccgccgccttgaaggccacccggttggggctaatccaaatcctgctaacatccaagggcatttccttaaaccttataacctggttttactacgtggggccgggctgcctttgtttcctggtggggccctgggtcttcgtcaagctgcccaggctaccccccgtaggcaccttccaaccgaattttttcgcttttggaaccaactaactttgggcctttgggctaaaccttgctgggttcctgctagggggcaaaacc

SEQ ID NO: 25396 - DNA, 199 bp, Zea mays
  unsure (1)..(199): unsure at all n locations
  Clone ID: MRT4577_123168C.1
tccccaactcgccgnctgccttctgcgcctccatttcggcctctgtcccttgcaagctcaatcctccctccacccatgggtaaagagaagccccacctcaccattgtgctcattgcccacgctgactctgccaagcccaccacccccggacacctgatctaccagcttgcaggccccgccccaccgctgtgctccacag

SEQ ID NO: 25397 - DNA, 292 bp, Zea mays
  Clone ID: MRT4577_123169C.1
ggaaaaaacggggcgggccacacgtacgcaacaagcaacatagaaagtacaattttgttccaacaatagcacaacaaagacggcggggatatatacactccgtgcgctccccaatttttgttcatgtaacgcttacgccacaattatccctcaatgctaacacgctcctatatcttccattcttcccccataccttccatcaaatatatcttaaccctatgaatacccacctcttcatccctctcggcttcaacacgcaattcacgattccaacatacctttattaccctcc

SEQ ID NO: 25398 - DNA, 366 bp, Zea mays
  Clone ID: MRT4577_12316C.1
gttgaaccaagccttccgttccaaccccaacttccaaaggccgcatattcagccccgcccccatttcctattaaccggattgcccctgccaaataagggacccgttaattccccaactttaaaactcgtcatctccgcgaatgttgaacctgtaaaactaccttttttaaaaagcatctcactggagagtttgaaaattaatatggaccaaccattggtattgaaattcatccgttagatttcaacactaacctttgtaaaatcaaggtctacttcttggataccctacggcaagaaaaatttggtggccttaaggattgataccatattcattgccaatgttccatcattatgcttgatgtaacc

SEQ ID NO: 25399 - DNA, 793 bp, Zea mays
  Clone ID: MRT4577_123170C.1
cttttagtctcctcctatgtttttatgaagaaccatttattaaagtgtgtatggtagttgtgtagaagggatgaccatggcaaacatgataggactgatcgtactcaagacagggcaaaaagcaattaaccagtatctctctggccttaaggaactcaccttcaaaatgtgatatttcagttatgttgtttaaaactttactaggctcagatagcatgttgttttgagtctctaatgtctctctctcacacacattcatacttactgagtatggtaaccttagttattttaattcttggcttaatccttttcctgaacaaggttcagacatatatactataggtgtcccaaatagcggcacatacaaatggaataaggttaatctgattcgttaaaaatcataagattcttttttagatttgcactcccatatcaacttaaaagtaagcgtgctatggataataactacaatcttgccttcatatattattatcgaacctatgtgggtgtgcaacttgcatccgtttctggtttaatgcagagacgagattgaggagttgaggacatgacacatgaggtctgtaactaagtatctctcttatctctattatgtatttaggcattcagattcttttttagatttgcacttccatatcaacttaaaggtaagcgtgctatggataataactacaatcttgccttcatatattattatcgaacctagttgggtgtgtaacttgcatccgtttctgtttaatgcagagacaagattgaggagttggggacatgacac

SEQ ID NO: 25400 - DNA, 270 bp, Zea mays
  Clone ID: MRT4577_123171C.1
ctttttctcccgtttgtcgcggtcactgtccttgttgtaaccaggggctaactattcgtcgtcggcggggaagcattccaatacacactttaggggtccataaatccatatcgaggagttggcttggacaaaattatacatatgggaaatgctatcaaagaaaaagggctcggatttttaagctaaaaaagtcggtcccattaattgaaaacccccttagggtcaatcgtgcctttcttcagaccttatcctagctccgctttcgttagg

SEQ ID NO: 25401 - DNA, 329 bp, Zea mays
  Clone ID: MRT4577_123172C.1
acgcgtccgacgatgccttcgtaaggtggtgatcccgggataagaggatgacacctcaatgattacttgaggacaaatttaaggtcggtaagaaactgcggggaatggacattgcaagatgtggtgtggtataagataggcaaaatgtgtgattattttttgtccgaggttatcaccccccttgccccagacaagatgataagatgtcaatgtaacaagccgtctgagcttctgtaagtaaatgactgttgctgcatgccccctgtgtacatgtagctgtttgagcagaattccgtttgcatgaatcgtgtgatcaccagccagggatc

SEQ ID NO: 25402 - DNA, 809 bp, Zea mays
  Clone ID: MRT4577_123173C.1
aaaaacaaaagtatgacaaaatcagtgagaagaaagtgctaacctcaattgaggccctgtgtaaatcttatccatcagaatttgttacatatttccattattgccgctctttgcaatttgaagataagccagactacagctatttgaagaaaaattttcgggatttattcatccgtgaaggttgccagcctgattatgtatttgattggactgtatcaaggcaagctgcggacaataacagattgcgagtatgtctgctccttttctggaaattaccagtattgctacttgctagattcgctgtactgaatgtggtttgtcactcactgccagctgagtgggaagacaggtgggttggtgggaccatctgtggatcgggctgaacgagctgcaggtttgtcagtggcgcttatattgaaatcttacatttaggaaataagcaaggtggaagcctggaggctcaaattttcatattatctctttaacagcaaaacaggatgttccacatagattcactggtccagctgatgcattggctaaaagaactggctctggttctggtcattatggagaacacacaaagcacagaactctgttggattcccttatggcatccaatatggtgagaactccaattaaattctattgatatttattctggatacttggtgaattgatcatataagtactttgtcatgcaaacctcatgtttagacgataaatgagacatcctatgtcttatgtttgctggaaaagtcttgtggtttgtactcatgattcatgaatgtggcaggggagggccaatatga

SEQ ID NO: 25403 - DNA, 277 bp, Zea mays
  Clone ID: MRT4577_123174C.1
ggcgacccacgcgtcctttttaatacattatctacaattttttatcaatggctgccaagatatatgcgaagcgtattctccttgctctttctacattttttgctaactcaaccatttttcctcatttctcacaaactcctatatctgtccttctttccccatacctttcatcaatgtaccgttcattatgataaaacccatccctttaaccctacattgctccaacaagcaatctcaacaagcatcttacctttatcacctcttgtttttcaacaat

SEQ ID NO: 25404 - DNA, 541 bp, Zea mays
  Clone ID: MRT4577_123175C.1
aaacgcggtcttcctccctgagacgcacgcaccgcacctcaccgccccgcgtcgcgagatctcaaatccccgatccgaccccaccggcggcgatggccggcaaggagctgagcgacgagcaggttgcgtcgatgcgggaggccttctccctcttcgacactgacggcgacggccgcatcgccccctcggagctcggcgtcctcatgcgctccctgggtgggaacccgacgcaggcgcagctccgcgacatcaccgcccaggagaagctcacggcgcccttcgacttcaagcgattcctcgaactcatgcgcgcccacctccgcccggagccgttcgaccgcccgctccgcgacgccttccgcgtcctcgacaaggacgcgtcgggcaccgtctccgtcgcggacctccgccacgtcctcacctccatcggcgagaagctcgagccccatgagttcgacgagtggatccgcgaggtcgacgtcgccgcggacggcaccatccgctacgacgacttcatccgccgcatcgtcgccaagtagtg

SEQ ID NO: 25405 - DNA, 266 bp, Zea mays
  Clone ID: MRT4577_123176C.1
ccctcgcctagtgctcagcagcggccgatgcatactcgttcgcgtccgtcggttcgggcgtatgtgctgcacacgatgaactctcggttgccgagcctctagagagccatggctggggctctgcagccgtcgtgccgactggcagctgtcgcgtgtacctagctcgattagcagcagctatagtaactgagcgagggcgtacatcaagcggagtcggccagctccgtctccgtatgcgaatctgagtcgcgcactcgtgatcttga

SEQ ID NO: 25406 - DNA, 146 bp, Zea mays
  Clone ID: MRT4577_123177C.1
acccacaagatggtcacaccgaacggggcttctgcttctcccatggtgttccccgtctacctttctggggtgttttcccagcatggcggggatgatcaggcttaaggtccagggatatatgccgttcaacagaaccatgttttcag

SEQ ID NO: 25407 - DNA, 583 bp, Zea mays
  unsure (1)..(583): unsure at all n locations
  Clone ID: MRT4577_123178C.1
ccctcctcgagntttttttttctttttttttttttttttttttttttttttttttttttttttttttttaaaggcaaccggagggaacaaatttttgtttaaaaagggtttaaaaacctttccccccttttttcggaaagggaaaaatggaaaataaccaaacaataataaggttggaccaaaacccgggcccaaataacatggcccatttggggaacagggaccaaaaattggaaaaaatttggaccaaaattaaaccggaatttggggggccaaaaaaaaaaaaccaacgtggcccgtaatttttaacccttccccttcccctggttttggaacggaacacggccgtggggcccagaaaccatccctaatttttcttggggggggagggacggcccctaaaacccaagttgcccgttgagggtttttggaaaaaagtggcccccctggaggggcaatttccccccgttgaacggaaggttttggggaacctgggagagaaacggaatttcgaccgtggaacgcggtttaataaaaaaaaagtagggacccttgaccttaaacccccccccggggaacccgg

SEQ ID NO: 25408 - DNA, 373 bp, Zea mays
  Clone ID: MRT4577_123179C.1
cggctcgagcatttatgctggacattcagcttattgtgatcctaatgtcaaattcactcctgaaatcattgatatccccggtggtggcaaaatcggaatgcattggggaacttatatcgataaaagaaatgtcgatgaaaagaaagctgttatgattgtcttacctggtctgactgcttctgctagagaaccttatgttaagaatattgtcagtgaagctatggagaatggatacgaagtagttgtttaccataaccgtggaaatgatgttgaaatgacacttcctgaaaatggcttttttgaaccgatagatgatttcaaggtcgctgttgagtacgttcaaaagaaattccctgatcatcaaatctttgct

SEQ ID NO: 25409 - DNA, 277 bp, Zea mays
  Clone ID: MRT4577_12317C.1
aaaaaagggatttggggttaaaaaaaaaaaaaaaaacgggggcaaccaccttaaaaattggggaaaaaaaaattacaggtgggggcaaaaactcgtaaatgggcattaaatgcatttatataagggggaggctttggtacctacttgaactaaaattacaaagcccattagggtttattgcggaaaaaatttcggaacaaaaacgggaaaaaaccacaaaaggggctgacactaatgggggggttttgggtttatcttctgaagggcaagctaaagg

SEQ ID NO: 25410 - DNA, 649 bp, Zea mays
  Clone ID: MRT4577_123180C.1
gggtacctcgaggccggccgggtatgatcctttgtgtgatgctgagaaggaatggtcttctaaggagctgcctgttgcttgtggaaatttcagagttggaagaacactcttgactgaagacactaagatgttttctcatgttgtctcttggacaaaaggaaggaagaggaacagatatgagatttatcctaagaaaggcgaagtctgggcacttttcaggggatgggacatcaactgggtttcagattccgacgatcataggcaccatgattatgatattgttgaaatcacctcagactttgctatgggtttaggcacttatgtgattcccttggtaaagatcaaaggttttgtcagcttatttgttcgatcaagcagtgaagcaccatttctgatacctagtggcaacacccttagtttctcgcacagcatccctttccacaggttggtggaaaatggcaggcaacatatcccaaccggtgctcttgagctggacactgcatcactaccttctgatttggagaaagcgtttactcctgtgaacctcgacaacagttttatgagcaccggaagtggtagtactccatgcaatgtttcatctactagctcctgtgaagtgccggttggaaagaccgaacagactcaggat

SEQ ID NO: 25411 - DNA, 267 bp, Zea mays
  Clone ID: MRT4577_123181C.1
atctgctctttaaaattggagggacaacaaatcattccaaggtacattccttttttaactatacaacaaccaaacgcacctttaaatctcaaaaccatacaaccaccataaaagtaccatcctatctcaaactaatttaaataaacccccccaaatctaactattattaaaattctccaaaattacttggccatccaaaaactttaccaccccaaaaatatccacataaccttttttaccacctttctttacttttcagccacttcc

SEQ ID NO: 25412 - DNA, 298 bp, Zea mays
  Clone ID: MRT4577_123182C.1
gttctagatcgcgagcgaccgttataaatgcacatagagcccgcacctcgttggctcggttgttggggccttcgtatcacatgatactaagtatcagaaaagctttggcgcataacaatagaagtgcaccgaagtaagcttcgtcacgatgacgtaagaaagcgacgtaaggaaaatgtgttatccaagctgctaagagcaaacgacaataatatctctgtgatatttgtaaactttatatgtaatctatgagggcataaataaaatatcgtacgaagctgtacgactgcatataact

SEQ ID NO: 25413 - DNA, 363 bp, Zea mays
  Clone ID: MRT4577_123183C.1
tgggatactgccggatatcgtcaacaattgttccagatcggagtattggatcaaatgagagtgtcagcaattgcttgttaaaaaacaaaaaaaaaaaaaaaaaaaaaaaaaaaaaaaaaaaaaaaaaaaaaaaaaaaaaaaaaaaaaaaaaaaaaaaaaaaaaaaaaaaaaaaaaaaaaaaataaaaaaaaaaaaaaaaaaaaaaaaagaacgaaaaaaaaaaaaaaacaaaaataaggtacgcttttttaaaaatccaataattattcaatagggtaaccaaaattaaatttattgaacggggatttaaaacttaataactgggaaaacttttaaaaaaacccaacttagggaaaaacctgg

SEQ ID NO: 25414 - DNA, 131 bp, Zea mays
  Clone ID: MRT4577_123184C.1
gttggaaaacagttcaacttctgtagtccagaaaccgtcagggaggaagttctgctcaccctcacaccgtgttaggagactactgttatttgaccaatgaattgacttctaataaaatctagtggtgatgc

SEQ ID NO: 25415 - DNA, 685 bp, Zea mays
  Clone ID: MRT4577_123185C.1
gctctcagctgctcctcaccctctgttcgttgtctccaacgccccagtctagctcgcccctgtgctcacccagctcacgtctaactcccctgttgccgacgaccgtgtgctctgctcgccggatccgagggcaccgtcctcgaccctgcaatggtgtcggccgccgcagcacctgctccctgcacgctggccgcccctgctcgtccccatggcgtccctcgcctccctgtagctccagctcgcgctgacgccgtcgtttctcagctccacaggctcgcatctggacgtgcctctacagcttgtcttccttcgccgctcggcctaggatgccgaatcccatgcctctctctcagctcgttcatcacgctacgctggccatctgggcgtccccctcaacaccgccgttcgaccctcgcctcgtcctcacgattgtggtcggctagtgttgtcctcctcgacctcaccgtggtgctcggcctcgccgtgctgctagatcatagtgccatcggctccttgtccggctttaacctcgcagtcgacctcctcctcatcacgcccaactgctctccagcgtccagctcctgtccgcggcgtcacgcgccgtacgtctctctctctgctcgacccggcatgggctctcgccgtcagccaagtgcctggatgctcgtgctcgagcatctgcagc

SEQ ID NO: 25416 - DNA, 302 bp, Zea mays
  Clone ID: MRT4577_123186C.1
aagatgtctaagtttgttatatttttcctcaaaagtgttaaacaatttttaacttacattgcccaaaacaaatccggactacctgccaggtgtttcctgttatcatcaaaaacaattaacctctctcagcttttggaaaaaaagaacaaacggccaaataaagggtcacagctcccataggacccggggattccctaagatcccaattccacgggggtaagaccccacctaccaatggggccgaataccactaaaaaactcccgctatcttatcaaaccaggccttgagcccaaattttaaa

SEQ ID NO: 25417 - DNA, 308 bp, Zea mays
  Clone ID: MRT4577_123187C.1
cacaaatccacatgcatttgtacactttttggtggattacattagccggatttacatccactgcaaaattacaaggtggctgcccacctcggatcgaagaaaaaaaaaacggggaaaccaccccctttactttaccccctgcgcgcattctctacgagcacgagcaccacccgttcaaacaaacccttcgccattcaatccctggggaacgatgcaagccacgcgggcggtgcattcgcacattacaccccgccgattgaagaaaaaatccttaccctttgggcccttaacggggcccccgggggacc

SEQ ID NO: 25418 - DNA, 205 bp, Zea mays
  Clone ID: MRT4577_123188C.1
aaaagataataagaggaaacttgttttattggtaataaggagccacacccgatggcatgtcaactcattaggggggggggggggccgtatcttttctggggggacttcctccggggggggggggggagctaccttatccactctccaacccaagcttcgctcgcccacctgccgcaagcccgtgcgctatattcaacgtcaaagg

SEQ ID NO: 25419 - DNA, 686 bp, Zea mays
  unsure (1)..(686): unsure at all n locations
  Clone ID: MRT4577_123189C.1
aattcggcacgaggaacaaacagaacctttaaagtgccagaccgccgcatccgccgccactagcggagactgccccgccgcgctttctccaagttcagctgacggccgccgtgcctactccaggccccgccgacgccctgtgaagaagaccctggttgcgctggcgcccatcgcgagcaagaagctctgaaactcgacggcggagcctcaagctcgtgcgccgaagttcattctttcgccctgtagaaacaaagggcagaaattggctaggactatcctggccccccactggccatggcgtgtgctgcttacagcatcagaagccctctcaagctcgctgtaaggcacggctcggatgtgttgagtagcaacaacttgtgcaatggctttaagtcttcggtgtcttacctcaattctcaacgttggagcagcaactgctcatccgtcacaatgcggcatgtcgcatcccattgtcactcgattgttaaggctccagcaatgtggccctcaaaagcttcagcaactgatgcagccacagcttccgatgagaggataactgtactggtcattggtggtggangcaaggagcatgctctttgttatgccttganaccattcccatcatgtgctgcagttctatgtgcccctggtatgctggtattgctcaatcccggatgcacatgtat

SEQ ID NO: 25420 - DNA, 160 bp, Zea mays
  Clone ID: MRT4577_12318C.1
ttgacaacaacggccgcaaatggcggaattatgtgtatgcttcaaaacacgatttattagtccgggtacatctcatatagggtctggacgaaacgtatactcatcgagaacatgcctctgtctcttgtccattcacattcatgcccatcataggcaaact

SEQ ID NO: 25421 - DNA, 437 bp, Zea mays
  Clone ID: MRT4577_123190C.1
cggacgcgtgggcggacgcgtgggcggacgcgtgggctaggaagagcgcatcatgaagcgtgcgtcaactggcttgcgcgtcgattcttgtcttgaagttgaaatcttggcgcgagtgtcgacctttaatcaatcgggcgaagttttttgctcactgatcagcgacttctgttagattgaactttgaagtgcgcacgcactgccctgaagccttcgggtccgtgacgatgtctaggagagccgcagcagcgcttgcgctcgcgtgcctcgccgtgctggcggcggcactggcggacggcgcgctgctcccgtggttcggcgaaaggaggcgcgggggcgacaaggccgcggcggcggcggcgtctccgctgtccggccccggagtgggccttctggccgatccgttccggatccctgaacacgttctcttgggcttc

SEQ ID NO: 25422 - DNA, 313 bp, Zea mays
  Clone ID: MRT4577_123191C.1
gtcggcacacattttgctacggtgttctacgcgggatttgctgtctgtgtttctctttcattgtcttccatgtaggtttgatctacgcgccgccctttcattttggttcctgatgctttcttccatgattccgcttgcggttcgcctgatcggtattgacgaggaggtagtatgatggcgatgacgaaaaactatggttcgctcgtctgatcggcggcggggtttaatccccactgccttgctgagcttaaaagtagttcgagccactcgtttccttcctctgaacccagatctggtccgcttttttccgata

SEQ ID NO: 25423 - DNA, 175 bp, Zea mays
  Clone ID: MRT4577_123192C.1
gctattagagggtgaccgctaaatgaccaaagactgccgtcttctccatacgtaccaactaaccggcattgcgccagcgcaaaaggacacacccttcatagcagtgaacctcaacgcggacaccaccgatatcttgcacgttaacgctggaagacattggccaacggaaacgcta

SEQ ID NO: 25424 - DNA, 362 bp, Zea mays
  Clone ID: MRT4577_123193C.1
ttgcagcaccaagaagcaggattcgtttggttatgatggaaccgagaacaaagccggacgggggtaacaggacccatcgatccgcaagccatgctggttgatgcatgggtctgctggagccaaggatgaacactgcactaacaactgactcagagcgtcctgcaatgaaatacacagctgggccacaccaaacacgaggccaacgaagatcaacactctggacttgggtaaacaacacgggggcgaacaggataacttggccgtgcgggccccaccactcaattgctccagtccgcctcggcattgccgtaaacgtcgccacggttggcagcggcctagccggcggcaccagcaccggatcc

SEQ ID NO: 25425 - DNA, 654 bp, Zea mays
  Clone ID: MRT4577_123194C.1
ccccgcgtccggtcagcgattcctactcgagttggagttcgtgcagtgcctcgccaaccctacctacatccactgtactgtactgtcctccattctcttgtttcatctcaccttgttgggattagctaatctgatgttgcacgcatctatagaacgttttcctgtaccggtttgttaccaattttgataggggctgtgctgctagtaactagcaatccattgcaacggactgaaaatttttgtagaagtgtgtgtttgtcagtaagtccctgcttgagaagggagctaggagtgcttaggaatttttagtactagcctaaatcccattctcccctattcaaactggtctcgtctgcatgggcctcatgagcggtttcttatcaataggatatgattgctaagctaaggctgcgatattgttagtagtgttgcttgatatcatcattttgtgtgcctcatggctccttgttttttacttgaactttcttgttcaatgcacatcatgtttggtactgcatggatgatttgaatgctctttcttttcccaaatagatctagcgcagaatagatatttcgaggatgaggcatttatcgggtacctcaagtatctaaaatactggcagcgacccagagttatcaaatacataatgtatc

SEQ ID NO: 25426 - DNA, 318 bp, Zea mays
  Clone ID: MRT4577_123195C.1
atcttatccccgaaacggagctcaaacaggttgtttttggtttaaaatccaatgccccagtttccacaacacacaccaccagctggtcacccacagcacaatggttgtcgacaacgcaacctaacgtttaatgaggtgatacagcgttacttgcagacattattgctggcgacactccaacaccaaccccaagggcccagctagagaaacaagtaaatgcattgacacccgacccgaggccatccattgccatgctatccatagattagactgaacgttccaaccaccagtcatggttcatgaccgttcgtatggagg

SEQ ID NO: 25427 - DNA, 1819 bp, Zea mays
  Clone ID: MRT4577_123196C.1
aatgcgttttttttttttttgttttatgaatagcggagcccccccttggattttttttttttttttttttttttttttttttttttttgccaaaatgtcaactttgtattggggccaacgggcatatgtatagtttatgaacagtacatatttcctgctgccaagcaatatgctgaaacattaaggtaaatggtatgatcattcaggagaatgctgacacctaaagtcacgtgtgcaagttcatgcgacatggagtatttgttctaacttcactctaagtcagaagcttccattctaaaaactcacgaaccctcaactacaaggccaaataaccagcactaaaacaaaaggaaataataaggctcctgaggcagcaactgtgctcgaatccggcagtgtccgttgaaaagttgcgcaagaacttcaattagcccatcttcctttttctattgtccatagcatttctcatgtcattcttcggcatattagtgcctggagttcctacaaactgcataggagacattgcagatgcaccacctgctaccacaggtggcatagacgatgttggtgcaggaacaggtggagctacaggtgtcggcacggacgcttgtaggggcaatgtagcaggtgcctgtgaaggtgcaggttcaggaggagggcgcggtatgatgtgcttcagtctgttattcctgtagtttttccagaagaaatattgctgcctatgagcaagctccttgtttgttggatgtgccattgcatttcggaaattggcattttggagaagctcaagaaagaaaaggcagtgtggatacattatgtatttgatatactctggtcgctgccagtattttagatacttgaggtacccgataaatgcctcatcctcgaaatatctattctgcgctagatagtggatgtaggtagggttggcgaggcactgcacgaactccaactcgagtaggaatcgctgactcccattgtcagggtccttgtacggcggcggcttcccacccacgccagggttctcgacgtcggacatcggggttcaatcggttgaaaccaggggcagatttggcgggcgctcttcgccggcaaacagatcggagaaggtctcggcagtcggcacctggcgtacggcggcggcggtagccgaccccgagagagaatgaccggatcttggaaagagggagtatcgacctggactgacgcactgtcagcggtgcgagccaggcggcgaacggacgagaggaggtgccgtcggttcccgctatttgggaaaagaaagagcattcaaatcatccatgcagtaccaaacatgatgtgcattgaacaagaaagttcaagtaaaaaacaaggagccatgaggcacacaaaatgatgatatcaagcaacactactaacaatatcgcagccttagcttagcaatcatatcctattgataagaaaccgctcatgaggcccatgcagacgagaccagtttgaataggggagaatgggatttaggctagtactaaaaattcctaagcactcctagctcccttctcaagcagggacttactgacaaacacacacttctacaaaaattttcagtccgttgcaatggattgctagttactagcagcacagcccctatcaaaattggtaacaaaccggtacaggaaaacgttctatagatgcgtgcaacatcagattagctaatcccaacaaggtgagatgaaacaagagaatggaggacagtacagtacagtggatgtaggtagggttggcgaggcactgcacgaactccaactcgagtaggaatcgctgaccggacgcgggg

SEQ ID NO: 25428 - DNA, 1241 bp, Zea mays
  unsure (1)..(1241): unsure at all n locations
  Clone ID: MRT4577_123197C.1
gccaaaatgtcaactttgtattggggccaacgggcatatgtatagtttatgaacagtacatatttcctgctgccaagcaatatgctgaaacattaaggtaaatggtatgatcattcaggagaatgctgacacctaaagtcacgtgtgcaagttcatgcgacatggagtatttgttctaacttcactctaagtcagaagcttccattctaaaaactcacgaaccctcaactacaaggccaaataaccagcactaaaacaaaaggaaataataaggctcctgaggcagcaactgtgctcgaatccggcagtgtccgttgaaaagttgcgcaagaacttcaattagcccatcctgcgatgaagatgtatacatatcatcagccaaactgtagttttatgaaacattcatatcacatttataagctctgaagaaatatgcagattcagtcacagctacaagacgttcacatttcaattgactagtctttatccagtctttatttgcacaatggaacgaataacacttggctcaatatgcattgttgacagaacttcagaggaattttactgggataatgggccaaagatcagagaagtaaaagaagtatttctccaccgtcttcaatgaagaagagcaaccaaagtgaatggggaagaggatatagcatccctcagaaaaaacatgttgagagtctcaatcatctttcctgtaaggaaaggagaatcttcatgatctatattggaagagtggccataaatcaaactgaattggatcatgtccttcgaaaataatagttcaccaatgatttcatagcacagacaaaatagcaaggaaagaaaacaatgcatggacaaataacttcataaaatgactgttggatgattgcaagggaggtggtgcatacttcctttttctattgtccatagcatttctcatgtcattcttcggcatattagtgcctggagttcctacaaactgcataggagacattgcagatgcaccacctgctaccacaggtggcatagacgatgttggtgcaggaacaggtggagctacaggtgtcggcacggacgcttgtaggggcaatgtagcaggtgcctgtgaaggtgcaggttcaggaggagggcgcggtatgatgtgcttcagtctgttattcctgtagtttttccagaagnnaaatattgctgcctatgagcaagctccttgttgttggatgtcccggccggcctcgaggtacccaatg

SEQ ID NO: 25429 - DNA, 297 bp, Zea mays
  unsure (1)..(297): unsure at all n locations
  Clone ID: MRT4577_123198C.1
ttccacgcgtccgcccacgcgtccgcccatgggtccttttgaatcttgcgtctcttggcagagttgntttcaacacagatggcattctctatcctgacagcgtagttggtactgactcacacaccactatgattgatggtttgggtgttgctggctggggggttggtggtatagaagcggcggctacactgcttgggccggcaatgagcatggctttgcccggtgttggtggcttcaagctaactgggatgttacggagtggtgtcacggccactgctcctggctttacagtaacac

SEQ ID NO: 25430 - DNA, 1022 bp, Zea mays
  unsure (1)..(1022): unsure at all n locations
  Clone ID: MRT4577_123199C.1
actatcctgtgttgtctctcgggatcgagggatccccattgtcactccctccaatccccgttgcgtcggccacacctcttcctcttacgcgttacacatcttcctcttcctctaaaattaacccagcgactcgaccctgcgaattcatacgcgcgcgcgcgcgcgcgtgcacgtgcgcaggcgcggctggtagcctgcagacaccgacacgtagcaagcggcgtcccgtcttccatcttccatggcggcggcgagctatgatcggttggccgtcgcggcgtccgctgtggtggtggcggcggtggcgctggcggtcgctgggctgccggcggctggagcgctcggggtgaactggggcacgatggcgacgcaccagctgccgccggccaccgtggtgcggatgctggaggacaacggcatcaggaaggtgaagcttttcgacgccgacgccggccccatggacgcgctcgccggcaccagcgtggaggtcatggtggccatccccaacaacatgctcgacatgatgacggactacggcacggccagggactgggtgcgccagaacgtcagccgctataacttcgacggcggcgtgaacatcaagtacgtagctgtcgggaatgagcccttcctgtcgtctttcaacggcacgttcctgaacgtcacgttgcccgccctgcagaacatccagcgcgcgctgaacgacgccggcttcggcgacaccatcaaggcgacggtgccgctgaacgccgacgtgtacaactcgcccaaggacaacctggtgccgtcggcggggcggttccggcccgacatcgccggcctcatgacggagatcgtgcagttcctgaaccagagcggcgcgcccttcaccgtcaacatctacccgttcctgagcctctacgacaacgacgacttcccgctggactacgccttcttcgacggcacgggcaggcccgtcgtggacacggcatcacagtacaccaacgtgntcgacgccaantttgaaacgctttgtgtcgggc

SEQ ID NO: 25431 - DNA, 362 bp, Zea mays
  Clone ID: MRT4577_12319C.1
gaaaacaaataaataattaacaaaagatacccaatataatttattatgcatcatgctgggattttatttggggtgcattttgtgacagcataaaataatataaaagaaaagaattatgttaaaaatccaaagtggaatataaatcctaaaggaaaattcaggaatctagaaaaagagaagaagggaatcaactatgcaaataaaaataaatataaatataaatatgtatattatttttacacggatctgagtttataaaattgactcaaagttgaatttcataacatgactctaattcaaattagggattcaattgaaaagaaattgtttcaaacaaattattattttaaaaaattattttt

SEQ ID NO: 25432 - DNA, 787 bp, Zea mays
  Clone ID: MRT4577_1231C.1
atgcagtataaattcgtctatcatctctctgttcctctctcgttctcttcctcgccttcctcagcgccggcggagctgctggtagctgacaattggtatcaaaggtagttccgatcgagggcctagctcacttgtactacacacgccgcgccaaacactccggagccatggagccgaacctcaagttggcgattgaggagcagcccaggatcttgcgtgacatctctgaccgcctctcggcgcaggattcgcgctgggcagcgctggaatcggtcgtcgcccggcaaacgtcttccatctagcagctggagaccgccgcactccaggttgctgctacctctgagcgcctggatgcggtcgaatcggcgacgacggcgttcgagacttggcgtccatcggtggaggcagcagtggatgacgtcaagtactccgtcgaccgcctctgcgacgacttcgccaagttctctgcatcagccctccgatctgcgccgccaggcttcagatctgagatgggcgtcttgggtccacgcccaccaaccacggagcgcccgtctgctaccgtctgcgcggccgacggtcctatggggcatcgcgatgacttcaaacgtcgggagactggctttgggcatgtatttacccgaacccacctcccgcacaatggtatgcccgatttcatgctccatacacccacccgtctatatggccctcctcctgatgcattcggtagtcatgcacatggatcccagttctctccctacttgggccatttacctaaagtcattttcct

SEQ ID NO: 25433 - DNA, 147 bp, Zea mays
  Clone ID: MRT4577_123200C.1
aattacatatttcattatgcttgcagttctctgttacacctttgatcttaggcaaggcatgtttcagaaatttaattggcattatcttgttgtagtcccatcttaaccgagtttgcgtcgttgcaataccttgcagcttttactttt

SEQ ID NO: 25434 - DNA, 407 bp, Zea mays
  Clone ID: MRT4577_123201C.1
atttcaagttgggattaaaaaaatccttgtctgtcccatgacaaagcataggtctaatacccggctgtgatcgcggttgttctgatatgtgctactatgccactgtgtatggatggaccaggggtttgggggttttctcgacctgcatgagaagctcttaatataatgctcagggctatcttaccccccgcatgtccagttttttatatgtttcatgcggtctaaatttagtgttatgttagttctcttattttcaaggtggtactccccctgttccaaaataagagtcattctcgcttcttgagaagtaaagttaatataaaacataattagtaacactaggtaaatattcgaatgtattttcataataaagttatttggggatttaaatgtggataatattttct

SEQ ID NO: 25435 - DNA, 1200 bp, Zea mays
  Clone ID: MRT4577_123202C.1
cagggggtccctcgaggccggccggggtgttcttaccttctctcctctcttctcaccagcggagagaaagcaaaccctagtccccgtcgtcgccgccggcaacccttcggatctgcggcgagcgccacagcggttagatcgaatccacccagggggagattgaagcccctttgtctgggaatttcgcggggaagcaagcggttggtgatttggtggtgaaggaggctatggggtcgtcgtcgaaggtggtgcggccggaggaggtgctggagtcgctgaagaacgacggcagcatcgacgcgctccgcatgaagatcatcgcccagctcaaggccaacgaagatatgaagaaaaacactatgatgatggtggagcaaagcaaggtactgaatactcctggagctgagaaaaagacaaagagggagttgtttgatgcacttcgacaggaactggagaccccagtccttgaaaaagcctccaaggcagtttgggagctgattctagacaatggtgggttagggaaagagataactgaaacggttgagaaagtcttctgccggctcagtggaatcgacatgatgccacctctgccttcgggcgctggtgctcatcaagagaaagatgacatggccttcgatgaaaaagttgtgaagagcaagggggtggatgcctttgaaccatcctcatcaaggaagagacccttcagcgacgtcaaccgaaaaggtgcaggtgctttacctaatggcagtgctacagaccagcatgatgagtccgaggatagtgaccagaagatgtgatgctctgctctctgctctaatttttagctcaggctgaagtagctttgctgcttgaatgataacaagtcaattgtgatccctgcatattctatggttgtatggtatattggcaagttagactttttctgtttatacaagttctgtgaccaactgctataggatatttgagttttcaaatctgctgctgtgagtttcttcttaatataggataaatttgttgactattactcttgacagttttgtggtatgtttaacttgtaatcattctagagtgttgtaaccatcaagagttataagttagatgcttcttaatcttgcagtattctaaactttttctcgagggagttcattagcaattttctaatggttgcttggtcaaaaaaaaaaaataaatgaccaatgt

SEQ ID NO: 25436 - DNA, 305 bp, Zea mays
  Clone ID: MRT4577_123203C.1
gggattaactttttcccattcattgtctacttacccttgttccttatgatcttgggttgttgtgactttatcggtctgcccagagggggaaacaactccccctaaaaaataaggggggcgacattggaaagcccttaaaaacggccgggccggggttaatgcccaaaaaacgcggttccagaggagcccttttatttctaaaaaccccagcctcctaaaaagtgcgggctggcaaaaaaaaaaaacacccggggccttataaaagggggggagcaccccctaaaaaccccctgtgggaagccccc

SEQ ID NO: 25437 - DNA, 230 bp, Zea mays
  Clone ID: MRT4577_123204C.1
gccttcgaccaagggcgaattcgtttacgccgcggcagggcagcagcaggtggcgcagcggctcggtgcgcggggcgtacggccggctcctgctggacgcgctccgcgccacgggcgacggtcagccgtgcccactcgccgttaaggtggcggcggactcggagcttgcgctgaccgcgcgcggtcagacgcggtggagccgcgccattctgctggccggtgcggtctgc

SEQ ID NO: 25438 - DNA, 496 bp, Zea mays
  unsure (1)..(496): unsure at all n locations
  Clone ID: MRT4577_123205C.1
tcgagcggccgcccgggcaggtctggtctggccgccattcattcaaaaaaaaaaaaaaaaaaaaaaaaaaaaaaataaaaaaaaaaaaaaaaaaaaaaaaaaaaaataataaaaaaaatttttttttttttttttttttaccactctaagggcaattttttggaggttttcctccccctgggggccccttgagcctccttttggggggccctattggccccttttttggccttttttttccatctattgggcggggttttcccacgttttgcctgggaaaacccgggtgttccccttctttttttggctggatgacctccttttttttacagctttggtaatatcgatgagggcccaaccggccccctttttcaaaattttcccccccttgttgggtattgttcccccccttttgcgccttttttacggcgggggttgtggggggtataggcagagngaccacctccgttggcatcgctttaacccccccttcttt

SEQ ID NO: 25439 - DNA, 424 bp, Zea mays
  unsure (1)..(424): unsure at all n locations
  Clone ID: MRT4577_123206C.1
tcttctctttttctncagctnagaagaattaacaattgtctcgattcgaacaaagcaacttgatcctggtgtgtgtttgctcagcaatgagctctgcagcgaaatgtttcgacaccaaaactagttacatgttaagggtcatgtgttttttccatgaaaaatgaactggttcatgcgtgattcctctgcaattctttcattccaaagaggggctaattgttttttggccactccctctggttggggcatgcctgaatcttcaccccctttccccgtttgcatcctcttgcacgctttttacacgaatacccacaggtgttcccctttattaggcggaggactggagccccgtctttgaaaaccggtctaccattctttggcacgaaccgatattgccatgccggacctaggaaccatgccatgg

SEQ ID NO: 25440 - DNA, 349 bp, Zea mays
  Clone ID: MRT4577_123207C.1
gtggactttttttttttttttttttttttttttttttttttttttttttttttttagccaatcaatgttaacctttcattactgcaaaaaaaaaaacagcttgatctcgagctctcaacactggtgggacacatgattccacccaataacgaaacacactaaaaatattttaatctgataactctttacatcaagccaagcccgggagaggaaacggaaaaaaccccaccaacagccgctgcaaacgagggaaaaactgcgctcaaccaccgaatccgtttaaagtgcggccctggcgcttgagggcgtacacaacatccatgggggggacggtcttgcggcgagcgtg

SEQ ID NO: 25441 - DNA, 234 bp, Zea mays
  Clone ID: MRT4577_123208C.1
acacccttccgcgacacccttggccgaacccttggtcttactcttggccgaacccttggccgaacccttggggccatattaactgaagggacgaaactgataacagtaaatcccaacaccaaggtcttgcaggcaatgcagttaataacaaaaaaccgcttaaaaaacatcccggtaatcaacggaccgggaatcctgggaatggtttcaatcggcaacttcttccccccgttg

SEQ ID NO: 25442 - DNA, 301 bp, Zea mays
  unsure (1)..(301): unsure at all n locations
  Clone ID: MRT4577_123209C.1
tcccggggtcgcatctgcttttcangaccccccgccgccgctgcgccgtggggtgggggctgccgtccgtcgaggtaaaaggacagcatggtgagggtcagcgtgctcaatgatgctctcaagtccatgtacaatgctgaaaagaagggaaacgtcaggtcatgatcaggccgtcatccaaggggatcatcaagttcctgggggggaggcgggcgccatngctacattggcgagttctagtacgtggatgaccacagagctgggaagatcgtggtgtagctttatggaatactgaataaat

SEQ ID NO: 25443 - DNA, 360 bp, Zea mays
  Clone ID: MRT4577_12320C.1
caaactaaaccaattttccgtaaaaaggccaagaccacaaagaagattgtactcaaattggaatgtagtgaatgcaaataccgcaaacaagtctctttgaaacgtaccaagcatttcgaaattggtggtgataagaaacgcaagggtcaaatgattcagttttaaactgtttcacatttttgaccaatcattcttttttttgtcattcatatttgctccatctctacccactgtttataaggaaaaattggataattgggccacgtataacaatcaactattacatcaaagattttttttaatttaatgttattagtttaacaaacttttgtttgtttttgtgtatttgtccatttctga

SEQ ID NO: 25444 - DNA, 398 bp, Zea mays
  Clone ID: MRT4577_123210C.1
cgggtcgacgacgcgtccgacaatatgtcccttgtaatgaccagagcaacactaacgcagccggtgaggcggccagcgaagacacggggacctcagatagtaatagtggccaaaaggttgtgatctttgcgcctgctgccacacttaaacaaagtgtgaaaacttcactttctgacgctgttcaagatgctgcaaaagctgcactggctgtataaaacatagaaatggagaaggcaaaagagattaaattggcctcaaaaacatagtctcatacctaatgataagaacatgagcaatgtcctaactctgtggacgcaaaggaatcaagaacggcttgctgcacgaattggccttgatgacaaagaaccggcaaattctgatgatcaatttactcattc

SEQ ID NO: 25445 - DNA, 306 bp, Zea mays
  Clone ID: MRT4577_123211C.1
gtaacacggcgccagcctatttggcaacattcccatattaattccgcatagatatcatcattattgtaacaggcgacattgcgagcccatgtgagaactacgccattttggacttgaagcctcacgagtacacatgctgacttttgcaccttgggcccactggcattttttttaaccatggtagctactactgggcagcggcgaaaaaaaactgcacttctgtggctacgacagccgggaaatcattgggaaccccgcggggtactcccgggccttcctaagcctgaccctgcagatccttggccc

SEQ ID NO: 25446 - DNA, 205 bp, Zea mays
  unsure (1)..(205): unsure at all n locations
  Clone ID: MRT4577_123212C.1
aacgngggagggttacttagctagtatgattgacatactggggacaggacataccacctctaaccaaacacggaaactcaattacagacagactggcagtggttcatccgcgagctgattattggggatcttatattagagaccagggcaaatgaaaggtcgaatttgaaacgtaacctggtcgctcgagcctgataaggacttg

SEQ ID NO: 25447 - DNA, 391 bp, Zea mays
  Clone ID: MRT4577_123213C.1
gggggaagcccggttttttttattttttggtaaaaaaaagtttcagaatttgtggggagggggtttaaaccagccggtaagggggggttttttcattaaaaaatttgttttcccaaaaaaaaaacgcgattgatggggtttcaaaaaatttaaagggcggagtttcaaaaggttttcacctttttttaatggacctttttatttccggaaaaaaacaagggatttttgccgttggtccaaaggggaaattcctccacccttttagggggggatggcctccaaaatggaaaccgcctcggccattttaaggggtttgtggggggggggggcccaaaagcgttttttaaaatttaataaaaaattgggcagaaccggggtattttcgccagtt

SEQ ID NO: 25448 - DNA, 375 bp, Zea mays
  Clone ID: MRT4577_123214C.1
tgtgactctcctcgcttcaaaacccctaaacccgctctatagatatgaccgcagctagcaacttacttaagtgggacaagaatgacactaatacaaagtgatgtccagtgccagggaacgagatattacccctccatgggggaggcggtcaaagaatccagaggatatacaaagagaaccggccggtacagattagtgccaatctaccttgtaaactgctgaggcaaggcctccttgctaaccaacattagctgttccctgagtgatgaaatatatcttctgataaatccctatgcgcctggatcctgaggtttccagcaacaccatcgacatcagaactgcccttgcctgggccaacaaatcgcttgacattac

SEQ ID NO: 25449 - DNA, 301 bp, Zea mays
  Clone ID: MRT4577_123215C.1
gacacgaatacgaaatctaactggccctcgacttaggaagcctaaacccttcatggcgacggaccgtgggtgcctggcaatactgctccacggggcacgcaccctatgcgacgacccttcttgtgcggcgctagactgcgggcgcggcccgctgctggacgggtggaacccgaaccctgacgcgagcgagttgcacatacaggatctaggccggcgggcgctggggcaagccaaacaccaaaagctggccgccgaacggctgaggtttcgccacctgttgcgcggctagcagcacgtcgtg

SEQ ID NO: 25450 - DNA, 329 bp, Zea mays
  Clone ID: MRT4577_123216C.1
ggtttttaccaggctcacaaggacatggatggggacttcgagattctatggcttgggactaatgccaaggatgcaacaaatgagcagaaggcattgatgagcatggcaaggcagataaagaacaggatggcgggcgaaccagctcgaagtggcgcgtagaagcctgcaactgacaaaatgcgggatcagcctgtttctcagcaaaacagctgctagtctagatcgcatgtgtagatcacagtcgtgtgattcgagagcaagccaaacttaaattgggaggtccgtgtacattaagcctattactgtgccaaagaactctacgttatcta

SEQ ID NO: 25451 - DNA, 270 bp, Zea mays
  Clone ID: MRT4577_123217C.1
ttggggctcacggccacttatggggctcctggcgcgcataagcattggtctgctgacagggccaatcaccatgaacaagagggacatcaagactggctaagaacggcgagaattgcaaactgggtcgatgccaagggtgccaccggtgaatgaaccggggtgccgatgatgtgaaccataatgggacatatcaacgctctctgacatgggaccatgcccgaggaccaggccacacctaatgcatggggccacacagggagagggtgcggc

SEQ ID NO: 25452 - DNA, 852 bp, Zea mays
  Clone ID: MRT4577_123218C.1
cctcgaggccggccgggccgggcagcagagcaagaaagccacaaggagatactgcggacgcgaggccaagctcccccgacggcattagagtaggagggaggaggggaagcagagagggacggcccttctcgtcctcgcaccctgtgaaacgcggcccgcgaccgacagcagctcgctcgctgtcatctctcgagatctcaagcagttcgttggttggccattttctttttctttttttgatatacttgctagcttggaagttggtaaaagatgaactcaacacgccgagcttcaaaagcggcaaagtcaacaatcaattaccacaggttttcattagatgagcaccacttatttgagccagatgctttgattaccaaggagcgagatgccaatcatcaatcaaggcaaagttctcaatcttgcagaacatatgcatacagaagattgaccactccccagtttgtatctgcattgtctggaatctggaatcttgttggccagcctgaatcatctggcacagctcaaagatctagtattcatgggatttcgagtagggaagaccctgtgtgctttagcagggaccaacaaggaaatatactgacaccttgctgtgtggaaaactctagtggtctgagatctcaatactgtttctctacaccaaaagaaatttatgaggatcttatttacgtaaagaagaagatgttaacgctgacaccattcaataacattgttggtgcatcatccacatggatgcatatgcattccacaaataaagttgaaggtgcgcattatttgcaatttggaactatatactctgtgcaagctgaaaagatggaaaaaatcgagacttct

SEQ ID NO: 25453 - DNA, 678 bp, Zea mays
  unsure (1)..(678): unsure at all n locations
  Clone ID: MRT4577_123219C.1
ttttttttttttttttgagtgaatacaatattatgtatagattaaagataacataacgaatattacagtctttttacaacaaagctatattaaccatctaaaaatgtttttacaataactactagtcttctttcaagaccttctccgcaacttcattcagcaatttattgatgactttgtcaacaatagcttcggccatattgatgatctcgagtgcttccttcgtttctatgcgtctctcgcgctctgcagcttcttcagcttgttttgcttgtactcgggcgtcatgaatgtctttttctcttttcttaataattttgtgagccatctctcggccaccatttacccagatatcattgtaaaatttcccgcccattaaacttgcttcagctgagggatcatttgtatcatccacggagaagacagcttcggcctgagccagggtcttgacatggtcgcatcccgccttctccaggatggctaaaatttcccttgcaccagaaaacgcgcagacatccccgcgatcacttaaaatttcttcaaaagcttcggcctctccacttatccattcgataacacctttagggtcgcctcgtatgaagttatcttcattagaataggcgcccacattagcgaagctagcctttatcttctncacgtagcccaaggattttttga

SEQ ID NO: 25454 - DNA, 268 bp, Zea mays
  Clone ID: MRT4577_12321C.1
cccacgcgtacgggacgcgtggtcggacgcgtgggcaggtgacgaggctcaagtgtgtgggcttcgggctcggtctgaccatgaaccactgcatgttcgacggcatcagcgccatggagttcagcaactcgtgggcggagactgctcgcggtgtctccgagctcaccgtaccgtcgttcctggaccgaagcgttctaaatgctctcgacccgtccgtgcccaccttaccccaccacgagttcgcctagatccccgacgtcttcgacac

SEQ ID NO: 25455 - DNA, 465 bp, Zea mays
  unsure (1)..(465): unsure at all n locations
  Clone ID: MRT4577_123220C.1
ngagtacaagctttttttttttttttttttttttttttttttttttttttttttttttttttttttttttttaattttttttggacctacgccaaaaaaaaggaaaaacacgcgagggccgggcgagagccggctaagcccgaaggccgggcaccggcgaggggcgacatccggacgcggacagggggccagcgcggcgggcggaccgacacagcccgacggccggggcaaattcacacccgccgaccggtcgccacaacatacgggcacgcaccataaggcgggaagcccggggtgacccaagagagagcccaccgccagcagccgcgcgggaaacaacgccggctcctcggccgggacacccgaaaggccagctgcatgaaggaggggggcagcccccggggagaggcggctcgcgcacagggcggcgttacgcctggtcgatcacggacccggtgcgcaagg

SEQ ID NO: 25456 - DNA, 313 bp, Zea mays
  Clone ID: MRT4577_123221C.1
ttcccgagccgccgcccttttttttttttttctttatattttatccattctttcttttttgatcacaaaaccttaaaacctccgggtgatctttttgtgtggcggcgagcaaaaacatttagttctttttccatacggcttactgcgcaagaacggtaacgagaggactgtggccatggctaagaggctcctcccctctcagaaccagttgctggtcgagaagccggttcaacccaacaataccgcctgcggtatctctcttcctgaaacatccaaaccccttaatgcttctaaaatggctactgtttcccct

SEQ ID NO: 25457 - DNA, 332 bp, Zea mays
  Clone ID: MRT4577_123222C.1
ctttttacgtttcacaggaatggccgtcttgcctctctagttccttaaagacttatcctgagccctatggagaatactttccatgagctcgtactgcaccggtgctatgacgacatgggggcaggcattatcatcctgatcaccaagtcactttcttgacctccgaaactggttctgtgagatcgatatgccttgattgtgttgtttacgactgaagcttgtataaaggcatgacagtagcattaacgagggatgatgatgctagaattcacgatcttctgctagactaagaaattctaacaaagaaaggcctgctgagcgtgttctacttg

SEQ ID NO: 25458 - DNA, 410 bp, Zea mays
  Clone ID: MRT4577_123223C.1
gcggggggggggttgttaaaaactaaaaatgtctttgttattctgggagcccaaacatcagacaaaaactttattattgaactataactcataagaaactaaaaggggcgccacccaagatgggttgttggtaaaacccttctggggggtgagggggggttttttaatggcaacaattgttgcagttgtaagagggggccaacgttaggcgcaacgtgctggtagaacgggaacaactgggggtgtattaaaaagggagaaggggttacaccaactaactggctgaatgggagtagttgttggtggtgtaaataaacaggagagatcaatgctgccaattggttgaatggaaaaaattgttgggggtaggcagaaagtaactgggtgaatgggagatgttggtgttgcaa

SEQ ID NO: 25459 - DNA, 401 bp, Zea mays
  Clone ID: MRT4577_123224C.1
gggttcaaaacaggccccaaaaccattaaactggctgaacaaggggggggggggaagcaacccgcccggggggccccacatccctttttaaaagaggccccccggccagtttttttttggggcgaaactgcatgcggccccggggaaaacaactgggtttattttattgcttcccggggttaaaaacccgggccgggcccgggacgtacgggtaccttggggaggcttattaggcttgggcgccgaaaaacctaactgatcttggtgcaggcgggggacacccttatggggaatcccacggaaaccccccactttccggggatgggggcaacgggccccatgttgacccctttgacccttttggcaagggttttgggggaaggcgcccccccctggggggc

SEQ ID NO: 25460 - DNA, 571 bp, Zea mays
  Clone ID: MRT4577_123225C.1
ttaataataataacgacgatgtgttgccggatgattaggttagggcacggcacggcagcaggacactctggtgggggcgggtgattggatacgcgtgtgcgtgggggagtttagcttcgtgtccccccgcacatgggggggtgctgagggggcgtggtggttagcgactagttagattagtgtcggggttaggccaccaggggctaggctactggagggagtgtgtataattgtgggaagaagtcacgtacacgcacgcgcgcccggatctaaccaagattgcgctgcgccccccacaaaggctcaggcctcactgacgagcgcgcgcgcggggcaccaaacaaatcatgcagccacacctgcacctgtctactgctgctaagctctagtttaatcatggcagtgcttgcgctaatgcctgaactagcggcactaatcaaatctctgtttgctgcatgacacatcatgtggggaatcctactgctcttcgcttgatcttttgctcaatttcttcgaaatcatccccaaaaccaaaaccaaaacaaaaaaatggaggagcttatgagtttct

SEQ ID NO: 25461 - DNA, 567 bp, Zea mays
  Clone ID: MRT4577_123226C.1
cattgggtacctcgaggccggccggagcttcttacttttccgatattcttatcacgtcaagcgctcatggattgctctgggtaccatgcgcttgtcagcctctatttcgtcgacgcgcctcagtccaggcggagataagtctctctgtaatcatgtcctacctgccgggatcttgcctcctctctgccacgcctgtgctaacagttaatcaggttcgccggagcgtcaaccgttcaacaccgcgctcctagtatatgagcttacgccccacacgtggaagtctcctcatgagccataacataggtcctcgcccataccacacacgatctgcacagcccctttgcaatcacgccgattcacctattttcatattgacgatctactgtgttcttgaggatgacgggacccaagacctgatcgtccatgcctgacctgtattttctattgcctggcattaccctagatgatactatacatttcgcattgccaccaagaacgactattcatacccatggccatcgaggacccgccagtcccagtggacgttagttaatttagcgtcaacgc

SEQ ID NO: 25462 - DNA, 812 bp, Zea mays
  Clone ID: MRT4577_123227C.1
tttgatctaaactccagtagtgcctaggcttggagcctgtatccgccactgataccaggtagatgatcaaaggttgacctgatagaggataaggagattaatgtggaattcctatactcagccaagtggaaggaatgaaggattaagggaactgatcagatagcagctacctgaaagttccctatgtttctccttgtcttctccaggtgctcgactccgtctctggtaacgcgtaaggaattttggcgttatatcacacattggagtcactgtggcagctttctggcagtgacctatgtggcgagagtggcgggaggaaacactggcgaggcgtcttttgcaagggaccatccattattgcaataggcagtcaagaagatattgctaaaaatgctctgaaaactcctctttcggataagaaagcaaaggttgccacacttttacttagaagacaggtgacaagaaaggtgccactcatgtggcaaccccacacccagcaaggggcaagacccctacaaacaatgacaaatcaaaggagaaataagacattcaatagtgagatgcctctgtatgctgtctcgaaggcgaagcatggggccaagtgagtcgcagttgactgtggtatacctcaaggaaaagcttgctagccaaggctcctagctagcaacactaagctccagcagtgggatgtggcctgtagcagcaaggatgatgttaaatctctgatcgatccttctttatttgcttgctttcacatggattttagctgagttcagcctgctgtgtttaggatggcttgctctattctgcct

SEQ ID NO: 25463 - DNA, 1889 bp, Zea mays
  Clone ID: MRT4577_123228C.1
tcgtcttcgtgacttcgtctcgtctcgtctcgtcccaaacacgcgaacgcgacacccgtatcgcaccacccaacttttgctccgagatctcctcctcccgtctcatcagtctcgccaatcaatcaccagctcaaacttgtacccaaaaccctacaccggagggagagggatggtcaagaaagccgtctccaccgcgccagcagacgccgaggccgacgagcgccgccgcctccgctcgctcgccttctccaacggcctgctccagcgaggcgaccccgcggcgccgcgggcgccgctcgcgccggcggctgccgtcacgcgcctacagggccgcgacgtcgtccgccgtggcggccagcgaaagagccgctacctcttctccttccctggcctcctcgcgccagcagcctcgggtggccgggtcggagagctcgccgacctcgggaccaagaaccccctgctgtacctcgagttcccacagggaaggatgaagctcttcgggacgcacgtttaccccaagaacaagtacctcacgctgcagatgaccaggtcggccaagggcgtcgtctgtgaggacgtctttgagagcctgattgtgttttctgaagcctggtgggtgggaacaaaagaagataatccggaagagctcaaacttgagtttccaaaagaattccaaaatgatggcacgacagcagactgtgatttcagaggtggtgcaggtggtgccatcgatgaagcaactggaagcaaagctggaaaggaaattgcagaacctcgttccccaaagtttgcatctgatgacgatgctcctgaggattcaaatcataaggatgagaataacacacagactatgagtggaacaccagttagacagtctgctaggaatgcagggaaaaccttgaaaaggtacacagacttatcttctggaggtgaatcgtctgacaataataatgaaactgatatatctgaggacttggatgataaggaggtggagagtccagaaattaaggacgagattgaaagcgaagatgtcaaacccgcagattcttcagcaatttccctctctagcaagaaggagcctcttgttcaggctactttgtctagcatgtttataagggcagaagaaaaaaagagatctacaaggagtcctaaagggtcccctgcaaccaaaggtgctgctgctaagaagcagcgagcaagtccaatggcaaaacagccagcagggatcaagaaggttagcggaactcggggaaagaaaaaaccaaaggtgggagaagatgaaatcgaagagctctcaagttcctcccaggataacgacgcagatgatgatagtgacgaggactgggccgaataatgcgatggtacagacgacggataggttgggccgttggggaagcatatgcataattgatgtgcggctgaagagaaggatggattgggggatggcacagaaactgcctgttttcatggactggtttggctggtcatgtctgacgacggatctagaatatggaatatcctgatctgttgtcaagctgagtccatgaaacgttggttgatgaaacattagttagtcagaagcgggtttgtttgtagttaggaactaggaacacacacacccgaggttgtgatggggttgcatacttggactagccattcccattcatctgtctgtactctgttcgactgttcctttgtgtggctcacacctgttgtgtttctgatggtggtcatttctccagccaggggcaaagaacacactgcgtttcgctgatcctttaattcagacccatagtcctttttttttttcgcgcacatttgatgggtctttgtatcgcagactgtatcatggtatcagattggtttcgcacttgaccccccttctcttc

SEQ ID NO: 25464 - DNA, 2572 bp, Zea mays
  Clone ID: MRT4577_123229C.1
ctgaggggcgtgctaagaagcctggtgagggtcacggaccttgatgaccagaaacgaatcactgaacaatgtaccaagatttatagaagcggagagaaatcggagagaattagtgtgcgtttgtttgggattataatctgtctacattatataatgtaacatctttagacgacaggcggcaataaactggagacaggcagggacagaggaggaaggggatgtttggttttctagggactaatttttagtccttctaatttaatcttttttagtttctaaattgttaaatacgaaaaactatagtgactaaaatggaataaaatggagagataaaccaaacacccccgaagatgggctcggcagttctcttgttctgttcgatcgatgccctctgcctgacactcccagctccttttgtagctgcacacttcactaatctgagcttaactggcagctcagtccatggtaggcccatttgacagcccagtctgtgaccgatttcgtatccttttccccattcgctgagcacgattttgggtttcccactttctctatgtgtcgttgggtttcgtctttacttgtagtaatcaccaactcaagacacaatctttgcaccatttcgcctgccccgtatggaatgcctatttgttattttatcagtaaaatcttgcacataaatactgagttaatatgcttcatggtgcactttgatacactttttttgtttatttaggactcaatccttgaggtgctggcacaggacgatatgctgaacgcaaaggagctggtccaatgggagaatggcttgtcattcaatgacatagcggctaggcaggggattcgcatccgcagacactgccgccccactgcctccttgaaggagatagaggaggagctgggagccccccttaacatcctagagaagatcatttgggacaaggagattgaagtagctgaggggcatgctaagaagcctcttgaggaggtgattcaggctgcaacgaaagcccctccttcaagagacttctatggcgctttagaagctgcctacaagcgtaatggggtgcctgcattgattgctgaggtcaagaaagcatccccgagtaggggtgtgctcagggagaactttaatcctgttgaaattgctcaagcttatgaaaagaatggagctgcatgtttgagcattttgacagatgagaagtactttcagggaagctttgataatcttgaaaaggtgcgcagctcaggagtgaagtgccctcttctctgcaaggagtttgtcattgacaagtggcaaatctataatgctcgctctaagggtgctgatgcaattctactaattgctgctgtgctaccagatcttgacataaggaaatttcttcagatttgcgaagagttgggaatgacagctcttattgaggttcatgatgaaagagagatggaacgtgtgctgaagataaatggagttgagcttattggtatcaatagagacatttgttgttgatacttcgaacaccaagatgttgctcgagaaacatggggatatcatcagggagaagggaattttggtaatatcattgtcttgggtgtatattgatccattaaaataaccttgtcaggttctagttcagtgtgtacactctgtcggctcagacacatagaacacaaataggaatgcaaaataagtgtgttattctctaaagacaaatatgaaatcatgataaatatccatttttaaacctgaaatgtgaaaaggcactggaatggcctgttttccaatttgttggacatattactccaattaatgtatgaacatatatgaaaataagtttctttagagcctaaaggaaacaggaaagatattatgaactgaaattgacaatttattttaagcagatatgtcaacttgtactcgatattacagttgtagtgtattgcatattggctggcttctgccagctagaagcagcacaattattgagctggcttttaaaaagctagaagctagcttctgaggctgccttttggtgtggtgagaaactgaacagtcattacaaaaaccaatataaaaaaagccaggaagccaacttttgagctaaaagacaaatagaccctatgactattaagtgtcataatctggtccttgctgatatatctcttttttcctttgtacttgtcaggttgttggtgaatcaggtctgtttactccggatgatgttgcttatgttcagaatgctggcgtttctgctgttttggttggggaatccctggtgaagcaagagtgccctggacgagccattgttgggttatttggcaaagaactgctgcactgaatgagaggacaaagattgtagtagtacatggtttggtggtgaggtgttagtgctaggctgctagctgttagccatagcatcatttgcagtaatagcattggttttattaataataccaccgaatgtgacatgcagaataaaaataatgttcaataagttccattcagtgattttctttagttcattgacaaacgaatgcgatctgttcatgacagaagatctcccaagctaaatgaaat

SEQ ID NO: 25465 - DNA, 324 bp, Zea mays
  Clone ID: MRT4577_12322C.1
gaacatactgaaagcatccggcttgggggatacgacagcgaattcgcctcattagattggatttggaagacagaccccgtgaacgagggaaggcaacacgctcaccagaggcgcccccgctacggactacaattattgctagccacattacacacgggacgaggatcctccaactagttggtactgttatcacaatgtcatagtcaccaccggccgatctaagaccacctgaggggaccttgacctatatggtgttgaacttgtagggatcacgctggagcagctattactcgggcacagggagcacgcctggcctacacagag

SEQ ID NO: 25466 - DNA, 246 bp, Zea mays
  Clone ID: MRT4577_123230C.1
cggtcctagtatcccgggtccaaccaagccttcggatacggaacccgccaacctcctcccctccgctcccttgtgcctcctcctcctcccaacttttttccccccaaagaaccaatccgaaggcctcaaacctttaacacaagggtcaaccggtaacaaccccaagattaagttttaacaaaccccgccttccaatttccaaaccccggaataaaggcttggaaccaaaccttaacctgcaaaagg

SEQ ID NO: 25467 - DNA, 357 bp, Zea mays
  Clone ID: MRT4577_123231C.1
gctctgtagcgtagtagctcggcatcggctcgatgacgagagaaagtactggtagcagtcagggctcagcagccacatgcatatgctaggagcttggcacgatttgcatcaacattgggggcagttggcagggatgtggcagcacatcgtatcagaacggcactcccacctgggacaagtttcggcgcaagatcggttgtagatggtgagcacctcaaaatctcagtgggctctgcagcatcgactaatcactctctgagcacatggtcacccatatgcatcaagaatgatgatcgtcacagtctgacgtctctatgggatgtatgctgaggcattaatagaatcaacatgctctac

SEQ ID NO: 25468 - DNA, 232 bp, Zea mays
  Clone ID: MRT4577_123232C.1
acccttcttccgcgaccccagcatcccgctcacttactacaacatgctgtactcctatatcgacccgccattcgctatcactatcgacatgcgacacacggactttaccgtgcacgatctcttacaccggatggccgatcagtgactactaggacgagaccgacgacacggttcataacatcatctgttacaacgataacctcattcacagggtcgacatgagccagtggga

SEQ ID NO: 25469 - DNA, 474 bp, Zea mays
  Clone ID: MRT4577_123233C.1
ctggccggactacaagcaccacaagctcaactagaacacgctggctggagagagagagacatgtagaacagatgcacagcgcacacatacaccaccatcagcaagccagatcgctccccgggctgcggtgctgaaccatggcgcgtaacatcttcatccgcgccaacgacaactactgcctggacgtgcgcgacgacaccaccgagctggcccaccacatgccgaaccatcgaccaccagcctgtggtacaaggacatgcactcccgcacgccggcgaaggactagtaaggcatgccgccgctcgtgctcgtgaacagcgccaaggggctgggagtgctgcactaggtcaagcacgaccacccgctgaagctcaagacctttcaccaccctaccagctacgacctgtccaatgctgtggacggcaagcaaggacatgtgcaagggcttgctctgcttccgcatagtcaacaaca

SEQ ID NO: 25470 - DNA, 661 bp, Zea mays
  unsure (1)..(661): unsure at all n locations
  Clone ID: MRT4577_123234C.1
agcgcgggggcgaggnangggacgggngggcgaggnanagaatacccggtgcggaatctcattctcatccagcaccgctcccaccgctaaacccctctcgtgctcctggacggccactgacgccgagtgcgacgccgagcgaggtcgcgactcgcgagggggaaccctagcagcgatagatctagagcgggcgctttcgatctgtccgggaaatggcggaggatcctgccgcggaacaggagacgcggcagctagaggaccggctcagggatgtcggggaacggctgcaggcgccttccgacgacgcggaggacctgctcaacctcctcatcgaagttgaggaatgtttaattaaagtagagcagtcacctcgcgaaagcatatcaaatgctcttcgcccagcaactgaagctctggtcaagaaagagctgctgggccatgctgattcaaatgttagacttgctgtggcatcatgcatatctgagatcacacggatcacggcgcctgatgctccatatgatgatgatgcaatgaaggatgtattctctttaattgtgggggcctttgagcatctggatgacatagagagccccttctttgaaggagaacttcattcttgtactgtgcaaagttcggcctgcggggatgctagacttgatgg

SEQ ID NO: 25471 - DNA, 1127 bp, Zea mays
  Clone ID: MRT4577_123235C.1
aagaacaagaaactgaagagcctcctcgttcaaggaaaagcaaaggacttgataaaagtctagttggtgcaaggatcaaagtttggtggccagatgataagatgttctacaatggtgttgtggagtcatttgattctgtttctaagaggcacaaggtcgcatatgatgatggtgatgtagaggtactactgttgagggatgaaaagtgggaattcatcagtgaggagaagggagcttctgtggcatctgaaacgccaggaggcagaaaaagaaaagctgatgcagtgaaggaagaaactacagagacacctaaaagtgatgctgttgatcatccaaagaaaagaggacgtccaaaaggtgtaagatccagcaatggcacacctagtaactcagctactccgagcacaaaggggaaaactgccggcaagaataccaaagaaacaccaaaaactggccccaatcttataaaggaactcgagaagagctcgaaggacaaagctagtgtatcaactgagacaaaggatgaattgcctaaggatgacaagagtgcaagcagacctaaggaggctattagcaaaggcaaggattcaaaagacgaaggcaagtccactgaaggaaaagctaggccaggtcggaaactaaaaaatgctggtactcctgcgggtgacgctgacaaagagaaggggaaggagaaagaagttaaggcagctgaaatagagcaggaggcaccaggaaatgcttctacaggaaagaagcgcagaaggaaggcttgaagctaacactgatggaacttcttttgtaaatggatgtgcaccttgtattattgagtgttaactcgaaatttcgtctgtttggtctctgatagttaggtgtggaagcaacatttgctatagctgtaatgctaggattaacatgtgttcattgtggtcagatgcatggtgcattggtgttgagctttgagcggaatcaacccaatgctcgctgtgaggcccatggcatcgtgttgtctggtggtgttgtagcttattgatgttctatttattataagcaatttaagcagtggattttgtagcaaaaaaaaaaaaaaaggcaccaagaaaaaaaaaaaaaaaaaaaaaaaaaaaaaa

SEQ ID NO: 25472 - DNA, 4205 bp, Zea mays
  unsure (1)..(4205): unsure at all n locations
  Clone ID: MRT4577_123236C.1
gccggccggggccggaggcagaggcgaacacaacagcccctcccgcgccgaaacctcgtcgcgtcgcgtcgcgcggaagagaggagagggacgggggccgcgggggcgagaagagaacaccactacggattgcctcgtcatccaccaccgctccaccgctaaaccctcgagtgctcttccgcgcggcggggcgccgagcgtgaaagccacctgctctcgtccagtcgcactcgcgccgcgaggggaaaccctaggagcggcagatctagagcgggcgctctcgatccggccgcgtagacgtccgttttggccggggaaatggcggaggatcctgccgccgaacaggagacgcggcagctagaggaccggctcagggaggtcggggaacggctgcaggcgcctcccgacgacgcggaggacctgctcaacctcctcatcgaagttgaggagtgtttacttaaagttgagcagtcacctcctgaaagcacatcgaatgctcttcaactagcaactgcagctcttgtcaagaaagagctgctgggccatgctgattcaaatattagacttgccgtggcatcatgcatatctgagatcacacggatcacagcgccagatgctccatatgatgacgatgcaatgaaggatgtattctctttaattgtggaggccttcaagcatctggatgacatagagagccccttctttggaaggagaacttcaattcttgatacagtcgcaaaagttcggtcctgtgtggtgatgctagatcttgaatgtgacgatttgataaatgatatgtgccatcacttcttgaggactgctaattctggacattcagaaggcatcatatgctgcatggaaacaataatgagattggtaattgaggagagtgaggatgtccaaccacagattgcttcatgtctactccaaaatgttagaaaagaagaaaaggaatcttcaccttcctttgagcttgctgaaaaagtgataggtacatgacgtgaaaaaattaagcccgaccttatgaaagaactaaaaaacagttccatggacaaagctagtgtatcaactgagacaaaggatgaattgcctaaagatgacaggagtgcaagcagacctaaggaggctattagcaaaggcaaggattcaaaagacgaaggcaagtccactgaaggaaaagctaggccaggtcggaaactaaaaaatgctggtactcctgcgggtgacgctgacaaagagaaggggaaggagaaagaagttaaggcagctgaaatagagcaggaggccccaggaaacgcttctgcaggatcaaggaccacatggcagaaatgagaagattgaacaaccatgctatgcccaaaacatagcagatgctatgcagttgaaatctgaccacaatgaaggtgctgagtccaatgctgcaaagcccaataagaaagctacccttggttcagtaaaaaatactaagctcaaaccgtccgataaatgtgaaccaactgtgcattctgatgctgacactaaaaagcaagatcttgtagcatctgcagagggatccaatggagcagccgatgatacatcaacacctgctgatagtacacctaaacccaagcgaggtcgtcctcctggtccaaagtcattgcagaaggctcctgggaaggatcaatctccaggtttggatttgaaaaaggtcaatgatgattcagctgggaagctggcgaaacgatcagctaaggatgagaagccttctgcaaaaaacactggtgaaggagaaccatctaagaagactcaaaagaacaatttaaaacagcataagggtgaaaatctttctgaggatgatcctgccaaggatctgagcttaaaggaaatgatatcgctgaaatcttcgactaaggtcccaggtagaaccaaagggcaaaccacagagaatagcacacctaaaatgaagcaagaacaagaaactgaagagcctcctcgttcaaggaaaagcaaaggacttgataaaagtctagttggtgcaaggatcaaagtttggtggccagatgataagatgttctacaatggtgttgtggagtcatttgattctgtttctaagaggcacaaggtcgcatatgatgatggggatgtagaggtactactgttgagggatgaaaagtgggaattcatcagtgaggagaagggagcttctatggcatctgaaacgccaggaggcagaaaaagaaaagctgatgcagtgaaggaagaaaatacagagacacctaaaagtgatgctgtggatcctccaaagaaaagaggacgtccaaaaggtgtgggatccagcaatgggacacccagtacctcagctactccgagcacaaaggggaaaactgccggcaaggttaccaaagaaacacctaaaactggccccaaccttaaaaaagaacttgagaagaactccaaggacaaggctaatgtttcaactgggacaaaagatgataagagtgtgagcaaacctaaggaggctattatcaaaggcaaggattcaaaagacgaaggcaagtccactgaaggaaaagctaagcctggtcggaaaccaaaaaatgctggtactcctgcgggtgattctgacaaagagaagcaggaggtagaagtcaaggcagctgaaatagaggaggcatcaggaaatgcttccacagggaagaagcgtaggaggaaggcttgaagttagcgctgatgaacttctcttgtaaatggatgtgctccctcctaggtttgctcctttaggaccttgtattattgagtgttaacttggaatttcgtctgattggtccctagtagttagttaggtgtggaagcaacatttgctatagccgtagtgttaggagtaccatgtgttcgttgtggtcaggtccatggtgcattggtgctgagccttaagcggaatgaaccctatgctcgctgtgaggcccatggcatcgtgttgtcgggtggtgttgtagcttgttgatgccctattttatattattataagcgattgaagcagtggattttgtagcaaatgtaccttttggactaggatgttggcctggttttcgagccccccttgtttctctgctgcatgggtaggaagggaaaccgcaatagaagatccaaacttcgccgggaaatgcttctccaggaaagaagcgcagagggaaggcttgaagctaacattgatggaacttctttggtaaatggatgtgccccttgtatcatgagtgttaactcgaaatttggttggttgggtctctgatagtaaggtgtgaaagcaacatttgctatagttgtaatgctaggattaacatgtgttaattgtggtcaaatgaatggtgcatgggtgttgagttttgaggggaataaannaaatgccccccgcagccccagggattggtgttgtctggtggtgttgaagcttattaatgttcaattggctgaaaaatctgatccttaaatggaatataataaataaaaagtcaataagcaaatcaatggcacacctagtaactcagctactccgagcacaaaggggaaaactgcgggcaagaataccaaagaaacaccaaaaactggccccaatcttataaaggaacttgagaagagctccaaggacaaagctagtgtatcaactgagacaaaggatgaattgcctaaagatgacaagagtgcaagcagacctaaggaggctattagcaaaggcaaggattcaaaagacgaaggcaagtccactgaaggaaaagctaggccaggtcggaaactaaaaaatgctggtactcctgcgggtgacgctgacaaagagagggggaaggagaaagaagttaaggcagctgaaatagagcaggaggcaccaggaaatgcttctacaggaaagaagcgcagaaggaaggcttgaagctaacactgatggaacttcttttgtaaatggatgtgccccttgtattattgagtgttaactcgaaatttcgtctgtttggtctctgatagttaggtgtggaagcaacatttgctatagctgtaatgctaggattaacatgtgttcgttgtggtcagatgcatggtgcattggtgttgagctttgagcggaatcaacccaaaaaaaaaaaaaaaaggcccctcatcgtgttgtctggtggtgttgtagcttattgatgttctatttattataagcaatttaaccagtggattttgtagcc

SEQ ID NO: 25473 - DNA, 217 bp, Zea mays
  Clone ID: MRT4577_123237C.1
agcagtggtaacaacgcagagtacgcggggtgttccttcagtttgtgttgcgcggcaatgaggacgaatgcttccctcacctgatggtttttgccatggagaccatcccacccatgcgtgagctgagcatcgattatggaatcgatggggagttgagtgcaaactgatgctggatctaaggcaacaatgagaaaaacgcttactggactttttacat

SEQ ID NO: 25474 - DNA, 193 bp, Zea mays
  Clone ID: MRT4577_123238C.1
agagagacttgccgtacaagaggattaacacgacttcgtagatatacactggcaccatgccacctgctgtggagcatcgtgccaggaggtgctcccgagatccagttgttgtgacagatggtacagctgggaacgccactgatctcatcacccagaatgtcataatggtcgaacgagtcagacaaagatgcca

SEQ ID NO: 25475 - DNA, 165 bp, Zea mays
  unsure (1)..(165): unsure at all n locations
  Clone ID: MRT4577_123239C.1
gttgattagttatatatatagcggtgtttgtagttgctgagtacatcanaagtggatagcacaaatcttatttgttgcgccaaccacacctcanattcatncttataaactntaacatttacattacctaattttttaccatgaacacacttccaaaattaaaaa

SEQ ID NO: 25476 - DNA, 1019 bp, Zea mays
  Clone ID: MRT4577_12323C.1
ttgggtacctcgaggccggtggggcccccccccctctgtcccgtgaacaacaaacggcaagcccgtccaagtccaatccaaccgtaccactcctccgcgccgggcccgggctccatcgccttcccggagcagttcacagtccccactccacctccttctacaaatacacctcagtctcagtcccccacaacatccgctccccgccttccgcttccctaccccccgcatcacctaccaacgccggcgccatgggggccttcgcgaaggaggagcaccagttcctagccgagctcggcctcgcgcagcgcaacccaggcgcgttcgcatgcggtgcgtggggcggctcaggtcccaccgtcacctccacgagcccgaccaacaatcaggtcatcgcagaggtcgtggaggcgtccgtgcacgactacgaggagggcatgcgcgcctgcttcgacgccgccaagacatggatggcgattcctgctccaaagcgaggagagatcgttaggcaaatcggtgatgcactgagagcaaagctccatcaccttggcaggcttgtgtcacttgagatggggaaaattcttcctgaagggatcggtgaggttcaggaaatcatcgacatgtgtgattatgctgtggggctaagtcgccaactaaatggatccattataccatctgaacgaccaaaccatatgatgatggaggtgtggaatccccttgtaggtgtgggtgttataacggcatttaatttccctcagtgttttctgcagaggtgccggccgggtggaaagaactgatgcaaccgcatttgagatctcagcagacttgagcagcatttattggcgtcagttgtgaaacttaaactgcaggagcatcttgtacataaataaaataagatgtttgttgctcgtgggccgtggcacgttttggtaccggtgtccagtctactaataaaatctaatgcaaaacggtcataactaaaaaaaaaaaaaaacaaaaaaaaaaaaaaaaaacccgcggcc

SEQ ID NO: 25477 - DNA, 162 bp, Zea mays
  Clone ID: MRT4577_123240C.1
gttgatcatgatagatgccattcgatatgaaggacggatatatttgatggcggatgcattttataacgtggccttagtttaggtcttaaaatgtttagaaatgactttattattgcaaaatctaatttaacagtaagtgcaatggtgtaaggactaacgctt

SEQ ID NO: 25478 - DNA, 156 bp, Zea mays
  Clone ID: MRT4577_123241C.1
gcttatcgataccgtcgacctcgagaacatttttaaaacctagaacgcacatattgggcgcgcacgatctagacgaggcaagctaacccgctgcgcgcgtgcgaaggcgaatatgaagattgtggagatacatgaactggagggggcagacattgg

SEQ ID NO: 25479 - DNA, 523 bp, Zea mays
  Clone ID: MRT4577_123242C.1
gccaaattcaaaaggcgtgcatagctgttttggtgagtttgagcaacgcgcttgcaagacataatttatcgggcgtacattcttaggaactacatataacaccaaattggacacaggacggccagtgtcaaattgtaacccacttcgagaggaaggtcagatcggaatcagaaccagccctaaatatctggaggttcatcactgtggcagctacgttggccaatcccttggtagggaatgttttcctggaatgtgaccccagtgggaaggccagggccttcaatgccaacctggaccgtctgaacgtttccgacgcaagaatctgacatactggcattatcgtcgaacaacggaccgccacacttgttccttcctaccatatccttagcattgccatgtatcggcgggaacaaggtaaataccaccaacttgctctgacagcatacaaaaaaaccttaacaatttcataaaactgccttgcaagcaactacagaggcctcaatttcaccagcgtgaccaacca

SEQ ID NO: 25480 - DNA, 179 bp, Zea mays
  Clone ID: MRT4577_123243C.1
gaaatcggctcgaggcagagtgaacctccggcttaaagcggcatataccgacaaatcggtcgggggagctggaaccgagggcagagagaagcaagacgcacggccaaacaagggcccttcaggatggactgaaggcaaaggcgaacggcaaagacgaaccagcagatcgaagcagagaa

SEQ ID NO: 25481 - DNA, 778 bp, Zea mays
  unsure (1)..(778): unsure at all n locations
  Clone ID: MRT4577_123244C.1
ccggccgggatcccccatccccctgcatagtgcatacccttctcgccatccattatattatacacacacccgtacgtcccgccgccggcgccgctgttgctgctgccacagcaacatgggcggcgatttggcgaagccggtggcggcgatggtggttgtgcaggtgatgtccgccggcgtgaacatattctacaagctggcggtgttggacggcatggacatgagggtgctggtggcctaccactacctcttcgcctccgccttcctggcgcccctcgcctacttcatcgagaggtacgcaggcgctgcagctccggcctccggcggctgcatggacgatggtcgtcccatccaattccaatccatgcatggctgcctctagcttgcaattcatcgtcgtcgccggcgcccggccgtccatgcatccatccatccatcccgggttgcttgtgtcgacctttctatttaaaggaggcaaagggcaaaagcgaaatggaagacggcgatggaaacttggtagcagtagtgccagccgccgccgtccgatcgattcattaaattttcgtgtttttttttctctccggccactttcctcgctcgcttctggtataaatatatcccagaacagaatgcattagctgcttctgctgcggtgctgcctcgctggtcgtagcactagactagaagatgatgcttattattagctaagctagctactcttgtcgatttttctgatggtttctctttcaggaagagacggaccaagttgacgtggnng

SEQ ID NO: 25482 - DNA, 304 bp, Zea mays
  Clone ID: MRT4577_123245C.1
gggcctaacacaggcgggacagatttttattacatgcggggtacaaaaaacaataggacatttttggggttcgttccccacattcgaaaacaacagggcattaattattttgggggcataccctgggttttcatcttatttcaaaaaaacatttaaaatttgtggctgggacaaaaaactttttttgcgacactttgaacagaaaaataaaacgtttaagctttcactttcttggggggagccctcatcaaaaaacccttttttggtttatccaaaaaggcggggaactcctggaacggggttt

SEQ ID NO: 25483 - DNA, 305 bp, Zea mays
  Clone ID: MRT4577_123246C.1
ctttaaacgggcggccttccttttttttttttttttttaacaagaaaaccaggggcaaaaacattgctatcaacaattaagcattccgaaaggtcaagacaaacaaaaaatttgttgcagcaactcttacggtatttaaactaaagctttgtttataagaaaaattatacctactgacaaacaactggcatactctgcgacccataaaatcttagggccgcaggtcctactcctggtcaactagatttaagagggaggcactggccctcttttgaccctaaaaattgtaggaagaaggctgtctt

SEQ ID NO: 25484 - DNA, 269 bp, Zea mays
  Clone ID: MRT4577_123247C.1
tcttaggaaggggaccacggcaaggaccgcgggtatctagactactaaagcaagataacgctaagacttagcttctatgtatatatttttgatgaagtactagaggttgttctagcgatgtatgggtctttatttttttgtaatttttaggaggagatttttagttgggggggggggttgtagggacgtaagagatgttgactgggtggaattttgagtttaaagatttactaggaacggtggagactgaccagaatgttttatgagta

SEQ ID NO: 25485 - DNA, 1333 bp, Zea mays
  unsure (1)..(1333): unsure at all n locations
  Clone ID: MRT4577_123248C.1
ggtacccccgagttcggccgggaaggagtggtgggaggcacaagaacgaggagatcaagttgcctctgtgcttgatgttggagaagttggtccccgagcagcatgtcgttgccaggtcgttagaagtgttggcccatggtcagcaggaacaactcaaatcgaaggaagcatccataatgcctatttttctcttattggaaaggcagaacattttgtttacatcgagaatcagtttttcatttcaggtctttcaggggatgacacaattaagaatcgtgtattagaagcactatataggcgcatacttagagcagaaaaagagaaaaggcgcttccgggttattattgtcataccacttttacctggttttcagggtggcattgatgatggtggagctgcgtctgtgagggcaattatgcattggcaataccgaactatttgtagaggacctaattctattcttaaaaatctgtatgatgtggttggctcgaaggcggatgattatatctcattttatgggcttagagcacatggaagatcagatgatgggggtcctctggtcaccaatcagatatatgtgcacagtaaattgatgattattgatgatcgcatggcattgattggctcagccaacataaatgatagaagcttgctgggatctagggattctgagattggtataattattgaagataaagaggttctcagttctataatggatggaagaccttgggaagctggaaagttctccctcagcctacgactttctctatgggcagaacaccttggtcttcttccaggagaggttagttgcattatggatcctgtggatgattcagcgtacaaaaacatctggatggccactgctaaggagaataccgtgatctaccatcaagtattctcatgtgttcccaacgatcacatccattctaggtatcaatttcgccaaagttttgctcatcgtaaggagaaaattggccacacaaccatagacttgggtgttgccttagaaaacctggaaacgcaacaggagggagacctggcatgtgccaaaccaatggaacggttgcaggacgttcggggtcatattgtttgcttccctttggagttcatgtgccaagaggacttgagacctttcttcagtgagagcgagtattatacatctccacaagttttccattagggcttgttcgattatttcaatttcatgtgacgtggtgtgtattagaatgagttgggatgaattttgacttgctatggatttaaaccgactcaataccatctaatccacatggattaatgttgancgacnnnnnnnnnaaaaaaaaaaaaa

SEQ ID NO: 25486 - DNA, 192 bp, Zea mays
  Clone ID: MRT4577_123249C.1
aaacacccggttcggagggtgggcttggttccttactattttcaagggcgccacttcaaaaatactcctaaaagcttatttcaaggggaaccatcctgccctcggagtgcgtggtacattaaaattgtacaccatgcttgcgactttaaacatactatttccgcctagagcttggggaaaacaaatctcttt

SEQ ID NO: 25487 - DNA, 331 bp, Zea mays
  Clone ID: MRT4577_12324C.1
cgcaggcccgattccaattcgacccacgcgtacgcgatccgcgccactccattcgcacctgacctgcggatctcatgcaagctcaggatggcggccttgcactgtgcaggaggccgactgtctcacctagcacagctgcctgactctgacacgcgctaaccgccctggctagtaccagcatgcagatcaacgtggctgctactacaaatcggacgtacagagtctgcatagcctgaaccatactggcatggatcacgacactgcaccagaggtgcatagcaacagttcagtacaagaactctggcccatccatggcgcaaagcaaaggttc

SEQ ID NO: 25488 - DNA, 705 bp, Zea mays
  Clone ID: MRT4577_123250C.1
actactccaatctcccctccctcacctctgttggctccgcggcccatcccatccgatcccatcgccgcgccgccagctccagatccgcccccgcgcccgccgccgagctccacacgcggggaaggggtgaggagtcagctgcctgccatttcatcaggccctggtgtggtgtagcagcggccttcgcacccaaacaaccagagcttttagatgatccaaagatggtgaggagctgagagcacctagagttcgacagtgggggctgtggggcagcaaggacatgactgtcatgccgcctgcgcgccatcggcccgcggccaagaggcccatgtggataatcgtgctcctgtgcctcgtctgcgtcgtgctgatcggggcgtacgtgtacccgccgcggcactactcgcagtgctacctctctgcttctagcgtctgtacgccgttcaaggattggctcccgtccatcggccgccgggagaaaaccgatgacgagatcatctcagccgctgttatcagggatattcttggaatgcccatgtccacgtcgaagaatccaaagattgcctttatgttcttgacacctggctcattgcccttcgagaaattgtgggagaagtttctgcagggtcacgagggaagatactccatctatgtgcacgcgtcgcgtcaaaagcctgtgcatactagttctctccttgttggccg

SEQ ID NO: 25489 - DNA, 653 bp, Zea mays
  unsure (1)..(653): unsure at all n locations
  Clone ID: MRT4577_123251C.1
ggccggccgggaaaantttnnnnnnnnnaaaaaaaaaaaaaaaaaaaaaaaaaaaaaaaaaaaaaaaaaaaaaaaaaaaaaaaaaaaaaaaaaaaaaaaaaaaaaaaaaaaaaaaaaaaaaaaaaaaaattaaaccccccccgggggggttaaaatgggatggaaattttccaaaatttcccttgggttttcccccctccccggtttgggaaccccaaggggtttttcaaaccccggcggggattttttcgggttcccttttgtcccccccgtcaaagggaaggtttttttccaaaaaaatttcaaaaagggttggaaaagccggggggcaaagcccaggggaaaaaaggataaaaacttggtggggaaaggaaaccccctttcggaaaaaggaaagggaattcccgggaaaaaaggttttcaaccccccggggtttacgggttttttgccttttcacccaaaacccctggtttcaaaaaaaaggaaaaaacccgggggttgaatttttttggaaaacccaaaaaaaactttgccgggggggggggtaacccaaagttgtggggggggggtgaaaaccaaaaaaattttgggggaaaccctttttacagatttatttttgacccaaaattctgggggaacacccccaaaaagg

SEQ ID NO: 25490 - DNA, 542 bp, Zea mays
  Clone ID: MRT4577_123252C.1
gccggccgggccgggatttgcctttgccttcctctggatcacttgtccctactctagctgatagagagctgacttgaccgttcatcacacaggcacagcagagagagagacaggaagagggcttctcaggcgctctacatagtcggcggaggcacctggatgtgtcggctaccacaaggggctctgcgccgaggcgaccacatcaggagccgccgccactgtcgtcgcgaggcacttatacccggccacggaggcctcccccgagctgagatgtgtactcctccgacagatctacgtgcttactatccctccttctgatgaacagcagtcgtcgaagcagcacccgggaaaccagtccacgtcttctgggtttcttaaggatgctagggtgctctctgttgatgatgcgtgctggagaaaagctgcggttgcttctgatacccgagatgtccgctaatccgatacgcaccaatcgacgctgatattcggcggccccccccctattatcatataatatgatgtgggcttgaaatgaatctgga

SEQ ID NO: 25491 - DNA, 323 bp, Zea mays
  Clone ID: MRT4577_123253C.1
cctactcctgcgatatgctacaggcttttttgtcttgctgcttatctgcctattgtgagggccgtacttattaggatctgggcctgcaagaaccggcacaactgcaacagctgtgatcgcttgcagctgactcatcgcattaaacggccacagagatgtttatataatggaactggcctcatactaattcatcgagctgaatgtatgtctccatagtcttgcacccaacttcgaactcattagctctttattgttgcagaacagttgctgtcagactgctatactgtgatgatatgatccattctttgtggacacagagatta

SEQ ID NO: 25492 - DNA, 124 bp, Zea mays
  Clone ID: MRT4577_123254C.1
ggttcgccccagcccccgacgcgctgggatcactgcgatgttgtaggtggatttcagaaacccaccgagagcggcaatgagtacgggctatatgccctaccacgcatggtcccaggaccatact

SEQ ID NO: 25493 - DNA, 352 bp, Zea mays
  Clone ID: MRT4577_123255C.1
gccgaagcccaaaccctagctccgctcggtgcggaggtgagccgacgatggcgaaatctatgttatacatacgcaagaatgcgattctgacattgcgccctgagatagcggtgccagttctacgtacaaaaagatgccgatccgctcagcgggcaagccggcgccgtagctgctgcccctataccggtccgaggggcccctacattccaggatgccggcagctgccgagcagatagctgggactcggctatgagatgaagaaatgtgtgccgcatggaacaacacgtttaacaccttccttgggccacttggtagcattacctagctcaaggctcatcttcatttggagctc

SEQ ID NO: 25494 - DNA, 346 bp, Zea mays
  Clone ID: MRT4577_123256C.1
actgaacctggtgaccaccgcgtggaggcggaggggtcgccgccctcctgtcctccaagctcagcatcgccgccctcctctccggcgggtggagccgtggaggcctaaccggccgctggccgccgccctcctctcctccaacgtcaacggacctaggccgccctcctctcctccaacgttaacggacctacgccgcctttctcttctgcacccgaccatgttcacctgagcagcggacctgcgccgcagccagccgggcggccccacaaagaactgcggcgacggcctgctttgaacaaccattctccacctttacttctgcagggtggaggacccctaaaccttt

SEQ ID NO: 25495 - DNA, 723 bp, Zea mays
  Clone ID: MRT4577_123257C.1
ctggacgcctgcaggtaccggtccggaattcccgggtcgacccacgcgtccgcgtcgagctctgcacttcgttttaaagtggggaaccgcttccagacggtgcatttctttcgagatgtcctggggatgcaggttctccgccatgaggaatttgaagaaggctgcaaagctgcatgcaatgggccttatgatgggaagtggagtaaaacaatggtgggatttgggcccgaggatgatcattttgttgcagaattgacatacaattatggcatcggagactacaagcttggcaatgacttcatgggaatcacgcttgcttctagccaagctgtcagcaatgccaggaagctggagtggccactgagtaaagttgcagaagggatttttgaaactgaagccccaggaggatataagttctacttacaggatagaagcccatctcagtcagatcctgtattaaaggtgactctagcagtgtctgatctccagaagtccttgaactactggtctaatctcctgggaatgaaaatttatgagcaagatgaggaaaagcaacgagctttgctgggctacgctgataaccagtgtaagctagagctacagggcatccagggtgcagttgatcatgcagcggcctttggaagaattgccttttcttgtcctcagaaagagttgccagacttagaagacttgatgaaaaagggagaccactcgatcctgact

SEQ ID NO: 25496 - DNA, 104 bp, Zea mays
  Clone ID: MRT4577_123258C.1
gttgtcgccggtcgtcggcgcggacaggatgcggttcacgtcgttgaagtcgcggccgtaccgcgcggcgacaccgtcgccgatgcccgtgatttcgccgatat

SEQ ID NO: 25497 - DNA, 632 bp, Zea mays
  unsure (1)..(632): unsure at all n locations
  Clone ID: MRT4577_123259C.1
ggtntaacttcatttcatttatataaaatggcagccctgagcaagtactttgacattaatcccaactttacaggcaagtaattatctaactcgatccaggcagtggcaatatgccgacagcactgcctaccctnataaaaagaaaaattgagtaaagagcactgaggccaactccaagtatcttgttaggccgcatgtcacctctcggcagcttaacacgagcccagatcaatccagcaacacgaaagctcattgcgtnaataagagagtggtcctgtggaagaacatacgaattgggtgccgttgaccatgctccatgcagcattgatgttcccaaaccagcacgcgtattaaacataggtcctgcgtaccatcccgtcttgccaatctgccctccgtcaccttcatttctcgcttccgcctcccttgtcatttcgccaccccttgtccccccccatgctcacactgtttgcccccgccttcgtgcgtcccctctctttttctccccccttgcttctcccttttttttcccgtttctttccctacccttttccgtccccgcctgatgtttttccctaaatcctccttttccccccccggtttttaccccccttttcccccccgactttttt

SEQ ID NO: 25498 - DNA, 2051 bp, Zea mays
  Clone ID: MRT4577_12325C.1
ccccttggccggtgtgttggcctccgaggccccggggggatccgctccccgccttccgcttccctaccccccgcatcacctaccaacgccgacaccatgggggccttcgcgaaggaggagcaccagttcctagccgagctcggcctcgcgcagcgcaacccaggcgcgttcgcatgcggtgcgtggggcggctcaggtcccaccgtcacctccacgagcccgaccaacaatcaggtcatcgcagaggtcgtggaggcgtccgtgcacgactacgaggagggcatgcgcgcctgcttcgatgccgccaagacatggatggcgattcctgctccaaagcgaggagagatcgttaggcaaatcggtgatgcactgagagcaaagctccatcaccttggcaggcttgtgtcacttgagatggggaaaattcttcctgaagggatcggtgaggttcaggaaatcatcgacatgtgtgattatgctgtggggctaagtcgccaactaaatggatccattataccatctgaacgaccaaaccatatgatgatggaggtgtggaatccccttggagttgtgggtgttataacggcatttaatttcccttgtgctgtgcttggttggaatgcttgcattgctttggtctgtggaaattgtgtcgtctggaaaggtgctccaacaactccactgatcactattgcaatgacaaaaatagtggctagtgtattggagaagaacaacttgccaggcgcaatttttacatctttttgtgggggcactgaaattggtcaagcaattgcccttgacattaggatacctttggtttcattcactggaagtacaagggctggtctaatggttcagcaacaagttagtgcaagatttggtaaatgccttcttgaacttagcggaaacaatgccatcattgttatggatgatgcagatatccagctagctgtgcgatctgtcttgttcgctgctgttggtacagcagctcaacgctgcactacatagtcgtacactaaatcttcatgagaacatttatcaaagataacataaatcaaaccttcctttatcagcatgttgaggtatacaaactagtccgaattggggaaccgttggaggaaaggcacctaactgtgactccagcgacactcctgcttcaaacatgaagattttgaaaggcattcggactatcaaatctttttggaggaaaagtccttgaaggaggaggaacctttgtgcaaccaacaattgtggaaattacaccttctgcaccagttgtgaaagaagaactctttggtcctgtcctttatgttatgaaatttcagtccttgaaggaagcaattgaaatcaataactctgttcctcaaggattgagcagttctatatttacaaagaggccagatattatttttaagtggctcgggccccatggtagtgattgtggtatagtgaatgtgaacatacctactaatggtgctgaaattggtggagcatttggtggagaaaaagcaactggtggtggacgagaagcagggagtgattcctggaagcagtacatgaggagggcgacttgtacaatcaactatgggagcgagctacctctagcccagggaatcaattttggttaatcctgcagaaatgttgcgcgtggatctcagtgttttctgcagacgtggatgccgtatggaaagaactgatgcaaccgcatttgagatctcagcagacttgagcagcatttattggcgtcagttgtgaaacttaaactgcaggagcatcttgtacataaataaaataagatgtttgttgctcgtgggccgtggcacgttttggtaccggtgtccagtctactaataaaatctaatgcaaaacggtcataactggcgttaacaaaaaaaataaaactgctacaaaaaaatataaaaaaaaaaaatgaactgttttttgcttctcgtgccgtggcacgttttggtaccggtgtccagtctactaataaaatctaatgcaaaacggtcataaatacattctcatggagtatgattttccggcctttt

SEQ ID NO: 25499 - DNA, 830 bp, Zea mays
  unsure (1)..(830): unsure at all n locations
  Clone ID: MRT4577_123260C.1
ctcgaggccggccgggcctttctacgaatgcgcccgcacaataccgacaaagcgccaacaacatgtcatcgatggttgaccaaacgcccgagtttcctgcacacatgacatctatggagtctagtgcgagcgaagcggagccgcccaatggcagccaaaacagcgtgctatcggaccggtacatgagcaagccagcgtcaacgggcgccgagtctggcacatactcatgcacatatcatgggtgctcgcagcgatttgaaacaccgcagaagctccagaagcacaagcgcgagggccaccggagcgccaatctcagcacggctatgacgtcggcggctatcctagaacgcaactcgcaagcgggaccccacaagtgtgagcgcatcaacccaaccactggcaagccttgcaacactgtcttctcccggccatatgacttgacccgtcacgaggacactatccacaatgcgcgcaagcaaaaggtgcgatgtgcactgtgcgtcgaggagaagacgttctcacgcaacgacgcattgacaaggcatatgcgtgtcgtgcaccccgaggttgattttcctggcaagcatcgcagacgcggcggcaaccacgactgagcgagcgggctttgacgaggtgcgcggaaccgaccgaagaccgcggagaccgtgcccttgcagccccaggcctgcctgcctgcacatttcagaacagccgggaccgttggcctgcatgcagcccacgcaccccaacacagncaacgtgacgcacagaatcttcgatgggcatctcgactgcgaagactgtgtgatggctgcaggcatggctttact

SEQ ID NO: 25500 - DNA, 168 bp, Zea mays
  unsure (1)..(168): unsure at all n locations
  Clone ID: MRT4577_123261C.1
ccctcgctagcgcttgtggtggcggtagantnatgggggaggaagtagataaacgtttaccctaacatcctaaggtctatacaacgccccacatgatacaaagcttaccgcacgttcgtgtatcccccctacacaaacaagataaaataactccccaaacctgcacat

SEQ ID NO: 25501 - DNA, 884 bp, Zea mays
  Clone ID: MRT4577_123262C.1
attgggtacctcgaggccggccgggaaggcagtccttcgaccagttcctttccaatcgccacaaagcatgcacctcggaggcccatccgtcctgatccagcccacacactaaggtagaccgtcctgacagctcgcgtggcttgcgttcagctcgctatcgtgtccggtacgcccagattactggagttgcttatatcaattcaccctcacggaccccgacctggttatttatcaacgccacccgccctcactctgatcgcgttcccacacaacacagcaacaccaacagtgtcttcacttcaacaccagtacacaaaacgacctgtgtgcacaccatggtctacaaccttgcttaccgccgccctcagaggcaggctcgagcgtcgaccgagtcagtgactggtgagcacaagcagctgtccatccgcgagtctgtccgcactggcagcagtggcatgtctcatggcattcctgaagctctgtctttcgaccgcatcatcgctggcggagtctgtcctccttgcacagtccgtgacttcatgaactttttgaagtacatcgagctgtcagccgagaatttgcagttcttcctctggtatcgcgattacagcaagcgcttcaacgagctgcctgcaagcgagaaggttctgtcacctgagtggacaggcgccagcaatggagatgcgtctaagctggccattcagaacgcgcatcccgaggtgtctgccatgttggagggcactgatttcgacggcagtcagcagaacgagaagaaccccttctacactccaccgcacacgccaacgaatggatcacggccgccgggaggagtcgcttgattcgtatgatgatagcgtgactactggcaagggaatcattctgaa

SEQ ID NO: 25502 - DNA, 2337 bp, Zea mays
  Clone ID: MRT4577_123263C.1
gcaaaaccgtggtgaaaatatagtatttaaatcttgaaccctgtgttcacaatgtaacaatttcggtctaattaattattcttcagatgctaccaacagagattattgtgctaacaattctacatgagctttccagcgcctttttatcttgttcctcagaagcttaactgttactcttcctaacccacaatatacaggtaaagtcaatgtgtaacccaataagaattagaatgtgttcctttcatatgacacaatataatacatgtacaagcactatatctacttcaatcctctgaatggcatgtcataatttcaccaggcccccacaatctcaactgcaagataccttccgtttgtttactcttgccaagttctctgaaaccgccctagtcaaattttgatcctcaaaactaggatcaagattgaacttgggatcaagggttattctctgaatttctctaacagcagaacttgctgcgtataaggagatcttttttacctcaagcatcttcagttttgcaagatggccatttggcaggcaacggatctcttgggacagccggactgactctggcaaactctcaggtgacaaaaaattgagagccaattgaaccgtggactggaggtttttcaattggaaaggacacccagctggaatgaaaacagcctcaccaatatgttggtggaatgtgaagggttcaattccatattgatccttcaacatcttcttatgataatcgttaaggtacacagtttgatcataaataggatacttaacagaagacactgcttgacatctagctgcacattcttcccgatgagcagctagatattcattaagctttggaagatcctgcctgcggaatacatcccagacagcaccagccagggatccttctgaattattagtgtttggctcctcgatgtgtgatttcgagtgtttgtgtgattgctcttcaatatccagattcaaattttgaacaggagtatgagcatttacatggacactagttccattagcaatcatttcagatacatcagactgtacccttaccctcttgggacattggtaatgcacttcagttgcatgcattaacatgtgaaccacatcgctcatgttaatcattagatttgtcattgaatcacctttaccaagttctcggtgacttccatgtgcaattagcagtttcatccctaattcaggttgtaaggcatctgggggtaacttggcagcaaggtttaggagaccccatctaggatgaataaaatcaacaagaggaaagttgacaataaattctggcctttggcacaacagaaacgcctccaagacactgggtcggggccactctttcaatttcagcatcaacaagtggccatctcctcctttgctgccatctgagtagcctttgataaactgtttgagctcgatatctctgattggttcgagcagtccacagccttgactatgacatcttcatccatttcttcatccatgatctcctggatacctctccaaatactcaagggatcccagcttgatgatagagaaggctcaaatgcttccctgataataataggctccgcgtttttccaatgcttacgaaaatgaatgatgccttcatattttaagtcctccaatacaggagagtacaaacaattcctaccaatcccatcactgtttgagcattttgagagaccgaggttttgctgaccagtaaactccgatcttctgccatcactgcaagacaagcatccatcctccaaatcatgtactttgcaaccattgaccatttcttcagaactttttacaagtttagcaatccaatttattttgaatatccgccttaataccaactttgaggagccacaaccaccagcctcgtgaggtccacaagtgatgctgccatcattgttgactctccatgtagggaataaagatttaatgtcaatattatttatatctattggccaagataatgacttgtcattgacactctcagcagatggttccaaccttgctcttctattaaaagaatctctacctttatcttcaacataaccttcagtatattctcctcgtgcaacattggcccgagaatgacgtatgtcatgacagcaatcaaggcataaatcatatgaacatcttgggcagtatcggtgataatcaaacactggcactttgcaaaagtcacagcacatctgctcatcagaagttatctttgctctgaggacatctgtctttggtccagaagatcttgtttcaacacctatttcaaagcattggtcagaataaattcccttcagtactggaagaacataaaccaaaaggcaatgaag

SEQ ID NO: 25503 - DNA, 327 bp, Zea mays
  unsure (1)..(327): unsure at all n locations
  Clone ID: MRT4577_123264C.1
ctcccctggccccctcccacgagctccgcggttgtcgaccaccgaaacacaggcgcagnagcggcggcgcccccagatcactgagagctcatgcccaggcaccacaggagggcgacaagcatgccctgcccctgcaagatcaccgactgggctgcactgtctcgcaggaccgcccgccacacatccccgccatcacgaacacgctcaaggatgctctcacctacgaggagcccattgccatcctgtcccatccccatggacttaccgatggaacccccccgccagccccgaccaaccctcctgttctcctcgctgccccccgcgtcc

SEQ ID NO: 25504 - DNA, 178 bp, Zea mays
  Clone ID: MRT4577_123265C.1
tagagcggtcgtccttattttttttttttttttcaagaatcaaaaagcaaggtttagttccaatattaacctgcggttcttttacagatggtagcaggaagggaagcaaaaaatcaaaaaatgtacagactcagcatgaaccatgcgacccaaaggcacgcgccattcacatttattt

SEQ ID NO: 25505 - DNA, 473 bp, Zea mays
  Clone ID: MRT4577_123266C.1
atacgccaacatcaattccatgcgcatcgtatccactgagaaggagagcacaggaagagagcattatagaaggtgaccagcctcctacctgctctctgtgcgattaatgtgaggcgatagtgctctctcactgacggtgaccaagacgtgtgacaactgttcagagcgcaagaacaagaccatcaagactcgccatatgtatcatttcaccagccccagacccagaggagagcctgagactcaaaagacccaagaatagcatgtattggaatactctgcttttatctcaaccccacctttaagacctgcctcactctgctaatatgcaacttaaaagatgttactgtatgatgctcaggaccttttgctgccgaacgttatgttttgaagatcatgctaccttttaaagaacaaaataccttgagcctatgctcattatttttgcctttgacaactaacatttggatttcatg

SEQ ID NO: 25506 - DNA, 323 bp, Zea mays
  unsure (1)..(323): unsure at all n locations
  Clone ID: MRT4577_123267C.1
aaaagaaaaaatttacggtatggaattgattgcattagtgggacaagggcacaaaaaatcggtgtacataagatttttatggaaatagtaaaaatgtgtagtgggagttggaaaaacaatagggttaaaaggtgaattgttttgtttatgtttaagaaaatattagaatgtttgggtttgttattntgaaggggattgggttgatggtgagcgataatttttgaatgctgattatagaatgtgttttttaaatgggctggggattatggggtnggtaattggttgtggggggtgtagagggtttttaggggtggtggtactgg

SEQ ID NO: 25507 - DNA, 124 bp, Zea mays
  unsure (1)..(124): unsure at all n locations
  Clone ID: MRT4577_123268C.1
gggaccacgcgtccgggaaagcccncgctctcgctcaccaccccggtcgttcgtttgctaatccctggagcggacgggagtaaggccagccaaccaaattgtctatttactgaagggaaggagg

SEQ ID NO: 25508 - DNA, 403 bp, Zea mays
  Clone ID: MRT4577_123269C.1
ctggcaggagcagcagcagcatggccaccaccagcacgcctcgcctctccaccctcctggtgctcctggcggcggcgtgaccgctgctgagcgcaggtcaggaaggccgccccgaaggctccggcggcggcgaatgcggcgccagggccggcggcgtcgtcgtcgaacggcgcgggcgctgctgacgctgcccctcccacagacttgaacaaggcgctcaaggacgaccagttcagccagcttaagcaactgctgcaccacacgctcgttgacactcttattaacactcatctgacgttcagctactacggtctgaccattatggcgccgaccaatgccgacttccagccgatgaatgccggcctgcttaacatgcttttgccgcaggtgcagatccagctca

SEQ ID NO: 25509 - DNA, 2168 bp, Zea mays
  Clone ID: MRT4577_12326C.1
actcctccgcgccgggcccgggctccatcgccttccccgtccggttcgcagtccccactccacctccttctacaaatacacctcagtctcagtcccccaccatatccgcttccctaccccccgcatcacctaccaacgagacgccggcgccatgggggccttcgcgaaggaggagcaccagttcctcgccgagctcggcctcgcgcagcgcaacccgggcgcgttcgcatgcggtgcgtggggcggctcaggtcccaccgtcacctccacgagcccgaccaacaatcaggtcatcgcagaggtcgtggaggcgtccgtgcacgactacgaggagggcatgcgcgcctgcttcgacgccgccaagacatggatggcgattcctgctccaaagcgaggagagatcgttaggcaaatcggtgatgcactgagagcaaagctccatcaccttggcaggcttgtgtcacttgagatggggaaaattcttcctgaagggatcggtgaggttcaggaaatcatcgacatgtgtgattatgctgtggggctaagtcgccaactaaatggatccattataccatctgaacgaccaaaccatatgatgatggaggtgtggaatccccttggagttgtgggtgttataacggcatttaatttcccttgtgctgtgcttggttggaatgcttgcattgctttggtctgtggaaattgtgtcgtctggaaaggtgctccaacaactccactgatcactattgcaatgacaaaaatagtggctagtgtattggagaagaacaacttaccaggcgcaatttttacatctttttgtgggggcactgaaattggtcaagcaattgcccttgacattaggatacctttggtttcattcactggaagtacaagggctggtctaatggttcagcaacaagttagtgcaagatttggtaaatgccttcttgaacttagcggaaacaatgccatcattgttatggatgatgcagatatccagctagctgtgcgatctgtcttgttcgctgctgttggtacagcaggacaacgctgcactacatgtcgtaggctgattcttcatgagaacatatatcaaaccttccttgatcagcttgttgaggtatacaaacaagtccgaattggggatccgttggagaaaggcaccttactgggaccactgcacactcctgcttcaaaagagaactttttgaaaggcattcagactatcaaatctcagggagggaaaatcctttttggaggatctgccattgaatcagaaggaaactttgtgcaaccaacaattgtggaaattacaccttctgcaccagttgtgaaagaagaactctttggtcctgtcctttatgctatgaaatttcagaccttgaaggaagcaattgaaatcaataactctgttcctcaaggattgagcagttctatatttacaaagaggccagatattatttttaagtggctcgggccccatggtagtgattgtggcatagtgaatgtgaacatacctactaatggtgctgaaattggtggagcatttggtggagaaaaagcaactggtggtggacgagaagcagggagtgattcctggaagcagtacctgcccgggcggccgctcgaaaggcgaaatcagtttgagcttcagtgcattcaaagtgcgcacttttggttatcattattacagcagtgcactagtaagggtagcagggccgggcctaagcacgtgtagcaagtgttattttgcaatggatttataagtagtctactaatgatttgggtcttgagttagtcaggagggaggtcctagaggtagtaagtcacttgtttactccatgaaggcaatagcaaccagatcgcggtggtgcctatggatgctacaccaataaagatctaaagttcttttggatggatgcagctagatattttgttttgtattttctccaaaagagaaatttgcaagtgaacttaaaattgtgaaaccaacatgtcgttggagaatttagtatctctaagctttcacaagccaaacttagtgttgttgctgcttattttgatctttattacaacaaaagcaaacttgtgaactttatgtgaatgtagtacaattgttattgtcatgaatgaaaacatgagctatgtatgaatgcagtacatttgct

SEQ ID NO: 25510 - DNA, 548 bp, Zea mays
  unsure (1)..(548): unsure at all n locations
  Clone ID: MRT4577_123270C.1
gggtacctcgaggccggccgggccgggnatcagaataagaaacctccagccccaggtttattcctcgaccgcatcgccacccaccccatctccatggctacctccgccctcgctgctctgtccgccaccgcggccgccgccggtaagcgcatcctcctgtcgcgccccgcgttcaccaacagcagcgccgaggacatgctcaacgcgctctgaactcgcgacgccatggttggttcgtctcttccggcaagagttggtttcttttccctgaaaataatcgtgacggcaacggtggcttgtgttactgccgccactgttgtgaccggcgctgtcactagtgcactgctgagatgcaagtttcttgcgaacatggctttgtaggtctagcttcatgcaattgttgacgccctctgtttcatgacttgtcatggtatgcaactcttgtctgagaaaaaaaaaaaaagagaaaaaaacttcttcaaaaaaaaaaaaaaaaaagcgtgcatgaaagacctggaaaacacccgtaatgaaaggcccctagggcc

SEQ ID NO: 25511 - DNA, 261 bp, Zea mays
  Clone ID: MRT4577_123271C.1
gccggccgggccgggacagaaacctccagccccaggccaattcctcgaccgcatcgccacccaccccatctccatggctacctccgccctcgctgcttgtgttactgccgccactgttgtgaccggcgctgttactagtgcactgcagagatgcaagtttcttgcgaacatggctttataggtctagcttcatgcaattgttgacgccctctgtttcatgacttgtcatggtatgaaaaaaaaaaaaaaaaaaggccccta

SEQ ID NO: 25512 - DNA, 854 bp, Zea mays
  unsure (1)..(854): unsure at all n locations
  Clone ID: MRT4577_123272C.1
ctcgaccgtctcgccacccaccccatctccatggctacctccgccctcgctgctctgtccgcccccgcggcggcggccaagaccatcgcggtcggggaccggctccctgacgcgacgctctcctacttcgacacgtcctcccccgacggcgagctgaagacggtgacggtccgcgacctcaccgcggggaagaaggtggtgctcttcgccgtgcccggcgcgttcacgcccacctgcacccagaagcacctcccggggttcgtggccaaggccggggagctccgcgccaagggcgtcgacaccgtggcctgcgtctccgtcaacgacgccttcgtgttgtttgcgtggaaggagagtctggggatcggggacgaggtgctgctcctgtcggacggcaacggcgagctggcgcgcgccatgggcgtcgagctcgacctctccgacaagcccgtggggctcggcgtccggtcccgccgctacgcgctgctcgcggaggacggcgtggtcaaggtgatcaacctcggggagggcggcgcgttcaccaacagcagcgccgaggacatgctcaacgcgctctgaactcgcgacgccatggttggttcgtctcttccggcaagagttggtttcttttccctgaaaataatcgtgacggcaacggtggcttgtgttactgccgccactgttgtgaccggcgctgtcactagtgcactgctgagatgcaagtttcttgcgaacatggctttgtaggtctagcttcatgcaattgttgacgccctctgtttcatgacttgtcatggtatgcaactcttgtctgagaaaaaaaacacccccccnccggnaattcggacggtgac

SEQ ID NO: 25513 - DNA, 1175 bp, Zea mays
  Clone ID: MRT4577_123273C.1
gccggccgggtcgggatttttcccattccatcctagggctcgcgagtcgcgtcccccaaagtgaatacagaaacctccagccccaggccaattcctcgaccgcatcgccacccaccccatctccatggctacctccgccctcgctgctctgtccgccaccgcggccgccgccggtaagcgcatcctcctgtcgcgccccgcctcctcctcctccctctccttcgcctcccgccgcctggccgccggggcacccctccgggggttccttggcgcgccaatccgggccgtggcgtcgtcggcgtcggcggcccccgcggcggcggccaagaccatcgcggtcggggaccggctccctgacgcgacgctctcctacttcgacacgtcctcccccgacggcgagctgaagacggtgacggtccgcgacctcaccgcggggaagaaggtggtgctcttcgccgtgcccggcgcgttcacgcccacctgcacccagaagcacctcccggggttcgtggccaaggccggggagctccgcgccaagggcgtcgacaccgtggcctgcgtctccgtcaacgacgccttcgtgatgcgcgcgtggaaggagagtctggggatcggggacgaggtgctgctcctgtcggacggcaacggcgagctggcgcgcgccatgggcgtcgagctcgacctctccgacaagcccgtggggctcggcgtccggtcccgccgctacgcgctgctcgcggaggacggcgtggtcaaggtgatcaacctcgaggagggcggcgcgttcaccaacagcagcgccgaggacatgctcaacgcgctctgaactcgcgacgccatggttggttcgtctcttccggcaagagttggtttcttttccctgaaaataatcgtgacggcaacggtggcttgtgttactgccgccactgttgtgaccggcgctgttactagtgcactgcagagatgcaagtttcttgcgaacatggctttataggtctagcttcatgcaattgttgacgccctctgtttcatgacttgtcatggtatgcaactcttgtctgagaattgatcatctgcatagtaccactactatcacaggagatctctattaaaaaaaaaaaaaagaaaaaaaaaaaaaaaaaaaaaaaaaaaaaaaaaagggcgcggacgcgtgg

SEQ ID NO: 25514 - DNA, 334 bp, Zea mays
  Clone ID: MRT4577_123274C.1
ctggggcgccgtcatattcgggccggatgatacgctttggaacggtggcacgtttaatctgagttggcagtttacacaagatgagccgcaacaagccatcaactgttctatttgtccctaggatgtttcatccaaatatatatgctgctggctgcatctgtctggatatcctacagaacgcaatgtagttctatatatgatgtcgctgcaattgtaacttatatccagtgcctgctaagcgatccaaacccactctccgctgcagactcagaatcagcaagagtgttcatcgataacatgctctagtatcaaccgtaaagtccgtgaaatcttt

SEQ ID NO: 25515 - DNA, 449 bp, Zea mays
  unsure (1)..(449): unsure at all n locations
  Clone ID: MRT4577_123275C.1
tccatcgccgtctcgcggaaaggagaggcnnnatggcgattgcactattgtatcatnncctaggaaacccgtcgccggagcccaagagtatgaagctnnngcagtcctccaaggggaacgtctcaggagaggcgatcgaagagcacatatcgcagtagggggaccgagatatgggtaccgcgaggaaaaagtgcaaagccgagggctgagacgaccatccacgaccagaagctcgagatagtagaggacaaggagaaaaggggaaggtgaccnngtacccgaaaaaacctcgtcacttatgnncaccatttgccctaaccccgaagggcccaggaagcatctatttgaagcttgggctactacgcccactncagcatctccaatcggtaaaacatatattctcgcactcaaggcaggttacccctggtctggctccaatgcttcgtctg

SEQ ID NO: 25516 - DNA, 480 bp, Zea mays
  Clone ID: MRT4577_123276C.1
atatactattttatagggcatgcacagctttgaacccatcaaacaggaactgcttccatttttaacaagctaggggttagaacagacctccatttgcaaactggttagaaaaattcattacctttaggaggaaaaacggccccttcacaacaagcgctggacaaaggcttttaaagccaaacgataacctgctgcaccaggtgaatttccccaaggaggtcctaaagatcctccaccaaagggaaactcggcattataaacgaagatttctgacgcagcggggaaaaaccaaacacaaaaacccccaaaacccaccggtttaacacctgggatggacacccattcctgagggaaaaaaaacccctagaacgaattttttgaataaaataattgggcagaaacaacacaaaaactaaagttgtttaaagatccccttctaaattacactactattgtaccggagtggataggatctccccc

SEQ ID NO: 25517 - DNA, 348 bp, Zea mays
  Clone ID: MRT4577_123277C.1
tttggtctgatttatgtgcttgtagagaccgacaaactagtgaataaacctcctctccatcgggacttcgataagaaggaacacgcatcgtaatcgcatcctaagttaagattgttagaagtcaacaaattattattagtcttcttggggatcccgttcaacgggatcggggccttcggcgtcttaataaggttattggtgtaagttttcttattttcgttataagccttattgtttttgttctacgtattcttcttcgtatttacgggaacgtttttcaggaccttcttatttttcacgggcggcgcctaattcttggtgttcttcttattgctagccgtaaacggc

SEQ ID NO: 25518 - DNA, 384 bp, Zea mays
  Clone ID: MRT4577_123278C.1
gttgggggtttttttttttttggcaacatatccacttaagacaccaattagcagaaataagttcaaaacttcaaaatacttggggtccaatcaaagtccacaagccaactcagtatataattttgtctagggtagaccacacaaactagggcgggttaccaggcattttgaacaaatccgtttggatcattgctgaagcgtttttttattttttcctgaaaccaatactttaactcttagtaagtcacaagcacaggcaaatgtttcaaattgagtcaagggttaaaaggctttacctgccggatacacaatgccacggtttttttttacttgccgcttttagggaaaggtaaacttgttgttcgaggttgaactggaaaccct

SEQ ID NO: 25519 - DNA, 177 bp, Zea mays
  Clone ID: MRT4577_123279C.1
gttcacaaaaagttacagggggtttctatccaggtacattttgtctaacaggcctagacactatttgaccgggctactggcacgttacctgttcacagttgattggatgatacagaggccccactgcttcgggagattcctattccacctagtttccggcacaactaaacggtccct

SEQ ID NO: 25520 - DNA, 318 bp, Zea mays
  unsure (1)..(318): unsure at all n locations
  Clone ID: MRT4577_123280C.1
accgtccggattattcccgatcgacgagctcactagtcggcggccgcccttttttttttttttttttttttttttttttttttttttttttgggtttttgtttttttttttgttgnatatgggnggggggaaggggggggtggaaaaaggaaaaggccaaggggacatggaaagggtgacggtccccggggttgtaaaaggggggtcacacaccttttgtccctttaggcaaacacaaaagtgctgaatcttttaaaaaaaaaactctatcatatttgcgccgcagggcccctaaaagtctttggggggggacaaaaa

SEQ ID NO: 25521 - DNA, 535 bp, Zea mays
  Clone ID: MRT4577_123281C.1
ggccgcttttttttttttttttttattgtggttttttttgttttttttttttttttttttttttgtcttttttttttttgtttttgcttttcacatttttacttatttttcgtcgttttttgacttatctagctcgccagccagcaaccagaccacaggacagaggccacccacaaacccgggggggggggggggaggggaaccacaagaagccaacagcggccggcaaaacaacaccaacagtggctgcgccgggcgggcagccaacagccaagcgacctggcgggggggccccccccgccccacgacggaggggcaggacgcaagccgagagaccccccccaccgccccgggagggggacggcaaccgggccccagaaaaaaccgcagccgccgcgcctggtgcggaggcgggcagaggggcaccggcgggcccccgcgaaaaagccccgggaccggggcgggcggccccacccaacggggggggggcaaccaccgggggcgcctagcggggggcacggggcggggaagaggg

SEQ ID NO: 25522 - DNA, 264 bp, Zea mays
  Clone ID: MRT4577_123282C.1
actgccagtcaacttacatcatatatcactcacatacgactggatgagatcaacaaaaagttaagaagtggagagatctatccaacttacagggatcgttcaccgtccccggaacccatttataactcttctggtaaaaggatcaacagccgtgagcaaagatacaaaaaaaagcttgaagatgagagatctaagcttatcgagcagactatcaagaacaatcccgaacttaataaggatattgaccatcagacttacttggac

SEQ ID NO: 25523 - DNA, 1711 bp, Zea mays
  Clone ID: MRT4577_123283C.1
ggaaggtctccaatggcgaggatatgttttaccttgagcaagaacctgggagtgtgggcgagctggaaggtggcagcatctagcaccgaatggcaaatgctgtcctacatgtgtttgaggaatgcctcagggaggcaaagagtaacgggattatcaatggtggcaatgtggagagcgagctctccaagcggtggagagcacagaggatggatgagcttgatgtcttgagccggaggctgaggttgctcgtggagtatgctgcagcggttgggcattgaagcttagattttggtggttttggtgatgtgcctcccaccatttgcccctttgttgtgtatagaacctaggttattgtgctatgctttgtaatgtcttcctcagctggacccttataaagcctactatatttgcctatgtacccctcgtgtttaataatttgagcagcataataatctatggtgttagcactgttatttgcatgttgtatagaagctaggttcctgtgctatgctttgaaatgaaatccttgggcttactcgcttgcccagagggccagagtgcatccacgcttccatcccaacacgcccacccgcagcacccgcattccctccgggctcaacagagctctaccagaggacgatggagctgcttgggctagcagataggagtggtgggatagcacacttccttctctcccggtggcagcatgtgggagcaagctccaaggaggtgacagtttcctcttcacgatgctaccagggctggtctcctccttgcaggctatacaaggttttgggtgtgtgggctctagtgtcaccacggccttggccctcagaatccatggagaagcaggtgcttcattacctagcgtgagtagtggcgcgggagaagcaagatcatagccacctccgtctccgctggtatggcggtatctctaacccgttgtggtgcaggccgccgccgccaccaccgtgaaagttttgttttcatcgtattagttttgttctctctgttatgtacatactcatttgtgctgtgataggaagaggcaggccgcggtatggcttcgtagctatccagaatgagatgctggagcgtgagtcatccctgcgctaacattggaagggcaggagagataccgtggacatcgatgccacctcaggaaagcaggcaactgggcgattacaaaggtataactcttatagcacacatcagattcggtgttgcaggagcagactgaggctgtggttgctctcctcaattggaacaatggaattggcaatgagataaatcataaatgtggactgcaaaatggtggtaccatgcagcagtggcatcaaatggcaaatgatgtgctggatgcctggacgtgtttgaggagtgagtgcctccgtaaggttaagagagaattatcaatggcgacaatgtggatggtggtgttgaggaaagcgaacttgccaagcggtggagagtgcagaggatggatgatcttgacgtgaccggaggctgtggttgctcatcgaggatggatggtcttgatgtcttaagccggatgctgaggttgcttgtcttctagtcgagtgctccaggggctgggcaatcaagcaagttcgctttcgcccatacagtatgttactacgaatagaagttaggttgctgtgttctatactttgtaatgtcttcctgagttctgctcttgccttttcggttt

SEQ ID NO: 25524 - DNA, 372 bp, Zea mays
  Clone ID: MRT4577_123284C.1
gagctcatcttacggcggccgccctggctactcttcggggggaagattggaccgaaaggcggaacaagaacaagacagaagagaacccagaaccgcagcccgacagacaaagtcaagccatagagacgtaccggagaatacaacatttggactagacaaccaaccatgacgcgaagcaggacacaaggggagcactaagccctacaactgctgaaggccgaacaatgcaaaaacaggacaacggagagcactaacgcgagtaagaaacctccaaactaccctaaaatgaagccgacaaccaattactaggtggaaccctcaccaaaacaaaaacgggtgaaacaccaggaagcccgaggggtataaccatga

SEQ ID NO: 25525 - DNA, 398 bp, Zea mays
  Clone ID: MRT4577_123285C.1
gctctttttttttttttagtttgcagctgcacgtgcattaattcgataactggatacacatacatattgaggtagcaagggtccatgtatgtgatagcgcaataataataataataatacatccactagtcttggcttgaattgatacaaaggcggacacggtcacgggctatacatatatatatggagtatgcccatgcgtggcggcataggattataactattggtcctggcgacgacatgcatacggggttatgattattctatttacaacttgcattacatgcttgcatgcacgctgagcctgatggcacagctagatgcccagcgacgcgacacacattgcgcgtagcgctatacgagaggacgctgacacatggctgaacattacatgaccc

SEQ ID NO: 25526 - DNA, 500 bp, Zea mays
  Clone ID: MRT4577_123286C.1
cccacgcgtccgcggacgcgtggacggacgcgtgggcggacacgagggtgccgacgcggcgctcgtcgacatgatcgtgcccttgctgcttccgttacgcctcgtctgcctcggactcagactggcgtccgcccggcacagtactatgggttgatgcgggcgacggaccagagccgataggctcgacacagccgcgctccccgcaggcatggtgaccctcccgcgtgaccacttccgggagtgcgccgctccgaacgcttatggctgcagggccggggatgatgacggcggcttacgctaggagctgcacatggaggacgagcacataaagcagcaactggcgcggctagaatctctttgggataggaaagagaaagctgtggatgataaacgtgattctttaaaggaggacaatggcctgggcactgagagcaatggcactcgatggacagtctctgatcaaagagcgggaaaatatcaagattcaggaatcatgaagc

SEQ ID NO: 25527 - DNA, 131 bp, Zea mays
  Clone ID: MRT4577_123287C.1
ggaggatcacgctgacactgagacgcttcggttatggaatacgacatgaggacacgggggatgagagcctatagctagcccgagcaagcctaacttaacaccatggacatgttatgccactgatccagcta

SEQ ID NO: 25528 - DNA, 570 bp, Zea mays
  Clone ID: MRT4577_123288C.1
gctgtcgatccaattgtcacttgctctccctccaacaagctaattaaggccggtcgtcatccctcttctagctcgttttattatccatggcggaggagaagcaccaccaccaccacctgttccaccataagaaggacgaggagcaggaggagcagctcgccggcggcgggtacggcgagtccgccgagtacacggaggccacggtgacggaggtggtgtccacgggcgagaacgagtacgacgagtacaaggaggaggccggcggcgagaagaagcaccacttcttcggctgattgatccctcccgtatcgtcgtccctccccgtgtgctacgcgtgcgtgtgtgagattgatatcgagcgcccgccgtgttgtgcgcgcgtacgtatgtatgcgctcgtgtgatgcacgaataagcgtggctacgtaatctatcgtatgtatacgtgtgtgtatgcatgtgcttgtgtatgatcgtggtacgaggcccgaaaaaatgtatgcaactctgatttacttacatgtttagttgtttacgtttctccaaaaaaaaaaaaaaaaaaggccccta

SEQ ID NO: 25529 - DNA, 248 bp, Zea mays
  Clone ID: MRT4577_123289C.1
gctcgacgctatcgagaacatgaacggcaaggagctcgacggccgtaacatcaccgttaaccaggcccagtcccgtggcggtggcggtggcggcggtggctacggcggcggcggcggcagctggagccactgatgtatgcgcccatacctggcatcagccgaatcatcttatctatcgctactatcgtgttaacgttcgcttctgtcaccgtgttagtgtcagtactacctatggaatacgtgttagt

SEQ ID NO: 25530 - DNA, 294 bp, Zea mays
  Clone ID: MRT4577_12328C.1
caccgaggagacgagctctgtatcaacaagtgactcttttggccgcgctacgaaggcaatttcagcctcggactgatcacacctcactcgagttggagtgtcctccaaatggcaccttggttgtgcggacagatgccaaaaagctcacatgtggagctgaacatgatggcgccaacagcacgtcagaactccaataatgacgacaagatgacggacggcggacatagctccaaagaagacgaggatgtgtccactaaagtaaagaagaaggctcctagcgaagatgaagttgat

SEQ ID NO: 25531 - DNA, 938 bp, Zea mays
  Clone ID: MRT4577_123290C.1
agatccaattgtcacttgctctccctccaacaagctaattaaggccggtcgtcatccctcttctagctcgttttattatccatggcggaggagaagcaccaccaccaccacctgttccaccataagaaggacgaggagcaggaggagcagctcgccggcggcgggtacggcgagtccgccgagtacacggaggccacggtgacggaggtggtgtccacgggcgagaacgagtacgacgagtacaaggaggagaagcagcataagcacaagcagcacctcggcgaggccggcgccatcgccgccggcgccttcgcactcgtacgtagtcctccgatcgatccgatcctccttgagtagtatatacatacatgaacgcgataacgaataatatattaatcgaacgaactgaatgatgatcacggatcacctcgtgtgacgtggacatgcacagtacgagaagcacgaggcaaagaaggacccggagcacgcgcaccgccacaagatcgaggaggaggtcgcggcggcggcggccgtcggctccggcggcttcgccttccacgagcaccacgagaagaagaaggaccacaaggacgccgaggaggccggcggcgagaagaagcaccacttcttcggctgattgatccctcccgtatcgtcgtccctccccgtgtgctacgcgtgcgtgtgtgagagtgatatcgagcgcccgccgtgttgtgcgcgcgtacgtatgtatgcgctcgtgtgatgcacgaataagcgtggctacgtaatctatcgtatgtatacgtgtgtgtatgcatgtgcttgtgtatgatcgtggtacgaggaccgaaaaaatgtatgcaactctgatttacttacatgtttagttgtttacgtttctccaaaagtattagtacccattatgttaaaaaaaaaaaaaaaaaaggccccta

SEQ ID NO: 25532 - DNA, 621 bp, Zea mays
  Clone ID: MRT4577_123291C.1
gccggccggttcgggaagacagctgtcgatccaattgtcacttgctctccctccaacaagctaattaaggccggtcgtcatccctcttctagctcgttttattatccatggcggaggagaagcaccaccaccaccacctgttccaccataagaaggacgaggagctggaggagcagctcgccggcggcgggtacggcgagtccgccgagtacacggaggccacggtgacggaggtggtgtccacgggcgagaacgagtacgacgagtacaaggaggagaagcagcataagcacaagcagcacctcggcgaggccggcgagaagaagcaccacttcttcggctgattgatccctcccgtatcgtcgtccctccccgtgtgctacgcgtgcgtgtgtgagagtgatatcgagcgcccgccgtgttgtgcgcgcgtacgtatgtatgcgctcgtgtgatgcacgaataagcgtggctacgtaatctatcgtatgtatacgtgtgtgtatgcatgtgcttgtgtatgatcgtggtacgaggaccgaaaaaatgtatgcaactctgatttacttacatgtttagttgtttacgtttctccaaaaaaaaaaaaaaaaaaggccccta

SEQ ID NO: 25533 - DNA, 524 bp, Zea mays
  Clone ID: MRT4577_123292C.1
ccctcttctagctcgttttattacccatggcggaggagaagcaccaccacccccacctgttcccccataagaaggaccaggagcaggaggagcagctcgccgccggcgggtacggcgagtccgccgagtacacggaggccacggtcacggaggtggtgtccacgggcgagaacgagtacgccgagtacaaggaggagaagcagcataagcacaagcagcccctcggcggcgagaagaagcaccacttcttcggctgattgatccctcccgtatcgtcgtccctccccgtgtgctacgcgtgcgtgtgtgagagtgatatcgagcgccccccgtgttgtgcgcgcgtacgtatgtatgcgctcgtgtgatgcacgaataagcgtggctacgtaatctatcgtatgtatacgtgtgtgtatgcatgtgcttgtgtatgatcgtggtacgaggcccgaaaaaatgtatgcaactctgatttacttacatgtttagttgttcaaaaaaaaaaaaaaaaaaggccccta

SEQ ID NO: 25534 - DNA, 573 bp, Zea mays
  Clone ID: MRT4577_123293C.1
atctccccaggtgctcgaggaggtcgatcgatggcgtcggagaaagacgcggcgctcgccgccgtgcccaacgacaaccccaccatatttgacaagatcatcaaaaaggagataccttctacagtggtgtatgaggatgagaaggtcctcgctttcagagacataaatcctcaagctccgacccacattgtaatcattcccaaagtcaaggatggattaaccggcctttcaaaggcagaagagaggcatgtagagatacttggctgtctcctctacgctgcaaaagttatcgcaaagcaggaaggacttgaagatggctaccgtattgtcatcaatgatggccctagtggatgtcaatctgtttaccacatccatgtccatctccttggagggaggcagatgaactggcccccaggctaaagaagctcttggttgtcggtcaatcttcatggcagctatgtcctttgcatcccaatcgaataattcctgtaattgacataacagtttgtgcgaggaacatttgctctatctatggaattggcaaaaccatcctgctgtgaatgtatggacaag

SEQ ID NO: 25535 - DNA, 509 bp, Zea mays
  Clone ID: MRT4577_123294C.1
gtccgatccaattgtcacttgctctccctccaacaagctaattaaggccggtcatccctcttctagctcgtttcattatccatggcggaggagaagcaccaccaccaccacctgttccaccacaagaaggacgaggagcagctcgccgccggcgggtacggcgagtccgccgagtacacggaggccacggtgacggaggtggtgtccacgggcgagaacgagtacgacgagtacaagaagaagcaccacttcttcggctgattgatcctcccgtatcgtcgtccctccccgtgtgctacgcgtgcgtgtgagagtgatatcgagcgcccgccgtgttgtgcgcgcgtacgtatgtatgcgctcgtgtgatgcacgaataagcgtggctacgtaatctatcgtatgtatacgtgtgtgtatgcatgtgcttgtgtatgatcgtggtacgaggaccgaaaaaatgtatgcaactctgatttacttacatgtttagttgtttacgtttctcc

SEQ ID NO: 25536 - DNA, 966 bp, Zea mays
  Clone ID: MRT4577_123295C.1
gccggccgggtcgggaagaagaacagctgtcgatccaattgtcacttgctctccctccaacaagctaattaaggccggtcatccctcttctagctcgtttcattatccatggcggaggagaagcaccaccaccaccacctgttccaccacaagaaggacgaggagcaggaggagcagctcgccggcggcgggtacggcgagtccgccgagtacacggaggccacggtgacggaggtcgtgtccacgggcgagaacgagtacgacgagtacaagaaggaggagaagcagcacaagcacaagcagcacctcggcgaggccggcgccatcgccgccggcgccttcgcactcgtacgtagtcctccgatcgatccgatcctccttgagtagtatatacatacatgaacgcgataacgaataatatattaatcgaacgaactgaatgatgatcacggatcacctcgtgtgacgtggacatgcacagtacgagaagcacgaggcaaagaaggacccggagcacgcgcaccgccacaagatcgaggaggaggtcgcggcggcggcggccgtcggctccggcggcttcgccttccacgagcaccacgagaagaagaaggaccacaaggacgccgaggaggccggcggcgagaagaagcaccacttcttcggctgattgatcctcccgtatcgtcgtccctccccgtgtgctacgcgtgcgtgtgtgagagtgatatcgagcgcccgccgtgttgtgcgcgcgtacgtatgtatgcgctcgtgtgatgcacgaataagcgtggctacgtaatctatcgtatgtatacgtgtgtgtatgcatgtgcttgtgtatgatcgtggtacgaggaccgaaaaatgtatgcaactctgatttacttacatgtttagttgtttacgttaaaaaaaaaaaaaaaaaaaaaaaaaaaaaaaaagggcggccgccaccgcggtgga

SEQ ID NO: 25537 - DNA, 212 bp, Zea mays
  Clone ID: MRT4577_123296C.1
acgcagaccccttgccgcacaggatcgaccaggtactactgagctcgcttgctgcatggctcgtgcccgggcgatagacttacctactgaatgctactactggagacgagagacggttagacggtgatcgccctcatgatactcggctagctgccggcgtcgacagactgcatcaacttgctacgggcttgctcacaccataagactacggt

SEQ ID NO: 25538 - DNA, 587 bp, Zea mays
  Clone ID: MRT4577_123297C.1
gccggccggttcggggacaagcaagaacagctgtcgatccttttgtcacttgctctccctccaacaagctaattaaggccggtcatccctcttctagctcgtttcattatccatggcggaggagaagcaccaccaccaccacctgttccaccacaagaaggacgaggagcaggaggagcagctcgccggcggcgggtacggcgagtccgccgagtacacggaggccacggtgacggaggtcgtgtccacgggcgagaacgagtacgacgagtacaagaaggaggagaagcagcaccacttcttcggctgattgatcctcccgtatcgtcgtccctccccgtgtgctacgcgtgcgtgtgtgagagtgatatcgagcgcccgccgtgttgtgcgcgcgtacgtatgtatgcgctcgtgtgatgcacgaataagcgtggctacgtaatctatcgtatgtatacgtgtgtgtatgcatgtgcttgtgtatgatcgtggtacgaggaccgaaaaaatgtatgcaactctgatttacttacatgtttagttgtttacgtttctacgaaaaaaaaaaaaaaaaaaggccccta

SEQ ID NO: 25539 - DNA, 306 bp, Zea mays
  Clone ID: MRT4577_12329C.1
cgcagctcctaactggtacacgactgtcctgagcgtcaatcaatttacaatatatgggacatcagtccgttctgggccgttgtcacgtgagattccctcaagtccatgtcgatttaggaaggatatcagatcacccaagtggactgcacacgtgatgcgatgtcgcagctccacgcggacagagtactcctcaccgcccatgactcatagtatgagttgccccactggtacttgcacagattgagcaccattgactgcgtctaaaacacgagctgggccacactgagcctgatcaatgaccgaaaa

SEQ ID NO: 25540 - DNA, 352 bp, Zea mays
  Clone ID: MRT4577_1232C.1
ggaaaacagttgttccatgagcgtgtgcagaggatggtgccggcattatcattggtacatgttgtgtgtgacctattgatacagaagatgctccacagatctcaatcctccagacggatgaatattttttagaggtaaagaatgaaccttcttcacattttaaggcattttaactgccaatgtggctagcaaggccttcatttctgtcggttaccggtttaatttcaactttatggctcccattgtcttcagtgtttcatgataccaacatctctggccttctatgtctagtcagacttgactgtatttttaatatgggagcgacgttgtttttccttattgcttatgcatg

SEQ ID NO: 25541 - DNA, 429 bp, Zea mays
  Clone ID: MRT4577_123300C.1
gggccccacaaaaaggggggaaaactttcctggggaccccctttcccccaaaaaattaataaaaccccggggttttttttttggccatttttaaaaacaaaaaaattcaaacccaggggaaaaatttccaacaaaaacccaaccggttagtccttaaaaaacaaaaaacgggagttaggccacggggccccccttccttaaggcatggggtaattaaggggattcccccattccttttgggggggccctgggaaaccccccccgaagttatgagggggacatttggggagcgggccaaaagggcccctttgttacccagggaacccgttattttttcccacaccttgtttttgccactgaaaaaacccccggtctccccggagggcccggaaaaggtccccctttcccccacgggaaaatccggggggg

SEQ ID NO: 25542 - DNA, 326 bp, Zea mays
  Clone ID: MRT4577_123301C.1
gccaatcgagcgagacataccacttctttcttattcattgagaagcccatcccttagcggtgctaacaacaggccaaccgagctttgctactgaaaacaacgtaccggatcttattacaccataacctaggagtgaaacgatagatcttttcactggtacatgagtacataactcaacgctcataatgtataacatcaacagcttaaactaaggcccatgctatatttatgtgtttgcaaaacatctgataacgtacaccaaaaaagaaaagaactggacagcgaatataatgatccaagcgtaattacgcttgcttacaagcaca

SEQ ID NO: 25543 - DNA, 562 bp, Zea mays
  Clone ID: MRT4577_123302C.1
ggccggccggaagaaaacagctaaaagaagaaaagcaagtgtctcggtctctcgaagctcagggcaaaagtgaagctaccagaccatgtcgtagcccctagttactactgcttgattattacttttcgcttttcttgggagtaaaattttatttactcgccgttttgggctgtccatgtttctgtgtagggtcgtttggggccttgattttttcagataattggtgcctttcttgataagtggatatacaaccgaggatccttggacttctatttaattagcgactccgcaggtatcatataaccacaaaatgaggaatcacgtgaactactggttatatttcccctggatttccacaaagttttttaggaaatttcgcactttttttcatggagaaatttctaagacaccaatgaagttctcgcataaaataataaaaaaaccctaagctgtgctcgattttcatttttttgccatgaacaactgctagtcaagcacaaaacaaggatttcctacctctccacactcgacaaccattattttcacagcttcaagaactctc

SEQ ID NO: 25544 - DNA, 209 bp, Zea mays
  Clone ID: MRT4577_123303C.1
aaatgtgtatctgggatggatggacgcaataatatgggggaggtggacaacggttgctggtggtggggtccagccttaatattcaatggaaacattttaccccaaccagggacaatcccttggctccgggttacaaggtaaaaaacccctctttttttttccaggcaatttaaacctccggggttttcccccgtggccacacacctttt

SEQ ID NO: 25545 - DNA, 586 bp, Zea mays
  Clone ID: MRT4577_123304C.1
ccggccgggacctcaccacctagctgtgccgctcaccgccaccctaccctcgtataactaaaactgactcatgttactgagaacccagtatggaaaacgcgccgagcatcctggccctctgtctgataacactcctgtgcactatctacatacctatccgccacacaaaacagcgactgctagatctatatctgcatgcagaatgtcgtctactgcatcacaaccgactcctactgcctggacttgtgccacttcttcccgtgcccatccctggccgacgccaatatcggcgacttcgatgaatactggaagcagcggcaagctcatgcgtcgactaccgcggccgacgacacgtacttcaatgacaccaacaacctcgccgacaaccttagccatgcaaaccacttctacacccagaacgcggacctgagcaccatcaacgcatatcatggctacgaccatgacgaaatctaggtgcagggcaacgcgcgagatcgacgaactcctatccacacgtgctgcacgagaccggacgtttgtgctacatcaccgaaatcgcctggagcgacgccctactgcgattcga

SEQ ID NO: 25546 - DNA, 887 bp, Zea mays
  unsure (1)..(887): unsure at all n locations
  Clone ID: MRT4577_123305C.1
atggtgttgaccttccagcttgggcccttanagccattgataagattcgtcgaggttttctgggcgaggccgaagagatgtaaaaggtggtcattgtcacgtggnctggggaattgtttgtaggcctcgtgaattgggtggtctaggcatttccagcataaaagaacttgcatggtctcttagaatgcgatggctttggctggctaaaactgagccaactcgcccgtgggcctctcttgctatccaggtccctaaaaaagtgaaagatttcttctcaatgactatgcaaactgagattggaaatggggctacaacctttttctggactaataggtggttatcgggtcacagaattcgggatttagtccctcgattatttgggatcattcctaagagaagggttagcaagagaatagtggtggatgctatctctaatcagagctggatttctgacattcaaggagctctttcggttggaattatcaatgaatttctcatcttgtgggatttaattgactcaattgttttaagacctcaagttgaagacaagcattttttccgtctagctgcaaacggaaagttctcctcaaaggaagcatataggggtgaattctttttgggatcttctgagtttgagccttttcatagaatatggaaatcttgggctcccccaaaaaccaagttttttatgtggttggtcgctcacaggaaggtttggacggcagacaggctgcagaaaagaggtatggaccatccagagagatgtccactatgtgaccaggatcaagaaaccttggaccatatgttgattggatgtgtttttgctcgtgaattctgttttaaattgcttcttcaagtgaacctgcagtttcttgcccccccaatct

SEQ ID NO: 25547 - DNA, 676 bp, Zea mays
  Clone ID: MRT4577_123306C.1
gttcacagagagctcgatccagagagagagagaaaagagcgagagtgataactgagagaggtctcgcgcgctcggcgatggcaaagtcgttcctcgcgatgaagacgggcccggcggccggcgcgtcggaggcgtcgcaggcgctgctggagtcggacctgcgggagctgaccatggcggcgcggaagctcgccaaccacgccatcgtcctcggcggcggcatcggcttcatcggcaccttcctccagtggctcgccttcgccgccgctgtatatctcttggtgctggacaagaccaactggaagaccaacatgctgacgggcctcttggtcccttacattttcttcaccatgcccggtctgctcttcggcttcataaggggggagattggcagctgggttgcgttcgttttcgtcgtcctgcggctattctttccgcgccacttccctgattggctggagctgcctgggtctctgatcctcctcacggtggtcgcccccgccatcttcgcggacaccttccggggctcctggctcatcatcggcgtcggcgtgtgcctggtcgtcgggtgctacctgctccacgagcacatcaaggcagtcggggggcctcaaggaggccttccagaagcccaatggctggtccaacaccatcggtatcctcctcctcttcatct

SEQ ID NO: 25548 - DNA, 441 bp, Zea mays
  Clone ID: MRT4577_123307C.1
agcgacaaactaactgtacatggtgaaagcattggcacctgcatttttcatagttttccacaagctgtttctaacatgagggcacaagtacaccggtcattccatccatgcatttttgccgccgccacacccacataataaatcaacttttgtggaaccctaaatgttgcacaactttacaaaaaaaacatacaagttcagcctatacaccactttccaaattaacaaaacaagatgccgatccttgcattctcgctaggtactgggcctttccatgctgttggtcctagcattctttcgcattttttccacgatgtgcctcccttttttttcgatgggccgccttttttccttcaacttgtcccccatccttttcccgaaatccattattcgagctcgcctcccgcttttttgctttgcgtcctttccaatgggggatgc

SEQ ID NO: 25549 - DNA, 679 bp, Zea mays
  Clone ID: MRT4577_123308C.1
aggccggccgggccgggatccacagcagcaggcgagatgcagatccagcgatagcgcgcggcggcgggagccttggcgctcagttcctcaccctccgtgcctccgtttactcgccgccgtccggccgggacgatgaacaggccgaggagtgggagtggccagaagaaggggaagcgcgggggaggaggaggcggtgggctcggcgcggcgctgaggaagcaggtggccaggctctgcatcatccgggagtgcgtcatcatgctcctcttctaccacgactgatcccactgacgatgccctttgcggttcttcctggccattgactacctttatctttttttttttctcgatgtgcctcgtgtatgtacatacagggtggtggtggtggtggtggatgttcttgctcttgctcttgctcacgtgtgtgtctgtatctccatcattttttgacactttattgcttcctcttgctgcctgctgagcatgcagtacctagcttcgcttgcgttccctcgctggtgcttgtgctagttgcgtgtgtaggacagcggactcctaggtatctatttgcttggctgctccgccatgtcggtgctctgctgtctgctcatacatcaccaggctcctggagctctcttgggtgctctgtgccatggtgtttgtacttatatataagtgc

SEQ ID NO: 25550 - DNA, 371 bp, Zea mays
  Clone ID: MRT4577_123309C.1
tgcttcccttattttccccatacctctcaccagaggtgggtcttttttttgaaaacccaattcttcaaccccacaggatccaacaggcaatcgcagctggcatcttacctttatcaccctagatccttcaacaatcatcagccctattacagcagatacctttggtgcatttataggctcaaaacaatcagggcacaacagctacaacaacatgtgctagcaaaccttgctgtctactctaagctacattagtttcttacattcaccaactagcttgcattgaactctgcttttttattgcaacaacaacaactactattcaaccagattgctgatgccttccccctgcagttaattccataaatccaact

SEQ ID NO: 25551 - DNA, 462 bp, Zea mays
  Clone ID: MRT4577_12330C.1
tttttgatacagaagtatattaaagaatatggacatgtcaatgcctgctaacgtgcatgatcaagctaaacatggtacaaaaaaatttatttaaagaatgaactggccgtagtgaatacaactgtggtattaacaggaatggaagctcgacttttgagctctaactaaacttattctaaaatgaatgtaaacaaaaaatagggaaggatcaatatataccaaaaacgggggtaaataagaaagaaagactgtcagtgatcctctaacatctaagtaaactaattcatgaatttccggcagttagcagtctggcaaaggcatggcacttcgcgttcatcaccctcatctggatcaaacaggtagtcatacgttagctcatcaccagcacaaacatttttcttggctattagaacaatacgactttcatcatgttcaacactcataatcctcggatagcagttt

SEQ ID NO: 25552 - DNA, 336 bp, Zea mays
  Clone ID: MRT4577_123310C.1
gggggagggataaaaccaaatcggaaagccctgggccaggtctcccaaagggcggggaaaaggaagaaacgccactggcggaccttttttaattgcaagcccgggtcaaaaaactagctaaaggagaagaccccatattgcatcatgaaaaagggggaccagaccatcttgtacgatgataggagaagaacaaggaaatggaagcgggctcccgagccttttcaagggcagggttttcctggaaacggactgggggtctggtgccggactaatcaaccaaagggagacccggggaggggggaacttggcacccaacccgcttagtttagcaagagc

SEQ ID NO: 25553 - DNA, 637 bp, Zea mays
  Clone ID: MRT4577_123311C.1
ccttcaaaaagggggagaattggaaaatcaaaacagggaaacccaaccggggaaacttgccgggaaaatttttaaaaccccaaagggaaaaaggaaatttgggcggaaccaaaaaactcccaaattttaaaccaaaacttttttaaaggaaaccctgggggggggaataattttaaaaccttttttggggacttgggttccttttttggggacttgggggcctttttaagggaattttttttttttggggcccccttaaaacccttttcccccccttttttggggaaaaaaacccggtttttttggggggggacccccccgggcccgggggggacccccccccaaattttggcgaactaaaaggttttggggatccccaaaaacccggggggggggaaaaagccccttttttttgtttcctttcccgggttggcggcccatttcaacccctgggggggggggtccctaaacccggggggaaaaaaaaagggggccccggggccccccccctgggggaaccggccttttttgggggaccccccctccccgcccaggggaaaatggaacccggcttttgggaaaccaaaaaaaattttttttttgggggcccaaattttggccccaaaccccccttttt

SEQ ID NO: 25554 - DNA, 296 bp, Zea mays
  Clone ID: MRT4577_123312C.1
aaacggggaacatccagaagatagcaaacccgcatattcacccattttttacccattcaaaaagccgatggggcattttggggggggggggggccacgttggcccaagcccacaagttttgggggaactccgacaggtacaaaaccacgacgacctccaacatggggatgacaaagggcactggggatacaatagataacaaactttgggcagactgcactccaacacgggggggcaatcacttaagggggggcttcacaagggatttaacgttcaggtttttccggacccctggg

SEQ ID NO: 25555 - DNA, 565 bp, Zea mays
  Clone ID: MRT4577_123313C.1
ccatcatctaccatcttgcaacatatattctctttttattggcaaaatccattaagcggataacgaaatattataatgtcacacacactattgattcctcgtgaacccatccatattctttgcttgaccgctttcataaacaatccaccccgaagcttttacatcatgatgtctttgtaaatttaggaaaacacacacacagttggtcaatgataatcattacagattctaaaagaatttggtagccactagtcaaagaacttaaaaggcaagatttatcgggacattaggacaaggtagatgaatgcattattagaaaataaaaaaaccctttaacattttgtttaatagaaaagaagtagaggttgattagttattgttaaaagaaaatgtgttgggcttgtcttttccttaaatgtcgcgaagcttaatggtataagcgaaagagaaagcatagcatgatgggccatatataaataaaaactccagtatgctacaaaaacaaagttcaatgcacttatatctcgttaacattttttaatttattcttttatgtgtcccccat

SEQ ID NO: 25556 - DNA, 713 bp, Zea mays
  Clone ID: MRT4577_123314C.1
ccgactcctaagctagaatcgcactccactccactctccacaatccagtcctcactcccacacccgtacgcttcgcggcgcgtcgcttttgccagccatacgccagcctgagcgcctgacgtcgcaggattcgccgggaacgcccacaccaccggccgcagctgaccaggcagacgagtagggtggtggtggtggtggtggcagcggtagcgcgggggcggggcggcgctgcgtgaccgacgccgcgggagatgaaggccaaggccctccctttcatcgccttcgagcacaagcgagacgcctatggcttcgccgtgcggccacaacacctgcagcggtacagagagtatgcgaacatctataaggaggaggaagaagagaggtccgacagatggaagaattttctggatcggcaggctgaggatggagaatcatctggagaggatgccaaggttgcgccatccaacgaggaagatggagttgctgccaaggatggcaggacagagccaagaccacataaaatccaaatatggtctgaaatcaggccctctttgggccatattaaggagatgatgaactcacgcgtgaagaagcaatcttcttctgttaatgacgggtacacgagggatgaaccacaccctggtaattctgaagggagcaagccatccggagattcagatgatgaggtctatgatgtagagaaagttgatcct

SEQ ID NO: 25557 - DNA, 322 bp, Zea mays
  Clone ID: MRT4577_123315C.1
actacatagggcgattggtttaccacgaggccggccgggacggacggtggtctgtcaggtcttgtataatagcgttgtcgcctgtttatgtttgcagcgagtcagctgttacttagcacaccttacacctccttcatgttgtaattcccatcaccggtgctgatgaatgtgcacaaaaaaaaaaaaaaaaaaaaaaaaaaaaaaaaaaaaaaaaaaaaaaaaaaaaaaaaaaaaaaaaaaaaaaaaaaaaaaaaaaaaaaaaaaaaaaaaaaaaaaaaagggaaaaaaaaaaaaaaaaaagggggggcccccaaaccccaat

SEQ ID NO: 25558 - DNA, 366 bp, Zea mays
  Clone ID: MRT4577_123316C.1
cccacacacagtcgcttagacagtcgtctatatactcgactatgtgcgtgacccatagtgcgatccttctttcaattcttatctcagtcgtcactaccgccttcggtccccaccatgagggagagcatgagggagcgcatcgcgcaggacattgtccaggccggaatccagtgctgagacccgtgctgggtgctgcactgccttcaggctggtattcagactcacggccacatgaccagtgacgggggcaatgagggaggtgacgacgcttttaacaagacttgtactgagaatgacgctcagaaggacgttcctggtgacgtttttgccaccgttgtgcccactgtgatgactgaggcctagact

SEQ ID NO: 25559 - DNA, 454 bp, Zea mays
  Clone ID: MRT4577_123317C.1
cataagagaggacagattcattagaaagaaactgtaatgaaccttaggtacaattgccatgaattagattattcaagtgacatgaatgaagtagaatgaggctagaaatagctaaggcagcaaatatctgatgatgagagcaacacccaacaccggggggcgtttgccttcaacacgatttctttgtttccagctccatcactcgtcttgtgtttgcagcaaactcagccatgagatgttcagtgtaaagcgtcagcgacttggggaattctgcaaagcacttgtatgtgacgtatctgcggttgctcccagtcccagccgacgacccaacgactgtcccagacatgtaagccctgcaagcgtcgaggatggcacgctatgctcggggaagtgccacaacacaagggtctcaaaagcattggaggctccggagtgatcagcatcgtctgcatga

SEQ ID NO: 25560 - DNA, 1599 bp, Zea mays
  unsure (1)..(1599): unsure at all n locations
  Clone ID: MRT4577_123318C.1
ccctggcactatatcattcatttggagattttcaatcagctgtatagctatgtaaaattggttgcattttaggtgatttgtgggaattaaattgcaatgtaccagaaatcgatcttaatttatgcaatagattatatgggaaaaatcataccatggattggatgtaggctgaaaccagttacttcatctaggctaaaattgttggttctgtacaaaaggtagtctaattaggctttgatatccgaattaaatgtttatcacctacttttagaaaaaagttagtcatcttcacgatccagttgatacatattcacaaatttgtacatgagtaacaggcaacaacttttctcaatttatccagaaaatgacttatttttaggggcctggtgtatatctctatcctattattttattctcagcacattcacattcacaactagctcaacacattcacattctcagataccgatctactggacatcatcaactcagagatcaagtacgcccgaggactcaggactgcgatgaccacgacacgaatttgtgatgtcacagagtagggatgatgatgatctatatcaaaaaagactaggttcctcatgttcctcatagtcctctccataaagcactagaaagtatactaccattctggcggacttcggctgaacccgaacctgtacgagagcgggaaagtgtgcctgagccttctgaacacctggtggggcaaggggtgcgagaagtggggcaagtcgagctccaccatgctgcaggttctggtctccatccagggcctcgtgctgaatgacaggccatacttcaatgagccaggatacaagaactcggctgaaacgacaggtggtgagaggtgttccttggcttacaatcagacgaccttcgtcagatcatgcaagacgacgctgtattcactccggaagcctccaatgcattttgagacccttgtgttgtggcacttccacgagcatgagcgtgccatcctcgacgcttgcagggcttacatgtctgggacagtcgttgggtcgtctgctgggactgggagcaaccgcagatacgtccatgacaagtgctttgcagaattccacaagtcgctgacgctctacactgaacatctcagggctgagtttgctacaaacagaagacgagtgatggagctagaaacagaagacgagatcgtgcctagcatagcagctagcatgaaatcgtgttgaaggcaaatgccccacagtgttgctctcatcatcagatatttgctgccttagctatttctagcttcattcatgtcaagtgaataatctaattcatgacaattgtacctgtctctatatctaatgaatctgtcctctcttttgtagcagctagcgtgaaatcgtgttgaaggcaaatgccccccggtgttgtatgttgctctcatcatcagatatttgctggcttagctatttctagcctcattctacttcattcatgtcacttgaataatctaattcatggcaattgtacctgtccctatacctagatggcttaaaatctgaaggtttattacagtttctttctccccnnnnaagagaataaattcanngnggn

SEQ ID NO: 25561 - DNA, 527 bp, Zea mays
  Clone ID: MRT4577_123319C.1
acttttgatctttttttctactagaccaccgagactacccatacattcatgaccactgatcggctatgtatagggtaaaatgcatgcaacaacctgttacaggggtcttacaaacatcaacgcaggtgccaacactctcatgcgtgcccccccacttaaactgaggcgggatgcacatggctcttgcccggaagtgtcttatatggggagaccccaaattctgcccacacttaataataacaccgctgcctacaatggtgactcccacgaacccatgtgtccagatcatctattgcctagtgtcattagacagcacccaccactaggcccttactcttaggcacgtaatgccggctttactgccccttgtttgagttgcgtctttggccccttcctgatcttttccgcagggtgctctaaaatgtcagatctctttagggtcaagatatcacgaatgacctgccttatcaacagcagctgaccttgttagactcctcgctcacggtgtgcagcttcgacatgatcta

SEQ ID NO: 25562 - DNA, 1998 bp, Zea mays
  Clone ID: MRT4577_12331C.1
ctcgaggccggccgggctccgtgccgggcccgggctccatcgccttcccggagcagttcacagtccccactccacctccttctacaatcattgggtacctcgaggccggccggggatccgctccccgccttccgcttccctaccccccgcatcacctaccaacgccggcgccatgggggccttcgcgaaggaggagcaccagttcctagccgagctcggcctcgcgcagcgcaacccaggcgcgttcgcatgcggtgcgtggggcggctcaggtcccaccgtcacctccacgagcccgaccaacaatcaggtcatcgcagaggtcgtggaggcgtccgtgcacgactacgaggagggcatgcgcgcctgcttcgacgccgccaagacatggatggcgattcctgctccaaagcgaggagagatcgttaggcaaatcggtgatgcactgagagcaaagctccatcaccttggcaggcttgtgtcacttgagatggggaaaattcttcctgaagggatcggtgaggttcaggaaatcatcgacatgtgtgattatgctgtggggctaagtcgccaactaaatggatccattataccatctgaacgaccaaaccatatgatgatggaggtgtggaatccccttggagttgtgggtgttataacggcatttaatttcccttgtgctgtgcttggttggaatgcttgcattgctttggtctgtggaaattgtgtcgtctggaaaggtgctccaacaactccactgatcactattgcaatgacaaaaatagtggctagtgtattggagaagaacaacttgccaggcgcaatttttacatctttttgtgggggcactgaaattggtcaagcaattgcccttgacattaggatacctttggtttcattcactggaagtacaagggctggtctaatggttcagcaacaagttagtgcaagatttggtaaatgccttcttgaacttagcggaaacaatgccatcattgttatggatgatgtagatatccagctagctgtgcgatctgtcttgttcgctgctgttggtacagcaggacaacgctgcaccacatgtcgtaggctgattcttcatgagaacatatatcaaaccttccttgatcagcttgttgaggtatacaaacaagtccgaattggggatccgttggagaaaggcaccttactgggaccactgcacactcctgcttcaaaagagaactttttgaaaggcattcagactatcaaatctcagggagggaaaatcctttttggaggatctgccattgaatcagaaggaaactttgtgcaaccgacaattgtggaaattacaccttctgcaccagttgtgaaagaagaactctttggtcctgtcctttatgttatgaaatttcagaccttgaaggaagcaattgaaatcaataactctgttcctcaaggattgagcagttctatatttacaaagaggccagatattatttttaagtggctcgggccccatggtagtgattgtggtatagtgaatgtgaacatacctactaatggtgctgaaattggtggagcatttggtggagaaaaagcaactggtggtggacgagaagcagggagtgattcctggaagcaatacatgaggagggcgacttgtacaatcaactatgggagcgagctacctctagcccagggaatcaattttggttaatcctgcagaaatgttgcgcgtggatctcggtgttttctgcagacgtggatgccgtatggaaagaactgatgcaaccgcatttgagatctcagcagacttgagcagcatttattggcgtcagttgtgaaacttaaactgcaggagcatcttgtacataaataaaataagatgtttgttgctcgtgggccgtggcacgttttggtaccggtgtccagtctactaataaaatctaatgcaaaacggtcataactacattctcatgcagtatgaatttccggccttttgatctggaattg

SEQ ID NO: 25563 - DNA, 616 bp, Zea mays
  Clone ID: MRT4577_123320C.1
gacaatatatacacactatatttacgtgtaataattattattataaagggtctcctttataagtcttgtcctgggcctctctaatgtcaggaccggcactggcgaggaagatagcagtagagcacagagacacgttcagatcgcatttgtgtccttgcactagagtacattattattacacaaaggcacttcgccccggctgtagctcatgacgatctcaaggacaaaatcgtcgtatcctcctaatagtatcccattgtttgtacccgcataaatatattaaccacactagtacctcctataatggcaattgcaattccaatcctgacctcctcatccgccccctcggcgacgccgtcaggtcgccgtcccacagcctcacgacgctgccgtcgagcgcggccatgtcgatgtggcggtaccaacccaggtcactcctccgcctcaccgccatctccctccttcccacggccccgtggccagggccgccgctcttcttgtccccggctctgacacggtccttctgagaaccacctccaccgcgcagtctcggccgcgcgcaccgtcgtcgacgtcgtcgtcatccgcgcatttcctgacgccgtcgaccactccg

SEQ ID NO: 25564 - DNA, 656 bp, Zea mays
  Clone ID: MRT4577_123321C.1
gtttagctgctgttgtattttttatctgctcctcgccgtgtactaatggatgcagggatgtcgaagagcacggaaatcgcagataaagcaatcatcttgatgcaggatcatgccaagcatatctatcgtatttgcaatgagaagctaatattgggtaaaggattgactgcatttgaggtcaaagaacttcgtgaagcacttgaattcgccgccgaaggattggaccaggactcccttttttgccaagaggaattggatgcaactgttaaggaggaacaattggagcatgacgagaaggtggcttcacagatgattgaaagcccacttcttctcctgattcggactgcttcctatcccttgaagagcacattgagaagttttggggcgttgattacaactcggaccagatgacctagctactccgactaggctcagagtttatggtgctgtgaaattctggatgtttgggtgtaatggtattttggatgtgtatgtgaactgtaattctggatgtgtggatgtaatggtgaactgactgaatggtgtcttgtgtaatggtattttggatgtctatgtgaactctagttctgggtttaatggtgaactgaaattcagtgttcaaaaaaaaaaaaaaaaaactcgagggggggcccggt

SEQ ID NO: 25565 - DNA, 1058 bp, Zea mays
  Clone ID: MRT4577_123322C.1
aattcggcacgagggagagagctttatttaggtaatttagctttgtgtatatcttcttggttctagctctttgaattttttttatctgggtgcaggcggcggcaacaagatgaacaggaagccaggagactgggactgcagggcgtgccagcacctcaacttcagccgtcgggacgcatgccagcgctgcagtgaaccacgtggagttggtgatcgtagcggcggtggtggcgacttgggtgggcgtggtggttcctccttcggcggtggctttggtgctggctctgatgtccgccctggtgactggtactgctcctgcggcgcacacaacttcgccagccgctccaactgcttcaggtgctctgcctacaaggaggaggctgccggcgcctttgatagtgacatgtcacgctcacggggctacgccggcttcggcagcggcgctgccgcccgtaccaaccgccccggttggaagtctggagactggatctgcaccaggtccggttgcaacgagcacaacttcgctagcaggatggaatgtttcaggtgcaacgcgccacgggactccggtagcgctgccacgacgacctacgaaaactacttgcactgaggtgtaggtagagcaaagtttacagctatagcgcgcgtcgacgaagcaggagcagcagcagcagcatgaattgaagaggagtcctcatcatcacatcataagggagcagcagtagatttaattgcaaaattaaagacacccgcgatgcatgccctatcactagttttgttccaccggtacccctaccgcgcgtttcttttaagatttggttccccatttatctggggacagtagaccccagatgagacctatgtttgctgtttcattttcagttacgttcgtctccgcatgcatgtttgcgcttggatctgatgtaaccccaaaacgcttgcttcacaagtactattaactagttctgttgccttcctataaaaaaaaaaaaaaaaaaaaaaaaaaaaaaaaaaaaaaaaaaaaaaaagagaaagaaaaaaggtaccaaaaggggggg

SEQ ID NO: 25566 - DNA, 380 bp, Zea mays
  Clone ID: MRT4577_123324C.1
gccgcgtcgtaagcttggatccttaatctggcgccggggtttttgtttaaaattttttttttttttttttttcacaagcccaacaaatggcattgactcatacaaccaaataatctcgggattttttaacatccactcatacatccgaataaaacaccttttattaaaatacaaggaatttttttttacatgggtttttccagatgtaccataggcaaacacaccatacgacaacttgccctatcgggggctcatacttaggttcaaatggcgagccttggaatatatatgggaaaactgtgattaattaagggcatgattcatatacaagggatgaaccattgagcaaccgtaccccggcctaacattaaaatccggga

SEQ ID NO: 25567 - DNA, 867 bp, Zea mays
  Clone ID: MRT4577_123325C.1
attgggtacctcgaggccggccggggccccctcttcaattcaaacctaacctgatacccgagcgcaaagcacagcatgtctgcgtgcttcctcccgtcagcccccgatctgaaaatcgaacaaatccccgcctcttcgtccctctctccgacttccgctcgcacacctcccctcatgtggctgccctgggtgaagacgcggccttcatccgccacctccacctccaactctccctccaccgcgctcgtagctgccgcctccccgcgcctgtccttctcctcgccctccctcaaggacctccaggcactgctcctgtcggacgccgcgacactctccccgccgcccgccgcgccctgttccccctcctcctccgtccgcgtcttccaccgggtccgcgtcgccgcctctgccctccgtgcgctccgcaccctccaggcgccgccgtcctccggcggcggcgccgccttcgaggcggaccgccgcgtcgtgctctacttcacctcgctccacgtggtccggagcacgtacgaggactgccgcgccgtgcgcgccatcctgcgcgggctccgcgtcgccgtcgacgagcgcgacctcgccatggacacgcgctacttccaggagctcgcggcgctcctcccgcgccccgtggccccgcggcgcgtcacgctgcctcaggtcttcgtcggaggccgccacctcggcggcgccgacgaggtccgacgcctgcacgaggccggcgagctccggcgcgtcgtggccggcgccgtcgccgcctccctcgccacatgcggccggggcggcggcgagcgggacgtgctctgcggcagctgcaacggcagacacaagctggacaacaccaaggacgga

SEQ ID NO: 25568 - DNA, 347 bp, Zea mays
  unsure (1)..(347): unsure at all n locations
  Clone ID: MRT4577_123327C.1
ccgcgaaacacanacacacacagancgaagcggaggangaaggnggagggggnggagacgacgcnggngccgccgagcgaggcgacgccgcggcacgcgccgnggcngnccaaccnggaccnggcggngcccaagacccacacgccgcncgncaacaacaacccgaggcccgccggcgccggngccggggaggagggagagggagaaggaggagaagggncgnncnncgacccggcgcggcngcgggaggcgcngnccagggcgcnggngcccnncaacccgcaggcggagcggcaggcggccggcccgggcggccggaacgagaacgacngcaccggcaagggcgc

SEQ ID NO: 25569 - DNA, 252 bp, Zea mays
  unsure (1)..(252): unsure at all n locations
  Clone ID: MRT4577_123328C.1
aaaaaaaaaaaaaaaaaaaaaaaaaaaaaaaaaaaaaaaaaaaaaaaaaaaaaaaaaaaaaaaaaaaaaaaaaaaaaaaaaaaaggggcgggccggttcttaaaggaatccaagctttacgttaccgcgtcgcattgcgaacgtcaatagcttcttttttatagggtcancctaaaattacatattcactgggcccggtggtttttacaaacgtcggggacttgggaaaaacccttggcggttcacccaact

SEQ ID NO: 25570 - DNA, 475 bp, Zea mays
  Clone ID: MRT4577_123329C.1
acagcatattttattggtcagctccacagcatgcatacaaataccctagcgggacaatttttggctcccaaagactcccttcaaaaatactggggcaacctggagtacgtaggaatacgtacgtttacgggccacgcatgcaagcattatgcccttgctcacttgccggggaccaaattgggggcctaagcccaggcgttgttgttgacggggtccgggatgtggtcggggaggttcttgagggggcccttgccggggacgatagcctgcacgaaaaaaccgaacatggaaaacatggggagggggccgttcttgaactccttcaccttaagctcgggaaacccctccgggttggcggagaacccaaacgggtcaaaactgcccccagggtacagggggtcgaccaccttttcgagcggccccccggcgacgcggaaccccttgacggggcccatgagcaccacctggcacgccc

SEQ ID NO: 25571 - DNA, 419 bp, Zea mays
  Clone ID: MRT4577_12332C.1
gggaaaatattggacaggggccttttttacagaaacaggggccccattttaaaaaaaacagggggagcgggacccatttacttccaggctcctaaaaagctacattttggggggggttatttgcccaatttttaaattcccgggccagataaaagctgccagataaaaaaaaaatggccggaacacttgtaagggacaaaaccattccatggtttggatttactggggggggtaacaccagtaatgctaaaacaaagtttatggggaaagaaacctaaggggggccctttgtttaacctccaaaacaaaaaactgccacgtaattttggcctttccaaaaaatactatggccattgcccaaaagggccttaaaaaggccccttacttttttttcgccctttggaaacggaacaaaaacg

SEQ ID NO: 25572 - DNA, 161 bp, Zea mays
  Clone ID: MRT4577_123330C.1
ggagcttcgaggcggcccgccgcggcccgtcggccggccggcctaagccaatggcacggcccttgggggcccgaccgccttaccttggttcgggccggccggcaagcaaagcccccggttgctacctggaatcttgactaaaaggcgttcagccataatcc

SEQ ID NO: 25573 - DNA, 200 bp, Zea mays
  Clone ID: MRT4577_123331C.1
cccacgcgtccggtttgtctggtggccaatggacatccagacatgtgccacttctgtccacatttaaaaaacacagaatttgctgttgtccttggacaggaaaatgatgctctggatgttgatcgtattctttcacgctgtaaagctgagggggataatacagacattacttgatatggccttggatgctctacgtggca

SEQ ID NO: 25574 - DNA, 507 bp, Zea mays
  Clone ID: MRT4577_123332C.1
ggccgtcctcgcacgggccctcttgccgcccccggacccctggcctccgtctccctcgggccgccgcgccctgcccgttgggccgccctgtgctccccgaggggccgctcgcccgactggcggtcgcgggccgcccggagccgccgggccactgcaaggtgggctgcctcgaggcaggggccgctttctgggcggggccgcgccctgtcctccctcccagagctggaggacgacttcaaagagggctacctggagacagtggcggcttattatgaggagcagcacccagagctcactcctctacttgaaaaagaaagagatggattacggtgccgaggcaacagatcccctgtcccggatgttgaggatcccgcaaccgaggagcctggggagagcttttgtgacaaggtcatgagatggttccaggccatgctgcagcggctgcagacctggtggcacggggttctggcctgggtgaaggagaaggtggtggccctggtccatgca

SEQ ID NO: 25575 - DNA, 212 bp, Zea mays
  Clone ID: MRT4577_123333C.1
aatggcaatgggcaccaactcaaaccacaaccagtttctgttccaagtcctaataaaacccatatcctggggatgctaatgttgcctgttggcctagcacccaaaacatgtatgggctgtgtacccatttagatttaataatggtaataataaccataacccatcagagctattcggaatcggaccaatttcccttgcccggatggcggact

SEQ ID NO: 25576 - DNA, 347 bp, Zea mays
  Clone ID: MRT4577_123334C.1
acctccttatgcatgggaagcacacacacatcacatcaaatacgcataatattactgcataacctttatgagaagaaaaagatggccccaccacctttcaaatgactggataacactggtgatattgccttatgactcagctgaagctatagctctcagcgcaactggaattttttttcctggcaactctcatctggctattataacgtggcacgacaggtggtctgtgtgatagtaacgtcaagatcggcttacacaccaaaatctactgccatgaatgtgaggtatttgcctactgctcctgcccgcacgagagctcaatgctgcttgtagagggaccggtacaa

SEQ ID NO: 25577 - DNA, 467 bp, Zea mays
  Clone ID: MRT4577_123335C.1
aaagaaagaagctagccttttagcatggcgtctctggcgttcggcagcaccgtagcggcagacgtggatgcgacatcggggatgacgcgggcggcgcgccggtgcttgctggtggtgccgtccgctggcagcaggggcggacgggaaccggccaaggaggagaatggcctacgcgagaccattttaggcttcatgttaaagaaggaccagctggtggatacggacccgctcctcaacaaggtctagctccgtgccggcctgcgcctaccgagcaaagacgaccgccggcaagaaagctgacggcggtgacgacagcgggagcggcggagggtttaacctcgaacgcctacggggactgttcggcaagaaaagcacctgaacgtggcgttgtattatagattgtcgaactcaaagctggatctggcttttgagggggaaatggctgcgcatatatatcaatcgacatg

SEQ ID NO: 25578 - DNA, 260 bp, Zea mays
  Clone ID: MRT4577_123336C.1
tcgatccaagtcacatactaagagtgccaagctatccgcgaaattccaagctggaaagaaatgggagaaagcttcccaggatccaaacaagccaaaaagaccccctagagccttctttgctttcatagaagagttccgtgagcaatacaagaaggatcaccctaaaaacaaatcccctgcgggtgtcggaaaagcttgtggagattaattgaagagcttgtcttaaactaaaaaagcaccttatgtatctaaagcataaa

SEQ ID NO: 25579 - DNA, 326 bp, Zea mays
  unsure (1)..(326): unsure at all n locations
  Clone ID: MRT4577_123337C.1
nncgtccgaaaaaaaaaaaaaaaaaagaaaaaaaaaaaataaaaaaaaaaaaaaaaaaaaaaaaaaaaaaaaaaaaaaaaaaaaaataaaaaaaaaaaaaagggtggatagctttaaaaggtcccggatttacaaaaccggggcagtgcgaggaaatcccttgttgtgtccgtgctccctaattctatttgcactggcccgttgttgtcaaccgcgcgggattggcgcaaaacgctggcgccccgccaactttttccgcctggcgcccatttctccttttcgccgggggggcaccctgggacggggccttaaccgctcgccctgcc

SEQ ID NO: 25580 - DNA, 160 bp, Zea mays
  Clone ID: MRT4577_123338C.1
cagcgtacacaaagagcataatccgtctatatagcatgacattaccctacccatacaggttgcacctgattgataggaggggggatctaagaacaattccttcagcacacaacaagaggaggtcattgcttatgcagacgccccacaattctagcaatgt

SEQ ID NO: 25581 - DNA, 482 bp, Zea mays
  Clone ID: MRT4577_123339C.1
cattgggtacctcgaggccggccgatctacctctcctgtgccgcgggaagcgtgtccacgattgaccaggctgacggattggatcggatcgctcaatcatttgctgctctgatggcgacaccctcgttctacatctctgttaaaaaaacatccccctctcgatgagtgacaaagtaccgcttgagctttggcgatccgggcacaagaggaagctgccgctttgctctcatgaggacgaggagcacgtccgccgctttcagattgcgcgctactctccaagaagaactgtcaagttcagcgaaggtatcatggtgtgtgcttgtatctcgtcgcgccgtttgagatagctcgccgtttaaggagattgatatgtgccctgggaacgccgaggaagaagcacaatcatagcattctcatttctttcttgagagttgcgtctctcgatcaatacttgatcgaaggtatgatgatcatgcattatt

SEQ ID NO: 25582 - DNA, 269 bp, Zea mays
  unsure (1)..(269): unsure at all n locations
  Clone ID: MRT4577_12333C.1
gaagaggagcgngagacccaggccccacgagggncaccgcaggnaggcacacccaaacaaacanaagcagcaagcacagcggcaggaaanaaaccnngagcgacaacgaaacggggccnaagnncggcaaggagcggcacagnnnccgcancccgananngaaccccaccnccccggcnaacccagccagcagccaccnngacaaaccncagcnacacaacanaaagaagcggcaccggcaccgccccgnaagcaacagaagcacgccc

SEQ ID NO: 25583 - DNA, 522 bp, Zea mays
  Clone ID: MRT4577_123340C.1
tttttttttttttttttttttttttttttttttttttttttttttttttttttttttttttttttttttttttttttttttttttttttttttttttttttttttttttttttttttttttggggaaaaataaacaaaacaccccgggggggagggggggaaccccaggtcctttttggcaaaccttttccaaccccctaattttgggggttggcaccatgggggggccccccccttaaatcccctaaaaaaaaaaccaaaaaccctagggggttcggggttccctccccccaaaaaaaaatccaaggaaacaatggcccccaaacaaaaaaaaaaactttctcaaccccatcggttttttttgcctcaagttggggcccctaaattttttttttggccggccccttttttacattgggcaaatctccgaaaaaaaagggtcccccggtttggggccggccccccggggccatttggaaacccaccccttaaaaattggaaaagaaggcccccccttttttt

SEQ ID NO: 25584 - DNA, 540 bp, Zea mays
  Clone ID: MRT4577_123341C.1
atgatctgtttttctacacattatgggatctgaacatgatcttgccgaactaggccctacatcgaaccatataaaacattacaacggcctcggggccaaaaaagtgttgggagaaccgccaacaaagaaggggtctttggccagatcccatggaatcaaaagaaaggatatgtctaagcaataaaaatgcagatctagtccattgaaagggcccttccggaaccaatctgacacgggtgaaatacgaacgaagggttatccaatcactctttaccacaaatacgtgaaataaaatacccttccttggcgaaattcctttacaaagatatgggccttaaaaaagatgagggaaccctgttcctgcaaaagggaacggaaaaatctatgcagcgcatacggccatgccttgggggcaaccacacaacatatatgtgaactccctgtaaggctatgtgccacatttgagaagcgtcatgtcccactttgggctcaacatctttactaacaaagactctggctctacaaggccaaaaccatgta

SEQ ID NO: 25585 - DNA, 366 bp, Zea mays
  Clone ID: MRT4577_123342C.1
gtttcatgtatgcctgtgatattttttctaagccaagcaggacaaatggggagacactgcagtggtataaactctcataagaagcaagactctactaccaatgggaacattctcatatatgcaaagggaggattgaatcaaatgagaaccgtgatatgtgacatggttgctgttgctaagatcctgaaagcatctctggttcttccttaactcgatcatacatcctactgggcagaagacagtcaatctaaggaccatttgaactggcggcacttgattgtgtcactgaaagaagacatctgatcttggcgaaacactctcccctgtctacagagacattgaacctttggctaaagctccggtttc

SEQ ID NO: 25586 - DNA, 252 bp, Zea mays
  Clone ID: MRT4577_123343C.1
cttatgttaaagggataatctaccccttttaaaaacaacgttatcttgcacaaaccccagagacgaacaaaaaggagggggaaaaactgaggccaccaaaaaaccaaaccaggttaagccccgaaaggaaaaaaaaaccccgcagggacaccggggggccctgggggcccaacccgcctttttggcttaaaggaaaaaaaaactctgcttggcccccacggggtcggggaggaacaacggccggacccgagg

SEQ ID NO: 25587 - DNA, 1714 bp, Zea mays
  unsure (1)..(1714): unsure at all n locations
  Clone ID: MRT4577_123344C.1
aaaaaatagggtagccctcaggtcgtcaaccagcggccgaccgtcgaccgagaagcccgagcggcggtccgatcaggtgagcagcggcgcggctgctgcctgcccgcgcctgcctccgcggctccgccggccgtcgaccgagcagccgagcagaggcgcggcggctgcctgcccgcgctcgcctccgcggctccgctggccgtcgttcgccgacccgaacgccgagtcgcgcgagcgtgccggcgtgccccgcctctcgtcggctcgcgactgcgccagcgcggtcgcgccgccccaccccccggtgaccggcgtccggatccatccgtctggcaacccaaccggccaagggccaaccccgtccccggaccccgactccccgagggccaaccggccaaggcacaaccgctgaaccgcacaatgcatatttagtcgcctactcgcctaggcctattatttccctctcaaactcaaattcttcctggaatccaccaaagccctgcctcccctctactgattctgaaagtggagttccatctgcgcgtcggttgatttattctatttgctgagttggactacattacctccatgtcgagactgcgagctctgtggcaggcttcctttaacgccacaaagagagctcttgtatggagttcagatgatctaattccgccaagtgaaagatgtatcttcaatttcaactcaaaagatgagctgaaaaggtggcatttgtactcagattcagagtatggaggtttgtcttctgcatccttagaaataactgatggcgcttcagttggagatactccattaactggtgtgttttctggtaacctttctttggatatgtctgaagagtcaacatggaggatcaggcgctatggattctgtgggatgcgatcaaagaagtttgatgggttcattgaccttgatgcatatgatacaatagcaatgaagatcaaaggggatggaagatgctacatatctacaatatacacggagaattgggtgaattcacccgggcaacaagaagacaactcgtggcaggcttttgtgtacatacctcctcaagacagatgggaagtcttgaagatccctcttgatcgctatttacccacatggagaggaaatgtgatccaggcaaagttggaaatgaaccctgctcggatcgtggggatgtctctctctgtaaacgcagaaggcggtgttcctggcgccaagactgggcctggtgattttaggcttgatgttgcttggatcaaagcgttgagagctttgtgaactccacaagtcatagttttatttcacatcggccctttccttctttatcaccctgccccagtggcgccgctgaactcatcacccgaccacaaccacaggagtaaccatagcacagattgccaactcctttatgcacttaataatggattttgttttgcttctgaggtttatgaataagtggtagaaaaatggagcatttagttaaggtgccccctttggacagatgttgctttttctctctctctagtatctgatcggccgataaaacgagtgcattccacccggacgataatgcgagagtaggattcagtttaattctttgactgttaagagtactactgtttgatcgtttgaattatacacgttcatttgagtaataaaaaaaaaaaaaaaaaataaaaaaaaaaaaaaaaaaaaaaaannnnnnanaann

SEQ ID NO: 25588 - DNA, 284 bp, Zea mays
  Clone ID: MRT4577_123345C.1
aaaaaaaattttaatttttgttggtttaaaatgcccaataaaaagggggacccaacgaagggcccttctttcccggtttttggttggccttttgcccttttcgaactttccgttttgggcccttcaaaggggattccccttttccagttgcagtttgtcctgcaactttttgagcccctggagcaagaagggtttgaacctttttttgttgcccctgacctcctgctttatgatgatcttggggattggtggccccccctgtgcggggttttgctttgggtcct

SEQ ID NO: 25589 - DNA, 848 bp, Zea mays
  Clone ID: MRT4577_123346C.1
actaacctatagaaggccagactgctagagcggtagagccagaaagtaatagttggtgacttggcggggacatttatgttatgctacctaattattaatctgtggaaaaggggaagcttttggagtagagcttattttttgttcgggttactatttcctctaattgtgtgaaaactgaaaagtatggttcgtgtctgaaaagcaatagttggtcgaggcatatttttgtatggttccactgtactaccttctatctggtgaattagatcccgattctaaataagttgctctctaatcagattaaacactttaatgtagctggcaattgcttattttgcaggtgcagaggatgctaggaaaatactcaataattatggtacatgtccaattctaagtatggtatattgtgctctaatatttttaggcatcattgtttctgttaaatactttgcccatggttaaggttatgagtgcattggttaatgaaatgtatgacattaaaacggtggctgcgtggtgttccatcgtttcgccttgagccattatttaggcgaagagttccacaattgcatactgcacttgaacatatatagtactcatgaagttgttctacatcatattggatttcaatgcttttttatcagtgacagttttctcttttttggtgagtacagtaattgtatttttatcttgtaatagattagttttattcatacgacaagcactatgcactgtgatatttgttgatttttcctttaaaaaaaaaaaaaaaagggcgacctaaatgtttgggactatggaatggatcttttccattccatgtggtttgggggacaattgatgtgctt

SEQ ID NO: 25590 - DNA, 432 bp, Zea mays
  Clone ID: MRT4577_123347C.1
gccggccgggccgggctgggcctggtgattttaggcttgatgttgcttggatcaaagcgttgagagctttgtgacctccacaggtcatagttttatttcacatcggccctttccttctttatcaccctgctccagtggcgccgttgaactcatcagccgaccacaaccacaggagtaaccatagcacagattcccaactcctttatgcacttaataatggattttgttttacttctgaggtttatgaataagtggtagaaaaatggagcatttaattaaggtgccccctttggacagatgttgctttttttgttctcttctagtatctgatcggccgatataacgagtgcattccacccggacgataatgcgagagtaggatccagtttaattctttgactgttcgaaaaaaaaaaaaaaaaaaggccccta

SEQ ID NO: 25591 - DNA, 421 bp, Zea mays
  unsure (1)..(421): unsure at all n locations
  Clone ID: MRT4577_123348C.1
attcggctcgagggaggatcaggcgctattgtacctgtgggatgcgatcaaagaagtttgatgggttcattgaccttgatgcatatgatacaatagcaatgaagatcaaaggggatggaagatgctacatatctacagtgtgtnttctcacacaagactcactcctgcntctttaatntccanccacgcccggtcttccccccccgcaaccttcatttgttcagatatacactgagaattgggtgaattcaccctttcttcacgaagacaactcgtggcaggcttttgngtacatacctcctcaagacagattggaagtcttggngatccctcttgatcgctatttacccacatggagaggaaatgtgatccatgcaaagttggaaatgaaccctgctcggatcgtggggatgtctctctc

SEQ ID NO: 25592 - DNA, 1724 bp, Zea mays
  Clone ID: MRT4577_123349C.1
gggtacctcgaggccggccgggccgggattcaaatcgatcccgaccttccgctggccggccctgaagaaaggaggagtcgaggaacagaggaagcgaagcacaagcagtcagaggcggccgccgcagcccgccgcagtagcgacacgcaacccccccttcccctatcacgccacccggctccacggaggagcgagaccgcgcgccgcagatccttggtcgccgctagggttccggcgagatggacgtggtgaaggcggcgcagctgtcggggcggacgctggaacgtgttgtggtgcaccccctggtgctgctcagcatcgtcgaccactacaaccgcgtcgcccgcgacacccgcaagcgcgtcgtcggcgtcctcctcggcacctcctcccgcggctccgtcgacgtcaccaactcctacgcggtgccgtttgaggaggatgacaaggatcctaggatctggttccttgaccacaattaccatgaatcgatgttctccatgttcaagaggattaacgccaaggagcatgttgttggctggtacagcactggcccaaaactaagggagaatgacttggatgtccatgcattgttcaacagttatgttcctaaccctgtcctagtgattattgatgttcaacccaaggagcttgggatacccaccaaggcgtattacgccgtggaagaagttaaagagaatgctacacagaaaagtcagaaggtatttgtccatgttccttcagaaattgctgctcatgaagttgaggaaattggagttgaacaccttttaagggacgtaaaggacacaaccataagcacacttgctacagaggtcactagcaagcttgcagccttgaagggactggatgcaaggctcagggagatccgaagctatttggatcttgtaattgaagggaagctcccactgaatcatgagattttgtatcatttgcaggatgtctttaatctccttccaaatctgaacgtaaatgagctaattaaagcctttgcagtgaaaacaaacgacatgatgttggtaatatatctgtcttctctgatccggagtgtcattgcgcttcacaatttgatcaacaataaggttggttgtttttatctgcttctggtgctgtttcagtccctgtgtgcaccccttgtagattttgatatctgtgacattgaccactagtaatgaaattactcaattttgctgcgaccatgaaatctggtatgttaattgctgtgattccagatgctaaacaaggagcataagaaggctgaggattcgaaaccagccgccattccaactgctgtcggtggagggggagctaaatgaacttttgatcacttattgatggccaagaaaagggaggaaacgtgattacatgtttatcacggttgtgctggaaccaaatcgccttgaccttgaatggataacatcacgtatgataaggtcaactgcaagagaaatcatttacgttgtatgagagctttagatcatatctcaagttttctgtagatctcgatgctatttcatctgatggatcatgtttcgtgatgtagacttaagttttttattattatgattgatttatagcgagcctgtacgttgtatgtcatccaattcatctatgtccatgaatgatttgtagcaagtcttaagtatcaactatttgggccgatcctgttgataagtaaacatgggctgtttggttcgtggtccttt

SEQ ID NO: 25593 - DNA, 135 bp, Zea mays
  Clone ID: MRT4577_12334C.1
tgatgatctagcgtggatgatatccttcgagaagtcctcaaacgccatccgcgacggcccgccatcaaccatcgtctatgccgccttctcctttgccaacgcgatccactccctgaggtactccccttcctcaga

SEQ ID NO: 25594 - DNA, 329 bp, Zea mays
  Clone ID: MRT4577_123350C.1
tctgtatgccccaatctatccgccgccacacggagacgattcacaagagactaggctcgatagaacgtcggagggctagaccgggacccgcaattccacttcgtcactctgggggcccgcctcatgagacgccaatactgaaccgacttggaggtgacaaactggaatgccacggcggtcgcggcctacacgagcgtggtctgtggaccacgccaaaggcagcccaactgacgaagatgagctttcataacctgtaggcggggcacttccagggggcgcccctcaggagcgactcgatgcacggcaagagcccctgggcggcggggggc

SEQ ID NO: 25595 - DNA, 968 bp, Zea mays
  Clone ID: MRT4577_123351C.1
caggccggccgggccgggatttttcgcccgccgcccccagtcccgatccgaagctgtgcctcgtaccatttcgatccaatggcgccgacgtcgaagctgtcgacgggcatcaagcgcgcttcgcggtcgcacgcgtaccatcgccgtggaacccaagttctaccctgccgacgacgtcaagccccgcgttcccagcacccgcaagcctaagcctaccaagctcaggtcgagcatcacgcctgggacggtgctgatcctcctcgcagggcgcttcatggggaagagagtggtgtttctcaagcagctcaagtccggcctgctccttatctctgggcctttcaagatcaatggagtaccgatccgccgtgtgaaccagacctatgtcattgctacatcaaccaaagttgacatctcaggtgttgatgtcgccaagtttgatgacaagtactttgccagggagaagaagcagaaggtgaagaagaccgagggcgagctttttgagacagaaaaggaggcatccaagtcactgcctgacttcaagaaggatgatcagaaggctgtggattctgctctgatcaaggctatcgaggctgtcccggagctgaaaacctatcttggcgcccggttctctctcagggatggtgacaagccccatgagatggtcttctaagctcttagttttggagttcggaggaagctgttttgtctgtgttcttgtacttctgagttttgtaccagtagcgaatgtttcattgtggttgaaatcttcctgccaaatattataagatctaagaaagttctatccgtgttggtggttcagcattgcactatctgcatttggttccttaggtagtccatggtatcttgaggtcccattttgtttgaattgctgactgtccggtgtttttgctgttggtttggaataaacttggcatgtcgcttgccaaaaaaaaaaaaaaaaagcggcc

SEQ ID NO: 25596 - DNA, 238 bp, Zea mays
  Clone ID: MRT4577_123352C.1
ggagaagcccgttcaccgcctccagctgctgctctcctcgacatggaccctgagacctgcccctgcccttctggtggctcctgcacctgcgcggactcctgcaagtgcgagggatgcaaatgcacctcctgcaagaagagctgctgctcctgctgccctgcggagtgtgagaagtgtgccaaggactgtgtgtgcaaaggcggagaggcagctgaggcagaagcagagaagtgcagct

SEQ ID NO: 25597 - DNA, 871 bp, Zea mays
  Clone ID: MRT4577_123353C.1
tgggatccctcgaggccggccgggatttttcgcccgccgcccccagtcccgatccgaagctgtgcctcgtaccatttcgatccaatggcgccgacgtcgaagctgtcgacgggcatcaagcgcgcttcgcggtcgcacgcgtaccatcgccgtgggctgtgggccatcaaggccaagaacggcggcgccttccccaaggccgacaaggccgccgccgccgtggaacccaagttctaccctgccgacgacgtcaagccccgcgttcccagcacccgcaagcctaagcctaccaagctcaagtccggcctgctccttatctctgggcctttcaagatcaatggagtaccgatccgccgtgtgaaccagacctatgtcattgctacatcaaccaaagttgacatctcaggtgttgatgtcgccaagtttgatgacaagtactttgccagggagaagaagcaaaaggtgaagaagaccgagggcgagctttttgagacagaaaaggaggcatccaagtcactgcctgacttcaagaaggatgaccagaaggctgtggattctgctctgatcaaggctatcgaggctgtcccggagctgaaaacctatcttggcgcccggttctctctcagggatggtgacaagccccatgagatggtcttctaagctcttagttttggagttcggaggaagctgttttgtctgtgatcttgtacttctgagttttgtaccagtagcgaatgtttcattgtggttgaagtcttcctgccaaatattataagatctaagaaagttctatccgtgttggtggttcagcgttgcactatctgcatttggttccttaggcagtccatgggacctcaagcccacgcgtccg

SEQ ID NO: 25598 - DNA, 923 bp, Zea mays
  Clone ID: MRT4577_123354C.1
cattgggtacctcgaggccggccgggatttttcgaccgccgccgcccccagtccccgatccgaagctgtgcctcgtaccatttcgatccaatggcgccgacgtcgaagctgtcgacgggcatcaagcgcgcttcgcggtcgcacgcgtaccatcgccgtgggctgtgggccatcaaggccaagaacggcggcgccttccccaaggccgacaaggccgccgccgccgtggaacccaagttctaccctgccgacgacgtcaagccccgcgttcccagcacccgcaagcctaagcctaccaagctcaggtcgagcatcacgcctgggacggtgctgatcctcctcgcagggcgcttcatggggaagagagtggtgtttctcaagcagctcaagtccggcctgctccttatctctgggcctttcaagatcaatggagtaccgatccgccgtgtgaaccagacctatgtcattgctacatcaaccaaagttgacatctctggtgttgatgtcgccaagtttgatgacaagtactttgccagggagaagaagcaaaaggtgaagaagaccgagggcgagctttttgagacagaaaaggaggcatccaagtcactgcctgacttcaagaaggatgaccagaaggctgtggattctgctctgatcaaggctatcgaggctgtcccggagctgaaaacctatcttggcgcccggttctccctcagggatggtgacaagccccatgagatggtcttctaagctcttagttttggagttcggaggaagctgttttgtctgtgatcttgtacttctgagttttgtaccagtagcgaatgtttcattgtggttgaagtcttcctgccaaatattataagatctaagaaagttctatccgtgttggtggttcgaaaaaaaaaaaaaaaaaagcggcc

SEQ ID NO: 25599 - DNA, 904 bp, Zea mays
  Clone ID: MRT4577_123355C.1
acccattacaaacaatagaaaccttcccttagtccgcttcaattttccagaccaggtgacagtaattcgtcaacaaaaacacaaaacgcaggcggcagataaagcaatgtaaccaaagaagagccagatcacaagctgcgctaggagatcagactagcatgtttttaagcaacagcacagagtatgatacgggcactgaaataattcattcggcagtttatagctctgctatagtagactaaaacatcttgcgtctgcatggagcttagacaaactaaggtttacaccgtgttggcctgagccttgttgaggatgacaccttcgtacttgacctggaaccacttcatcgagtcctccttggtcaccctgtgctggatcccaacacgggccttgcacctcctgcggcgtgcaactcggtagccagcacgctcgagcacgacatagaagtccattccatagatgcctgttgatggatcatacttgataccaaggtcgatgtgctcctggatgccgaatccgaagcacccggtgtcgctgaagttcctcctgagcagctcgtactccttgaccttgaggccgctctcaagcagctgcatagccttctcgcccctgacagtgacgtagcaggcgatcttctcgttacgccggatgccgaacgaccgcaccgtgtacctcgccttggagaagacaggggtctggccgctgagctgctcgagcaccttggcggcgcgggtgaggcggtcgccgctctcccctacggagatgttgaggacgagcttctgcaccttgatctcccgcatcgggttcgactgcttcttctcggacgccattggggcgatgagacggccggatcctcttctcctccttctccttcggcggcggcggcggcggctcggacgcgggg

SEQ ID NO: 25600 - DNA, 3433 bp, Zea mays
  unsure (1)..(3433): unsure at all n locations
  Clone ID: MRT4577_123356C.1
ggccgcttttttttttttttttttctagaaaagcaatgacgctctaaaattcaatctgtgataattcgggtgataaacggacaagggctaacataaccatataccaaaatgacagacctgagctccgacataacatattcatataaccaaaataaccaattcaaggcaattaaatccaccccctagttcagctaattatagagcagcacctaaaattccaataaagtaaacaaagtaattgcattctagagataggtatcaagcaaaaattgccagcaatttctgaatcatcagaaacattcagctggagaggacgccatcattcagtgatagattagccagctgctgctcggtggaggcattgctctgctggagatgctgggctgagcggagaacctccatggcttcagcaaccttagccttgagagcatctggcgactccagcaggtgaagaacctccgtctggtccatctccaaaagcatgccagtgaccttggcagcctgctcacgctccagctgttcaacaagaggatacaggttctcaccaagcatcagtctttgctgatctggtgaggcgttagcaagcgcagtggctagtgccccaattggaacaggttgtgagacaccagcatctctcattgccatccctcccatctcatatggagatggcatcacagcaccaacattatgcatgccaggatcaggcattccacgtccagtagcatagcggtagccacgaccacctctagggaatatctgttgctgactacccattggcatgggctgctgcattccaccagacccagcacgcctaccagcaggacgttgcggttgctgtccctgctgaaccataggcatcataaagttcggcattggaccaccaggcctcataccaggcatcataggttgctggaaagcaaatccagcctgagggttgatgaaggctggaggtggctgaccataaaacagctgctgaccaactccaggaacactaggtggaaacatgggcatgcgaggacctactgaaggtgccattgcaacaggacgcatttgtgaaaactgtgcctgtagctttgcctttctgtcatctttacgctgtgcaagagctacataaaggggcttgcttccaaccattttgccattcatctcggtaagagctcggttagcatcttcagcagatttgaatgcaacaaatccagaccctctgctaacaccataagaatcccgcataaccttgcaagaagtaatattgccatactcagcaaagatttcacgcaacttttcatcatcaatgttatcatctaagttcttcagatacaagttagtgttttggaacttctcagctacctcttgaatattcttttcaaatttctccttcaactccatctctctttcagacttcttttgtgctcttccaacatacagttccttatcattgaatatcttgccattcaactcttgaacagcctgagcagcagcatctgcattttcaaaattgacaaatccaaaacacctagaatttccatcactatcccgcataacaacagcacttgttatggttccatattttccaaagatttccttcaagtcatcatcagtggtagtatcggacagattcttaacatagacattattgaatttgacattgccgggagagttatctctctcctgcttacgaacaaaaggcccaacatacaccttcttgtcattcataagcatcccattgagtttctcgatagcagcatgagcagcctcatcccgctcatactgaacgaagccatagccctttgattccccagcaggatctgttgcaattttacatgaaaggatattcccaaacacgcaaaatgtgtcatataaagctttgttgtctattgacttatcaagattcttaataaatatatttcctgcaccgcttttgcgcgagctggggtcacggttagaatacatgatcctgataggctttccattgataggagtgaagttaagcagttcaagtgcccgtgcagcgtcgctagtgttgttgtagttgacgtaggcgtagccgagcgacttgcgggagttgatgtctctgcagacgcgcacggagacgacgccgccgacctggctgaagacgtcgaagagctgtgcgtcctgaacgctctcgtgcaggtcacccacgtagagagaagtcgccgggaacgcagccgccgccgctgcagcagctgaggcagccggtgagccgccagactcggacgcggatccagccgccgcccccagtccccgatccgaagctgtgcctcgtaccatttcgatccaatggcgccgacgtcgaagctgtcgacgggcatcaagcgcgcttcgcggtcgcacgcgtaccatcgccgtgggctgtgggccatcaaggccaagaacggcggcgccttccccaaggccgacaaggccgccgccgccgtggaacccaagttctaccctgccgacgacgtcaagccccgcgttcccagcacccgcaagcctaagcctaccaagctcaggtcgagcatcacgcctgggacggtgctgatcctcctcgcagggcgcttcatggggaagagagtggtgtttctcaagcagctcaagtccggcctgctccttatctctgggcctttcaagatcaatggagtaccgatccgccgtgtgaaccagacctatgtcattgctacatcaaccaaagttgacatctctggtgttgatgtcgccaagtttgatgacaagtactttgccagggagaagaagcagaaggtgaagaagaccgagggcgagctttttgagacagaaaaggaggcatccaagtcactgcctgacttcaagaaggatgaccagaaggctgtggattctgctctgatcaaggctatcgaggctgtcccggagctgaaaacctatcttggcgcccggttctctctcagggatggtgacaagccccatgagatggtcttctaagcttctagttttggagttcgtaggaagctgttttgtctgtgttcttgtacttctgagttttgtaccagtagcgaacgtttcattgtgattgaagtcttcctgccaaatattataagatctaagaaagttctatccgtgttggtggttcagcagtgcactatctgcatttggttccttaggtagtccatggtatcttgaggtcccattttgtttgaattgctgactgtcaggtgtttttgctgttggtttggaataaacttggcatgtagcttgccgaaactggaataaacttgacatgcatcgtnnaaaaaaaaaaaaaaaaaaaaaaaaaaaaaaaaaaaaaaaaaaaaaaaaaaaaaaaaacccaaaaaaaaaaaaaaaaaaaaaaaaaaaaaaaaaaaaaaaaaaaaaaaacccggccccgtggtccaccccggaatttccgacccggaccctgggggggacccacttttcc

SEQ ID NO: 25601 - DNA, 550 bp, Zea mays
  Clone ID: MRT4577_123357C.1
tcgctcagaggcggccttgaccttagtaaccgagaacccagccactctggtctctctctctagtctgactctgctctgctcttgggtctcgcgctcgcgactcctcgggcggcgcgcctcgccggtcgccatggcctcctcctcttctgaggtgaggcccgcgagcaggaggatcgttgattacctcaacgacggcgaggagctcggggcccagggggcggtggagacgccgccgtgttcccctgctgcggttgcggtggggaaacaggccaagtcagcgctgcccaggttcaggtggccgcggctcgtcaggctgcggagagagggaggcggcgacgaggggaagccgggggtcgtggtggtggagaggggcgacgacctccccgtggcggccgcgtctacctcaggtgcgtgcgtgttgcctgacctcgttgtgctcggtgtccaaggcgccatcgttgattgtttagcgaaatcttagacatttgggctgcaaatagagccgaacatgcgatcaaacaaagaagtgtgccttgccagaatttagcac

SEQ ID NO: 25602 - DNA, 415 bp, Zea mays
  Clone ID: MRT4577_123358C.1
atgggacacatatatgcccgtacctggatgccgctatgtcgactgaggcgatgtcaagtaggtggacacacctaatgtcatgtctgctccagcctctcagcgcctacatggtggatactagtcccggcaaacactagaatgcacattgttgaagggcagacatacagcccaaatgccttgtgcaccgctaatagaagccatggagggaaactctgtggcggtacttatgtcaagggacaccgatctcattcacgtgcatcccactcgtggtgggatgaccttgtccaccgaacttagatggataaagacaaggagagacatcttcatccggcgctatccattattagagaatatttgctaagtaacactgcgacagcatacataactaggtcggttatttatacgacaaatgtga

SEQ ID NO: 25603 - DNA, 1522 bp, Zea mays
  unsure (1)..(1522): unsure at all n locations
  Clone ID: MRT4577_123359C.1
ttttttttttttttttttttttttttaatnttttttttttttttttttttttttttttttttttttttaatttttttttttttttttttttttttttttttcctttttttttttttttttttttttttttttttacaaatttaattagtattgcacaatgatagatccacatcacataaaccatcaacaagcatcacaacaaaatcattcgcaaaacctacacatgttattatgttttgcacatatttgcaaacactttacaaaatcattcacaaaagtactaacgcttcaagtgattcgcaaaagccttcacaaaagcactccaacttcttgtatcctcttgttttaaggcacaagcttgtaggggttgtgatgtcgccatttacttgatgtctacagtaaaaatgaagtgttaaagatagatcacaatgaatgcagatatctctaattttatgactcaattctctcttcaaaactataccacgaatgttcctctagtaaagcccaagtcaccaatcacatacatgacaaaaatatcagagcaataaatagcagtacatcagaaccgatcggtgtttttagtagtgacaaaaacgaagatatctaggactacaaacaacagaccgacaacatatcatggatctaaaaacacaaattgagcatatccttcctgcacaaccagtaaatggaagatcactagttctagatcgcgagcggccgctcgcggccgccgccgagaatgaggagaagaggatccggccgtttcctcgcccccatggcgtccgagaagaagcagtcgaacccgatgcgggagatcaaggtgcagaagctcgtcctcaacatctccgtcggggagagcggtgaccgcctcacccgcgccgccaaggtgctcgagcagctcagcggccagacccctgtcttctccaaggcgaggtacacggtgcggtcgttcggcatccggcgcaacgagaagatcgcctgctacgtcactgtcaggggcgagaaggccatgcagctgcttgagagcggcctcaaggtcaaggagtacgagctgctcaggaggaacttcagcgacaccgggtgcttcggattcggcatccaggagcacatcgaccttggtatcaagtatgatccatcaacgggcatctatggaatggacttctatgtcgtgctggagcgtgctggctaccgtgttgcgcgccgcaggaggtgcaaggcccgcgttgggatccagcacagggtgaccaaggaggactcgatgaagtggttccaggtcaagtacgaaggtgtcatcctcaacaaggctcaggccaacacggtgtaaaccttagtttgtttaagctccatgcagacgcaagatcaccatgcaaggtttttgttcacattgtattctctgacctgatggtttagtctactactatagcagagctataaaacgccatatgaattatttcagtgcccgtatcatacattcatactctgttctgttgcttgaaaacatgctagtctgatctcctagcgc

SEQ ID NO: 25604 - DNA, 305 bp, Zea mays
  unsure (1)..(305): unsure at all n locations
  Clone ID: MRT4577_12335C.1
cacgcgtacgactgcctactatcaacatcttgtttttntttcatacaaccaanagaccgcgctggaccccgctgcggagtggcgggagcaaatactactaccatttagccagctagctacagcaagccgagcttgcttcttgacacaacaacacctgctgtcgttttaccagcactttgcggctaacacccgcaaccctttttacaactacaacaattgatgccctttgtacaacttgctttgacaaacccagcagcctcctaccaacaacacatcattggtggggccctcctttagattgctta

SEQ ID NO: 25605 - DNA, 188 bp, Zea mays
  Clone ID: MRT4577_123360C.1
cccacgctcgctgcagcgaagtcagtcggacattcggctcaaagagagacgcatcttccgaatctctcggtggcaatggcgctctacgaccgatcccgcgagtcgctcctaccgagctatctctacgcctcctcagcgcgctctttcgctgccacaggagccgccgcgcgcctacctgtctcctcccc

SEQ ID NO: 25606 - DNA, 1000 bp, Zea mays
  Clone ID: MRT4577_123361C.1
cccctcgagttttttttttttttttttttttttttttttttaaacaaagcatgtaaccaaagaagagctaggacagactaataacatattctcaagcaacagcagagtatggtaagggcacaaaaaataattcatatagtgattatagctctgctagtagactaaaaagtcgggccagaccgccagaggatacaactcaaacaaaaaccttggaaggtgatcttgcgttcacatggagatgaagcgagagagctgttttgcccccacaggtgaggtttaaatcgtgctggcctgagccttgttgaggatgacaccttcatacttgacctggaaccacttcatggagtcctccttggtcaccctatgctgaatcccaacacgggacttgcacctcctgcggcgcgcgacgcggtagccagcacgctcaagcacgacgtagaagtccatcccatagatgcctgttgatggatcatacttgataccaaggtcgatgtgctcttggatgccgaacccgaagcagccggtgtcgctgaagttcctcctgagcagctcgtactccttgaccttgaggccgctctcaagcagctgcatggccttgtcgcccctgaccgtgacgtagcaggcgatcttctcgttacgccggatgccgaacgagcgcaccgtgtacctcgccttggagaagacgggggtctggccgctgagctgctccagcaccttggcggcgcgggtgaggcggtcgccgctctcccctacggatatgttgaggaccagcttctgcaccttgatctcccgcatcgggttggactgcttcttctcggacgccatcggggcaaggagacggccggaccctcttctccttaggcggcggcggcggcggctgggtggagggtggagcagatgggcgtcggatggcggcgcgaggttaaaaggaaggaagcaaccctaggtctaggcggggaggtggggagtctagctccccggccggcctcgagggacccaa

SEQ ID NO: 25607 - DNA, 935 bp, Zea mays
  Clone ID: MRT4577_123362C.1
aaccaaacaaaaaagccagattatttgctgcgctagggagatcaaactagcatgttttcaagcaacagcacacagagtgcgacaagggcacggaaataattcacatggtggtgatcttgcgacaacagcacccacagagtgctagcagactaaacatcagggctgagaacacaaattaaacccaaaaaaaaaacctggcgaggtgggtggtcttgcgttggcacggaagaggggacgagaccagagagctgttttgcccacgggtgaggtttacaacgtgttggcctgagccttgttgaggatgacgccttcgtacttgacctggaaccacttcatggagtcctccttggtcaccctgtgctgaatcccgacgcgggacttgcacctcctgcggcgcgccacacggtagccggcacgctccagcacgacgtagaagtccattccgtagatgcctgttgacggatcgtacttgataccaaggtcgatgtgctcctggataccgaaaccaaagcacccggtgtcgctgaagttcctcctgagcagctcgtactccttgaccttgaggccgctctcaagcagctgcatggccttctcgcccctcaccgtgacgtagcaggcgatcttctcgttacgccggatgccgaacgaccgcaccgtgtacctcgccttggagaagacgggggtctggccgctgagctgctcgagcacctttgcggcgcgggtgagacggtcgccgctctccccgacggagatattgaggacgagcttctgcaccttgatctcccgcatcgggttggacagcttcttctcgtgggccatgggggcgaggagacggccgtaccctcttctccttccgtccttcggcggcggcggacgacggtggagatgtgccccggcccggccggcctcgaggaacccaatcgcccataggagtg

SEQ ID NO: 25608 - DNA, 1123 bp, Zea mays
  Clone ID: MRT4577_123363C.1
ctcaatctcctataccaatatttcagtaaaagagaattctcattctggtggagatgctttaggtcaccctctattttccagaccgggagatggtaatccatcaagaactaaaacgcaggtggcagataaaagcatataaccaaacaaaaaagccagatcacaagctgcgctagggagatcaaactagcatgttttcaagcaacagcacacagagtgcgacaagggcacggaaataattgacatggtggtgatcttgcgacaacagcacccacagagtgctagcagactaaacatcagggctgagaacacaaattaaacccaaaaaagcctggcgaggtgggtggtggtcttgcgttgacacggaggaggagaagagaccagagagctgttttgcccacaggtgaggtttacaacgtgttggcctgagccttgttgaggatgacgccttcgtacttgacctggaaccacttcatggagtcctccttggtcaccctgtgctgaatcccgacgcgggacttgcacctcctgcggcgtgccacacggtagcccgcacgctccagcacgacgtagaagtccattccgtagatgcctgttgaaggatcgtacttgataccaaggtcgatgtgctcctggatgccgaaaccaaagcacccggtgtcgctgaagttcctcctgagcagctcgtactccttgaccttgaggccgctctcaagcagctgcatggccttctcgcccctcaccgtgacgtagcaggcgatcttctcgttacgccggatgccgaacgaccgcaccgtgtacctcgccttggagaagacgggggtctggccgctgagctgctcgagcacctttgcggcgcgggtgagacggtcgccgctctccccgacggagatattgaggacgagcttctgcaccttgatctcccgcatcgggttggacagcttcttctcgtgggcctgcgggacgccgggcgagttggcctcacaaatcacaggccggacgaggaagagaaaggagacaagatgggaatggtagcacggggatgggacggaggcggcgtaccatgggggcgaggagacggccgtccctcttctccttccgtccttcggccccggccggcctcgag

SEQ ID NO: 25609 - DNA, 386 bp, Zea mays
  Clone ID: MRT4577_123364C.1
acatagacgccatcctcgaactttattagatgagattggactgctatctgtagcactccgcggccatcagcccacatgcttaaggtcatgtatcttagctaatctgcaattccatagattttgttagcgaactttatcaccttggcttggataatgaagaacggtgatgggaaattaggatgcactctacatgactcagaactggctaaacgtaaggctcgagtctatatggtatgctgagctagacattcatgattgactcagagcatgcctacttcgacattgaccatacggactatgatggactatacctacttgcggaacctgtacctaatcgtcagactgggactcgcgctgaacctaggctctagacacttgaactatgg

SEQ ID NO: 25610 - DNA, 235 bp, Zea mays
  Clone ID: MRT4577_123365C.1
atttctctgacgatgccgacaggcaaacagcaaatctcttctaagatggaggacaccaacgccggggaatcctggtccgatggcactgatcaagcgctcggccggcgtggactggcatacgttactcgccgccgaacctgtctatactgaagctgcccgtggactattgctactgctccgtgtggcatgcttcggccgacgctgagctatgctccgctacaatgtgtggtcaaga

SEQ ID NO: 25611 - DNA, 177 bp, Zea mays
  Clone ID: MRT4577_123366C.1
tcggtaggcgcgtccgccgcacgtcgcattggccggccccatcatagcccggaggtgggcttgccgaccttctcgcggtcggcggccttaagtgctgggccgttgcggagacccccccgaacgaggggtgccatcttcttgtttttcttaacggtaccccaaaaaaaccgccgtttg

SEQ ID NO: 25612 - DNA, 247 bp, Zea mays
  Clone ID: MRT4577_123367C.1
gtcgcacagtgacccagagcctgggctatatctctgaccctcaaggaagaccacttctggggacatgggcttgtagggcaggagctagaagcaccaagggaatgccccattccggggctgttccccgaggaggaatggaaggggctctgtgtgccccccaggaggaagagagcctgagtcctgggatcagacaccccttcacgtgtatccccacacaaatgcaagcttaccaaggtcccctctcagt

SEQ ID NO: 25613 - DNA, 736 bp, Zea mays
  Clone ID: MRT4577_123368C.1
gctggttatatcttttttgtattttatattcctcttttttgttgcttttccacactcctcttctgtaatatagagattattccatagaaaccaacaaggttttttttttttttttgtcttcgcccttaaattgagcggaaaattgatgctttaaaccacaacagatagcaggaacaaatgaacatgaacaagtgtacaagcaagcaatttttttgtatctccaccgcctcgtcggctcctgcgctccagtcctacaccgttgcggtagacacaagccgcgcgccgcacggagaaatctgatcacccgccgaaggcccgaacctttccgcctctgccagccggaaacccaccggattgggggttaccactgaatcgcctcatctatcgccttccgcttgcagatcgccgtagatccgggctcggacaccacgaaaccgccttatggaaggcctccaagaacgagaacccgccgagactaggtgcttcctcgagcgtagtcgcggcggcgcgccgccgccgtcgatgctgatgcagctggggagcggtggagccctatgctgctacgggagccgaatcgcggcgggctcctgaggaatcgatgacaccggggctcaaattaggagctagggttcggagctcccaggattgcgtcttctcgcgtcgttgaggagggagggggaggagtagggacgcgcggatgggaaagggaaagggatcggatgaggtcatgggtacc

SEQ ID NO: 25614 - DNA, 423 bp, Zea mays
  unsure (1)..(423): unsure at all n locations
  Clone ID: MRT4577_123369C.1
taccggtttcggaattcgccgggtacgactccacgtcgtgccggtggccaatgctcacaatcnttgaaactcctgtattcaaatnnattggtcaagggtacctttaggtgagttggctgnnctgaaaccctcccaatngnnaaatgactggnntcatggacctcataggtactcttagagtagcttgagactatgactgttattgggtacctctgtacaaatgtattccgcataaacgctttaaacttgagggcaataacttagtgtgtcgtatctcttatttgtttgttctctttcagacgattacctagaaagcgctagctanagattcagagctcgtaaatgccttagaaatgccaacatgtgctagaattcgtgtctagtaaaaataaatacctcnntctcagttaagaaaataaaaag

SEQ ID NO: 25615 - DNA, 305 bp, Zea mays
  Clone ID: MRT4577_12336C.1
gtacgaccaataattacagaaatttttgactcctggaatgcaatcttacctgcttcacttgccctggctcttccggagaagaacaccccctctttgagaggggccagctgcgcctcattgtcttcaaagcggcaccctcatccaaacctctgaactgccgctaatacgtattacatgcaaaccaactagatctgctcgggacaccagccaccgatcagtgtatcaggacagctcatctgaactctgttttttcagacccattgcgcttgaaagctactaacattcaggcccgactagggaagatc

SEQ ID NO: 25616 - DNA, 395 bp, Zea mays
  Clone ID: MRT4577_123370C.1
taggggccttttttttttttttttttacataaagatatcgttaacgagaattctaaggaatgaggtgaatatgtcttgcactgaaagaggaataagaggaagaggtgcaagagttcttacatactagttatctttaaggacagcagatcctatctcatatcttcttcttatactcgaacaatcgtgttccccacgtacgacgactgcgctgatactgcacaaacgacgcgcgagtagacgggcgcccttgagtacttagccgatgagcttggcaaggcaagaaatggaatccggagatgaggatgaccacggacgccaagcaacgctagagcattgtgtggacaatgcataagcgaagatgatggtcaaagatgatctcgctgccggggggctta

SEQ ID NO: 25617 - DNA, 141 bp, Zea mays
  Clone ID: MRT4577_123371C.1
cgcgcaggctgtgtatgcaagtggaggaaaagcacatggaatgttcattttgttagcttacgacatccactcgggccgggttaaggttcggcgtggaggggccccaagatctgctgctcttatcttccgtccctccactca

SEQ ID NO: 25618 - DNA, 2632 bp, Zea mays
  Clone ID: MRT4577_123372C.1
ttgtgttttttttttttttttttctttttgagacagtggaacaggggaagcaacaattcaacaagtaaagtttaacacacgagaatacttcaatactaagccctcaactcctaaacccaaccaaccagtgaattcctcatcagatcaacacaacgatacaacgataaacacaaacctgaaaaagggcagaaggggataccctgctcccttaacagttgatgcagtctaccttttcaatactgctgtgcatgtagcatgaaacaacccccacaaactataaccataccgggtaccgggaccacagcacaagccacaagccggaaccctgaacccttgcggccatgaagaatcaaaaaacctattactcgattggccactgaaaaaacaagattatctttctttttgagacagtggaagcaactattagacaagtcaagtttaacagtacagtacacgtgaatacttcgccctcaagtcctcaacccacacaaccaacaaatacgtgtagtactcatcagatctatacaacgataaacactcacctgaaaaaggacagaaggtgagcacagataccctgctcaactaacagttgatgcagtctatctcttcaacactgctgtgcatgaagtaacccacacaaactgcaaccaatactattaccgggatcaatagcctcagcacaagccacagcgtggaacccttgctaccatcggcagtgaagaatctcctaagcatttccgccagtggccataagagctcacgcttcttgtttactgcctgactcatttggccattatcttccgtgtcttcaagcttgctcaacttggaaatcatgttgccatataatttggcatcccttcttttgtactccttgaccttctcctttagcctcttgtaccccatcttcacatccctgttgtcaggatctatttctagagctttcttgatatctgcctctgccaaatcaagatcaacaagatgcatgtgtgcctgtgcccttctgtacaaggccttcacgtttgtgttgtcagatttccaggacctcggtacacagttcctttgcttccttgtaatcattaagtcttagtttacatgcggcattgttgagcttgcagcttatctgaagtggtttcgatagctgcttctcttcttcagtgaaggagctatcgtactcgacaaagctcaaagccttttcatatctcttagaagccctggcatacttgccaattttaaaccacacattcccttcttctttcttcttagcagctgcttcaatcttctcagcaacgttcttcaagtcccatgaatctttctccttatcaaatgagacaagctccatttcgtagtaaacatatgagtttggtggaactgtagccagatctttagttgtttcattagttccaaaggcatgatgtggaggaatagtgaccaaggatacttctcctttcttcatgctgagtactgctttgtcaagcccttcaatcacttgatcctcatcagtcttgaactcaaatggctcctcaccatcatgacctttcttgacaaacaaggtaccatcctccaacttcccaataagtttcactcggacaactgcacaatcattgggacaatcatagccttcgccctccttaaggatcttcttaaggatctttttgtcactgcctaactcagtgactgtcctccaggacaccacttgaagatcaatgtgcaatgtcgcgttaggaggcacagaagcttcttctccagatgcctgtctacctttcacaccaaagccatattgtggcatgacagtgaggtgggccttctcgtttttcttcatagtcttgacagcctttgatatggcagggcagaatacgccatctctcacagtgaactcaacaccatcagatttcgatacaactgttccatcctcaagccttgcttcatacttaacaacaacttcatcaggatctctggggttctcccacttatcgcccttggctactaccttttttaagatgcctccatccttggaaatgtccttgatacacacccatgacagaagctcaacatcaaattgcagtgtggcatttggagggatgactggtggtgagccatcttcaccatatgcaagctctggtgggatggtgaacacagcattttcgccttttttcatggtcttgatgcccaaatcccatccctttataacttgtccttggcccagcgtgaacttgaacggggagtcgcggtccctggtggagtcgaagatggtgccgtctatcaacgtccccgtgtagtgaacttcgacttcgtcgccggcgtgcaggtccttcatggcatcgtcgtcgtcctcgccgcctaggccgtagccccccatccccatgggacctccgaggccgtagccccccatccccatggggccaccgaggccgtagcctcccatccccatccccatcattcccatggggtcgtacccgccagccgccgggaagtcgtagtcgtcttccatggcctaaggaaatggaagcttctagaagggaggagtgcaggtggcttctcgagctgggcgagccgggggcgtggaccgcgtgcgcctttcgagtttcgattcccgagatcgatgcggcggcggtgccttggaattatagcttgc

SEQ ID NO: 25619 - DNA, 211 bp, Zea mays
  Clone ID: MRT4577_123373C.1
aactcctaattcactcttttgatggaggacaatttgatgaggctatagtgtttgacaaactttgttttgtgaattagaggtattttgactgaatagttaagaaaactatacgaagtagtgtgaccggacacagccagacatttgatgatgctgctgcactgaaacactgacgcggaccacaataaaaaaccctgaaactttatcactactg

SEQ ID NO: 25620 - DNA, 814 bp, Zea mays
  Clone ID: MRT4577_123374C.1
gcaccgatctcggtcccaatcttgacaagatcaaaacggagatgctgttcactagagcgctgctggtcgcggcccagcgaagggacgtcaccggaaacccagccctgcaggggctgctcgagatgctcggcaagaaggccaaggaggctgagaacaccttacacgagctccaccacttcatgacccgggacaagatcgacgggactcgatacgccgctccggaactgggcgatggcctcggcgccaaagctgagcatgcgcaccatgctgctcgccacactgctgataactggctctcatgcttatcttgctgctgtcgacgagatgatgacgacgacgacgctgcccatgccatgcctcgccgtcctcgtgacgatggccatgttgcaaagttgccattcaaccgagtggccatgtccaacaaaatcaggcagctcattgaggaaatgcactcctattgtactcgtatctctaacgtcctcgatgaaatgccaagcaggagcagggacattcacacgccagaaagaaacttaggcatcccattccaagagaaatatatgtcggtcctggacgctgagcgagagcgacaatgaacctttcctgctacagcaactaataagtacagtattaaacagtaactaatatttcttcaatttcaaactgttatattttttatttttctagattcatactttttattacatactcaagtatactgtatgtccaaatatataggaaaacaatgtatcaagaaaaaaaatcctagttcgtgagaaagcgggtggactagtaatgtctaaatatcctgtccctc

SEQ ID NO: 25621 - DNA, 595 bp, Zea mays
  unsure (1)..(595): unsure at all n locations
  Clone ID: MRT4577_123375C.1
ngagcccccttggagaccagctccccacacatgcacacccacacatggaagatttttctttggattgagaccaaagactcaaggaagaatagtacagaaagcagctctgcagaaggtggcaaaattttacactttttttctttctagctacatatatcacctacatattccagcttgatatcagatgtgttgttttgtactaataaatgttatttaaaaatgctgtattagtagactttatatggcgataggtataataaaaactctaaacatagagatcagattcagctaagatgttttatgctaggttagaatcgttattaattccaacattagctctcaatttgggttttttattactacctcttgttgaataagcatacctttgatttttgtgttttatgtgttattagaagtgttaatgttttgtttcggaccagatgtttagttcaattatggttctcttctttaaaggtgtcttttgatttcgtttgatttatttttagttttaatggtttattccaaattttatttcctgtttgtgcttcaaagtatgtatgtatgtactgttatgtgtaaataaatagttttgttc

SEQ ID NO: 25622 - DNA, 288 bp, Zea mays
  unsure (1)..(288): unsure at all n locations
  Clone ID: MRT4577_123376C.1
cgaatactaccgagctatagatggcgcgatcttacgatacatctgtggagaatcgacgtgcaattggattagcaataactacttagctgtggtgacagagaaatttggtgctgcattggtttctcctgagcatcgatactatggcaagagttctccttttaacaagttgacaatanggaatctacagttcttatcatcaaagcaggctttatttgatcttactattgtccgccaatattatcaggaaactgaaataccagtataccgctctggggcaacagttctggt

SEQ ID NO: 25623 - DNA, 483 bp, Zea mays
  Clone ID: MRT4577_123377C.1
gggggaggataatcaggaccctttacaataatcactggttttgcaatctgcatacatgaaccatcagggttagacccaaacaatcggggtggttttaaaaaaatacatatacttcactttgcactatcattttccttaacagggccaatttaaaagcccccgggggttaataccccccaaaaactttttttcgactcccagggaggggcatgacgggctacttttttttacatccaaaactatgcaacaagagggcgtaaacccccgacttaggcgacccctaaaacccgatacctaaaaatttttagggttcccaaactcgatctaggggcaaagcaaattccaggtcatggggggtgccgttgctggcccgccttattatggctgggttgttgggccctacctgaggttcaggctggaatccacggttttcgatcctaatccgagccaggggtggctctccggctcctttttgactggggc

SEQ ID NO: 25624 - DNA, 994 bp, Zea mays
  Clone ID: MRT4577_123378C.1
agcaggtgttccgtgagcaccacgacggcggcggcggcggcgacgacggcggcaacccgttcgcggcgcagctgatggaggtgatggagctgctgcacggcaacctggaggccaagtcgcggctgtacaaggacccgtcgctgagcaacatcttcctgatgaacaacgggcggtacatgctgcagaagatccgcgggtcggcggagaccaacgcgatgctgggcgaggcgtgggcgcggaagcagtcgaccaacctgcggcagtaccacaagaactaccagcgggacgcgtggagccgcgtgctggggctgctccgcgacgacggcgtgctgacggtgaagggccacgtgcagaagccggtgctcaaggagcggttcaagcagttcaacgccgccatggacgagatccaccggacgcagggcgcatgggtcgtcagcgacgagcagctgcagtcggagctgcgcgtctccatcgccgccgtcgtcgtgccggcctaccgctccttcctcggccgcttcgcgcagcacttcagcgccgggagacagacggagaagtacgtcaagctcagcgctgaggacgtggagaccatcatcgacgagctcttcgacggcaacgccacgtccatgacgaggaggaagacatgacaacaataacaacaacactagagcttcttgcttgacagtgccgcggcacgtccattggccggtccagcttatccatccattatcgatttgagcaatgtgttgttccatttttttttgtttcctcttcaaaaattcttctttttatttgtcttctgtcaactaaaaacgttactgtactaattttggtccagcaacagtcgatccatgtactaagaactgtacttactaccagtgcttctgtcaggagccagggcagctagatcatctctctgtaactctttgtacccatatatgtactgcttgcctgatgacactgttctgaaaaaaaaaaaaaaaaaaaagtcgacgcg

SEQ ID NO: 25625 - DNA, 813 bp, Zea mays
  Clone ID: MRT4577_12337C.1
gatccagatcggtcgcctctcctcccttccttctgccgcttccctatctctcttcccgtcaccggcggcggcgccctccttccctcacgctgcacccaaacctccctcccgctcccagcttttcttcctcctccgccgcctctagggtttctctccccgatccccaatcccctagcgctccactccttccttgccgccgccacctccggtgcccgatcctggtgacctcaggcgggaatcgaagacccctgtccggcaagatctggcgggcgcccgagcccgagcgatgaggtggtccagatcgtgcacggggacgcagcgggggacccgacggtggtcaccgtcagctgcccgaacaagacctgcctgggctgcgacctctgccgcctcgtcgtcctcttcggcctcaacgtccacaagggcgacatgagcaccgacgaccgctggtgctacatcgtgctcggggtcgccgcctcgcgccgggccgggccggggactgggacgtcctcaaggagcggctggtggagcttcgttcgcaccggcgctggagcagacccgcctccgcaccgccctcacgcccaacccctcgcaggggaaagttcaggctcatacgagccaacgacgatgcggactggttttggatgctctctccttcagcgctcgtaaaattagactgcttcacaggcttgacggttgagaagaaaaactatgttcaggagccctctttggtcgacatgcacgagggaggaggaaattgtctccccacacaaggaggatgcctgagctgaccaggaggacaccctcgtccacccc

SEQ ID NO: 25626 - DNA, 337 bp, Zea mays
  Clone ID: MRT4577_123380C.1
cggatcaacgcttattctaccctactatactgttggatgttctttggaagtccagctcaggaggtaaaggatgcaggtcacgaagagcatcctatatgatataaatggagtagcctgtgagcagggagctcacgtcgcatcaggcaataactatatctagggtcatctatacacatccatgtgggaaggattgcgaggcatggctgaaatggatggtgcatgtactagctcgtagcagagcaaggcacggagattatgagagctacaatgtgcttctcagattgacgatgcacagttgactgaggtgaaagagatagcgatgaccagattggaaaga

SEQ ID NO: 25627 - DNA, 2228 bp, Zea mays
  unsure (1)..(2228): unsure at all n locations
  Clone ID: MRT4577_123381C.1
ggccgctttttttttttttttnntggtttnttnttccatgaatcacaaacagactttactcttccgtaggaaactgggtttttttcccacagatgtaaacaattgcaagataaaaatgaaatacccataacacttgttactcaaagctctgaacaaactaagtaggctactataacttcagtccatgtcgatcccttgtgttgggaggggggtacaaagaaactactcatctggccaaactccctatctctatacattgttgataaatcacacggccccagggtctatgagacaacatcagtagcattggtactgctgggcaaatgaaccgggtcgtcatcgaccatgctaacaatcggagtttcctgctcctgctgaacatcctgtggagactctccagctggtatgttgattccagcgaaaccgactaggacggcagcggctccgacatagtccagtagatgaggagcatgaccggtgagtgtgtccacaatggcagcaatcggaacttggattgtgaggccagctgtagcgaccgtggttgttgtgagaaggatcgctttcgcccacaagtagtcactcaaaacattgtctatcaaaccttttccaacaacaagaccagcttgttcccatgtgagcctgtggaatggtacttttcgttctaggacaaggtcttcgcctgcaaagacagttacaaagaggttgttcaccgacatagatggaggaaccactggcttcaaggatgccgcagataacgctgctgctcctaggtaccttttccctcgtacctctaggttgtccatgaacgcagcgtgcttttgtgtacaacgatcatctgcttgttgcaccgtacatgtatagtctaaggagctgtaaactgttagagttatgtattgttgtactgaacaccgtttcgcaactgcatgtacgctgtcttttagagacagttgtggaaccatcaagtgattgaaccattcatctgaaatcctgttgcgcagtttgttcttaattattttcattgcagagaaggctctttcaactgatgcttttgaaactggcagtattattgacaactcaataagcttgtagactttgactggtatttcatcaaccatatttggcactggaatagatttttcattacagaattgcttcacctcatcaaataagttctcccatccactctctctcatggtaattaactgatctttgacatcagaaactaactccatagcatgaataatattaatatcttttctttgtaagatatgtgaaagttcatttgtaataccgagcaatcgcaacatgagctttaaaatgaaagcaaatttaaatgactccattttctcaatcagacctcctgcctgagatggtgcacgcccatctgtctctaccattccaagcacttctatcacggagttccacatttgatcactctcaagcttttccaagatactttgatgatgggcttctattaatgcatctctcctcttacaggatgcacttgtcgtgttcacaatcaaggaaatataagttccatccttatctttccaccagtctatcatctctctaaaattacccttgtttaaggacgtagaagattcatcatgtccacggaaagccaatccttgtgccaatagatacctcgaacactctagagatgacgtcaaacgtattttatataactcttctgcttcttgggatgcaatacaaaacttgcgtgctacactctgcctttgattattgaaatcatcacaatgctttaaacagttgttgtgaatactattaacaacaccaacatgctcaggcaatgatttgtatgtgtgcttccaattagtaaatcctgttctagtgaacacctcagagccaaattgatcagccctccctggttgcttaaagagaaaacaatagaaacaatatgctgcatcttgggactcactatattctatccaattaaatttttcataccatgattgcgaaaatgctcttgtcacaactccaaactgtctgcgaggaaatttaataatgggctgatgtggtccttttgctatatatgccctcctggcttgatctctaatttcaggggcatactcgtgtatttgttttctaagagctggatcatttgcaatgtcatctaaattaagaacatgtgatgattcaccttcgtcttgtgcttgagtttctgcaggctgtgttgtttgcgaagtccgagtgaaatacctctccat

SEQ ID NO: 25628 - DNA, 271 bp, Zea mays
  unsure (1)..(271): unsure at all n locations
  Clone ID: MRT4577_123382C.1
tcaatccaatcccatttgcatttgcattacatcaacgccaacataagctttacatgcaaagggtngcttcacagggggctttagtctaatcaacctcctcactctgtctgtgtctattgtatataccacttgtcgtggatgtatgcctgtacattgttggcaaggatcaatatgatctgcttgctatctcttaagtgatcttagcaattacttcatctgtcaatgatgatttgtcgaaaccttctaccttgcgcctatttcttgacaaata

SEQ ID NO: 25629 - DNA, 528 bp, Zea mays
  Clone ID: MRT4577_123383C.1
ccgtccgaaaaaaaaaaaaaaaaaaaaaaaaaaaaaaaaaaaaaaaaaaaaagaaaagaaaaaaataaaaaaaaaaaaaaaaacaaacaaaaaacatgcaaaaaaaaaaaaaaaaaaaataaagaaaaaaaaaaaaaaaaaaacggggcgcgccgttttaaaggttcaaagatctgggaaccccctgagggcaacccaatttatttttttttggggcacacaaaatttttgccagtggccgtattttcaaaaaggcccgaacggaaaaaccttcccaacaccaaattaaactgcatggcaaaagagaccctttttgcaagggggcattaaaccaaaagggcccggaggttacccccttccaaaccgttacacttcccaaatgccaagggcccccccctttggcttgcttcattaacttcgtggggtggggggctacctctccccgtaacctctaaattgcaagctcccttgagcccgcccatttagttttttacctttcctttaccccaaaaaactcgagttttccca

SEQ ID NO: 25630 - DNA, 220 bp, Zea mays
  Clone ID: MRT4577_123384C.1
tttttggtatttaaagaagattctagggtcaagacagcatcagcacagctctgggaactcaatttctgattctctaacaaagctctgggcccgcatgacaaacagggaatgataataatgccatgaattacatggtacatcttagagacctaaagaaagaaagtggttagaattttactacactgaacaagagagggtgtatacataggcaatccatctg

SEQ ID NO: 25631 - DNA, 366 bp, Zea mays
  Clone ID: MRT4577_123385C.1
caacaaagaaaggtaagtggggaaaatcaagatccatcaaatagaatatatcacaaagagaagcattgaacaagtgaatatcctggcttggttatggctagtgcggcctattctacacaaacaatggttcatgtattaaacccaaaggcaccaggcttgagcgaggtattcgtgacctccagaagattgctgcagaatacagaccaccaacaattgatattaatgaggtcgatccaaatggccaggcagcagttaaaagacggttgcctcctgaagtaaagcaaaaggttgcaaggttatcggcaaatcagggaaagatccaagaacatgagctaatgaatcgcctcatgggcatagttggacacc

SEQ ID NO: 25632 - DNA, 203 bp, Zea mays
  Clone ID: MRT4577_123386C.1
gcgttgggagtttctgagaacctggaggagcaaagcttgattcagatcctgtctgcctcgctgggtccttggcaggtcccctgtcctcctgggtgggagcttatcgggtggtggggcagaaggactgaaggtaattcactcctagatcgcagtggctggctgcttggccaggacagtgatgccgccacgcagagcttccgctt

SEQ ID NO: 25633 - DNA, 493 bp, Zea mays
  Clone ID: MRT4577_123387C.1
gaacaaagaaaggtaagtggggaaaatcaagatccatcaaatagaatatatcacaaagagaagcattgaacaagtgaatatcctggcttggttatggctagtgcggcctattctacacaaacaatggtaagggtttcattgtggcacaagagagtcttaaatacatttcaacattttccattgtttcagcacccgttgttggtagggcaggttcatgtattaaacccaaaggcaccaggcttgagcgaggtattcgtgacctccagaagattgctgcagaatgcaaatcagggaaagatccaagaacatgagctaatgaatcgcctcatgagcatagttggacaccttgttcagcgcaggacactatagcttgcagagttatggcctaaaggttacatggatagtgttggaatcaaagatgccatttatagatgaagggagcgaagaatattatactacagccagcaaaatgttcgcagcgaagagagaatga

SEQ ID NO: 25634 - DNA, 370 bp, Zea mays
  Clone ID: MRT4577_123388C.1
tttcatattagggcgcagtatactcaacttcagtgatttctggttgcacatatattcttattcatcctttagatgtctcatctcatatcatggtagtgtgcttctgtgctggtgcattttcatgtataatatcttgttataacgtttttttgtggtgacatgagtcaatgacaattttcatgaaaaaatgagccaatgccaacctggttgggttctataatgttgtaataggggtagtactccccccccctcattatcttcgatatagagccagcagagctcctgttaatcttagggaagaaagctcgtaacttgtttgtcttttatggatcttgttgacatgtctactgacttcgattaggcaccacat

SEQ ID NO: 25635 - DNA, 2302 bp, Zea mays
  Clone ID: MRT4577_123389C.1
ttgggaccctcgaggccggccggggtctccgttctcctgtcgctcctccctcggcctggagtccagtcctcgactccgcctgccgcctgctgcctgacaagccacgcgctgcggcagccgtacgggcactagggttttcttccacttcgaccgcgggctcgggatctcgcgccgcaccgcaatgcagcacacgtgccgctgatcccgtggccgcctccttcctttcctcctcctgcgccacgcgtcctgcgccgcctctgctgcagcgggcagccgccatggcgcggcgccacgggtggcagctccccgcccacaccctgcaggtggtggctataacagtgtactctgtgctttgtatagcattctatgctttcttctctccatttcttgggaaggacttgtatcaatatatcgctgtcggtatttatagttttttggctttatctgtgctgattctatatgtcagatgtactgcgattgatcctgctgactctggcatcctgatttccatggatgacatactaatttataaatcagaagcacatgtagacactcaagatgaagctggtaagccaggattgaggaacgatgaggatatccgaaagcataaatcatgctttggaagggtttgtttttgttgcgctatttttacaactggggactgtcgcggaggggatgaagctaaccatcaagaagattatggtgaagaggcactcttttgcaccctttgcaacgcagaggtgcgtatgctgggccccaaccgtagcaagcactgtcgaagttgcgacaagtgtgttgatgggtttgatcatcactgccggtggctgaacaattgtgttggaagaaaaaattatatcacatttttatgccttatggctgtgagtctggcttggcttgctgctgagtgtggagttggtattgctgtttttgttcgttgcttcactgacaagacagtcatagaagatcagattggggaaaagctgggttacggtctttcacgtgcaccctttgcaaccattgtagccctggctacagctctttcaatgcttgcttcagtaccactaggagaactatttttcttccatatgatattaatccggaagggcataacaacttatgaatatgttgtggccatgagggctcagagtgaacctcctggaccttctgtcaatgatgaccaacaaagcttggcatcttctccaatgagttctgcaccaacagcttttagtgggagctcgtttgcacggcactacaaaggcgcatggtgcactcccccacgtatcttcattgaccaggacgaaatcatcccacacctggagcctggccgagttccttcaactgttgatcctgataccacagacccaatggaaagaaccaaaacccatcctaaacggccagtccgcatcagtgcgtggaagcttgcgaagctcgattcaaatgaggccatgaaagcagcagcgaaagccagagcctcttcgtccgtgctgaaaccgatcaatacccgcaaccagtatgaggcagacagtgatagcctcagtagcagaaacagtgtcataagtgctgataccggacaccataggtaccctcggtcttgcgggaattcgcagtacaagccctcttatccaccaagcagagcaagtgcagatgacatcgagttgtacccccagacaccgagcagcttccagagcaactcacggacttcaactcccatagccgagcaccatccctccaagcatttcaacccaatctaccagacatcagcaaacaggtctccattctcagcaaaagcaagtgtcagtgaagctcctgtctctgaaatcaccaatgcagggaggtcctaccccccaccacaagcggacagatcctcccggtcatctgtttactgggatcaggaagctggcaggttcgtgtctgctcaggcaaaccagggatctagctctcgccctgcctatcctgatcttctatacaccgggcagaatatattctttggtggacctctgattgcagatcccgcagcaagaagcttcagagatcctggtggctcgagccaaaggtctgccgggcctcggtcgcaccagctcccggtgttcgttcccagtgacccccagaaagatcagctgtccaggttaccgtgaaatgctatatcttttttttttgggggggggggggggggtagtagtcttccgaaacacatgttgccctgccgggttattaatgtatagttattagctcttagacctgacagaatagttcatgactttgtatcgggttcatggaaattaagacctatttaggcactatc

SEQ ID NO: 25636 - DNA, 397 bp, Zea mays
  Clone ID: MRT4577_12338C.1
aaaaaaattggtggttaacaaaaggacaaaacaaaaaaaaaaacccccacaaaatgaaaaacccacacaaaaaaaaaaaaagggggaacaccgaaaaaaaaaaagggacaaaacccaaaaaccgggaaaaaaccaaaaaaaaaaaaggggaaaaaaaaaaaaagaaacccaaaaaaaaaggaggggaaggctcaaagagaccccaaaaactaaagggaagccaaacaggaccaaagcccgagggtggcaggaaagggcagtttaaacacccaggaaccaagaaggagggaccccagagcacaaaaaggggagcctttgaaaaaaacaattcttaaacgaaaaacccaccggagaaaccaatacaaaggacaaaaagattagcccccagaaagaaagc

SEQ ID NO: 25637 - DNA, 496 bp, Zea mays
  unsure (1)..(496): unsure at all n locations
  Clone ID: MRT4577_123390C.1
naagcggacagatcctcccggtcatctgtttactgggatcaggaagctggcaggttcgtgtctgctcaggcaaaccagggatctagctctcgccctggctatcctgatcttctatacaccgggcagaatatattctttggtggacctctgattgcagatcccgcagcaagaagcttcagagatcctggtggctcgagccaaaggtctgccggtcctcggtcgcaccagctcccggtgttcgttcccagtgacccccagaaagatcagctgtccaggttaccgtgaaatgctatatcttttttttggtggtggtggtggggtgtgtgggtgtgtgtgtgtgtggggggggggggggggggtaggtagtctccgaaacacatgttgcccagccgggttattaatgtatagttattagctcttacacctgacagactagttcatgactttttgtatcgggttcatggaaattaagatctatttaggcactatcaaccat

SEQ ID NO: 25638 - DNA, 282 bp, Zea mays
  Clone ID: MRT4577_123391C.1
attgtataaacctattaaaaggttataacgtttaatttggaacaatacttttttggtttcagttcaattgtttattcatgttattgctcacacagacactgtcacccatggagatgcgtgacacattattactcattcatcgccgctaaatgactcaactagctagctagccagcggctttactacagcacatagttttttcagtgggggacaaccttcggctgttgcagtaagggtttggagacttctgcttttatgcctatattggctcttgtatcattt

SEQ ID NO: 25639 - DNA, 444 bp, Zea mays
  unsure (1)..(444): unsure at all n locations
  Clone ID: MRT4577_123392C.1
cctgcagtaccgtccgnattccgggtcgtagacactcaagatgaagctggtaagccaggattgaggaacgatgaggatatccgaaagcataaatcatgctttggaagggtttgtttttgctgcgctatttttacaactggggactgtcgcggaggggatgaagctaaccatcaagaagattatggtgaagaggcactcttttgcaccctttgcaacgcagaggtgcgcaaacatagcaagcactgtcgaagttgcgacaagtgtgttgatgggtttgatcatcactgccggtggctgaacaattgtgttggaagaaaaaattatatcacatttttatgccttatggctgtggtactgaagcaagcattgaaagagctgtagccagggccacaatggttgcaaagggtgcacgtgaaagaccataacactagttctagatcgcga

SEQ ID NO: 25640 - DNA, 285 bp, Zea mays
  Clone ID: MRT4577_123393C.1
cccacgcgtccgaactcgtctgcgcattcacaggcgcgcgagcctgaccctgagatgggcgggagagggatccctctcaagacggccctgaaacaccaacttgacctccatctatgctaagcctatgaccaccatgccaaaggacattccggtggggccgaggatccgttcttagagggcctaatcggcacctaaaacatcatgacaaaaacatgatatcctggggttattgtcaatctcgtgccattgtaaggacatatgagtcaggtttgtatataggatcac

SEQ ID NO: 25641 - DNA, 632 bp, Zea mays
  unsure (1)..(632): unsure at all n locations
  Clone ID: MRT4577_123394C.1
caaggaaccagcaaatagatccatntcgcccaatgatgtttttgagttcaattcaaaatttactgacagaatgagaagaattaagattccactgcctcccgttgatgagaagaaaaaggttgttgaagatgttgacaaagacaggaggtatgcaattgatgcatcaattgtgcgcattatgaagagccgcaaagttatgggtcatcaacagctggttgctgaatgtgttgagcagcttagccgcatgtttaagccggacttcaaagccataaagaagaggattgaggatctcatcacaagggactatttggagcgcgacaaggacaacgccaatacgtacaaataccttgcctgattggtggttagtgacaaagtccaaaacagctccgggactatgcgataccactgggatggcaatcttcctgcaatgtcgtggtagatgcgtattctggctccgttgtcacctgttggtttgtggaggcagagtggattggtcagctagctgacggaagtcactgactcactagaagctattaagtggttttgtacttactgagtcaaatatatgtcatacgttgaaaccatgtttcgtaattatgaatagtttctttaaaattaaattttgcgcaatc

SEQ ID NO: 25642 - DNA, 596 bp, Zea mays
  Clone ID: MRT4577_123395C.1
ctcgagccggccgggagctcctacacaataagggatcccagggatttcgttcgccacactctgtaccccggatgagttgcagctgcatctcacacccgcgatcccataaacaatggtgaaagttgctgctgtgcttggtcaacaagatggtgtcaagggaaccatccttcttcacccaacagggagatggtcctaccactgacaccggaagcgtctctgccctcaagcctgggctacatgggctccatgtgcatgcagttggtgacaccaccaatggctgcatgtcaattgaaccacactacaatcctgcgatcaaggaacatggagcaccataaaatgagaaccgccatgcctctgatcttgcaaatgtgacacctgcaccacatggaggtgcatacattactgttagcgacagctagatcccactgactgacccaaagtccatcattggcacatctgtcgttgatcacgctgatccctatgatccctgaatagggtgcacactagttcaggaagaacaccgtcaacgctgtcgaccgagctgcttgtgagatcatcggactccagggcctgaactgaaacaaatgctcccttgc

SEQ ID NO: 25643 - DNA, 938 bp, Zea mays
  Clone ID: MRT4577_123396C.1
gctattgaacttattgttacacatatcaggctgcattgctactactgtttaatggatctgacaggcttagttattctgagattgtaacacaattaaacctgtcagatgatgatgtagtgcgtttgctccattctctttcttgtgcgaagtacaagatccttaacaaggaaccggctagtagatccatctctcccaatgatgtttttgagttcaattcaaagtttactgacagaatgagaagaatcaaggttccactccctcctgttgatgagaagaaaaaggttgttgaagatgttgacaaagacaggaggtatgcaattgatgcatcaattgtgcgcattatgaagagccgcaaagttatgggtcatcaacagctggttgctgaatgtgttgagcagctgagccgcatgttcaagcctgacttcaaagccataaagaagaggattgaggatctcattacaagggactacttggagcgcgacaaggacaacgctaatacgtacaaataccttgcctgattggtggtcagtggcaaaagtccaaaacagctcccagactagtgcaataccacgggggtggcgatctcctgcaaggtggtggtgcgtcaacttttaccatgatttgaggtgcgttatggtgatttgcgtgcttatgggtcctgccacagcaagggctgctcgcatttgtaaattggccgttaaaatagacaatcttgacctgcattagatgatatgatgatgatatgaggaataggagaggcactcaagtacttgtttgccatctatgccaatgttttacctatatgtctgtatcaatgtttcagttaactgagatgagattatgcttgggggttgctttgctatatgaaatgagtggatactatgcgaatttgcagtaaaaaaaaaaaaaaaaaaactcgagaaagggccgcgggtacc

SEQ ID NO: 25644 - DNA, 1030 bp, Zea mays
  Clone ID: MRT4577_123398C.1
aaaaaaaaaaaaaaaaaaaaaaaaaaaaaaaatgggtacctcgaggccggccgggctctgcctccgcctgccttgccgccgcccaagtctcgtccgtcgtcgtcgctccgctgccagtcagccgcatctccagcctccagcaggcagagcacccccgctctcgtctccggagccttccggatgggctgcatcttctcgtcgccgggctcggcgcgtgcgctgcggccgtgcgccggggtgcgggtgatccacaccaacgggttcgtggaggacttcgagggccccggcgtggtgaccgtggcgcacgtgacgcgctgcctcggcgggcccggcggccccgcctccgccgccaacgccgccgggaaggggtacgtgctgtgctcgtcggcgcacctgctgcagccggggcgcgggccgttccggcccgacgacgcgctgcagccgggaaccgtctacttcctgctcccgcagtcggtgttccaggccgagtcctccgccgtggacctcgcgtgcctcatgaaccgcctcacggcgctcgcccgcaagggcggcgccagcgccgcgcccaagcccagcccgctcgacgcgctcttcgacgccgccgccgccgctgccgccgcctccgggagccaccgccagcacaaccagcagcggatgccagtggctgcggcggcgagggagaagaagggtcagccctggcgggcggcgccgtggaagccctgcctcgagcgcatcgacgagtccgtcggccgcgcctccatgcgcagcgcgtccagcggctgcagcagcgaggcctgatcattggctccatctagtccccttttcccttcttgtcttctgcagtagtgcatacagatggatggttttgcagaactgtgtgtaaagatctgttgctttgccggtagtgattaattagattcattcagcgacgtgttttcagatccctcccatctgcagctctgctcggctgccgcttaatcaatctcttcctgtaaaaaaaaaaaaaaaaaaaaaaaaaaaactcgcggca

SEQ ID NO: 25645 - DNA, 1221 bp, Zea mays
  Clone ID: MRT4577_123399C.1
atgaaggccgcgcgggggagacgctgggaaagccgcacctccacgcccccatcaatcccgcccaccaccaagctcgccgcctaccaaacccgccagctccgcgcgagatccgccacagttatgccgcgcgagggagacggcgggatagccgccggccagatccgcttgctcgcgagggagaggaaggaaggccgctcggggggaaacgccgggagagccgctacctccgcgcccccgccaatcccgccgcccaccaaccccgtcctcgagcccgcccccctccaagctcgccccattccatactcggcgacaggattcaccgcgctcccttccgcgcctgctattaaaaggatggacacaggtgatccctccaacccatccccactctcctcagatccaccgattcacagccgttcttgcatttctcagagagaattccgcatattcgcgctcagattctcgccctctgctgatgcttctgaattgtgttatgagcagctggagctggagggcatccagagaatctcggcaagaaggaaggaacaggagcaggtgcgtcgtgaggcgacggaggacctggccgaggatctgtcagaaggcgagaagggagacaccatcggcgagcttgcgccggttgagacgaccaagaagaagttccagaggaacttctctgaccttaccgtctggtctgacgacaataaggagaagaagctttacattgtgctcatcagctggtatatgcccgaggagattccgaaggggtcaaaaatagaagcaatttcataccgcgataatgtccaaagatttgacaccttactccaacaaggatctacatatacattatatggagtggcgttctatttcctgccgtatccaaaacatcttatgccatttcatgaggtcctccaacaacctcataagaggtttatagatgtaatagaaattgtcattcatttggcgccgttagagcacatcggtggaaggccgtacagagaggccatactaatggattccagacgtgttatattttattcaaacaatacaagctttatttataggtgggatataatcgtcgtgggtatttggcctgaactgttgcaaagaaatgctctacgcaattcggcgctccatgatccaaaatccgaggagtgctttaatcaacaattatctagagaggagacgggcttatctggcaacagtggtaccggatgtgtagtgtga

SEQ ID NO: 25646 - DNA, 297 bp, Zea mays
  Clone ID: MRT4577_12339C.1
tcttcctactccacctacctcccttctcccggatccctcgatcgagaagattctccacggatccgtatcccacgtcaggctgccggagttcttcatcttccctgcctacaagctccctcagtccaaggccacctcatctactgtctccctgcccatcttctacctcttcctcggccgctactaggttcttctctccatcctcgattccgtcaaggagatcggcttcttccatttggtgaaccacagcgtctccctttatgctattcatgacatgtacactgtattccaccaattctt

SEQ ID NO: 25647 - DNA, 285 bp, Zea mays
  Clone ID: MRT4577_1233C.1
gggcaatcaggcttggtactgccttgtccttcttgaggtgttatgtcagcttgctgaacttggctattcaaagccagtgcgagcaattcagccaattcttggttatcctctgatcaattatcctgaagtgttacttcttggtgttagccatatcaatactgcatataatctcatccagcatgaagtactgtcctgtgtttttcctgctgtggtgaagaacaccatgcacagcagtcttatgaactatctatgacatatcaatccttaccttactcttcaaggatt

SEQ ID NO: 25648 - DNA, 602 bp, Zea mays
  Clone ID: MRT4577_123400C.1
ctctgcctccgcctgccttgccgccgcccaagcctcgtccgtcgtcgtcgctccgctgccagtcagccacatctccagcctccagcaggcagagcacccccgctcccggtcccggtcccggtccccgcccaccgatcgaccgggtcgtctccggagccttccggatgggctgcatcttctcgtcgccgggctcggcgcgggcgctgcggccgtgcgccggggtgcgggtgatccacaccaacgggttcgtggaggacttcgatggccccggcgtggttaccgtggcgcacgtgacgcgctgcctcgccgggcccgccgggcccgcctccgccgccgccgccgggaaggggtacgtgctgtgctcgtcggcgcaccggctgcagccggggcgcgggccgttccggcccgacgacgcgctgcagccgggaaccgtctacttcctgctcccgcagtcggtgttccaggccgagtcctccgccgtggacctcgcgtgcctcatgaaccgcctcacggcgctcgcccgcaagggcggcgccagcgccgcgcccaagcccagcccgctcgacgcgctcttcgacgccgtagccgtcgccggcgcctcc

SEQ ID NO: 25649 - DNA, 402 bp, Zea mays
  Clone ID: MRT4577_123401C.1
tcggttttgaattctcgactcaagcgtcccttccgtggttcattggtcatgccttgtttattttacaatatagctccaagcaccagggtggaattatcaccaagtgaggtagatcaccgactaagtgttcgaccagctcacggatgactcccagaagcgctacaaggagtccctgatattcgaggaggtctacatcatcgtcctctgcgtctacaatgacatcaacaattacttgcctgggccacaccactaccccctgtccaaggagaatctcatggccatgatgtaggagtactacgtgaacctagacggtctcctttaccagaaggagttcgccgagttcattcctaagctgaccgaagtctcgctttgctcgatcaacgagaagcttcttatcacgct

SEQ ID NO: 25650 - DNA, 238 bp, Zea mays
  Clone ID: MRT4577_123402C.1
gaccgccgaatcttgttctcgaattacgggagatccgcagtgctatgcttcaccatctccttggacagttgccaaggcccggcgcgttctctatacacactctgatgacatgaaggctagcaaacccctgcctagccttaattatgccattagcgcgcacgggaaaagactcagctagcgcgcgcacagcaatatcgctcaggagcgactcgtaatcttgcacggcctcacagaatct

SEQ ID NO: 25651 - DNA, 1634 bp, Zea mays
  Clone ID: MRT4577_123403C.1
cgggcgggggggcaactattccaagccccaccagctctgctcagccaccaccatcctcctcttcctcgaacggtcgaaccgccgaaagcacgcaccccgccgccgcgtaccctcccctcacccgctcaccatcgccggccgccgttcggcgcgacgcggattcgaatccggaaagcgggcgatgggggcgaagcgcgcggtgctggtgggcatcaattaccagggcaccaaagcggagctcaagggctgccacaacgacgtcgctcgcatgcgccggtgcctcgtcgaccgcttcggattcgacgagtccggcatccgcgtcctcatagatgacggctccgcgccgcagcccacgggggccaacatccggcgggaactcgcgcgcctcgtcggggacgcgcggcccggggacctcctcttcttccactacagcgggcacggcatacggctgcccgccgagaccgggaaggacgacgacaccggctacgacgagtgcatcgtgccctgcgacatgaaccttatcacagaccaagatttcacggagcttgcgcaaaaagtccccagtggctgtctctttaccatagtttctgattcgtgccacagtggagggctacttgacaagaccaaggagcagattgggcacagcaccaagcagaagcagaagcagacccagacccagacccagagccgggaacttgaggaacggtctccttctggcaccagcttccgggaattcctcaaaggtactgttcgggaagcgtttgagtctcaaggaattcacctgccccaccgtagccgtagccaccagcaagggagcggtcacggcgacgacggtgaccaagagtcgcgctacatcaacacagccgatgcccacgtcaaaaaccggtcgctacctctctcgacattgatcgagatgctgaaggagaagactgggaaggacgacattgatgtagggtcaatccggctaacgctttttaacctcttcaaagacgatgccagcccgaagataaagaagttcatgaaggtcatgctgaacaagttacagcaggggcagcacggaggcattgtgggcttcatgggcgctctggcacaggaggtcctgaaagccaagctcgatggcaaggaagaagaagagttcgacccggcaatgaaacagcacgtgcacagcgatcaagaggtgtacgccgggacgacggcaagggtgccgagcaacggtgtcctgatcagtgggtgccagaccgaccagacgtctgccgacgcgaccacgccgaagggggtgtcctacggtgcgctcagcaatgccatccaggccatcctcgcggagcgtgggacggtaacgaacaaggagctcgtgctgaaagcgcgcaagatgctgtcgaaacagggctacacccaacagcctgggctctactgcagcgatgagaatgccagtgcggcttttatatgctgatgatgattcattgggtttgtcctgtggattgcaatatttgtattttgtctctaagtgcatgtgagttggactggtggttatgttttttcgctgagatttgggaatgtatcgtttctttcgcaggatgacattctttgaggatattagtcatttaaacataaaataaattttattttaataaagc

SEQ ID NO: 25652 - DNA, 324 bp, Zea mays
  Clone ID: MRT4577_123404C.1
cccccccccaaaagcatggaaaccgccccaaacttaaattttaaattgaaaatgcatacatactgccacagtttgttgttcaaaaaatccctaaacatttgggttaaagaaaaacctcccttttttaacatggctttaaatttaaaagttgctactacattttcaaagctgggggggtccaaaaaacgattagtgaaccaagtcgggtcgagagttacccaattgattgcttttttttgcagggggggggggggggatatccttgatgacacctttaccggcagccacattgaaaaaaaaaaaatttttgactggacccccctt

SEQ ID NO: 25653 - DNA, 405 bp, Zea mays
  Clone ID: MRT4577_123405C.1
ggttcctggagacttatacttacacgttcaccccctcctcaggtggtctgacagtccgtcagatttgtctgccacgtgtgcatagtctgagtacaggaagttgaattagttcttaataatgggaagaacctacattgtagaagagactgttggccagtatctttcaaacatcaatctgcagggaaaagcttttgtctctggtcttttaataggacagtgttcctcacaaaaggattatgtgattcttgccacaagaacaccacccaaagaagaacagaatgagagccccacacattccaaagccaaattggataacttggatgaagagtgggccacagaacacgcccaccaagtatccagggatgctaccaaggggacttttagttcttggagtatttattatta

SEQ ID NO: 25654 - DNA, 456 bp, Zea mays
  Clone ID: MRT4577_123406C.1
acaagtcacaagggagggggcatatgcaaaggaaccctcactttctttccattctaacaggggtaacgtaataaagcataccagaatagaatcgaatgcgggggggaaaacaactggggggggcaccaaaagaacaggcttggcggacaaagctcccatgacatatcccggccaataaaatagatttttttaaaagtcctagtctaggataaaaacttaaattcacaggtggttttttgacactaacataaaacaaactcgttgctgggggggcatcaacagcgctgaaaggggcatcaaggaaaaaaaagtctgcattctgggaccctttattacgttatcctgggtggaggtatagatatggggggggaccttggcctttgccccccccccgggggcggggggttcccttcttcccccagtgcaaacaaagacccccataaaaaaaaataaagg

SEQ ID NO: 25655 - DNA, 328 bp, Zea mays
  Clone ID: MRT4577_123407C.1
gactacttctaaatcgcgatcttacctcttatatctctttttttttcatcgaatccgcaacttttttaataccctccatacataatctttcataccacacataataatttctctctacctactccattattacatatatccatataaaaatatacatataggatatccccaaaatattaataatcattaatatcaacgtaatcccacctctaaactccacattcttacccttctctaactctacagctagtactggtaaattccacccaatcccatcatgttctgcgccatcatcatttccattttgtttataccctattcttccatc

SEQ ID NO: 25656 - DNA, 389 bp, Zea mays
  Clone ID: MRT4577_123408C.1
ccacgcgttccccacgcgtccgagctcaaatacctagtcagcttcaatagcaaaggatgtaagcagtgatcttgcttccatagtcccaagtgagtttcaggattttggactcgagtgccacagaaagctcaaaatcagagttgcttatctatctagatgaagcaaatgtgtccatggatgacaagaagttcaacttggtgaactattggaaagtgaattctcatagattccctgttgtggcgagtatggcaaagagattcttggttgttcctgctggaagtgtatcatcagaatcaacttttagttgtggaggaaggattcttgatgattataggagttctttaaagccggcgatagttcagtcactagtttgtgcatctagttggata

SEQ ID NO: 25657 - DNA, 498 bp, Zea mays
  Clone ID: MRT4577_123409C.1
ccccccccccccccctttctcctctttctctctcttcctcctcctccccgttgagagtccccttggtttccccggctcctctctctttctcctccggcggcgccgctgcttggagtggggatgagaggggagcttgggctgctcatgtctatagtagtagtaggtgtaggtttgccgttttagtggtgtttggccttgtgccgtggattggcgtcatgccgtcggggagttggtcaccggagcttgcaagcagcttctggtggtcgccgttggagccttctgctctgcctccatggtggaggcctaaggaaggagccggatctggcgaatccccccataataagcttgttgggccactggatcaaacctctgtggttattctctcgcttcctaccgtcgcggtggcggagcttccgacgagggtggtgtcgttccctgatcgagagaagggcttccggtgtgaatctggaggcagacgatggggatcctgagcacaat

SEQ ID NO: 25658 - DNA, 479 bp, Zea mays
  Clone ID: MRT4577_12340C.1
tggcttggaacctttgggctgatttatgtgcttggtggcggtggagacgcattcgtcgggtacgattgataagactgctattagtggtcggctgatgcctggtcatgctgggtatggttctggtgggtctatgttgcggactacgcctaggttcgagaattatattatgttccatttgttgcgttgttgggttaagcttacggagttgcgtacgtatgggttgttgcctcatgatcgtagggttaagtatggtgttgatatggggaagtcggcgttgtatgcttagtatcgtgaagatacgagtcgggggtctaaatccgcttactttgagcgaaatagtaccaacaacgaaaagaacactccccccaacggcctgaaaaaaaaaaaaaaaaaagggtggttgtctcagaggacttaagtccatgcatgtgcgtacgtgatgctacagtctcctcacagcgctattcaaacctaaccta

SEQ ID NO: 25659 - DNA, 206 bp, Zea mays
  unsure (1)..(206): unsure at all n locations
  Clone ID: MRT4577_123410C.1
cagacaccgcnccacaagacaagnggcnaaccccccaccaaaccngangggcagacgacacaaaggcacgaaccaggggccaacacccagangacaagcgcaccaacggcaacaaaaggcacccaccaaccacggacgacggcaacaaccaaacccagagcgacccaacacggcacaaaaaaaaagaaccaagcggnccgacagca

SEQ ID NO: 25660 - DNA, 453 bp, Zea mays
  Clone ID: MRT4577_123411C.1
aattcccgggtcgacccacgcgtacgcccacgcgtccgcagaaacacaccaagttatacacattagcaacagcctagcaacaatggctaccaagatattatccctacttgcagcttcttgcgctttttgcgagcgcaacaaatgcgttcattattccacaatgctcacttgctccaagttccattattacacagttactaccaccagttacttcaatgggctacgaacacccacctgtgcaagcctataggctacaacaagcaattgatgagagcgtcttaccacaacctattttccagatgcaacaacaacacttggcacatgtaacattacaaaccatctcaacgcatcagtatcaacaattcctaccagcactgtaccacctagccatggtgaaacctgatgcctacttgcaacaacagttgcttgcattaaacccacttgctctggcaa

SEQ ID NO: 25661 - DNA, 303 bp, Zea mays
  Clone ID: MRT4577_123412C.1
atggcgtggagggcgcgatggcgggcgggtcagggcgcgggtgcggcagacggtggatgggcgggcgcagcaaggggcgtgggcgcggcggggggtgccggcgcggcgaggagcggcggcgcggtgatggcggccgggcgggcgcagcgaggggcgcggcggcggcgcgaccggacggcgaggggcacgacggcgatgagggtgagtgtgaatgagagtgagagagtgaggaagaaagggttaactgtcggtcactcgaaacttgaaaaccgtgcatgcaaaaatgatatccatgctacttag

SEQ ID NO: 25662 - DNA, 433 bp, Zea mays
  unsure (1)..(433): unsure at all n locations
  Clone ID: MRT4577_123413C.1
gtacgcctgcaggatccggtccggaattcccgggtcgacccacgcgtccggggctgtgaagcgggcaatttcagtgtgagaaggagcggtgagaccgagcggcggctccgagcgcgccgcggcagctccttccgcccggggtcagcgccccggcgcgcgcacgcgcaccctcgctgcctgagcgcgccccgcgccgcccgcgcagtcggtccgtcggtcgtccgtcgtcctgtcgccaccgccgcctcaggcgccacccgagggagccgtcgccgtgggacgcgaccagaccggacccgagcgctctgcctgaggttggcctggggcccagctgccgatcgcgcggagcccagcatnttcgaatgactgaagaagcatgccgaacccgnagtcagaagcgcacccttgatnctgacctaacggcggatgatgt

SEQ ID NO: 25663 - DNA, 373 bp, Zea mays
  Clone ID: MRT4577_123414C.1
cccacgcgtccggtcgtcttgcatttttctccagtgttctgccttgcatattattcatatacatccctatgagctttgctgccctccaagaaagtttaagtgaaggtctatttcactccatctggacaaagcactgagccaacccagtccacgactccacgctgaagttccgtgacccaacgcccaactgaagtcatcatagtaacatgcatgattcacgcagtcataagcgaaggtggcgtgcgtaacagaccggtgaagaagacgagtcgctttagtttctgtggctcatttcatacactagaacatgatgcgcccatacgggcgggcgccctatcagacaacatagaaatggatgttttttttacagttt

SEQ ID NO: 25664 - DNA, 179 bp, Zea mays
  Clone ID: MRT4577_123415C.1
gtcacgcgtgcgccaacccggactacatggacagcaatttcatgctgatggagggaggtgacaaagcccgtcgctttgcaggcattacgacaaccattgcacacggcatgacggctcccaccgaccgaacaggaatacagggcatttactactgagatcaaccgaactggtgtggccca

SEQ ID NO: 25665 - DNA, 332 bp, Zea mays
  Clone ID: MRT4577_123416C.1
cacgcgtacgggtctagatcgcgagcgtcttactcttactttctctttcaactgcaacaattgctgcccttggaaccgatttgctttgacaaactcatcagccacctaccaacatcccatcatgggtggtgccctctttaacatagcttatgagttatagtccaataacgaagtttttcggatgatgatcgtggcgtaccagaaataagaaaggacatctctggaggtgctaaatcaaaggactatgtgcacgtgcatattcaccagctcaacggtaggaatagtctgacaactgttcagggcttgaagaaagagtacagctacaacaagat

SEQ ID NO: 25666 - DNA, 194 bp, Zea mays
  Clone ID: MRT4577_123417C.1
atgaaacaaccttacgcagaattaaaaccacagggggaccgatccatggtaccaacgaggggggccccacactcacacgtaagcccttccacacaagtaaccatacatagcggaccaacacagagaaacgctacaccaaatatgctttctttgccacggcaaattctccacggaaaaccccataagaacaaacg

SEQ ID NO: 25667 - DNA, 259 bp, Zea mays
  Clone ID: MRT4577_123418C.1
agaggacatagatgaaaatctcttgttttgaacgaagattttaaagaactcaactttccagcatcctcctctgttctaaccacttcagaaatatatgcagctgtgatacttctagatctatatttagcaaaatgttacatgtatgacaagacaatgagagtacttgcttgacaacaacctatgcaccaggtatttaacattaactttggaaacaaaaatgtacaattaagtaaagtcaacatatgcacaatactgtaca

SEQ ID NO: 25668 - DNA, 379 bp, Zea mays
  Clone ID: MRT4577_123419C.1
gcatgacctgcactttgcacccttagttttgcctgtccttcacatttcgtctagagttgggcaccccgaatgagcatgtatcattgtgataccacattctagtaattacttaatgtcacctctctgatgtttgcaaatccttggtgcatctttatgaagtactcacttcgttccaaaatactagttgttttatctcttggtttttaagtctatattcaaatatatgaagatgaacctagacacaaaaaagacatccttcaaatattgtatgaactcattaattaactaaaacgaattttaatttgggacggaaggaggatgtggttgcctgtatgtcttgattaacttttgttgtccttgcaggctgcaaatacatatg

SEQ ID NO: 25669 - DNA, 856 bp, Zea mays
  Clone ID: MRT4577_12341C.1
gggccgacagcatcgatcctcccaactcctaagcttaagctcggcttcgcccaacacatcaccggccaaaatgtggcagtccaagccagtcctgctcctgctcctgctcgccgtcaccacggcggcgaccagcggtaagccgctgctcacgaagatcaccaagggtgccgcgtccacggcgctctacaccgcgcccctcagcgccggccgcccgctggtcctcgacctgtccgccccggccatcacgacgccgtgcagcgggcagacgacgaccgtcacgctctccgccaactccaccgacggcagcaacccgctgtccccggtctccttcgctgccaccgccacctgcgcggcggccccctccggcgccgtcggcgtcgcggggctcgcgcgctctagcgcatcgttcccggcacaggtcgccagtacacagaaggtggccaactcgttcgcgctctgcctcccgagcgacggcaggaccgggttcagcggcaacggcgtgggcgcggccatcttcggtggcggcccgttcttcctcgcgcccccggcggaccggccgtccattacgacgctcctctccgacggcgtcccgctccgccagcccttcgccgggaaccccggctacttcgtgaccgccaccaacggcatcgccatcgacgggacgccgcgtgaccgtgtccggctccggtgcgcttgtggtcggcctctccaccacgatcccctacgcgcagctccggagcgacgtgtaccgccccttcatcacggccttcgaccgcgccatgggatccagcgccaaggtggcggcggtgaagccattcgagctgtgctacgactcgtccaagctggcgccgacgcg

SEQ ID NO: 25670 - DNA, 313 bp, Zea mays
  Clone ID: MRT4577_123420C.1
aaaaaaaaaaaaaaaaaaaaaaaaaaaaaaaaaaataaaaaaaaataaaaaaaaaaaaaaaaggaaggataaataaaaaggaaagaaaaaaaaaaaaaaaaaaaaaaaaaaaaaaaaaaaaaaaaaatctaaaatttaaaaaaaaatacgggcaactttttaaaatttccaagttttacaccatcatctttttaaatgtacaactttttttaaacggcattcttataaaaaccttttgttctggatttaaaaacggtttcaaaaaaaaacccttttaaaaaccatctttaatgccaatgagccattttccctt

SEQ ID NO: 25671 - DNA, 277 bp, Zea mays
  Clone ID: MRT4577_123421C.1
tgtagaattctagaagtttacttctaatcatgtccctctcaattttatttcccgcagtccaggagtgttatgttttgccactattattttcagaatgtgaagattttactcttggcttaatttttccctccactcagtgctaaggctgagcctccagatgctgttacctcagatttaatcactggttgaaactccgtataatctgtagagcctccatggctctaaaatttggaattaacttctcttgccttaagagctgcttgtacatatgtggata

SEQ ID NO: 25672 - DNA, 487 bp, Zea mays
  Clone ID: MRT4577_123422C.1
gaagatcgcatgatgatgacaggaatgcatactgtttctgatatcttctgtgttggctgtggatccatcgttggatggaaatatgaggctgcacatgagaagagccagagatacaaggaaggaaagtttattctggagaggtacaaggtgtcgggccctgacggaagccaatactggattccacaagatcctcacttgggtggaagcgacgccgatgatatatgaagcgcaagtcaacaagttcaagcctgctgccattgaaaaaatctgggtgtttttgctctttaggcagccgggattgctcccattgaaataatccccggcataaattattgttgttctagatgacatgatcatatccctcctattgcttctggaagttgttggatgtttctggtgtatatgtgtgtaagtgtaaccggtgttgcttataagttcatcgagttgtatgccaagcgctaatgaccaaataattaaagtttgttaa

SEQ ID NO: 25673 - DNA, 540 bp, Zea mays
  Clone ID: MRT4577_123423C.1
tcccgcaaacagacagggactcatcttcagtgtaaaacagattgaggacggacgaacacttgctgactaccacctccagaaggagaggaccctccaccttgtggtccgcctcaggggaggcatgcagatcttcgtgaagaccctgaccggaaagactatcaccctcaaggtggagacctccgacaccattgacaaagtcaaggccaagatccaggacaaggagggcatccctccagaccagaagcggatcatctttgctgggaagcagcttgaggacgtgcgcacccttgccgactacaacatccagaaggaaagcaccctccacttggagctgcacctcagaggaggcatgaagatcttcgagaagaccctgaccgaggaagactatcaccctcgaggaagagtcttcagaaacccatcgacaacggcaaggacaaaaaccaggaccaaggagggcattccccccagaccagcaggggatcatctttgctgggaaagcaacttgaggacgggcgacacggttgccgactacaacatcca

SEQ ID NO: 25674 - DNA, 981 bp, Zea mays
  Clone ID: MRT4577_123424C.1
accgccatcccctcatggcctcatccgttttcccactcgcttgctgggaatagaaaccgtcaccccagtccccataccacacccggcctgcacaccaccaccgcggcacacacaaaccaaccacaggcaataaacactagacagctcccactcccagtaaatttctcgtctcccaatctccgattcgaggaagccggaggaggggatttcgagccgcggcatcgggacattagagtggccctcacccggcgctggaattgccgagagggactgggttggagtggagttcgggaggtgtgagagaaggcggcgatggggcggctgttcctgatgcacctggacggcaacgtctacagctgcaagcactgcaggacccagctcggcgttgccagcgacatcatctccaaggccttccactgcaggcacgggaaggcgtacctcttccataaggttgccaatgtgacttctggagtaaaagaagatcgcatgatgatgacaggaatgcatactgtttctgatatcttctgtgttggctgtggatccatcgttggatggaaatatgaggctgctcatgagaagagccagagatacaaggaaggaaagtttattctggagaggtacaaggtgtcgggccctgacggaagccaatactggattccacaagatcctcacttgggtggaagcgacgccgatgatatatgaagcgcaagtcaacaagttcaagcctgctgttcgtcgcctcccctgtagataacctgggtgtttttgctctttagtcagccgggattgctcccattgaaataatccccggcataaattattgttgttcttgatgacatgatcatatccttcctattgcccttggaagttgttggatgtttctattgtatatgcgtaaccggtgttgcttataagttcatcgagttgtatgccaagcgctaatgaccaaataattaaagtttgttaattgtctgatcgacc

SEQ ID NO: 25675 - DNA, 466 bp, Zea mays
  Clone ID: MRT4577_123425C.1
gggggggcaaagggaagttcgttcaaaaaaacattaaccggccagaaaaaatgctagcgatcctttttattacaaaaaaaccccttttttttaacccgcgtcgttcgggaaaaacaaacgggctaaaccacctagtttcttaaaaaaaaaaacaccaacagggaaaaacctagccacccccatttttttttttacaggccttttgggggacaaaacataaaaaaccttttttaggggcccttaaactgcccggggcgggtggtaaaggggacctaacccaaaaccccgtttttccggaccctaaaagaaccaaccgggtttttggccaccacctgcagggcctgggaggaggggccaaccgggataaccatccggcccccaggttttaactgataaaacaaagggtgagggatctcgggggccccttcacccacatggaaagcgtcctagggggccccctttggaa

SEQ ID NO: 25676 - DNA, 800 bp, Zea mays
  Clone ID: MRT4577_123426C.1
gtcctcgtctcctccatccgcagccggtcctcactcctctgtcctctgctcccgctcctccagtcctcctcaaaggctctctcaaaaaagatcttttttccaccgctgggagtagttggccttggaaccgagcgagcgaagcgagggagcaagatttgactgctgccgagaacaagtgagaggagctagctcccagcaaagctccgtgcccccgcgtgcgtcatggactccttcagcctcctcaagtacctgcgcggcggcgtggccgccggcgcccagcgcgcgcccgccgccgcctccacgaccatcgccgcgtcggcgtgcgagaacggcgacggcgacggcgacgacgacgccgcctccttcttcgacctggagttcgcggtgcccggcgacgagagcgccgcgtccgacgccgaggaggagcgggtggagttcaacttcgccgtggcgcccggtgccgccgacacggtggccgtggccgtggacgcgccggccgcggaggcggaagccgagtccgaggccgacgccgaagccccgccgccggcgccgctgctccgcccggccaccaggttccgcgtcctgctgctcaagctgaggaagcccaaggccccgccggcggatggggccggggccgggtccgcgcaggcgccgccgaggcagccggccgtggcgagccggttcctggtgaagttccgcgtggaggacgcgccgcttgcgtcgctcttcacgcgcgacaacagctcgcgcacttcggacgccggcgtggaccggcgggctccccgcgcggcggcggcggt

SEQ ID NO: 25677 - DNA, 614 bp, Zea mays
  Clone ID: MRT4577_123427C.1
tttgtgtttttttttttttttttttttttttttttttttttttttttttttttttttttttttttttttttttttttttttttttttttttttttttttttttttttgtttttgttttttttttttttttttttcccgggggggggtttggggggggggtctcgggtggcttcacaatttcttgtgttccgggggggggggggtttcccccaggttgttcgggggccacggggttttgggcggggcgttggtgggcgaccccgtcccctgggggtctgggtgtgggaccttttcccctggggtgttggctggcccgggttgacatcgggggggggggggggccccgccgcctcttggggtccttgggggacctttcccccgggggggtggtgggcggggttgggccctttttttgggggggttcgggccccccgcccttgggtcgcttgtggttagcctgccgggggggcttttggggggcctgacttttctccttctggctggtttttagcgcccggctcgttttggggcctgggggtggcgttcgggggaacctttttgggcccccgtggtggcgctattggatgtggcccgggctaccccggggggggggg

SEQ ID NO: 25678 - DNA, 131 bp, Zea mays
  unsure (1)..(131): unsure at all n locations
  Clone ID: MRT4577_123428C.1
gcgggaagatgtacttgctagaatgcttcaacttagaaaaagaaagctgcatgaggaagcagcagctttggagcttcgaagtgaggagacggtnntgaatgggtaccactttccannagtgatgnaaaaca

SEQ ID NO: 25679 - DNA, 419 bp, Zea mays
  Clone ID: MRT4577_123429C.1
ggccgcttttttttttttttttttaaaagtagttttgtttctcgtagccatgagacccatcaaatcaaattaatgaagcacccatcaacagttagcaagaccgatgaactggagactctgcgataagcatcgactctcttccttctccgtgcttttctcctccttctccttctccttctcctgctgctgtttcacgttctccattatcaaggcatgcatgggcatggctactcccattttggcatcgatggttcccacctctgctgcgacgaggaggagaaacaagaataggacagctccctgagacactgccgccatccttctctcgttttatcaagaacaggaacggctgaacctgctggcggccccaaccttgatgggtgggtgacaacgcaggtcgcaaggtgtggggggatcct

SEQ ID NO: 25680 - DNA, 136 bp, Zea mays
  unsure (1)..(136): unsure at all n locations
  Clone ID: MRT4577_12342C.1
ggctgagcggtcgaggagccgcgtcactctatggaacgttttgggtctgacaggacaacctaactacgataactgtttcttcaccttgcangatgaacctgttgatcgcagcaacactggggagatttggaggaag

SEQ ID NO: 25681 - DNA, 689 bp, Zea mays
  Clone ID: MRT4577_123430C.1
ccggccgggatccgcgaggatccccccacaccttgcgacctgcgttgtcacccacccatcaaggttggggccgccagcaggttcagccgttcctgttcttgataaaacgagagaaggatggcggcagtgtctcaaggagctgtcctattcttgtttctcctcctcgtcgcagcaggcagattgattggtcacccacctgttcttggtgactaataaatctgtacgttgcgaatctgcaaaatggaatgtgatcagtatggtgcatgcagaggtgggaaccatcgatgccaaaatgggagtagccatgcccatgcatgccttgataatggagaacgtgaaacagcaggagaaggagaaggagaaggagaaggaggagaaaagcacggagaaggaagagagtcgatgcttatcgcagagtctccagttcgagggcttctgcttcaacagcgacagatgcgccgaggtgtgcatgaaggagagctttcccggtggcgagtgcaagcgggacgtggccatgcgcaagtgcttctgcaagaagccttgctagttcatcggtcttgctaattgttgatgggtgcttcattaaatttgattgatgggtctcatgcctacgagaaaacaaactactttttgataaatgcagggcattgaaagcgtttctgcaaaaaaaaaaaaaaaaaattgcggcc

SEQ ID NO: 25682 - DNA, 684 bp, Zea mays
  unsure (1)..(684): unsure at all n locations
  Clone ID: MRT4577_123431C.1
atctggaacgcgcggccgacaccttgcgacctgcgttgtcacccacccatcaaggttggggccgccagcaggttcagccgttcctgttcttgataaaacgagagaaggatggcggcagtgtttcagggagctgtcctattcttgtttctcctcctcgtcgcagcagtacagcagaggtgggaaccatcgatgccaaaatgggagtagccatgcccatgcatgccttgataatggagaaagcgaaacagcaggagacggagaagaaggaggagaaaagcacggagaaggaagagagtcaatgcttatcgccgagtctccagttcgagggcttctgcttcaacagcgacagatgcgccgaggtgtgcatgaaggaaagctttcccggtggcgagtgcaagcgggacgtggccatgcgcaagtgcttctgcaagaagccttgctagttcatcggtcttgctaattgttgatgggtgcttcattaatttgatttgatgggtctcatggctacgagaaacaaaactacttttgataaaatgcagggcatgaaaagcgtttctgcagtccttaaattgctgggnnnnnnnnngacgaaactgcatggaggggtttgcagccccttgcagaaatttattgaaagaaannnnnnnnnnnnnnnnnnnnnnnnnnnngcggccgcgaattcgg

SEQ ID NO: 25683 - DNA, 445 bp, Zea mays
  unsure (1)..(445): unsure at all n locations
  Clone ID: MRT4577_123432C.1
ctcactttctcctcgtcggtcggaataagacgcctttctagagacgcaagtagattncttcttttttccttgtatgctagctgagtgccgtacctacagtccaacaagttgatggttgaacttttctcgccttttttctttttttcctctattttaacttcggaggttagtttcttttttttagttatcttatctttctccccatatatttttttttttttcttttgcaccgttgacttttatctgcattattatttttccttgctattatctttctttgatttttttccttcttgttttctatttctcgtcttttcttttgtaatctcttaatttttatttttttttatttttttttttatttttttatttattctttattctttatttattttattttttagtttttttttttgtttttttttcatttatttttttttatatt

SEQ ID NO: 25684 - DNA, 2312 bp, Zea mays
  Clone ID: MRT4577_123433C.1
ggccgcttttttttttttttttttggggtcgaaaattttgttttgtgctagtgtagcctccccataatcttacagtatattctaagaatatgaagtaaatatggtaaacatataccaaacaccctctatcggtggtatcgacaactagagatgatgttagtttgttacatctcaataattttcgggtgagtttgtcaccactggagtgagtccacgtgaagcacacaagaagctcattggttagcctcttgagagcctggtcatagcattacaacatatctaggttgatctcctcgagctagggtggcctagtcttgcttggtagccaacatttaatcccgtcgctgtagctaggaatctccttccttgcttgggtcatgttgacgagaatgagccgatgtagataagtcaatgaagatgagccgatgtcgctgagcggatgtaaattgactgatgcagtggtcgatgtcgatgtctcatcgggtgtgcctgacatgtctcatcatgggaaaactaattacattaacacgctaccttgaggttattgtcagcttttctaggtcggtatcaactaaataagtgaaagtaaacattcattgaaagcaaaagtaaacatgcacaaccacgagcgcaacaataggctaagaagacaccaggattaaacacactatcaaccaaatctagggccaaataaatagtaaatcattcataggaacatcctagatccaatctatattatgtatcatgccaattaccctaggaacatttgtagtcggtatattgatggtcatgcaagcaaacatagataaggacctcaaaaaaagttcatccagaataaacaatgtgactaaagaatgtaaggtaagatgccatatgcatatcaaactctcgagttgctacatacacatgttgcattctcatgttgtggattgtagcaattgtacaagagatacatgtttggtcatgcaagatcaatctaataacattaagctcagcatgaaataaattgatactacacaagataactagcagatcttgccaaccacaacgattagtccaagatctactaggtaaggtgacaacatcatattgtcttgatgaaatctacaagagattgagccatggcatcatgggacttatcttaggaaacccttggtcaaggggcgacgatgcgtgagatgagaagcacatgtttcttgggtgaatgtctgccttataattattattatcatgaaatgtacattttatagtctttcgacttgaagtgataagcgctccctaaccgattttatctaactgggacctatttatagatacaagctttgtaggccctagctctttgcatatgccaaatattcattatgctcatattatatatagaccctatttgggagagcttcacttcaagaatttcaagcctatttcagcttctatccaaacaggcccagctcagctagctctagctttaaaaaactaaaactagaggctagtttcataaaattttcgaagcttttcaaaggggtgtttcaaaaacactgtttttatacttctcatgaagttgcaccaaaattttccactacgccattgatttatatgacctaccaatttgtgtctctttcttcactcgctaatcattaagggtaattaagtaaacttacaaaaattaattgtattatagaagctggagtctatgtgcaagccaaacacacttgaaccacgccttactaatctattaagttgtttcatggtgaagctggaaaaccgaaactacattttttgaagtataaccctcccacatagggccttaattcaaattttgggagcttcaccataggaagatttatattctggatctgtcgcccttgctattattacttgtgcttccacctaatatgtgatgtttttttatttcatgcattctgctggctacttgcttcatgttcaatcgttcagatggtaatgggcaaatgcatgaaagtgctaattgcagcagatcaaccaagcactgatagatttcattttcttgtaccaaattatttccttgagttgagttcctgcattcttccaggaggtgagcgtcaatgacttgaaatatttgattcggaaagttgttctccacaaagttgatgatgtttaagccatcttcgaacatagggtctgttggccttttactcgtcaaaatctccaacaacacaatcccaaaactataaacatccccacatgttgatgcatggccacctactccgtattctggaggaatatatccaattgttccctttataccaattgaactacttgaacatgtccatttt

SEQ ID NO: 25685 - DNA, 726 bp, Zea mays
  Clone ID: MRT4577_123434C.1
cactcctatgggcgattgggttcctcgaggccggccgggatccgcgaggatccccccacaccttgcgacctgcgttgtcacccacccatcaaggttggggccgccagcaggttcagccgttcctgttcttgataaaacgagagaaggatggcggcagtgtctcagggagctgtcctattcttgtttctcctcctcgtcgcagcagaggtgggaaccatcgatgccaaaatgggagtagccatgcccatgcatgccttgataatggagaacgtgaaacagcaggagaaggagaaggagaaggagaaggaggagaaaagcacggagaaggaagagagtcgatgcttatcgcagagtctccagttcgagggcttctgcttcaacagcgacagatgcgccgaggtgtgcatgaaggagagctttcccggtggcgagtgcaagcgggacgtggccatgcgcaagtgcttctgcaagaagccttgctagttcatcggtcttgctaattgttgatgggtgcttcattaatttgatttgatgggtctcatggctacgagaaacaaaactacttttgataaaatgcagggcatgaaaagcgtttctgcagtcctcaaaaaaaaaaaaaaaaaatttgcggccaaaaaaaaaaaaaatgcccgcgccgtgcagaaatttattgaaagaaacagtcaagtaaaagaaaaaaaagtcgacgcggccgcgaattcggat

SEQ ID NO: 25686 - DNA, 625 bp, Zea mays
  Clone ID: MRT4577_123435C.1
gttctagatcgcgaggatccccccacaccttgagacctgcgttgtcacccacccatcaaggttggggccgccagcaggttcagccgttcctgttcttgataaaacgagagaaggatggcagtgtctcagggagctgtcctattcttgtttctcctcctcgtcgcagcagaggtgggaaccatcgatgccaaaatgggagtagccatgcccatgcatgccttgataatggagaaagcgaaacagcaggagacggagaagaaggaggagaaaagcacggagaaggaagagagtcaatgcttatcgccgagtctccagttcgagggcttctgcttcaacagcgacagatgcgccgaggtgtgcatgaaggagagctttcccggtggcgagtgcaagcgggacgtggccatgcgcaagtgcttctgcaagaagccttgctagttcatcggtcttgctaattgttgatgggtgcttcattaatttgatttgatgggtctcatggctacgagaaacaaaactacttttgataaaatgcagggcatgaaaagcgtttctgcagtccttgggtctcatggctacgagaaacaaaactacttttgggaaaaaaaaaaaaaaaaaacccgcggcc

SEQ ID NO: 25687 - DNA, 722 bp, Zea mays
  Clone ID: MRT4577_123436C.1
actccatagggcgattgggttcctcgaggccggccggggtatccgcgaggatccccccacaccttgcgacctgcgttgtcacccacccatcaaggttggggccgccagcaggttcagccgttcctgttcttgataaaacgagagaaggatggcggcagtgtctcagggagctgtcctattcttgtttctcctcctcgtcgcagcagaggtgggaaccatcgatgccaaaatgggagtagccatgcccatgcatgccttgataatggagaacgtgaaacagcaggagaaggagaaggagaaggagaaggaggagaaaagcacggagaaggaagagagtcgatgcttatcgcagagtctccagttcgagggcttctgcttcaacagcgacagatgcgccgaggtgtgcatgaaggagagctttcccggtggcgagtgcaagcgggacgtggccatgcgcaagtgcttctgcaagaagccttgctagttcatcggtcttgctaattgttgatgggtgcttcattaatttgatttgatgggtctcatggctacgagaaacaaaactacttttgataaaatgcaaaaaaaaaaaaaaaaaaataaaaacccgcggccgctggttttttttgacgaactgcatgggaggggtttgcagccccctgcagaaatttattgaaagaaacagtcaaataatttactaaaaaaaaaaaaaaaaaggggcggcc

SEQ ID NO: 25688 - DNA, 853 bp, Zea mays
  Clone ID: MRT4577_123437C.1
agcctcgccatgttcgtcgccttcttcgtacctgcatgtggtgctacagtggtggtatcttgctcctcttgcaattgatgaatcgagactcctatgggcgattgggttcctcgaggccggccggccggggtatccgcgaggatccccccacaccttgcgacctgcgttgtcacccacccatcaaggttggggccgccagcaggttcagccgttcctgttcttgataaaacgagagaaggatggcggcagtgtctcagggagctgtcctattcttgtttctcctcctcgtcgcagcaggtgattagctggtgccctatggtgtcaggttttaattgctcattatccatctataattgtacgtactcgtaccaggcagattgattggtcacccacctgttcttggtgactaataaatctgtacgttgcgaatctgcaaaatggaatgtgatcagtatggtgcatgcagaggtgggaaccatcgatgccaaaatgggagtagccatgcccatgcatgccttgataatggagaacgtgaaacagcagcaggagaaggagaaggagaaggaggagaaaagcacggagaaggaagagagtcgatgcttatcgcagagtctccagttcgagggcttctgcttcaacagcgacaaaatgcgccgaggtgtgcatgaaggagagctttcccggtggcgagtgcaagcgggacgtggccatgcgcaagtgcttctgcaagaagccttgctagttcatcggtcttgctaactgttgatgggtgcttcattaatttgatttgatgggtctcatgactacgagaaacaaaactacttttgacaaaaaaaaaaaaaaaaaagcggcc

SEQ ID NO: 25689 - DNA, 599 bp, Zea mays
  Clone ID: MRT4577_123438C.1
gcccggaggggcaaaaggctcatcttgattctacttgattgatgaaatgggtaacaacaaaataagaacaaatagcccacagttgccaatttccatgactcacgagttcagcaatctctatgactcacaagcgaaccagtccaaatgcaaagacactagtagttcattacaagactaggacacattattatcccgccgtattctttagcagaatgcaaaaaaaaaaggcagcacatgcgttgcacggaaacatgatggatctcacactactcaataacctaatcgagcaagtcagatatcgatttcttcttgacaaacggatcagtagcggcaatcaaagttgacacagcactgttggggaaaatgttgtcagccttcatcctctctctgaatccataagcaggggccttagcacgtacataagcatggagcagcgactggtacatcctgatcctcccagtgtagccggactgccgcaacttgttgaacactttctctgagttgcggacgtctcctttctttgagtagctgtcaagcagcgtcatgtatgtgttgtaattaggcttgatgtggttctgtatagatagcttgtgcactag

SEQ ID NO: 25690 - DNA, 144 bp, Zea mays
  Clone ID: MRT4577_123439C.1
gggactatctgctaacagacgtaacgagggggacggggacgtgggaccaccagatagaccggctcttgcgcatccagaagatgctgtataagatgctgaacgaccgccgatacggtgtccccgtcaaaccgacctagccccaaa

SEQ ID NO: 25691 - DNA, 445 bp, Zea mays
  Clone ID: MRT4577_12343C.1
cctaaaaaatatttagtattttgggcgggaaaacaaaccttttattgatgaaccgcccggagggttatgggacacaccggtaacttttctaattggtacaggactggcaatgaaatacacaggaaaaccttttttttaaggaaaggaaaacccctagcttttgtttttttttaggcatgaataccggctgggatatattacccccgcccttttttaatttgtttccgcagggaaaaaaattgcagcagcatttcattacggggcaagccccctaaggggggcttttattgcaaaccatcatttggttaggcatgggcggggggtaacccccccaataacaccacaggcacctggagcacttgcaccaccggggcattggcggggggtaacccccccaataacaccacagccacctgggagcacttgcacccccgcggcattggcc

SEQ ID NO: 25692 - DNA, 619 bp, Zea mays
  unsure (1)..(619): unsure at all n locations
  Clone ID: MRT4577_123440C.1
gatcgcacttagatccactagttattgcgcgcgtacaatctctaaaatttcaccgaatcgcaatctacaataccaacttgtatctggtacaccacatggagaagaaatacacgacaataagggcgcagtagagcgagagcgacgagaacgcaagaagaaagctccgacgcctcatggccaagaagagctgcacgtccctgatggtcggattcgggggtaactgaacaaggaccgtcacacgcggcgtcgangacactggcgcccccgcctaactatgccagcgtcctgcagaactgcgtcaccgaggctatgcgagttgtgaacatatgcgtgcaaatactacaggaaaacaaggatgatctcgcgacactcgcttatggcgatttctaacaactaggagcacgtgaagctgctgagatgagcgacgatcctgcaatgcgcttccatccccaaaatccagtaccgtgctcctgcgccacaagagggccgacaatgtgatcgacgccaggagtcaggacacctagatgccacaacaatggcgagcagtgccccaagaatgattagaaagtaggtacttcatctgcactgcgcgctgtagcatggtcgcgcctagatctgt

SEQ ID NO: 25693 - DNA, 2671 bp, Zea mays
  Clone ID: MRT4577_123441C.1
attgggtacctcgaggccggccgggcatccgcggcctgctgaagctgcccgccaacaagcgctgcatcaactgcaacaatttgggaccacaatatgtctgcacaaatttctggacctttgtttgtaccaattgcagtggatcacatcgggagtttacacatcgagtaacatccgtttccatggccaaatttaccgcacaagaagttgctgcccttcaagaaggggggaatgagcgtgctagagaagtatttttcaaggaatgggatcctcaacgaaatggataccctgacagcagtaacgctgacaaattgagaaatttcattaagcatgtgtatgtggaacggagatacacaggagaaaggagtactgataggccaccaagggcaaaggatgacaaggatgagtatagtgaaaatagaagatctgatggaaattggggtggttcgagaagtccgccaaatggaagttactctgatcgtcagatttatagcggacggagtgatgacagaaattccagatattcctatggggaccgtagtcctggctatgaccaaaatgactataagagaagtcctcgctactttgaggttggtgataatagatctggaaaaagaactccaattcaaggttttgaagacaggaggttttcagagcccagaaagcgagatagtgggtctccagacttccagaaagaagctgatggttctaagtcctgttgtacggccagtgagggatatattgggtgacaacgctcctcaacttcgggttcggtgaaccttcaaagccagctactgagcctgcaaagccaactgtagtcagaccaattgatcctccaaagccaagtgtagtcagaccaattgatcctccgaagccaaatggaaccagggcaattgatcctccaccactgacaaagacaatatctagtgccagcagcattggttctgcagaagggacatcggaacagacaaaggtggcaagtgctgtaagtttaattgattttagtgcagatcctgaacctgcgtccacagcaccaccacaacccacccctatgccacaacaacctccatttaacgcagcagcaccacagcctattcttgaacaagggaaaagtgttccttctgtcagtggtggtgactgggcatcttttgattcttttggccaacaacaaacaccacaaacaagcagcagtgtaaatcctcttgagtctgcacttgcacagctgtcattctctgaagcaccctctgcaccaaatgtgtcagcttatcctgtttctcttgatcccactttgaaagcaaatgatggaggacattcatctgtgctagaccagtcacattccttgtttgatgcgccctttggaatctcaggcaaccaggcctcaacagtaatgtccggccaaggaacatcggttcaacaatcttctctagctgccccaacggctggacttccatctcaagctactgcaaatcaacaaggaaccagtggtattcaaggagcagcttcttctactgacagtaaattcagtggcaggaaagaacttccagcggatatctttactgcactatatccaccatcaactccaatgatgcctggttggcagagagccccccattttggaatgggatacgccatgcaatatccacctggagtgggattgcaatcgtatcttcacggagcatttcctcagcctacatatcagcaacctgtatattcacaacatgcatattcccacccccaacctgtgaaagcttcaaacccttttgatcttgggaatgagtcagctcatattcaagctcacatgcccccatctgggccacctggagcatcagcaggttcagctccccaaaccttaattggtaactctagttttggtgttcctccacagcagcctcaccagctctatcagtcagaagcgcatctaagccattttatgatgcagcaagttccgaacagcatgcccatgcctgaacaacaacctaatagcatgcttgcaacgcaacaaggtttgggatacctccagccaaacacccccccaccttcatacggctccgttgggggtagtaatccattcgggtaaaagaagtgtgggaacacctgctctttcatctctagactaagggtctgcagcactcagcgggacagacatgcatcgaagccctcgagagaatgtgttccatacaaccaggtggtgtattctgtcggctgtgatatgttgtacaacttgtttccaagggcgtcatcatcgaatgtaactctgttttagagggcctaagctgctttcagcctcattccctgtatattgtgtctgcttgaattgcatagtatgtatattttgtgttcctttgttgtcttggacagtatcagctccagttttagtacgagtcagcttctagtgcagttgactattcattttaacgtggatggtaagtactttataatagaccagatgtatgatcgtgatcaaccaattttgtggtttcttttactaaaaaaaaaaaaaaaaaaaaaaggcccctagggcggctttctaaggtcttaaaaaaaaaaaaaaaaagggtccttgctatcttagtaccccttaattttgtggtgatcttttgtaagggttattttcttgtggagctcattacttgttatctacattttgtaatgcaattcaaggtatgttcccctt

SEQ ID NO: 25694 - DNA, 324 bp, Zea mays
  Clone ID: MRT4577_123442C.1
caggttaatctacgttttcttctacaaccttatatacggctagcgacactcaatgccgccccaggcttaacacatcccaatccctggagctcgccttcatacttcccgagaagcttaagaagcggatgatgcgtccgtcttcgttttcatctaggctcgacttcaacatcttgcccttgccgccctttggctttttatttcttgcacgctcgctgtgtgcatacagggtgcaattcaagtgtgtttcataagaatcttacattgtcccttgccttgctatatactatgtaatgcttttaattttcctgcattcttcctcctttt

SEQ ID NO: 25695 - DNA, 205 bp, Zea mays
  unsure (1)..(205): unsure at all n locations
  Clone ID: MRT4577_123443C.1
tgccaatggccttcagacctgacaaatgatgatgaggctcttgctctttactttgacaagttgaatgacaagaatcatgatgttattgaagaattgaaaaatancancaaacatgtggggacgtggggggactntgtaccaaggcaagagttgtgtccggagaaacaaatgctttattccccatatctgcctaaggtgattgggt

SEQ ID NO: 25696 - DNA, 249 bp, Zea mays
  Clone ID: MRT4577_123444C.1
gcgcactgcatgaggacgaggccagcgaagaagggtcacggatgtgcgctgcagttgcgggcgcggcggtgaccgccgcagttggagggtcggagcccgatggggcagcggcacgcctctgcaacagcctgcggggtctcggctcaagggcggtcggtgcacgtgcggggtcaggtgaagcaccagcccacgccagcgaccgccaggacggcccgcccggacgcccctggacagcccggtctcggagtc

SEQ ID NO: 25697 - DNA, 467 bp, Zea mays
  Clone ID: MRT4577_123445C.1
aaattacagaccccctttattcaaaaggttccttaaggaccaccacaagggaacgaccccaccaagggcacaactctaaaacggggttaagaaacaaaaaaacggggccaggggtacaaaaaaagcacaacccccggagctccatggatataaaaagccgggagagcttatgcaaaagaagccgcacatgcatgcctaaggatatggtgggggtaaaaagggggggaaaaaaaactggaccggacggggacaaatatgagggatataggttaggggccaaccatcatatttataccggggaggagcagtccatatgcaaatgaagaacgatcaaaaaggaccccccccaataaaattattacgggcaccggaagctggaggggacgtgcttgccccactcgttgacaaacacggaaaaggcgacggggagcacaaagctgaccctgaacgccttggccttgaagggg

SEQ ID NO: 25698 - DNA, 231 bp, Zea mays
  Clone ID: MRT4577_123446C.1
accagaaccatacagattaaattaacaccaaggcgggactgagatcgatacggcaactaattagatcggccaatgggagacaaaagctatatacgtaatcaaaatacaggtaggtaggtagactacagcgaggtacatgatgatctggccgaatcgaggaacgagcgaggagaggccaggatgtgacatctgatgaacccgatagcttataatcacgcgtcaataacacgc

SEQ ID NO: 25699 - DNA, 426 bp, Zea mays
  unsure (1)..(426): unsure at all n locations
  Clone ID: MRT4577_123447C.1
attgcnggccctttgtaaattgggctaactgctgggcatttaaacccatgttgtgactactcccgatatttgatgtacaaaaccctgtattcagtccttaccgaccgagtttttattatgcaaactaagtgcctcctccccactcgctggctttatctttattgggataaaaaaaggccacaacagcaatgatgatgtacaccccacaaagcaaaacaccttcaaaaaaattgcttcttccatcaaggacaaaaaagttgacaataaaccccgaaacaaacaagcaaacagtctcaaatagtgtaaaaaaaaaaaacatgtctttgtccataatccatcccaggataaccatgaccggtgtaaggagtaaaccaatttgaatggaactgcctacaaaaacacccatcgggagaaccatatggtttt

SEQ ID NO: 25700 - DNA, 405 bp, Zea mays
  Clone ID: MRT4577_123448C.1
cgtccgtcctccttccgtggacccttgggcggttctttagaattgttggttcccaccaggaacatgctggaggacggggggttcaaaatttcaaccaatcgacacccaaaaaaaactgttggatttaatggagcccacgtctttggtaaccggccacgtcctaaaggagcctggttgggcgatattagctaggttcattggacccaatcctgtttttggtttggccgaaccagcttaaaaatgaccccccccctagaaatggtccactccgtcttattcggggatggagcgttttttcttcctatatggtaccaggtaaaggttgtttcccacccccaaagtaatatttaaatgacctgctttggttcaattttttttcttggtcctagtgccgtgaatttggtt

SEQ ID NO: 25701 - DNA, 502 bp, Zea mays
  Clone ID: MRT4577_123449C.1
acaacaaaaaaatctcgactgcaaatctgcaattacaagaatttgaaacgtgttgagtgaaccatgagaagaactaaaaaaaagaagtgcacactgtacacgttgtcctaccgtctacgcggcgcagaaactgtgccagcccaccttgtggacccgaaccggacggcgccgccgtcgccagcagcggcgcggatcggcaggatggtgcgcgcggacgcgctgcccgcggcgtccctccgcaccaggcgccgttcctccaccgtcctccgcagcaccacatcctcggcgcgctcgcggaggccccgagccgcgcgcgcgacgccctcgtccagccccgcccacttgcaatccgacgcggtgccgtcctccacccgccgcagcacgcacaccagctccacggcgtctgccagggagagcgtgtctaggcgctcccccatcttctggacccgcgcgacgatgctccgctccgccgcgacgcggtcctcgtcagcgaggcggacgg

SEQ ID NO: 25702 - DNA, 306 bp, Zea mays
  Clone ID: MRT4577_12344C.1
cccacgcgtccgcggttacgatttggcacagctaattactctggaaccaccatgcgtaattcgggaccgtgtttttatcttttattttagctgggttcgggatctggaaaacgatcagcttttggcctcttagtttctctcaaacaaagtacggggctttatgggagaagatgtgataatggtattgggcattgagctcttgatacatgagttgcgatgtgctgaagctgctggatgttgcatcaactggctggcaagggcgttatgaacttatggcactagggtgcggttgtggttagatgctgc

SEQ ID NO: 25703 - DNA, 227 bp, Zea mays
  Clone ID: MRT4577_123450C.1
accacacgtcaggtatccagtatcacggcgacgaacgatgcgctcatgctcatgaagaatagaccgctgcagaccgtgaacatcacagtgacgatggactgctatggttgccagcgtcacgtcaagagcggtgtcaactcgatgcacggggttccgagcgtgacggtgaacacgtcgcagagtacgtgcacggtgaacgggtaagtcaagtccgccagggtgctgga

SEQ ID NO: 25704 - DNA, 450 bp, Zea mays
  Clone ID: MRT4577_123451C.1
ggccctcacagcatgttcagagtaaaatgaatgggaagcagctctcagcagcagagtaagaagtttacacagcttattattgggcgaaaatgaaacggttaaaccggagctaaatggcgaccaaagtatatcattcttgggctggcctttgccccaaaactggtatgtcttcgtaccttttctgcaattccataacgtaaagaaaaatcgtcagccaataatctgagacaattttgataacagtgtgacatgtcgagtgaacaataaggggtctttacacttcagctatattatatgcagctggaaaacaaagagagagctaacattgaggccagcctttgctttggtttcaaatcaaaccacagacgaaaatgactacgtgcacttttagatatgcaccgcacagagaaacagaagccgtgcatcctgccagaatcagtggctgattac

SEQ ID NO: 25705 - DNA, 387 bp, Zea mays
  Clone ID: MRT4577_123452C.1
ctttttttttttttttttttcataacattttttttttgtttggatcttttgtttttatttatttattagttttttttttttatttttttttaaaaccaaaggggacgaccttttccatacccaaaagggcgggggggggaatagattaacagaaagaaaaggaacccacccacaaaagaaaaaactggttggaaccgggggaggaatgggggaccgtgccattgacaccgggccccaacacaatttccacccgccgcacacttttttttacccacgtaacttcaaaaccgcaccggacaagtgcccgcgaaagaactttttaattacacaccgggttgttttccacacacacccccggatgggggcccccgttacgggggcgtattg

SEQ ID NO: 25706 - DNA, 582 bp, Zea mays
  unsure (1)..(582): unsure at all n locations
  Clone ID: MRT4577_123453C.1
caatgggtgatttccatcatactatcacgcgaagaacgaggtgatactatgaggtaagactatagtgcacagtgcagacgaactcactgaggtgaccaggctattgctgcacaaaccttagaccgaacaggcttgtgccatattgcaacaggggccatcatagaagagctaagctcctctgaagatcgacaacccttcatatgaagggagcacagagatgaagatgaggggactgaccgccaaaaacttcaatgcacatacgtactctggtagatggccaagaggcaaactacgtgaaacggagatttgctggacagggacaagaagactggcacatgtactgaagcattgcaataacctgaaacatcaaacacattggagaggatatctgtagccaggagttttatccattatctaaaaaagaacatatctgcctgtgcgatgatcctgcacttatatatcataatcagtcatgatgaactagtacttgacatcttaataacanaatacgaagacaatggatgagctgtccaatcttgcatgcactttgcatgatatgcaatctgtaaaccgatgacatac

SEQ ID NO: 25707 - DNA, 184 bp, Zea mays
  Clone ID: MRT4577_123454C.1
cgtgatttttttgaaccactctgcttccgaaacccgataccccttttttctggctgggtttacaaattgggtgagggtgccatttccttgaagcacattagtattggagaacacttcctattgttcagcttaaacggctatcattatgcgtgaatccaccatgcgccgaaatgcaacaaggtca

SEQ ID NO: 25708 - DNA, 244 bp, Zea mays
  Clone ID: MRT4577_123455C.1
gggccaaggccacgtgctcgctgtcgccgtcgccgtcgaagcaggtgtggcagagccggctgcccgaccgggctcgcaggaacctccctggcctcgtgcttgcgatctgaccggatcggatgcgaatcatgcgacatataggttgttgcccagccaactggcggtgtggcttagcttattatgcctgtgcatgtctgcaatgtggttacaattggacatggatgaatcaaatgagccacacatt

SEQ ID NO: 25709 - DNA, 254 bp, Zea mays
  Clone ID: MRT4577_123456C.1
agcaaggcatgcgctggagcaagaagctaaatgctggctgggagtctattcggggggcaaagcgctctgttttcatggcgccctactacttaaagcagtctgacttgtaacgctgatacttacagtgaaactagatgcacacatctatacatggatgctgacacgtgaaataaagaaagattatgggaatcatgcacacctaatcgacaatacctatcgtctattactgacattgatacaagatgtatggtaac

SEQ ID NO: 25710 - DNA, 532 bp, Zea mays
  Clone ID: MRT4577_123457C.1
cctcctcgagtttttttttttcctttttttttttttttttttttttttttttttttttttttttttttttttttttggcaacccgcttgttatatatacataaaaaagggagggccctatggggggctttaccagcttaactgaaaattgtttatggataaaacaaaaaaactggggggagtttccttggggggctatacccgttcgggagcccccttggagggctaaccatggcgaggggagtatcctttttagcagtttaccgagcataaacaggccctggaatactgcactccgaaagcatgggtttttgaaatttggaatccctttgaaagcaaaaccttgcccataaaagggtttggattcataacaaggccatttgtttggaaaatccatagcccccccaaaccgaaatgaccggttttttgggggaagaacttcattcaagatttcctgctttccttttgcaatctccacatcatggggaggcaacaagccctccttgtaagcagggcgacaaaattgatatcat

SEQ ID NO: 25711 - DNA, 219 bp, Zea mays
  Clone ID: MRT4577_123458C.1
gcgacccgtcttctgacgcgcaggccctcccgtggccggacgcttggcgctgcgacaagtgagtaaatatgcaccatgcttgaccacggctagcagcatcaccatgatccttgacaccattgaacaattcacaatgaaactacttaggcttgtccttgggtttacagcgccgcaagcacagagagccctgagtaccactgccgcttgtgcggaaggtgc

SEQ ID NO: 25712 - DNA, 308 bp, Zea mays
  Clone ID: MRT4577_123459C.1
ctcctcccacctcattttctacatttataaaaacccacccgcatcctcgccctgctccttttaataagccggcgggcccaccatctcctgctaccacatctttccaacaaacaaccaacccgcacttttcatagcactcacacatcatccagtcagctttaccatcctagcctacaccaacaactttcatatctacaactaccacttcatctatggccccttactcactcagataaaccacttagtaccagcctatccttacatcacagcagccaacgcccattactacatcatcatcaacaactcat

SEQ ID NO: 25713 - DNA, 386 bp, Zea mays
  Clone ID: MRT4577_12345C.1
ttttgtttttatggtgaaaagatatatatatatatatatcgagaattaggcagggtttctgagtttagacgatcccaattttgtaggcaacatccaaagcatcggaatcaggagccagtcgaacatatgccttcttctctccatcaggccgaatcagggtgttgaccttggccacatcaatgtcatacagcttcttcacagcctgtttaatctggtgctcgttggctttaacatccacaatgaacacaagtgtgttgctgtcttctatcttctatacggcagactcagaggtcatcggaaacttgatgatagcatagtgctcaagcttgtatctgctgggagcgctcttgcgaggatatatatgctgacttcggagtcgcactgtc

SEQ ID NO: 25714 - DNA, 626 bp, Zea mays
  Clone ID: MRT4577_123460C.1
gccggccgggttgcgatagaagagagagaaaccgactgtgtatagcgagatcgtggcacgatagactgcgagatgacagaggaggcatatcgagaccaaaaagcgagaagacattaagaaaagagatgaacgcccacttcagggtgccccaggagctcagtgcaaggcctggatcagggtgggcacctctacgaccgcctcctcatgtcaggtgtcgagcgacctaagccaaagccggagcacctcgaggagatcacatccatatatgccagcctggggccaggctcgtccgagcaggctcttgccgcatacgtgttgacctacgcatcgtcaacttccacacgtacgccgtcgtcgtgggcgccctcgaggagccgcacccgaacctggcgttcgtgctgttctctgggacgcagcggcaggtacggcacaacgcccatggcatcttcgatgagctcgtcaaatgctacgagcctccagactcgctgtacacatcaggtccagacatgcgcggacatggttgctaacgacaggtgacatattcgacaacatcgtcatgcttgatatgaaaaccaaggtgggttacatgtagtcggccagaaaggcgattgaagaaatgctaaaac

SEQ ID NO: 25715 - DNA, 150 bp, Zea mays
  Clone ID: MRT4577_123461C.1
gtaagctcggaattcggctcgagcagaacatgaagacctgtggtccttacaacaaccttttgcttacctctgggggggctcctaaaccaatggccggggtcccacccctaaaaccgatgcagcctgaaagctcacttacgagaatgggcc

SEQ ID NO: 25716 - DNA, 205 bp, Zea mays
  Clone ID: MRT4577_123462C.1
atcttggcattcgtgttcctgcttttaaagtaggtaatggacgtacccatgctgggatcaatctggccatgcatgagttcaggacttgacctgttggtgcaactgcatttgttgaagctcttcgtatgggcagggaactttacgatgtcttgaagagcatcaataagtcaaaatatggtcatggtgcatccagctgtcggacatg

SEQ ID NO: 25717 - DNA, 536 bp, Zea mays
  Clone ID: MRT4577_123463C.1
ctagcacccgcttgggactctgctggggctcatcgtactccagcagcggcggcacggcgctcacacaaaatgggcagcggtcgtcgtcctgctttgtgggtgggaagacgctgctgagacaggcagtggctggccggccgacgctcggcgtgcgcgccggggcggaccccaacagacgagctggttgctggggatgacccctccgtcgcgggtctacggtaggcttctcggcgacttgggctaagatccctgcggcctatgatatgatacggaaagcctgcggacaaacattgcagaccgaactgttgcactgtccggggtcgatgactggcacggcgggcatgtacatgccggacatcctgaccaaggatcagctgattaaacacgcctttatggtacaacgtccggaagcagcactacttgacagacactaccaccctgttaatcatctaactaatcctaatcgggtgggccgaaggctcccggtgtgctgacatgatataagcccggaagcgtgaacagccacccatatcttg

SEQ ID NO: 25718 - DNA, 535 bp, Zea mays
  Clone ID: MRT4577_123464C.1
tcgagcggccgcccgggcaggtcaagcttttttttttttttttttttttttttttttttttttttttttggttttttttttttttttttttttttttttttttttttttttttttttttttaaaaaaattaaaaaaaacctttttccctaaaaaaaattcctttccatttaaaggggtaattaagggaattggtaaaactgccacccatggggaggggggaaaattcgttattaattggcgttaaaaaagggaactaattttagggagttagtaagggggtccattaaattattaataaaggaccttgggcggaaacaccctaaggggaaatttcaaaaaaatggggggcgttattaagggatcccagcttggaaccaaacttggggaaaaaaagggaaaaactgtttcctggggaaaaatgttatccccttaaaattccaaaaaaaaaaaaaaccggaagaaaaaagggtaaaacctggggggcctaatgagggagctaactcaaattaattgggttgggctaactggccgttt

SEQ ID NO: 25719 - DNA, 196 bp, Zea mays
  Clone ID: MRT4577_123465C.1
ccgggttcgacgccacgctgtccggcgtccgtcctcacgggtacaccatgcagactggctgatcatcaacactttccaaatgcgcggtgttgctaaaccgtgcgcgcgtacgtacttcgttgtgggaccgcgatactcgagcaaggcaagggacaaggccttcttgtgagcgataggaggtcctgccgtcgaacat

SEQ ID NO: 25720 - DNA, 520 bp, Zea mays
  unsure (1)..(520): unsure at all n locations
  Clone ID: MRT4577_123466C.1
cgttttgcaagtcattcaaatgcaaaggcaaaaaattaccgatgcaagaagtactcttcaggaggtatcttcaaggcgaacaagcatacagcaagaaatggattcatttaagcagaaattgagcttcattgacaaaaggggccctgaactagaggctgaaaagaaagttgcggctgctgcaagaaactttaaggaagcaggaaggatagctgcagaggcaaaagctcttaattccgaaaagaacgaactgcgtggcaagttggagaaagctgctgctgatctagagataatagaaaaggacattgcagcaactacagacaagatacaagaatgcgaagggcttattgtactgaaagaaaaggactcagcattgacaagttacaaaaggctgcggttagattgtgctgctgccagagcagaactgactgctgcaactgaaatacatgataatgaagaagttgagatactatgcaaagaagctgaaactgccgattctaaagcaatggagcntcaaacatgc

SEQ ID NO: 25721 - DNA, 688 bp, Zea mays
  unsure (1)..(688): unsure at all n locations
  Clone ID: MRT4577_123467C.1
gggggnagctgaagccgaaagtttcactggagattttgcttagactgcacgatttgggggaaggttctaataccacggaacaacaagaagctatagaagcatggcgtgttgggaagctcaaggacatgagaagtacatcttctaagaatttatcaaattttggcctcttcagtgaagattcaaggatgttaaagcgagccttggagtttaactggcaaatgctattggaggacattggtctttggatacctcccactatatggtaaaatcatatggattggatctgagatttaagttcgacttgtactcacttgcaggcaaggaaagtgcaagtgtgtatacttcttggtatctcaacgatgtggactactatggcgggttcgagcaagatgagctggatgagctgtttgaggcgatgcaatcaaactacaaggcctggtgcttaggttttgcacccctgtgtgttggaggagatatggaatcagtggcagttcaggagtttagcaggacactcttcaatatacgtccggacattgcaattaatgttgcccagacgatcttccagagcgatgtgcgcagcctcctcccgcacggttagtgtcccatgccacattgttcagagcaccaagtctntcgcggtgccagttgttggtgtctgagtacctgcacaggcacctttggtggcgac

SEQ ID NO: 25722 - DNA, 1436 bp, Zea mays
  Clone ID: MRT4577_123468C.1
ggacattggtcattggatacctccccactatatggtaaaatcatatggattggatctgagatttaagttcgacttgtactcacttgcaggcaaggaaagtgcaagtgtgtacacttcttgttgggtacctcgaggccggccggggcccttccgcggttggccggggcccttccggcgctgtgctgtgctgttctgttctgtgctctgctcccggtctcctctcccggtctttcctcctctccccttcccgcccagcgcgtccccccgaggaaccaaccccgcggcatggggatcgtggaggaggcgcacaacctgcgcgtggtgggcgaggggaagcgcggggtcatcgtgctggcgcacggcttcggcaccgaccagtccgtgtggaagcacctggtgccgcacctcgtcgccgactaccgcgtcgtgctcttcgacaccatgggcgccggccccaccaacccggactacttcgacttctcccgctacgccacgctcgagggctacgcgctcgacctcctcgccatcctccaggagctcggcgtccgctcctgcatctacgtcggccactccgtctccgcggtcatcggcgcgctcgcctccatctccaggcctgacctcttcaccaagctcgtgctcctctccgcgtccccaaggtacctcaatgatgtggactactatggcgggtttgagcaagatgagcttgatgagctgtttgaggcgatgcgatcaaactacaaggcctggtgctcaggttttgcgcccctgtgtgttggcggagacatggaatcagtggcagttcaggagtttagcaggacgctcttcaatatacgtccggacattgcgcttagtgttgcccagacgatcttccagagcgatgtgcgcagcctcctcccgcacgttagtgtcccatgccacattgttcagagcaccaaggatctcgcggtgccagttgtggtgtctgagtacctgcacaggcaccttggtggcgactccatcgtggaggtgatgccctctgaaggccatcttccccagcttagctctccagacatcgtaacccctgtcttactccggcacatccagcatgacatcgcagtctaggttggccagtcgttccaacaagacaatgtggaaattgtagcatatatatatgaccatgtaatctattgttcgtctaatgtaggataccgtgttggatgctctgacatcttaagtccttgagaagctcttcatgtcatttgtgttttttccatgaaacagaaactactaccatgtggtatatgttggtgtcgatgatcatttgcagctgtagggtttgcttatatatgtgtttctcttcaaaagggatagatcggaccaaattagcaaggaactccttccatgtgtatgaaaaaaaaaaccaatgtaattgcaagttattcaaactcagttgtacc

SEQ ID NO: 25723 - DNA, 1564 bp, Zea mays
  Clone ID: MRT4577_123469C.1
gcacgagggccgctgtcgccgaaacacgggcagcaggagcagtagcgtccgtccggtccgcgcgcgttcccctccccgaccggcaggttccccgtccacgcccggccattcatccgtttcccactgctcctccgtggctcagctctgctccctgtatcggtctgcccctctgccctcccggtctctcctcttcccgtcccgcccagcgcgtcccccaaggaagccccgacgccacggcatggggatcgtggaggaggcgcacaacctgcgcgtggtgggcgaggggaagcgcggggtcatcgtgctggcgcacggcttcggcaccgaccagtccgtctggaagcatctggtgccgcacctcgtcgccgactaccgcgtcgtgctcttcgacaccatgggcgccggccccaccaacccggactacttcgacttctcccgctacgccacgctcgagggctacgcgctcgacctcctcgccatcctccaggagctcggcgtccagtcctgcatctacgtcggccactccgtctccgcgatcatcggcgcgctcgcgtccatctccaggcctgacctcttcaccaagctcgtgctcctctccgcgtccccaaggtacctcaacgatgtggactactatggcgggttcgagcaagatgagctggatgagctgtttgaggcgatgcaatcaaactacaaggcctggtgcttaggttttgcacccctgtgtgttggaggagatatggaatcagtggcagttcaggagtttagcaggacactcttcaatatacgtccggacattgcacttaatgttgcccagacgatcttccagagcgatgtgcgcagcctcctcccgcacgttagtgtcccatgccacattgttcagagcaccaaggatctcgcggtgccagttgtggtgtctgagtacctgcacaggcaccttggtggcgactccatcgtggaggtgatgccctctgaaggccatcttccccagcttagctctcccgacattgtaacccctgtcttactccggcacattcagcatgacatcgcagtctaggttggccagtcattccaacaagacaatgagcactcgaagctgtctactgtctgtttgtatggtatcccgcttaattgttcaacgtaggattgcatctatttgatgctctaagaagatttcataaggtgttatgtagtgttggctgtggaaattgtagcatatatgtccatgtaatctattggccgtctaatgtaggctaccgtgttggatgctctgacatctgaagtccttcagaaactcttcatgtcatttgtgttcttttttttaccgcatgaaattaccatcttgtatatgttggtgtcgatgatcatcatttggggctgtaggatcgatgtgcttgtatagttctgggttctttgcgaaggagatagatcggaccaaattagcaaggaactccttccatgtgtatgaaaaaaaaccccaatgtaattgcaagttattcaaactcagttgtaccaaacgtccaaacctgattgaaacaggttgttatcggtcgctgtgattcgagaa

SEQ ID NO: 25724 - DNA, 226 bp, Zea mays
  Clone ID: MRT4577_12346C.1
tttataactttatttctttaaaccttcaggtacatggtgcacgcgcgccgcatgaccgtttatttcacaattcaatctaatatttattgtgcacacttctgggagcattatatgtgcccacaaaatgacaaaactttttacattttggcgaagggtgagccatcctacggtcaccattaagacaagttgtcaaaaaatgtgaccccaaggaattcttttaacaatt

SEQ ID NO: 25725 - DNA, 298 bp, Zea mays
  Clone ID: MRT4577_123470C.1
aatctatagatctttgttgatcacagaataatgatcatgaagtttctaacgtggcggagttgtgggatgaatcgtctgaacactcttcataccaacatggtgttcacattggaaactggatcaagtcttactttggatcataactatgaagcttacaatgacatcaacttcatcttcgctaatgttcattaacactatcaaaacttcgatccacgttgatgatgagagctctagcgacatgtacactgcacagtcacaagacagccgctccatagtgacgaaggctgtggatattgaa

SEQ ID NO: 25726 - DNA, 684 bp, Zea mays
  Clone ID: MRT4577_123471C.1
agcgagcacccctgtcgccgaagcccaggcagcagcagcgggcagcggcgtccgtccggtccgcgcgcgttcgttcccctccccgaccggcagattccccgtccacacccccgccttaaaacgcccgccactcatccgtttctcactgcccttccggcggctgtgctgtgctctgctgttctgttctgtgctctgctccccgtctttctcctctcccggtctctcctcctctccccttcccgcccagcgcgcccccccgaggaaccaaccccgcggtatggggatcgtggaggaggcgcacaacctgcgcgtggtgggcgaggggaagcgcggggtcatcgtgctggcgcacggcttcggcaccgaccagtccgtgtggaagcacctggtgccgcacctcgtcgccgactaccgcgtcgtgctcttcgacaccatgggcgccggccccaccaacccggactacttcgacttctcccgctacgccacgctcgagggctacgcgctcgacctcctcgccatcctccaggagctcggcgtccgctcctgcatctacgtcggccactccgtctccgcggtcatcggcgcgctcgcctccatctccaggcctgacctcttcaccaagctcgtgctcctctccgcgtccccaaggaacctcaatgatgtggactactatggcgggaattg

SEQ ID NO: 25727 - DNA, 459 bp, Zea mays
  Clone ID: MRT4577_123472C.1
tggacctttgggctgatttatgtgcttgtttatgtgcttgggcgaatggcaagtcaagtgaggagttcgggccggcgaatgtaagtttgcatgagaaggggcggaccactaaggctaagtctactgacctatgtgagtctagcctgtctacggacggcgataagcatctgaaacctcgtgaggaagaagatggctaccgaagaaactagagggctcctcgaatattaaagattcgcgctctaagtctcactagcgtccctcggctcggagattcgtcgcgataaacccaaaccggtaaggcctaccgtacggaacaaaccagccaggacccgtttcaccttattaaggtccgggaaacttgagtccgcgccgcgagcggtgcggctaagcccgaccactctcccccagccgcaactctgcgacccttcctccccccccaaaaaaaaacccactcccccg

SEQ ID NO: 25728 - DNA, 2073 bp, Zea mays
  Clone ID: MRT4577_123474C.1
cctcgaggccggccgggccggggctaccattggcacctcctgctgccgcgccaccatgctctatgctcacctccaccttcgccgcccctgctccccgttcgcctactgcccctacagcaagctatccgtttccatcccaaccctcaaccctctgccacgcgggccgctttctcgccgcgcctgcgcctgcgcccaccggtacctacgacacgtcgcgtcaccggcggatgaggaagaggctgggtacggggagggcagcgtggagggtgatgatctgggacccgcgtcagcggcggcagtggcagcgaccatccgccgggcctccagcgcgtcgcccgtgcggttcaggtgcgtgcttggagaggcagtggaggaaccgcgcggcgaggagggcttggccgacccaagccccgactttcgccggctctgtgcggagcagcttgagattttccgagtgctcatctcccgtgacgccgtactctctgtgtacgtgagacctgctggcagttatattatggatcagctggaactgcgccgagttgctttatatcctggaattaataatctttctgaaaaagatacccctgtcctagtttgtaatttttctatatcttctggactacgagcagcagaagcttttctagtaaaacaacagatggaagtcataagagaatttggggctatagttcttccaatggtgaaacacccctttgttgttgggttccttgtcgtagagcttccagaattacatggtggacgtgctatgaactcttatactgctgatactgagttaccacctaacacatttatggataaatcatctgatgtaactccacatactgcgtgggatattcaaacttatggtgatcaggcaaagggttattctcagcttgttaatgaatggaagaatagtgcccttatgatttctcgaactctggcaatggcttatgttatggatcagaaagcatatctgcttcaacaaacttcctggcaaaataatgttagaatgagtggcttagtggaacagatttggggccccctctctagcattcgtgctcttgcaaagatgttatcctttcacacaaagagaagtgagatcccctatgatattattgaagatatgctcacccaaggtgatcacatgaaagatgctctgcaacaaattcaagatgctgtatatctgactaaggcaaacatagttagaagcaatgaggagactttaaagacaattcagagatcaccacatccttcaagaactttatcagattataaatcagtacctgggaatgattcacagaagttggatccagttttagccctgagttctgatgggtatgacatggtgatgcctatgccacctctatggctggcacctcttcaacaccaatatgatagaccatgtgatctctgtgatgtgctgaaggatttagttgcaggagcattaccacttgcttataagcagcagcgcacattagatttaacagaaatttcacatccacttcatgttgctgttgaggaatctgctttaagaaaagccttgagtaatctgattgagggagcgctcctacgtacacagcatggtggagtagttcaaatatgtgcagtcgaagcacctgcaggaggcgctctcgtggtcatcgatgatgatgggcctgatatgcaatacatgactcagatgcgctccctggccccatttggatcagaccttgcagatggtatgctcgaagataacatgacgtggaacttcatcgcgggattaacggtcgcacgtgagctacttgaggaatatggatgcgtcctgcgtgtgatatcacctcgaaggactgatgcggttataggcaccggagggagtcgtgttgagatatggttgccatcttttcagacacaagcagccaagactagtcaagaagtgtagtttacatctgaggaagcgaggcatgcttcgttttcccgtacgttttgaaatctgtagatattggcttaccggaatgttactgtaccagtaacatctcatatgttgaatttgcaaaattacaggacgtgcgcaaatgattgtgatggtgatgttgcttt

SEQ ID NO: 25729 - DNA, 402 bp, Zea mays
  Clone ID: MRT4577_123475C.1
acgcctcacttctccggctcttcttttttaccggcaccagtcccacgcgggggcggggctgctgccaccacacggccccaacggggccaccgcagcgcagcaatggcgggcaacggcgccatcgtggagagcgacccgctgaactggggcgcggcggcggcggagctggccgggagccacctggacgaggtgaagcgcatggggtcgcagggccggcatcccgtgcccaacatccagggttccaccctccgcgttggccaggtggcctccgtcgcctccgccaaggacgcgtccggcgtcgtcgccgagcccgacgaggatgcccgctcccgccccacggctagccgcgagcgtatccttttctgcatcgcccaggggggggacatgtacggcgtcaccacc

SEQ ID NO: 25730 - DNA, 1001 bp, Zea mays
  Clone ID: MRT4577_123476C.1
ggctgggcgggaggcggtgcaggcgtccccagctaccacacacacacacgaagagccggcgatgaaaatgtccgcttccgttgctgccgcttcccccaccctccgcttctcctccgccactcatcctctccaccgaccgctccgccggcggctcccgtccgttcgatgctccctcgccgccgccgccgccggccccggtgtccgggcgccccctgagctcgtcgactccatcctctccaaggtgaagggaactgaccgaggagtgctgctgccaaaagatgggcaccaggaagtggctgaggtcgcgctgcagctggggaagtattgcatagacgaccccgtcaagtccccgcttatattcggagaatgggaggttgtgtactgctcggtgccaacctcgccgggcgggctctaccggacgccccttggccgcctggtattcaaaaccgacgagatggtccaggcggtggaagcgcctgacgtggtcaggaacaaggtgtcgttctccgtctttggcctagagggcgcagtgtcattgaaaggtaagctgaatgtgctggacagtaaatggattcaggtcgtgtttgaagcgccggaactgaaggtcggctccttggggtttcagtacggtggcgagagcgaagtcaagctggagatcacctatgtcgacgagaagatcaggctagggagagggtccagaggctcgcttttcgtcttccttagacgatgatagaatgtcatgcatgtgtgttgagacttcagacccacaagcaccgatgaggggtggcgctgacgcggtcgtttgtacaatactgtgttcaggatttctatacgtttatgtaaaaattctggcgtccagctgggtaattctggcgtttcagtacggtggcctgatgaatgttgttgcgtagtttgtagcatccattattagtgctgtaagatgatgttttgaattctgatacaccagtgcgagtgtgatgaaccaaattccggacgcgtgg

SEQ ID NO: 25731 - DNA, 161 bp, Zea mays
  Clone ID: MRT4577_123477C.1
aggggaaaatccattgataaacaaacctttataaccagaatgtatccggcgttaagctgattgcacgtgtgctaccctagtctggctttgtcttcagtttgggacaacagtattcatgtagtcgactaaaagacaaccgtgtgcggagcatggcttactag

SEQ ID NO: 25732 - DNA, 364 bp, Zea mays
  Clone ID: MRT4577_123478C.1
ctaaaaaaatgggctattgcagtagtacgattgtttttcctcaaaataaaaggaaacaaacgggaccttagagtgcgtctcaatgggggccatgcggcaagcacatgaatcaaatcttactcgccgattcaattgacgccatgcgggaagcacatgaatcaaatcgtaccgtgtctgccggtctgtcatacatcgagtagaataaagatcaactcctttgggatgtagggaaaccgagtgtacaactatttataaaccgatggctgatgctgcccatcaggacactacaaagcgccctcgggggatccatgcatcttgaggaggaccaaatgttctagtggaacagccctatctatgtactagt

SEQ ID NO: 25733 - DNA, 250 bp, Zea mays
  Clone ID: MRT4577_123479C.1
gagagacagacggagactttactattgaatccagtttttttaatacatgtttaaatgcatttgtccactttgtaaattttttcatttttgctcttttgcaacaatatctgagattcaaaaaggttcaacaagttaaaaggcaatgaatatacatgtccattgaagcctaatcctccgttaagactttttgtcccaatactccatttctatcttatttaataacaacccgcaacacaaaaggtcatttcct

SEQ ID NO: 25734 - DNA, 311 bp, Zea mays
  Clone ID: MRT4577_12347C.1
ctccctctatcgtggcgcgcggcgcgagcgaactctaccttttttttatttacttttctgccatagaaaagcgcggaaatgaaactctcttatcttctggttggccacatacatcatccaaaaaactttatctattgaattacacctaatacgcaatcaaaaagaggccaccaccaatgatgccatgtcggaaggaggccgatgggtctgctaaagcaagtcggacaaaggccaacattagtcgtacttgtaagaagattgcagagttagccacaaactgatgggataaaggcagaaactgctgatattcc

SEQ ID NO: 25735 - DNA, 599 bp, Zea mays
  Clone ID: MRT4577_123480C.1
cgctcgcccagctctgttgccgcgccctgccttcgtggccgctgcgcacttgcctctgctcggcaccgagcctgtttgccgcggacgcgggtcgccgcgctgcgcaggctgctctctctactcagtctcgatctctcgcgggaagctctctgttcgtcgtcattgctcggtcgcgcgacaagctgactgcgtgtcgtgtgtcgcacatcttagctcctcgccgacgtgtcattcgtcttcgcactatgtgcgacaatatcgtcgttcgccgtgtcctcagtaaatattttcgcctagccgcgcggacctcgccgttgtcttggtcatcgatgccgcgcaatcatccacacgtggttgtcctcacgggcactgcttcacaccatcacattgtctttaccatccgtagtgtcatcatcgggatatcctagccgcaacactagcacccttaaccgtgcccaaagctctatattggattcgtcagcgtgctacttgtccgctggctcctcgccgtcgactctcggtcccacaagctcatttttccttgtgcacatcttcccagaccctgtcttatctcgcgtatacgttatcgatctcgtcgt

SEQ ID NO: 25736 - DNA, 394 bp, Zea mays
  Clone ID: MRT4577_123481C.1
ttcatacacgcgatctgtctgcgtccgagactgccactgaatgtgacgatactgcccagccacctgagggcgtgcgcacacaggacccaaagaaggtcctacttgacgatgctgccgctccaactcagatggatgtcactaagaaatctaatgcatgcagatggatggccatgaaagagggtccaccaactccaggtgctaaaacaacatcgtctgttttcaaacagaaaccagctgctaaaccattggccaccggtgtcgaaggcctatagaaaccatctaggaaacctacctagtatatctgcaccgcagatgggattgaagtccaaaacaactacatcagcatagagcacggatcattaagagtgatcaagagagtgcctttccatgcccc

SEQ ID NO: 25737 - DNA, 582 bp, Zea mays
  Clone ID: MRT4577_123482C.1
gtagaaagctgaggaaagcaccgatcaaagagctcccagaaatcaattgctcacccttccgcttccaacaccagccaaatcgtcgatccattccaccagcagctccaatccccaccgatacgaccgacaatgtcgctgatccgccgcagcaacgtgtttgaccccttctccctcgacttcttcgacccattcgaaggcttccccttcggctccggcaacagcggcagcggcagcctcgtcccgcgcacctcctcggacacggcggccttcgcgggcgcgcgcatcgactggaaggagacgcccgaggcgcacgtgttcaaggcggacgtgccggggctgaagaaggaggaggtgaaggtggaggtggaggacggcaacttgctggtcatcacgggcagcacagcaaggaggaggacaagaacgagaggtggcaccgcgtcgagcgcagcagcgtcccgttcacgaggcgcttgcggctcccggagaacgccaggacggagcaggtggaagccgggctggagaacggcgtgctcacggtcaccgtgcctaaggccgaggtcaagaaacccgaggtgaagagcg

SEQ ID NO: 25738 - DNA, 580 bp, Zea mays
  Clone ID: MRT4577_123483C.1
tttttctcgtgtctatgttgttgctctgatacaggtgcgttctattctgttgatcacgtctgcatgcgatacgtccatatatacttcccctgtcatggccttgactatcaccctcttggtgtgggcctccgactcgctctctcacttcttctagctgaactggtgtgcgtatacattccctatgattgtgaccgtctcatctttgatgtcaacggactaatggaaaatgctcgctctgcgactacgatctctctaagattggtgcctcttatcttactactccggtacagactagaatcggtcattcttcttgactactgtatgtggaggcttgatccgcctcttccactatgcttctgacatactatctgcctttttctgcactgttccagatcttttcgatctctttctaccactacttctacgtgatctttctgactatattactgtatgaccgacgcacgatggacgatgaccgcagttcatcggagaacacccaccactggaagatgtactgcaacagagtactgtacatattcattcctgctctgtcctgagcatctatagctctggacgactc

SEQ ID NO: 25739 - DNA, 278 bp, Zea mays
  Clone ID: MRT4577_123485C.1
caaaaggattaacccccccgcccgtgggaaaggaagtttcaaggcggcccgccccggcccttgggccggccggcttaacccaatggaccggcccttggggccccaacccccttaccttggttcgggccggccggcaaccaaagcccccgttggttacttggaatcttaactaaaaggcgtcaagtattaatccgcgcaacggaagtcttcgccacactggtttttaaaccaaccccagaaaccaatggggggaataaacggttcttttggtcctaggt

SEQ ID NO: 25740 - DNA, 175 bp, Zea mays
  unsure (1)..(175): unsure at all n locations
  Clone ID: MRT4577_123486C.1
tttcctgccgtncnnccgcagcattctcaacnccccatggccaagnatcaagnatcgggnatcanaatgggttcggcagggatnncggaaggcctggtggccaggggtgnngccctgcagaagtgggacgatgnnncgagctcgttcgctcgttgaacgaagccccttcattcag

SEQ ID NO: 25741 - DNA, 290 bp, Zea mays
  Clone ID: MRT4577_123487C.1
aatttcctaagcactactggctttttgtagtccatttacatgaactacatccacgggaccgttttataatcccaacgggccatcctacaattcttacacatcatgcatagctctacaaggattatgtccgcctctgaagtcttaactagcgactcattccgcattctacacccaatctttatgtataaacttcttaacctcagctctaagccctttacttctccttctcttgacctcaccaactcaacctgtacattgcgactccgttccagcatttccatataccctac

SEQ ID NO: 25742 - DNA, 166 bp, Zea mays
  Clone ID: MRT4577_123488C.1
agaaactcatgttcttctccagtcccctgtggtttctgttggagcataaggtttccagtaagcgggagggcagatccaactcagaaccatgcagataaggagcctctggcatatgggtgctcatcagaacgcgtggattctctttcatggcagaatgctcttggac

SEQ ID NO: 25743 - DNA, 262 bp, Zea mays
  Clone ID: MRT4577_123489C.1
cgcttgcgtgcgcggacgcgtgggcggacgcgagggatgaggattagaacctcttatacagggagtcctcccccgccagctctcatccttaacacagattctccgctcaaggcgctgaacttgggctcatcaaatagcggcgacgccccgcggaggttccggcagaaacccaggcactgcgagaagccaacacagtgcgccagcagccccaagagcaggtctgctagcgggacccaccagcctagttcggttcgctggacag

SEQ ID NO: 25744 - DNA, 248 bp, Zea mays
  Clone ID: MRT4577_12348C.1
ggatttatcgggtcctggatcaacggcgtttgttgaaaaactggttgttgagaataccgaaagccgcgaaacaaataaaagcgcaacaccagctaacttaaaatagcccaccgagacaaaaacatgacgtacctaggaatgagaaccaacacgacaaccttatacccagagcacaacaaacaacaaaacaagagcaagcattaatgagaaaacccttgattgctaccaaagattctaactgatcaaat

SEQ ID NO: 25745 - DNA, 146 bp, Zea mays
  Clone ID: MRT4577_123490C.1
cccacgcgtccggatttccgtccatttcccaggttctcaccggttcctcaaaccctaaaacctccaaaccccagcaatggcggattcccctgcgttccggcgctacacgctcggctcctccgtcgagctcgtccgctggcgccctt

SEQ ID NO: 25746 - DNA, 295 bp, Zea mays
  Clone ID: MRT4577_123491C.1
gttgcaaccaacgcgcaacatggaacgaccattggtggccaaacaatggggcttactaaagctggtcggcttttgcgcacgggtcgttatcgaaaccatgctcccacaacgatcacacgacactgttgataagcttctatcgccatacttcttaccacgtgcgtctcaactgcgggaaaacccgattgtgcaaacctacaggatccaacatgcaagagccaccaggctattaccattatcaccctagcttcttcaacactcgtcagccctattacatcagccaccttacggccat

SEQ ID NO: 25747 - DNA, 162 bp, Zea mays
  Clone ID: MRT4577_123492C.1
tcgcccacgcgttcgcaccagacgtattgtgccgaccccgacccatactctgctgctgcagacatggcgacctccgcggggctctctacccccgccaaatccacccagatctgtcggggccccgctcttcttggcaaaccggggaaagggcttgggctgagc

SEQ ID NO: 25748 - DNA, 164 bp, Zea mays
  unsure (1)..(164): unsure at all n locations
  Clone ID: MRT4577_123493C.1
gggagcgccgtatgggggggatttaggttaactacccatcccggnggggcgccgcttccccncttccccttgcggcctcgccctctctagatacttaagcagcaaaagcagttcgctgagcaaatacatagcgcaccaaacaccgtactcatcctattaactga

SEQ ID NO: 25749 - DNA, 508 bp, Zea mays
  Clone ID: MRT4577_123494C.1
tttgtgtttttaaaatttttttttttttttttttttttttttttttttttttttttttttttttttttttaggacgccaaggacccatttatacaaatttttagttccattgcaacgtttggagcatctaaagtttggccttttaagggggggggtacagctgcccttattcagaaggagctttgtacaccaaattgattgccaatggggtcccagtaaaaaaaacatacagtaccaaacaaggggtattacccgaggggggggtctatttcacaatgggacattataagttacacaaattccctgggggtcacttcgtctgtttcatacttgcataaaattcaactttccacacaatatttttcaactttgatgaaaaattcttgtaaaaattggggaattccaatgggtctcctccggttttaccaagctcaaccatgtgaagggaaggagcaacctcaaaaacctcaattgcaacaaataaatggccttttttttcggatttgtc

SEQ ID NO: 25750 - DNA, 451 bp, Zea mays
  Clone ID: MRT4577_123495C.1
cctggtgggtttttttttttttgcgggggttttttttttttttttttttttttttgggcacaaaaaaaaaaccacaaaaaaggggggggggcccacccggagagggaccctaaaccccaaaaaggggccccccaaccttaaccaaacctccccggccggttcccagggccaaggggggccccccagaccctaaatcccccgggagaaaaacccccccccccccgccgaacccgggggggaccccaccagggatagggggttattcattcccctcccccccaagccccttcccaaggccaaagctcccccgccgaaggggggacccccccccccgggggttcttcccccaggcctacacattcattttaccccgaaagggataataccccgcccaacccgggccccccacaaccaagggccacaccccccaaccaaactgggggggccccca

SEQ ID NO: 25751 - DNA, 276 bp, Zea mays
  Clone ID: MRT4577_123496C.1
gcgatagctagatatatacatagaattagttgaagaacggtggcgtagaggatacgaggagaaccaaggttgcgtctcgaaggttcttgcctcgttgggaacggatggcgtcggaggtggaggacgaggcggcgacgcgctagctcgccaacggtgcatccgacgtccgccggacgatggacaaggcgaaggcaattctgtccacgcaggcagtcaggatcgccaccaaggccgcgcagcatgagcgcttcatctttgaggtcacacacttgctgg

SEQ ID NO: 25752 - DNA, 283 bp, Zea mays
  Clone ID: MRT4577_123497C.1
tgaggatactccctctgtcacagaaatagtgcacctatggattcacgctggttaaacccttttttaaattgactagattgtagaaaacattagcaatatttgtatctctaaataaatttaatgatactaattacgtacacttcagaagccatgagtctggaaactgggaaaccagcgttcaaagctggagtctgaaagggaacattctatactattacaagcataccaaatctcagcaaccttggtctgttggataccatgacatttctatggttgacctttt

SEQ ID NO: 25753 - DNA, 589 bp, Zea mays
  Clone ID: MRT4577_123498C.1
gggcgttttgtgagctgctaggcttgggacttgccagttttgactgcgcttactagtatgtgcacgtctttggaacccggctagcagaagagatttactgccggcttcactgctcatgcttttgaagctaaagaggcatggcaggcttacacgtctcacgtctcctgctgcaaagaaggagcattcacctagtataggcccaagccaacgaagtctgttggagggatgccctagttccgattaccaaagcctccacttggagttatcatttgcatactatttgacctcgactgccgccaggatactactcaatatcttccttaccgacattagcgacagcaacgatacatgtgacatgtgcactaagatatggctcaacctctaccggaagaattcacataagcagccgtgctctacacttctgaagcatccgactcgctcggaagataacacagacacgagctgcgctccaatattaagataggcaatcaaacttcaaactgactgctgatgctactgtgcccatgataatgattggccgctggactgctctagcacctttcagcggcatgctacaggaactactagc

SEQ ID NO: 25754 - DNA, 456 bp, Zea mays
  Clone ID: MRT4577_123499C.1
cttacccaaagaatcgccctatttatgttgcctgctaaggaagcgagaaagactggtcaccgtcatacgactatgccatgtgcgcgctacgggcgggaaaggactggacaaggtctggagcaaagcgccaacgcagggggctacgcgacaacatccagagcatcaccaatccctcgatccgtactctgtctcgaagattagaagtgaagcgcatttgggcacttatctactaagagacccgaagcgttctcaagatcttcctctataacgtgattcgatacgccgacacctacaccgagcacgcacgccgcatgactgttaccgacatggacgttgcttacgcgctcaagcgctatggccgaaccctctacagcttctgcagctaggctggatgccttttatgcttgctgaagaggatgcctggttgttggtagggctacttcgattacctccttg

SEQ ID NO: 25755 - DNA, 565 bp, Zea mays
  Clone ID: MRT4577_12349C.1
gactccaatgatgaactaccttgagcaggtagaaatagaacgcaattatgttcaaatggagaagggctttctttctatttctaaaggaaaatacgaaatatgctactttgattaatagttatgaaatgattcgagtgatcttatgctctactaagagaatgataaaggactacaagtgaacgcgatagacggattagacaatactatgacccagaccttgaaacacgtgactagaatcacaggattactacatacacgaatctagcctattagctctgttaggaggcaccatcccagtattgacgaatgacaccagacgaatctatgatagttgcgccaacctgacgggctataagctgaatctctagcacaaaaagaatcacataactaacaagaataaaataggctattattgaatcattgaagttatagaaaacttcctgaacccaagaattcaagatgacaaggtcttctttacccagacaaatagaaccacttataatagccaaacggattatatctgttgagaaatgcacaatgagatggagatgatcctcattatcta

SEQ ID NO: 25756 - DNA, 421 bp, Zea mays
  Clone ID: MRT4577_1234C.1
tggggtgtttttataaattttttttggttgtttttaattttttattttttttcttttttttttttattaatttttttttttttttttattaaaaaaaaaaagggccctattcacttttcttttttttaattttaatgtgggcccaccccccatttatacaaaactcaaattataaaaacccccccccccccatgggtacaaaaaacactttaaccttttccaaaacttttaacccaatcgaaaaaaatttacccttcttttcaatccggaaaaaaactgcgtcctctggggggggggatggcccaaaaagggaaaacctttttgtcataaaaacttttgggtacttttaccataaaaaaaagtctagaaaattttttttcccctccttcctctctttttataaaaaaagctaggaggttac

SEQ ID NO: 25757 - DNA, 214 bp, Zea mays
  Clone ID: MRT4577_123500C.1
tcgcccacgcgtacggaaagttattacttttgacatggggctacttgttgctggaactaaataccgatggagagtttagtagagagactaaaggaaactttatggaaggaatattaagcaaaatagaagacattattcctcttctattgatgaagtgcacacacctgatcaggacgcaggtcgcagttataatgctgtcgattgatgcttgctc

SEQ ID NO: 25758 - DNA, 409 bp, Zea mays
  Clone ID: MRT4577_123501C.1
acctaagcccacgccgacagacgggggacatttttaggaatcaaggggctatacaaacagcaaagggcgagtcccatgtttgtcgggagctgaggcctacacccagggataacagtggggaccagcttgcaccgattgaagaacaaaacatctacctggcaagactcagagaacacccggcggattcacctgcaaatgctaacgacctagatcactgcactgcatcaaggtccaaccttacagatgaaacagatattcttgacgctaagaacgaggaacttaatgctcgcagaccgtctacatcgaccagcgagcatgtcactatatgtactagatgcagagatgttgctgttaatgctattcatgatcatacggctttaataaaacaacaaagtgatcatatcgcaaa

SEQ ID NO: 25759 - DNA, 1180 bp, Zea mays
  Clone ID: MRT4577_123503C.1
gcacgagccctcccgaacggcaacattttttttctccaaaccatataccctagcccgtgcacaggtgggcgcccgccgccacctgcggctcggtggactccggcatcgacacccctggcccccagcgccgcagatcgcaagctctcagcaacgcgtgcttggtaggaacccgtgccgaccgactcttcctctgcgggacggtctcgagtttggtcgggagatgggtgacgggagctgctgcgtctgcaaggaggcgccgcccaagtacaagtgcccttcttgtcgcacgccctattgctctgtcacatgctttaaaaagcacaaagaggaatcttgtcaaaagatattgcatcaggaagaaattagcaagtcagcattgcaggaggaagttacactgcacaccacatgcactgcagaatctccaaatacagcgtgccctacaaaagctcttgaagttgaggacctaagctggcttgttgacaacaatagactaaggtccttagcggaactgaaagggatccaagacgctctcagggatcctgaactgcagagaatgatacttcaaattgatgggtcttccgaatcagaaaaagaattggagaaagtgatggaaggtcaagcttttcgcgagttcactgataagattcttgacattgtcaacccacaagaataaccgtctaccctgtttggtgggattctgacgctagagtaaacagaagcatccgggcaaacaaagcaaaagtggagctcatctctgttttcctttttccaggatggtataattcataacatatcttgagtcgcctgtttttccatgatggggtagactttagaacacatactgtgtcgcctggtgaaaggaaattacgtctgctgaaaaatctctcttgccaaatatagtttttcttctgtattctagtgttgtattctagtgtggtagacagcgactctacactgactactgagggtgtgtttggtttggttttgacttttgctctctaaaaacgaaaagcaaacggcccgagccagaaagcagcttttttcaaaagcatgctttcttgcactgcacattgaaagcacatttgaatctatgagagctggcgaaactgcaactccaactgctagcattccaactgctggcgcagactgggctgatgctccagctactactggggcggcg

SEQ ID NO: 25760 - DNA, 737 bp, Zea mays
  Clone ID: MRT4577_123504C.1
aatgagttttcgagcacgcgacgagcagcatcgcgcagcagcaccttggaattcggcgttgcccgcgctgctgcttgcatccagctgctcctccgcctccatccggcggcccggcctgcatctctgagatccacccgccgacctgcatctccgagctccggcctgcgcttcttcctcccccgtgcgtcttcctctgcccgcccgcctgtaattcttcctcccctcgcgtttgcgcttcttcctcccctgcgcttcttcctttgcttgcctgcctgtgcttcttcctccccctgcagttgcgcttccacctccctccacgccagctatgcgcctctgcctttgttgcatgtggtagtcgcaactcgccagtgctctctgctttacaactacaagtcaggttgaggagttggagcaggaaaagcaggagctggagtttattgcagatatgtacgtgaaagaaagttctgagtctaggacaattgctgatattgaagaatcagaaacccgagctcgcaatcaggctgaatatttgaggagcaatctagaggagcatagtcttgagcttcgggttaaagcagcaaatgaagctgaagctgcatgccagcaaaggctttcctttgctgaagtggaactagaggagttaaggaccaaagtagatgcatctgaaagagatgttgtggaacttaaggaggcattaagaattaaagaggctgaaggagacgcctatatttctgata

SEQ ID NO: 25761 - DNA, 188 bp, Zea mays
  Clone ID: MRT4577_123505C.1
cctgggcaaaagccacattaggacacgaatttaaatccaactaacacccacataccacttacagtcattaatcgtggtttcacgactaaacgcgacaagagccaatgtctgacgattgctgaccgacatgtacatgctgtaaaagatcccaatcagcttctaacaattctacatgatgactatgaaca

SEQ ID NO: 25762 - DNA, 1070 bp, Zea mays
  Clone ID: MRT4577_123506C.1
ggcgagctcgaaccaggcgggaccaggcggcacacccagctataccctagtccgtgcacaggtgggcgcccgccgccacctgcggctcggtggactccggcatcgacacccctggcccccagcgccgcagatcgcaagctctcagcaacgacgtgcttggtaggaacccgtgccgaccgactctttctctgcgggacggtctcgagtttggtcgggagatgggtgacgggagctgctgcgtctgcaaggaggcgccgcccaagtacaagtgcccttcctgtcgcacgccttattgctctgtcacatgctttaaaaagcacaaagaggaatcttgtcaaaagatattgcatcaggaagaaattagcaagtcagcattgcaggaggaagttactaggttagtggaagatgcaacaaagtgccctaatgacaaggatcatccctctttatcactgcacaccacatgcactgcagaatctccaaatacagcgtgccctacaaaagctcttgaagttgaggacctaagctggcttgttgacaacaatagactaaggtccttagcggaactgaaagggatccacgacgctctcagggatcctgaactgcagagaatgatacttcaaattgatgggtcttccgaaccagaaaaagaattggagaaagtgatggaaggtcaagcttttcgcgagttcactgataagattcttgacattgtcaacccacaagaataaccgtctaccctgtttggtgggattctgatgctggagtaaacagaagcatccgggcaaacaaagcaaaagtggagctcatctccgttttccttattccaggatggtataattcataacatatcttgagtcgcctgtttttccatgatggggtagactttagaacacatactgtgtcgcctagtgaaaggaaattacgtctgctgaaaaatctctcttacaaaaaaaaaaaaaaaaaaaaaaaaaaaaaaaaaaaaaaaaaaaagtactctgcgttgttaccactgctcggcccgagccagaaagcagcttttttcaaaagcatgctttcttgcaatgcaaatt

SEQ ID NO: 25763 - DNA, 764 bp, Zea mays
  Clone ID: MRT4577_123507C.1
cttgcggccccgcctcgtcttcctctcgctttgcccgctcggagctagactcgatcgcatcgcgtcacatccgagggaggcaaaaccctaggcagatccctcccgaagcctaccgcgaccttccgcccccggaggagatgcagggcggcaaccacatgctcctcgaggagcccgtccgcctcgcctccgtcctcgcccccgccaagcccaaagttttcccatccctcactaagattgttgggacgcttgggcccaactcgcactcagtcgaagtgattgaagaatgtctcactgctgggatgtcagttgcgcggtttgatttctcttggaaggatgctacttatcatcaggagacccttgacaatctgaggaaagccgcacagaatgtgaagaagttatgtcctataatgctggatacagtgggtccagaaattcaggttcacaattcaactggtggagcaatcgagttgataggggggaatcatgtcacaataacaccagatctttctaaagctccttcggctgatatcctaccaattaaatttggcgatcttgcaaaagttgtgaagaagggtgatactcttttcattggtcaatatcttttcacaggaagtgaaacaacatctctatggcttgaagttacggagacttctggtgcagaagtgatttgttacgtgaagaacacagctacactgtcggggccccatttcactctacatgtttcaccagtacatatcagtatgcccactttgagtgaatatgat

SEQ ID NO: 25764 - DNA, 139 bp, Zea mays
  Clone ID: MRT4577_123509C.1
ggctctctagaggaccaacttaatataccatgctgaagctcacaaggagcataaccacccaagtttgtttgctggatgatcacagctgtggttgtaccgaccactaaagggcacagcaggaagggcgaattttacaaca

SEQ ID NO: 25765 - DNA, 851 bp, Zea mays
  Clone ID: MRT4577_12350C.1
tcccacgcgtccggacggacaggccgttgccgcccaggagcccgcaaagaaggctgtgaaggttgagacccccagcagcgacaagaagaaggtacagttcaccaagaacctcgagatgggccccactggctcgcccagggttgacgaaaagaaggaagccgcaaagcccgccgccaagggaccccgcaacgtcagcggcgtcaccgtcgacgacaagagggagggtaagggcaaggccgccaagaagggcgaccgtgtcgagatgcgctacattggcaagctgatgaacggcaaggtgttcgactgtaaggcatgaatcccaactaacttgagctgtactgacgtgctaccagccaacaagaagggtaagcctttcgccttcaagctcggtgtcggccaggtcatcaagggctgggacgtcggtgtcgctggcatgactgccggtggtgagcgccgccttaccatccctgccggcatggcctatggaaagaagggtgctcccccggacattccccccaactctgacttgatcttcgacatcaagtgtatctcggtcaactaagggtccgcatacgcagagccgaggccgtcccactgtacgatgccggtacgctccactcgagtgcatgagtacgtttcctgtttttgatttccctgcataagcgatgtatgagatatccgacttgcatactggttgtaaaatgtgcgaggaggacggatctctcgcacgagcttgtatgccttttcctatctgtttgatcatctagcgaggcgtccctacgctgaggaagctactagaaaagtgacggagttccggtagtcaggtagtgaattgatcgatgagagttgcg

SEQ ID NO: 25766 - DNA, 144 bp, Zea mays
  Clone ID: MRT4577_123510C.1
tcgacccacgcatacgcggacgcgtaggatcaccggccgttaagcgtttaatctcccaattccacccaatatctcatggcgtcttctccaacgcacttatcctcgcaccactatatccaggagcgtcgaagtgatccacccgcc

SEQ ID NO: 25767 - DNA, 691 bp, Zea mays
  Clone ID: MRT4577_123511C.1
gccggccgggtcgggcctgccgccgccgccgctcccgctcccagctcgtgttccgcttcttgcagccgtcgccgcgaagcgctccagagaacttccgtcaacatggggaagacacgtggtatgggagccgggcgcaagctcaagacccaccgcaggaaccagcggtgggctgacaaggcatacaagaagagccatttgggcaatgagtggaagaaacccttcgctgggtcatcccatgccaagggcattgtcctggagaagattggtattgaggccaagcagcccaactccgctatccgtaagtgtgctcgtgttcagcttgttaagaatggcaagaagattgctgccttcgtgccaaatgacggttgtttgaactacattgaggaaaatgatgaggtcttgattgctggatttggtcgtaaggggcacgctgtgggagatattcctggtgtccggttcaaggtcgtcaaggtttccggtgtgtctctgcttgcccttttcaaggagaagaaagagaagccaaggtcttagattgctcttgcttgctatgtttgcagtgcattcgtgcaattgttaacctaagattttgttggtgaaaacgatttcttttcagacttgcttctgttgagtgctatcattccatatcaatgtacttcctcttctagaaaaaaaaaaaaaaaaaggggcggcc

SEQ ID NO: 25768 - DNA, 485 bp, Zea mays
  Clone ID: MRT4577_123512C.1
aaacccttcgcggggtcatcccatgccaagggcattgttctggagaagattggtattgaggccaagcagccaaattctgctatccgtaagtgtgctcgtgttcagcttgtgaagaatggcaagaagattgctgccttcgtgccaaatgatggttgcttgaactacatcgaggaaaatgacgaggtgttgattgctggatttggtcgtaagggtcacgctgtgggagatattcctggtgtccggttcaaggttgtcaaggtctcgggtgtgtctctgcttgcccttttcaaggagaagaaagagaagccaaggtcttagattgctcttgcactcaaaatcagcaagcatggagtctaaattggagggtgttagatgtttaagaagaatggttgcttgctatgtttacagtgcactcatgcaattgttaacctaagattttgtttgtgaaaacgatttctttaaacacactgcttctgttgagtact

SEQ ID NO: 25769 - DNA, 2396 bp, Zea mays
  unsure (1)..(2396): unsure at all n locations
  Clone ID: MRT4577_123513C.1
gaccaacacagtccctggatcctgggtgtcgaggaggagcgcgacggcgaggagcaacgccgccccctcctctcctccaccccgccagccgcggcggacccgcagcagcaacagtaccagttcctgggccggagcacctcttcagtgctgcgcggcggtggcgggggctgggaagggcctgaggtgagcgccgacgaggtcaggtccgccgctggcttccacacgttccagggcccacctcccaacggcgacaacgcctttgcttacccgccgtccattcatagcgccatgctctccccgtccccatctcatgccccaccgtctccccatccaattgaagggttggcgattgttcctcaagggccatatccgtatggtggcagttaccaaccttctgagagtgtcgggagggatgtactggatgaggtggagatccgacagctactcattgaccatattggacatcgatgctgttggggaagtcaccctgcccgcacatggaaaattacctccattgaggactgcaatgtctatgttggcaccttggaaaccttcatcgaggagccgccgccgctcccgctcccagctcgtgttccgcttcttgcagccgtcgccgcgaagcgctccagagaacttccgtcaacatggggaagacacgtggtatgggagccgggcgcaagctcaagacccaccgcaggaaccagcggtgggctgacaaggcatacaagaagagccatttgggcaatgagtggaagaaacccttcgctgggtcatcccatgccaagggcattgtcctggagaagattggtattgaggccaagcagcccaactccgctatccgtaagtgtgctcgtgttcagcttgttaagaatggcaagaagattgctgccttcgtgccaaatgacggttgtttgaactacattgaggaaaatgatgaggtcttgattgctggatttggtcgtaaggggcacgctgtgggagatattcctggtgtccggttcaaggtcgtcaaggtttccggtgtgtctctgcttgcccttttcaaggagaagaaagagaagccaaggtcttagattgctcttgctaccaaaatcagcaagcgtggagttgaaacgggagggcgttagatgattaagaagaatggttgcttgctatgtttgcagtgcattcgtgcaattgttaacctaagattttgttggtgaaaacgatttcttttcagacttgcttctgttgagtgctatcattccatatcaatgtacttcctcttctagaatttttgttgcccgcaagttcatttatttgttgtccgccagtttaccggtgaaacttctgcttgcccttttnnnnnnnnnnnnntgtaattgctttgtcnnnnnnnnnnnnnnnnnnnnnnnnnnnnnncgtggagttgaaaccggagggcgttagatgattaagaagaatggttgcttgctatgtttgcagtgcattcgtgcaattgttaacctaagattttgttggtgaaaacgattttttttctagaagaggaagtacattgatatggaatgatagcactcaacagaagcaagtctgaaaagaaatcgttttcaccaacaaaatcttaggttaacaattgcacgaatgcactgtaaacatagcaagcaaccattcttcttaatcatctaacgccctcccgtttcaactccacgcttgctgattttggtagcaagagcaatctaagaccttggcttctctttcttctccttgaaaagggcaagcagagacacaccggaaaccttgacgaccttgaaccggacaccaggaatatctcccacagcgtgccccttacgaccaaatccagcaatcaagacctcatcattttcctcaatgtagttcaaacaaccgtcatttggcacgaaggcagcaatcttcttgccattcttaacaagctgaacacgagcacacttacggatagcggagttgggctgcttggcctcaataccaatcttctccaggacaatgcccttggcatgggatgacccagcgaagggtttcttccactcattgcccaaatggctcttcttgtatgccttgtcagcccaccgctggttcctgcggtgggtcttgagcttgcgcccggctcccataccacgtgtcttccccatgttgacggaagttctctggagcgcttcgcggcgacggctgcaagaagcggaacacgagctgggagcgggagcggcggcggcggcagggcgtgacgcccaggcagacgtgccctccgccagaaggcttcgggcgcaacttgcgttcaaaaactcgatggttcgcgggattctgcaattcacaccaggtatcgcattttgctacgttcttcatcgatgcgagagccgagatatccgttgccgagagtcgtgtcg

SEQ ID NO: 25770 - DNA, 1245 bp, Zea mays
  Clone ID: MRT4577_123514C.1
atggacgccgctgccctcttcttctctcacctcctccccatcgtcgtcgtcgcggccatcgcgggcgcggcgccactggacccgcagcagctgctggcgctgcgcgcgctcggcctgggcgcgcacccgcgcgccgacccctgcggcgcggccgccgttgtggccgccgtgaacgcttcctgcgacgcgggggagcccttccggcgtgtcacgtcgctcgccctcacaaactgctccgacaccacctccgtctcggcggcggcgctcgaggcgctcgcgccgtcactccgggcgctggcgttctccgactgcccggccgcgccgccgcgagctctgcccccggagcagctggcgtccgggctccgggcattctcctgcaccgcctcgctccaccgcctctccgccgtgtggctctcccacctcaccaatctcacggagctcgccgtcgcggacacgcccctcgccacgggctcccccactgagctcgcagtcgtcgtctcccacatggagcacctcacccggctcaccgtctccaacgccaacctctctggcttcctcccgcaccactggcattgccccaacctcacccacctcgacctgtctggcaaccgcatcaccggcgccatcccggataccctgacgctcctcgccggcatcacccacatcaacctcagctccaacgctctcgatgggcccatccccacctccatcggcgatctcatctcgctcaccgccctggacctgtccaataacagactctccggcggcatccccgacacgctctctacgctgccggagctggaggtgctcgacttgggctccaaccggctcaacggcagcataccgccgttcctggccgagatgcatgggctgagggagctcaacctcgagaacaacgacttcgacggcatggttccgttcaccgccaagttcctgtccaggctgcgcgtgttcagggccgccgggaacggcaagctgtgctacaaccggtccgtgctgcccgctgagctcgccatgagcgtggctccgtgcgacaagtacgggttcccggtgctgccgcccccggccacggcgcggtcggagcgaagcgcggactacgacgacggcggcggggacggagaggcggacggcggcgccgacacgaggggtgggcccagcgccacggtgctcggggtggccatcgggctatcctgcctggcgttccttatcatcttgctcgtttgcatctgcaaggtgtgccgctga

SEQ ID NO: 25771 - DNA, 357 bp, Zea mays
  Clone ID: MRT4577_123515C.1
cccacgcgtccgcccacgcgtccgcccacgcgtccgcgagattctgaatgtaatatagtagaatcatctataagctgtcggatatcatgtatctcttacaaaaaaaaaaaaaaaaaaaaaaaaaaaaaaaaaaaaaaaaaaaaaaacaaaaaaaacaaaaacaccaaacaaaaaaaaaacaaaaatacaacataacaaatcatatatagatccaccatgacgcaaaccgcccgcctccctacaacaacgtccgcatctaaaacaaccctgtcgctacccaacatacccttacagcacaacaccctggtttcaccagatgatgtaacaaccaatagtcccgcacataccgatcttacc

SEQ ID NO: 25772 - DNA, 501 bp, Zea mays
  unsure (1)..(501): unsure at all n locations
  Clone ID: MRT4577_123516C.1
cggacgcgtgggcttctctnacattgannagatgaagctgaaaanataaactattcacggtcaggtcaattgggttctgctgagctgcaaggtttcccaacactttcaggagatttctttacctatgcggatagaaatcaggattactggagtggttactatgtatcaaggccattcttcaaagctgttgaccgtgtactagaacagacactccgtgcctcagagattttgggttcatttgttctaggatactgtcagaagtttcagtgtgcaaaactccccatcagtttctcacacaaactgacagcagcaaggaggaatttggctctttttcagcatcatgatggggtaactggcacagctaaagatcatgttgtggtagactatgggacgcgaatgcacacttcactgcaagatctacagttatttatgtccagggcaatcgaagttcttttaggagatttccacgatagatctgaccctacattattatcacatttt

SEQ ID NO: 25773 - DNA, 374 bp, Zea mays
  Clone ID: MRT4577_123517C.1
cgggctcacttgtgtatcccacgagaatgcgttggtgcgggcggcacaaggggcaggcggtaggaggagctgttccaagccacaatgggtttctcacgcgactctatgcacaagcgccatgccaccggtggtaagcataatgcctggaggaagaagcgaaagtttgagcttggtcatcaatcggtcaacaccaagttgtcaagcaataagacagtgaggagggtccgtgtttcaggaggaaacatgaagcgaaggactcttaaacttgatactgaaaactactattggaaaagtgaaactgttaccgtatagacctgtgtggacggcgagggctactgtggatgaaacaatgaattttttgaggtcacattcca

SEQ ID NO: 25774 - DNA, 479 bp, Zea mays
  Clone ID: MRT4577_123518C.1
tggaacctttgggcgtgatttatgtgcttgtttatgtgcttgtatagagatattaagtgccgaatctgttcaagtagtcactaattggtttcacaaagtcagatattgcatttacggtctgtgtcagtgctgctcccgctaccgttgtctcttctcctgctgttacggctgcagtattgacggttgaggtaaagcttgttgacgttttcgcggtcgatgtgttagttgacggattcagtgggttggtcgtcgtattcggtttttagggcgctgaaggttcgctaggtaacgaggacgatgacgacgatcttattaaccgaggttatatatgctggtttggccaaacccggaataagatacggaagaaaaacgagagtaacgctcccaaaattacgacaacgcgcggctacttatctacttacggacatacttccgtctctttctccccctccctcgccggacccctaacgcgccactac

SEQ ID NO: 25775 - DNA, 202 bp, Zea mays
  Clone ID: MRT4577_123519C.1
gttattttggttgtaaatcattctcctgtggaattggcaaaagctacatttttactgtccttaccagcaacagtttgcgtcgtcacatgctgtgagtgtgggctgtggtgtcaccgtgtgtgtacatatgtgtatatgtatatatcacgcagcaggagtgtcattcatgctgctgtcccctggtgaagtgacaagtacaatt

SEQ ID NO: 25776 - DNA, 332 bp, Zea mays
  Clone ID: MRT4577_12351C.1
cggacgcgtgggttcgacgccactctcacggccctccttgagcaagagcaacaccacggccttgacaccggggaccttccgcagatcgacggcctttcagaagtagcatactacccaaccgccaccgatgaggccaccatagggcaattcaaccagatggggcttccgacgaccttagctgaacagatgcttccaatgcagatgaacagcagtgcatccgccttgatggccctcacttcagactaccatgaggggttcacaagggccgtaggttgaagggtcaagggtctggatggaactatggatcaattggaaactggagccattctttc

SEQ ID NO: 25777 - DNA, 166 bp, Zea mays
  Clone ID: MRT4577_123520C.1
cgcacaaaacgttgctacgacggacctcgggctaaccaaaagtctcaataatacactgctgtgccgagtagtgttttaaaacccagaaactcgcgaatctatgggggatagatatcgagttatacatcaagagtgacgagcagtaacaacatgaaacaagtattac

SEQ ID NO: 25778 - DNA, 152 bp, Zea mays
  Clone ID: MRT4577_123521C.1
cagtgactcgcatgttatgttattgcaacagatctggtatgaaaggcaagctcatggctgagatgccaatcgagtattagagatcacattatagcatcataggatggtgcaactactaacgtatgttgacacctccgtacatcgatcgatta

SEQ ID NO: 25779 - DNA, 329 bp, Zea mays
  Clone ID: MRT4577_123522C.1
gggggggggaatcgctgtttgttccccccccaaattgaatgggaggtgccggggaactaaaccgcaaaaatcccggtccgcaaaacattcattataaaaaaagagaaggggggccataacattaaaacccccgggtaaacttggacgggggggcctaactggtgtcccacaaatttttttgcccccccctaaatttttatcactgttttaaaactgtagcctaactttgggggccctggccccccttcggcccccccccgttgtttccatcctctgcgtgggccccctggggctgttcttgccccctcccctatcccctcttaagtttt

SEQ ID NO: 25780 - DNA, 484 bp, Zea mays
  Clone ID: MRT4577_123523C.1
gtcgacatgttgttcgtgtcaattaaactttcttaattttaactaaaattataaaataattttattgtaacattataaaaggagattcaaagatctgatataaattttatactataaatattaaaatttcttatatcaaagttaaaaatgtttgactccttaaaaataaaaatggccaacatttatggacgagagtattttatagaggtagtaggtataatgaatttaagaaaaagctctgcacagagttgaaaaactgggggagaaagatttctgacataagaacatagtaagaacaaaaatgaccaacatttatggacgagagtgttttattaaggtagtaggtataaagaatttaagaaaaatctctgcacagagtacagatactagcggagaaagatttcggacataatgaggtattgaggaaaaaaatataaagaaaccgttttgctcccaaaactcttcgaggacaagaaaaaccatg

SEQ ID NO: 25781 - DNA, 380 bp, Zea mays
  Clone ID: MRT4577_123524C.1
accggggatccgaggggtggggtggaggggaccgagggacgaggatgctgccgtgatggcgctatagctgtgctgctgcgcgagcggcggcgaacgaaggatgcgggaggccgtggctttcgcgaccgagtcggtggaaaagctgctggtggtgatgcagcggcactgcgcctcggccacctcgtggatggccggagagctgatgcgagcggtgcggatggagcatgagaagaagggcatggccgccgcctacgatagccgcaacatccatgtcatgtcgtactgatggatccggcggaaacacgtcgccctgcagcttcaatcatctggacccgaggggtgggggtggaggggaaccaaggaagaggatgtggcgggga

SEQ ID NO: 25782 - DNA, 412 bp, Zea mays
  Clone ID: MRT4577_123525C.1
aaaggacgtggacctgcggtgcgagtcgtgacaggggaagccgcgcgaccgttcgtccttctgccggacagctcctccgtggcaatgccggaagttgtcctctgactttgcacggtgaaatgagagtgcatggtccgtgcatcgtagctccgaggagaatctgcttgggggaagaagcgctaagctatgattggacccgggcgtggggattgctgcttgattcgccgtcttggcggcaggtcgtcgtgtcgcgcagccccagcccagccagaacgattcgccttctgcagttgcccttccaagtggccgtgtcgtagcttccatttgtttttcccctgtatttttacaagctgtacatattcgagcggccgagttcttccatgctgcctgaattggttttgggcgatctttg

SEQ ID NO: 25783 - DNA, 518 bp, Zea mays
  unsure (1)..(518): unsure at all n locations
  Clone ID: MRT4577_123526C.1
gactgctgcgagttgaggagggccgtgtgaccatcctcgcctcaacggtcgaaggctccacgatcaggttcgccgacgaggcgatcgaggcatcggacggcacggtgtacttcagcgacgccagcaccaggttcggcttcgaccggtggttccatgcctacgtcgagtcccaacccaccggccgcctcctcaagtacgacccgcgcaccggcaaggcgtccgtcgcgctcgacaacctctccttcgccaacggcgtcgccctgtcacgggacgaggccttcgtcatcgtctgcgagacagggaggttcaaatgcacgaggctgtggctgaagggggacaagaccggccaggcggagacgttcgtcggcgaccttccggggtctccggataacatccagctagcgccagacggctccttctggatcgcccttatccagaggtcgccgtggctggacctggtcatgcgctggacgttcacgaagagggtcgtcgcctcgttcccggcgtgnctcgacgcg

SEQ ID NO: 25784 - DNA, 183 bp, Zea mays
  Clone ID: MRT4577_123527C.1
atggcccacaagggcaaggcgacgtacaacgtcccctacaacccgaaggacgggcctgaggtgtatagcaacccctccgtctacaactgcctcatgacaatatgcggcatccaacaaccctcatggatcgcccagtgcatcttcgaaccagtccagccgcccaccttgttgatgttcttctaa

SEQ ID NO: 25785 - DNA, 520 bp, Zea mays
  unsure (1)..(520): unsure at all n locations
  Clone ID: MRT4577_123528C.1
ataattaaaaacatcaaagaatacagaaccaaatgggtagttgacatctcatctccatgattaggcatgcggttggccagattggagggggcccagtttcgctttctagttgggcttggtggatttttgtctcgtgcagctaggcggcctagcgtatggttgctacctcttcgtccccgcgatcggcggcaggagttcatgcaacttcctctaccccgtcttctactcttcttcctgtggtggtttgaagccggccatgcaaggagcccggggtgcagttggtgacggcggccggggatgcggctcctggcgcgattctcccaagtggccaagtcccaaataagtccacctgatggaacactcgaggtctatagacgtacggggccgtgtgatccaacatggcccacccggaggcgcaggcaggnggtcgtttccccagcatggtgcggcggccggtgctggcgctgcccggggccatggcgtgtggtgttcgtcctcaacgtgtcgatgatgaagctgc

SEQ ID NO: 25786 - DNA, 253 bp, Zea mays
  unsure (1)..(253): unsure at all n locations
  Clone ID: MRT4577_123529C.1
cgaatgaagggaccgagaaacggagcncaagggtcaagggacagccaagatggacaagagcaaggaaacgaccaaagcagagacngaanccggcgaagncggaccgcaagggaccgaggcagacaagcaacagaaagccggcccgcggacgggaaaacccgcggagaaagggacaccggaagaggcngaccgcccccaaaagaaggaagagacgcggaaaacacggnaaaacggacaggacgagggcgacaaa

SEQ ID NO: 25787 - DNA, 1318 bp, Zea mays
  Clone ID: MRT4577_12352C.1
cacgaatgttcagagacacctttcgccactcctccttctcttgttccagaaattcagtctacaccaggaatcttcacattcaacctcacttgggccaacattagcagtagtgctttaaaacccaggatatcttccccagtgagtgattattatcttgtaaggaacccaaggtatgcaaatcaagggaattttctgaagttatctgactttcttgcaatcgtgatggagagggatttgtctggtgccatgatcattatcgagaatgctgcatatatagcgaagtcattaggaattgacattgttgattctgtaaccactgccttaagtgctgctggcttcgataatcagactgccaaggaagttctgatccagtcaaaagatagtgatgttcttgtcaaactgaagcagcagaaaacaaaatgcaagcttgtttacactctcccttctggcatcggggatgcttctaattcctcgttgaaagacattaagaagtttgctgattatgtagctgtggacagcaaatctgtttttactctaagctctgacttcatcataagacagaacagtcttgtgcaagatctgcagtcagcggggctagctttgtatgcagaggtgttccagaatgagtttgtagcacaaccattggatttcttcggagatgaaactgtggaaatcaattactatattcaatcatttaatttatcaggcatcataactgatttcccgaagacagtcagaagatataaaagaaacacttgtacagttctgggaaaggatatgcccagctacatgcagcctcctcaggctggttcccttgcacagtttctacaaaccttcaaaacccagcctccatctctgccaccaatgccgacgctgaattcttcaagcgtggaggagccacctcttcctactgttgcgttaagaagtgtatctgatggtagtgcctcgggggcgaccaagactcctggcacaccttctgatgctccaacggctacagtaaatgctggcatgctacttgtgatggttttcacagctttgctaatctgagaagccacatgagattgtatagtagacgactgaagctaatctgatctcccttggattcaggtaagctttgactggtgatctggtactaccacacacttgttttcttatttccacctttacaaatttttcagtagaaaatgttagagtacccatttagggtttggggtttaccccgtgtaattacccgcttacccctgtgtaataggccagaccgagctaacttagtctattaatacaacactcaaccttgtgtaggggtaggttctcttta

SEQ ID NO: 25788 - DNA, 398 bp, Zea mays
  Clone ID: MRT4577_123530C.1
gggtaaattaaagtggagtttggtctttttttttttttgctaaaggcctaccagacagacaattcgttacacgactacactacaccagtgtatatgaaacacctgttataatggccttccgggagctgcggaataaaaacctttagaaatctttatgtccacgcaaagggaaaatttaggcaccgcctaaaaattatgggggttggccccccccggtttttagcacgtgcatgtaaaagtgggcgaaggtaaggacatctattcgcactgggtattttttgtattagggggggggctgtcaacgggcaattgaaatcttttctttttgcttgttgtagcggggccaaaccaactacgcgttcggggggtctgagagaaactcgtttaaaaaagggggg

SEQ ID NO: 25789 - DNA, 272 bp, Zea mays
  Clone ID: MRT4577_123531C.1
taagctcggaattcggctcgaggtgaaatcaagctgccaatgttctgatgaagatctaacagatgatcataagactatcctttccagacgcggcgcaacggcaaacttgagcgcaggcactacctaccctgggatgccttaggaatggctaaaaccctatggacgaatccgacaagccccacatgatagcacacttgccgataccatgtcaccactgaactggtggcatacacggattcacgatcatgaggtacaagtacgagaacgaggca

SEQ ID NO: 25790 - DNA, 301 bp, Zea mays
  Clone ID: MRT4577_123532C.1
ctgacctaccgtgtgcccagcaccatccttgcgacaggggaagcagcagtgagcaaaacagaggcccttcctccaggacctccacactctgggagacaggaacctaagacccaggcctagaagaggaaacttgcagtgtgtagggggtgcccttgggatgggctgggatggagggtaaggatagagaggacagaggcagccccatgacttgagtctagtcattcgaggggccaggccctggggatgggaatccgttcctcctctctctccccttcctccttgggtgaatcaaccaccaccc

SEQ ID NO: 25791 - DNA, 325 bp, Zea mays
  Clone ID: MRT4577_123533C.1
ccgaccgcctacctctcccgctaccgtcccaaaggtcaatagatttcaagtgcctctggtgcaccagcataatcaacccattgtccttcataagctcggtgcccagtgccacctgcgctcgatcatctctgaaggcgtcacggcaccctaacatatgcccatctgtctcatcttatgaaagcgcatttgccacaaggaactacatgacccagagccttttgcccccttccatgtctgatagcggcgcgcatcaatgacccactgcagcgcaccccgctctgtgctaatgctcctgctgtttatttgaggccacaacttcatgatc

SEQ ID NO: 25792 - DNA, 288 bp, Zea mays
  Clone ID: MRT4577_123534C.1
tttacacggtaggacaccggctctcagagcgaggctgggtcgaccactggaagttgaagttacatcatgggcaggggatcatgaccggaaagagaaaggttagtggcttcaagtatcgatccatactattcctcgacgcatcaaagatggacggctcagcgtacgaggcatgaatctagcgctagcacagcaagaggttgtgacaagggggatgatgtgagcacatggaaagggtaataagtgaagaggggctggatagcccccaaagataatggatttgttgagaat

SEQ ID NO: 25793 - DNA, 324 bp, Zea mays
  Clone ID: MRT4577_123535C.1
catcattaatcctacaagtccagcagcattgccattatcaatacctcatacacaagtgacgggttaattcagacaacgaacgagacctcatcctactaactagctatgcataaccatcccatacaaaaatttcttgtaactattactattgccaaatattccatagaagtttaaaattataacatgtccatgacccacttaaatgttctataccacacgctcactacatttatttatccaacgacattatacccttgtacaactagctcagattaaattcctaaatcacatcgtgatgtagatagacaatttccaatatttttc

SEQ ID NO: 25794 - DNA, 425 bp, Zea mays
  Clone ID: MRT4577_123536C.1
gggggcgggggataacggcccccgggtttcaagacccccattttttcaaaacaatcaccacgaaacaggggacagaatcaaaccccctgccccccgcaacaaagggaccaacaatctcatggcaaaactttaaaaaaaaaaaaaggttttaccccctacaaaactaaaacaaaaaaacaccggtcgattcaacaaagacaaaagacggggggcaagaaaaaaaaacccccttgcaaccggtggtttccccaccccgaccccccactattaaaaagccctgccgaactgtgcccgggccaagggtttcctgaaccccaacccctcctactccaaaggtttggtgttcgggacattatccaagacccaaagctattaaccccgaaacggcccggtcctcgagcatcaattctggagggcttgggggg

SEQ ID NO: 25795 - DNA, 1288 bp, Zea mays
  Clone ID: MRT4577_123537C.1
ctggccgagcatcggacgttgtacggtagcttcttcttcctcgatcttcttcttttgcttgctgcttgcgttcatagtcaagcacgaggaggaagaagagataagagaaaaaagaagaggcaggagcagctagtcccatcgatccatccatccagtcgttccaaccatcatccatagatctatagcttcaccgacgaaatgacgacgacgtcgagagatgagatagtcttcttggacgtggagacgacggctccgacgtcggccgggacggtggtggctgctagagttcggcgccatcctggtgtgccccaggaagctggtggaggtgggcagctacgacaccctcatccgcccgggcgacctctccgccgtctccaggcggttcacggacggcgtcgaggccatcgcgtcggcgccacctttcaaggacgtggccgacaagatattcggcatcctggacggccgcgtatgggctggccacaacatccagcgcttcgactgcccccgcatccgcgaggccttcgccgacatcggccgccccgccccggagcccgccggcgtcatcgactccctcaacgtcctggccgcggagttcggccgccgcgccggggacctcaagatggccacgctcgccacctacttcggcatcggcaagcagaagcacaggagcctcgacgacgcgcgcatgaacctggaggtgctcaagcactgcgccaccgtcctgctgctcgagtccagcctgccacacgtcctctgcggcaggcaccagtctcgccaagccgacggcgccgtggtcaccaccaggaggatggcggcgcagcagacgcctccgcctaaacatgaagtacaccaacaccggcccggcgtcttgaccaagctgccgccgtttacccctgtgcacgaccgagcagctacagctacagctgcacctgcacatgcggccacccccacccccaccactccatgcggcaagaggaatagcctgggcaaggtggtggcgagggccgtgacggcgaccactgctccattgagtagcagtaatagcacaagcacaaacaggcgccccgtgacggcgaccacgcccttccacatgatcctcaggcactcaagggccatcctcagatgatccatctttctttctttcttctttggatgatccatgacaatgggtgagaagaagattcttatttaatttgcttcggctcaaacatgtctttccctagctcaactggtgtagatatatagtttggtgttgtaaattcctctgaataaactgttcattcgtatt

SEQ ID NO: 25796 - DNA, 577 bp, Zea mays
  Clone ID: MRT4577_123538C.1
aacaaataatactctcatttcatgcttacaatatgtttataacccaaatgtaaattataacaattaggaagaggtgaggctgcggatgagaaggccttcgaaggtgattccaggtccgaaagctaagccaagtccccactcttgtgctgcgtcacctttcttcttcagctcatctctcatatactccatcacatacagtatcgtgttgctgctcacgttcccgtaatccaccaacgcccttctgctgctctccagcttctctttctccagcttcagttttgtctccagacggttcagaatcgcaggtcctcctggatgaacagcccagaacatgtcattgaactccatcgactcatcgccagcctttcccatcagcttcttgcagaactcttctatgttctcctctatcttctgcgggaggtctcgtccaagcttgaagtttatgccttcctcagtcaacctcccctcgatcacgttctgtgtccccggcaagaactgctgaaccgcatagtgcagctccatgaaaggagcttcacactctctcgggtcagctccgatgatcacagcagctgcacca

SEQ ID NO: 25797 - DNA, 115 bp, Zea mays
  Clone ID: MRT4577_123539C.1
tcggatccctgaaacgggcggcgcgggcagaatgccccttgcacggcggccgcgggacgtgtaccaggaaaccaggggtggggagagcagtggtgaagcctacagaatgcaacag

SEQ ID NO: 25798 - DNA, 327 bp, Zea mays
  Clone ID: MRT4577_12353C.1
gaccactaataggccatctcaattgtacaacgcacaggatgatgtggtacgacagaatgcagggccgttggaagaagcggaattttcacttgcaccctacctcttcagatacaaatctatgaacaagctgtgaaccacacagatgttagttcatcattttcctaaaaatccttctttttgaaggatttcaacaataccagtcgctgaatgaattggcacgtttcgaaaccaattggaacaagaaaaaacttagggttaatttgggaaccccattactttacaggctttttaatttttaagggaaattagaatatctttcctcagaaa

SEQ ID NO: 25799 - DNA, 504 bp, Zea mays
  Clone ID: MRT4577_123540C.1
ccccaaaaggcgaaagaaccatatggtacactgttatacaaccccagcctccaactatgaagcactacatcaagtcattaaggacatgaactcgaatcaatcaataaatcctcataaaagtccttcaacagttatctaggaattctaggaagtgttttcgtcccaaacacaacggcggggtgcgtgcgcgtgccaacacatacggcattatgaagctgtcccttgagtagccactagatacatcaatcctttctatgacaagtcttggtaagaacaatcaggttaccttttgtacaaacttttctcttattctaccagggagtacagctacaagaactaaactttcttttggatgccatgtctggggatgaggaacatggcctcacaaaaatcagctccgtttgaaaccccaacccactttttaggggctagtttgagaactatattttcccagggattcctattttctcagagaaaatgattaattttcctaaaaaatgaaat

SEQ ID NO: 25800 - DNA, 344 bp, Zea mays
  Clone ID: MRT4577_123541C.1
gacaaacattctctggaatacggaattgactcgatcgagatgcatgttggagctgtacaggcaagcaatcgagcgtcagcagatcatgatcttagtgggaagaagggaaacactctgcgcagcggtcaaacttattgaacgagttggagcaaaggttgttgaatgtgcttgcgtaattgaattggcagaacttaaggcgctacacgaacaaggggacatgccagcactgtgtctcgacgaaacacatgcttgaccggaacttgtgatttaatacctcacagagttagagctagagctggagatgctagctgtctggaaccaccagagtactcgatgtatgctat

SEQ ID NO: 25801 - DNA, 483 bp, Zea mays
  Clone ID: MRT4577_123542C.1
attcggctcgagggcatacaagacctttttgctacgttccaaggccagaagtgctgatggcgacactggacaagtgagttggcgataagacgatcagactgatgactgaccctgacattcttggtacacgtggaagaggcctaattaaaagcgtgcagcggggaagggtaactgagtattgctctcacagctgtaaagtacccccaattatcattgcgcctgaaaagaaacctggtgaacaatctgtgatttgaaggaagatgagacgaagatttgatccatgacgtcgaactgtcaattacggagataaagcgtggactagcggttctggtatgttgaacctaacatctccttaagtgcttacctttgctagaaatctgaatctctacaccgtattggtggctgggatatccacgaacgcttagaaaccgttgaagtctcagacaaccatataacaaaagagatgcgctgctttcgccattg

SEQ ID NO: 25802 - DNA, 1708 bp, Zea mays
  Clone ID: MRT4577_123543C.1
tgggtacctcgaggccggccggcatgccatcaatggctggctggccgtccgtgattgttttggaacgggcagcgtgtttggttggtgcctgtgctgtgccgccgttcgtctctgggtagcgtagcgacggcgccacggcggcttccggctcgtgcgcgcgcgcgcgtgtccgggcgagaagagctgccaagggatggaggcgctgaggaagcaggcgagcaagttcaaggagcaggtcgccaagcagcagcaggctgttataaagcaattcagtactactggctatgagcggtcagattccattgtaattgatgaggttgaactacagagacatcaacagcttgagaaattgtatacttctactcgttctgtaagggatttccagaaggacatagttagagcagctgaaggtttggtgtctattggaaacaaacatattgaagtgggaacaaaattttctgaggactgctatagatatggaagcgaaaataatgcaagcgacgaagcccttagaaaagcagcatcactatacggaggtgctttgagaaatattgagaaagagtatgaagatttcaacagaattttatcttctcagactatagacccattgagagcaatggctatgggtggacccctggaagatgctcgtggtcttgcacagcgctatagcaggatgagacatgaagctgagatcctctctactgaaattgctagaagaaaggcacgggtaagagaagctccaattgctgagcacactacaaagcttcagcaatcagaagctagaatgatagagcacaaagcaagcatggccgtgttagggaaggaagcagcagctgcacttgcagctgtcgagtctcaacagcaacgagtgacccttcagaggctggttggcacggcggaagcagaaaagttattccatctgagattagctgctatacttgatgacgttgaggcagagatgtcctctgagaagcaaaggagagaatctgcaccacctatcatatcttcacataagcgtgctgagaaagctcagtacttccttgctgaggtaatgcataatttcaatggaaccacggagaaggaactgagcttaattgttggcgattatgttgttgttcgtcagattgctcccaacggctgggcggaaggagaatgccgagggaaggctggctggtttccggctgcctatgttgagaggcgcgagaatatccccccgaataaagttttccctcaagtataagatcataagaggggtcatctgtttccactgataagcagtttggtttggcattgaggagctgcaaggctgtatctaacttctgattggtttgatgctccgtatggcgtatcttgtgcatcctatgttcttgtggtggtctagacttggaataagatatgtcggcacgtgctctgcgcctgtgcctgcgcgcacattgatgaagatgtcgctttgcatgtgtccgcagtgtgctactgcttgcggcagcgtaggtcatgttgaatgagctttcctttactgacagatttcgagtgtaaattggttcttgcacttttttttcgttagggtgtatcagtagttctgtacaatatgtttttaatgagaccattcggccatcagagctttgatctgtctcctaactgcaggattttttttcagaacgcttatttcacatgttagctgtcagaagttgattttttttttctttcc

SEQ ID NO: 25803 - DNA, 386 bp, Zea mays
  unsure (1)..(386): unsure at all n locations
  Clone ID: MRT4577_123544C.1
aaagaaaaggagccccggttatgggaacaggacgaagggggggcccccagggggggcagaataaaaacagaccccccggttttacaagacgaaacgcaagaagcgccggcctgggataaccctagccggggagggccccgggggtggaaaccaggggggccccccccccgaggaccccagggggggggacggcccaaaacaaaagcccagggggtccacccacggaaaccccgccggggggagaccagccaaccccgggggaaaaggggcgggatcccccgacggtcgcgccctacttggcgacaaaatgggacacccccttgcccctgccccttctcccgggggcggcnacctggcccggaaggccacccccaagcaccgggggg

SEQ ID NO: 25804 - DNA, 141 bp, Zea mays
  unsure (1)..(141): unsure at all n locations
  Clone ID: MRT4577_123545C.1
ccgngcggggatccccagcggaaagcggaccaggaccgggagntgaagcggtgtnttccccctcgnntccgtnantggnctttaattctctctttanacatatcttggnntttaattntctcatcaccagcgtaagaaaaa

SEQ ID NO: 25805 - DNA, 534 bp, Zea mays
  unsure (1)..(534): unsure at all n locations
  Clone ID: MRT4577_123546C.1
tnntttttttttnnttttttttnntttttttgtttttgtttgtgtttttttttttttttgttttttttttttttttttttttttttttttggggggaacacaagggaaataaaattaacacccaacaggaatgggggggtcaagggaaaaaaaaagttttgggggggttgggccaacggaacccaatggaagggaattcggggcaaaaaaaaaaaccgggttccagctaaaaataaaaaatactggcccgattaggaaggaccacctaaaaaaaaaatacatttactagcccaaaaaaataggacccctgtccaaaaaaaaaaatgcccaaagggggggcccaagcgggcaaaaaaacaaaaaaaacccctggtttttttttttaacaaaaatctcgaaaaaagaagggaaataaacaaaaggtaccgggtttgaggcatcgaaggaccccaaaaaggacggaaacccaatcttcaaggcaatgaggccacttaaaaactctaatttttgaacacgaataagggaattcaaaaa

SEQ ID NO: 25806 - DNA, 404 bp, Zea mays
  Clone ID: MRT4577_123547C.1
tctaaaaaaaagaaccaaaaacaattgctgataaaataagatgaacctagagaaggaagcaaaaaggagaaaaaacatactacagggaaccaaaaaagacaaggaaacaaaacaatagtaaagaaaaaaaaaaaaaaaaaggggggggggtgtggggggcaccgaatttggaagccgggcaacccgtttggagcttttctttgcccccgccataatagttgggccggcctttgctctctcgggcgcctgggaacccctgggggcaccccttgtttagcccttggaatcaaatcccctttttcccgcgggcggtaatctcggatgggcccctcatggattcccttcctaacggtcttccccctgcctgggctgtgggcaccccccctttgaggctctattaaccc

SEQ ID NO: 25807 - DNA, 496 bp, Zea mays
  Clone ID: MRT4577_123548C.1
gtccggaacaggtctccgacatagataactaatactacaggctgccgatctgaaatactctgctgatgaactaatgcgcataccccttcattcatgtcgaaattggcccttgtacagacagatggtagggcattatctagggtaagcaaattactgatatctgcatgaccaatgactatatcactgcataatgtcacactaggatacctgtaacgtctgactgaacaacctcggtctctgacttgctaactcactacatgaggtaaggtgcctatattcgcttctgctgggtacctgaggaaaggcactagtaagcctatcaagcgtgatatgcgagcacctgagaccgacgcgaccctgacatcacccaagatctcctacgtaccattgcatacacctccaaatgaatcctgctcctgcaagttaagaggcaggtccacctgcaagagggactggaaaccgaatgaactgacgatctgtatctccttcatttgct

SEQ ID NO: 25808 - DNA, 575 bp, Zea mays
  Clone ID: MRT4577_123549C.1
acccgcgtacggattagctatattagcatacggcacagcgcacaagaaccctatcgagaccatgagggtgtcagctcgttgccctcgatcacctgggtatcgctaccaacgccaactgcacgcatacgaagacgcgaggatgcggatgacacccaccgacggcagggaatataccgtacgggaaagaaaaagacaccggcggtccacctgccagatccaaggcaacttacaccggcaggccacctgacagctcctgtacaccggcacaccaaatgcacatgagcgcgcgccggttcaaacgccgccactggaaaaacactagcctaaccaaactaatggctagcactaatccagctatacccatgcgcgggccaacagaagaggccaagaccgagccacctgcacaaaacctgcggagctggatgacacagacacgcgcctggcgtggagattaagaggcataggtgcagcggaccgcacaccctactggtacactagccagcgtcctagcggcagcactgttgccagcatctcatgcatgtggagccagatcaccggtaccaggcgatcttcgg

SEQ ID NO: 25809 - DNA, 306 bp, Zea mays
  Clone ID: MRT4577_12354C.1
gacccaaattataggagttccatttaggtatcaaaagtgtacaaaaaacgccacaccacagtaacaatggcttgtttaggtgttttggtgcaccacgataccatgttaacaacaacttttacaaataaataaacacgtatttgtataggccaacgagggcgtgagtccatcccaggaagttctccgtattttgtaggaagtattacacaaggttttgccggaacaagggctgcaccttatcaccagtattcgcgttactgtcctgtgccttccataggtccttgaaagaggccgcgctccttttaa

SEQ ID NO: 25810 - DNA, 193 bp, Zea mays
  Clone ID: MRT4577_123550C.1
gccagagccgatcgtcaggcagcgcacgatcacggagagatcacgtggctctctctcactagtgacgccctcgccgcgcgagaccgactcgcgtgtgccggactcaagcactacgacgacatggcgccaagacacagactgtgtgtacttcgcgctgtcggcctcgtcagagcgctcagagctgctcgtcacg

SEQ ID NO: 25811 - DNA, 974 bp, Zea mays
  Clone ID: MRT4577_123551C.1
ctgcgattttagtattcccagttctctatccggatgactgcaaaatcacaggttgaactgttttatatatctttcagtttggacagtcatatttcacattcattggaaacagctaacctgaacgctttcaaggcataaccataaccttttaagtctttgtaattttttctcctgcaactgcatttgcatttttaaatacatcacgtgtcccatagtctattagctaggtgctaaggcaaataggaaagtatggctatttttatatgtgattttagcttttcaatgcagcaactacaacttctttgcaactctattttccatctcatgttttcagtactttttttgactgttggtgatgcatttatgtctagactggactgcagagagaaagttggggcagatttccggcttcaatttatgtccttatcagtactacaacagcaacggcgagcacaatagcaaagcagtccgggccttgtggaggagagcctccacaagaagtgcctcgacgggttccctacctctgccgccggtactgagtcattgacgggggactacatttctacctagtttggggcgcaactctccctaccaacgctctatttgtattcagctaaccaatacaattcgccctcttcgttaggcccagattagtcatgttactagtatgatggtgatgctgaattcagagtttcagtgatctttgagccatgaaaaggacacgagagagaagagcgcacacctgtcatcccgtgtcaagagttcaggtacccacccggtgtgtgtgtgtgctagaatttgatgcaccgatcgctgccaccaccgccagtggcgagcaggtttctctgcaccatgcgagtgccttcacggcggccatgtggtcctcgagcctatgcagccattggttgtggcccacagatggtagggacgatgccatccacacatcccaaatgtgcagaaggttgtcgttgcct

SEQ ID NO: 25812 - DNA, 384 bp, Zea mays
  Clone ID: MRT4577_123552C.1
gattaagatctgggatgctcttgggtcacggacatgtatgcgtacctatatggggcactcaaaggcggcaagggatatatcattctccaatgacgggactaagttcttgagcgctgggtatgacaggaatatacagtactggcatactgagacagggcaagtgatctccaccttttcaactgggaaggccccatatgatgtgaacatccaatcctgatgaggataagaagcatattctccttgccggaatgaccgataagaacattgcgccatggcatatgaaatcagggcagattacacaagagtatgatcaccattaagggggtgcgaacaccctaacttttggggataacaacaggacatttgtgacctactacgatgaca

SEQ ID NO: 25813 - DNA, 170 bp, Zea mays
  Clone ID: MRT4577_123553C.1
accgatgcacaattcccgaatcgacgcacgcatccacgcgtgcgtatagcttaaaattggagcttcatagaaacaaacttagacacttgaactaataagggtgctgtcaacaattataggacccctcccctttttgactgctaaataaaggctttaacaatgtgcagaca

SEQ ID NO: 25814 - DNA, 119 bp, Zea mays
  Clone ID: MRT4577_123554C.1
aacggggtgcttggatacatttcagtgagtactttgctgctccttcaaacaagtgctggatttgggctacaacatcctttggggggtattggatgtacaaactactccctgttttagga

SEQ ID NO: 25815 - DNA, 389 bp, Zea mays
  Clone ID: MRT4577_123555C.1
ctacatgtgatcaccccgtggcacaggagtgatcctatgactggctgaatgagtaccgactggcaaccgattggcagagacgccttcaccagacatcaatgtacgagaacgttgaggagaaccagcatgccctccgtcagctcctattctgatgccctggtgctctccagtacatgagcggagggagcctcatactggagaccctgtaccagaggaccaggagacctggccttgtcgtgatgcactatccgagggaggcgtccgccctgtcatcaaggttggctacggcaccaccaaggatgtagcctctgtgcaggggaccaccaccctttgccatgacgaacttggacagctctgccccatgtgatgcagaggccggcgcccgcttt

SEQ ID NO: 25816 - DNA, 293 bp, Zea mays
  unsure (1)..(293): unsure at all n locations
  Clone ID: MRT4577_123556C.1
gcccacgcntccggngcttcacactcaatcttttatcctttatcaccccccactctncnaaggaccctagttcacatttttaaatgctccacaacacaaaccaccacnagcatattcctaaccgcccaatactacctctcttataaccatactcacacaatgccttcaagatcactttgctccacaacattatctacatacagtctctaaaagaccttgtcatccttcacatattcctcctcatcgacgaagctcaaatgttacctatctctccctctacttccacattatac

SEQ ID NO: 25817 - DNA, 261 bp, Zea mays
  Clone ID: MRT4577_123557C.1
cttgtttcgattaattacgtttctactaatttgaaaactaaactaaaattaagttcggtgatcaataatattttctattatggttcatttaaaggcaggacacggtcagctcaacgagttggtaatatgcgtgtaaaacaacataaacgtacactttctagagatggaaatcaccgaaattcagaatcagatgaatttgacgaacttagcacttctccaaagcaacaactagttgtttctggagctgttacaaagggagac

SEQ ID NO: 25818 - DNA, 437 bp, Zea mays
  Clone ID: MRT4577_123558C.1
gcagggagccgggccggagtgtatagtgccgggtcgacgagctcataagtcggggggcggcctgtcgtttactaggttgtttttacgactatacttggcctgagacaacgagcttgctcaatgcagaaagcattacagaatctatggaactctctggtggaacggcattgcagctgctaccgtgcagggggctatgatagcgcgcgacagggtgacttggactgcgtccacgcctgacttgagacacaagcctggggatgatcaaatacaagcgcaggttgactgatagctaacactgacgaaacctaggcgtacaaggctaccctaggacagcctgagggcgttagtgatgccaaggaacgagcaacacacgcacatgagcctcatcatgcaaagctgccaaaactggaatgatcacgagcaagaaccccttgccg

SEQ ID NO: 25819 - DNA, 524 bp, Zea mays
  Clone ID: MRT4577_123559C.1
ttttttttttttttttttttttttttttttttttttttttttttttttttttttttttttttttttttttttttttttttttttttttttttttttttttgggggaaccaaacccaaaaaagggccctaaaaaaaaaacagggttggggaataaaaaaaactaaaagcaaccccccttttttttttcctttaaaaaggggggggccttttccggggaaaggccccaatccaaaaaaaaaataggggggattaaaaaaaaaacaaaacctgccaaattgaaccgacaaggttttggggggaaagggtttagggtttgaaaaacccaaagcttggggccaaactggaaaaggaaaaaattttagggggaaaaaggggtgcttttgggccaaggagggggggggcaaaaaaaaatttggacggaaaaaaaaaaaaaggggtaaccccccggaggtgtttacccccaaaagtaacccttggggaccccctttccaaaaaaattaacaagccccccccgcttttggggg

SEQ ID NO: 25820 - DNA, 2034 bp, Zea mays
  Clone ID: MRT4577_12355C.1
ggtaccgttgagtcgatctgggaaccgaacacgaccgtcgccgtctctactcccagtcccagctgccaaggtcttcgtcgcctcgtcgggctcgggtcctttgccggcgacgagcgcgtgcacaccagaagaatacagtggaagtggtatgcggttgtaaaacgatttcgattattccaagcggccggcgatggctcggagcccctgcgacctccgcctcctcctcctcgctgcagctgcagctttcatctacatccaagtgcgcctctttgctactcagtcccattatgcggaccgtcttgcggaagcagaaagatctgaaaatcaatgcaccagtcaattaaagtccttgatcgatcaagtcagcatgcagcaggagaagattgtagcattggaagagataaaggtacggcaagatgaagaacgtgcacatctgaggattttgataaaggatcttgaaaaaaggagtgtgcagaagctactagacaagaatgtggttcccgttgctgctgttgtcataatggcttgcaatcgaccagactatttagagagaacagttgaatctatcctgaagtatcagacatcagttgcttcgaagtttccgctttttatatctcaggatggagcaaatggagctgtgaagaataaagctttggaatataaacaaataacatacatgcagcatgtggatcttgaacctgtgcaaactgaaaggccaggagaattgacagcatattacaagattgctaaacattataagtgggccttggacaacctattcattaaacataattttgctcgagtaatcattctagaagatgacatggagattgccccggattttttcgactacttcgaggctgcagctaaactacttgataatgacaagacgattatggctgtttcgtcttggaatgacaatgggcagaagcagtttgttaacgacccaaaagctctttaccgctcagatttctttcctgggcttggatggatgttaacaaagtccacttggattgaattgtcaccaaagtggcctaaagcttattgggatgattgggtgaggctaaaggaggtacatggacatcggcaattcatacgcccggaaatttgtagaacatacaattttggcaagcatggatcaagcttgggacagttcttcgagcaatacttggagcccattaagttaaacgatgttcaaatcgattggaattctgaggatctgagctaccttagggaggataagttttcaaccaaatttggaaaagaggtggctagtgccactcctctccgtggatcagatgctgtgttgaaagcccacaatatggctgaggatgtaaggatccaatacgacgaccaagaaggtttcgagcagatagctcgtcaatttggaatattcgaagaatggaaggatggcatcccaagaacggcttacaaaggagtggtggtcttccggtacaacagtagtcaaaggcgaatatttctcgtcagcccagattctcttcgtcagctgggggtgtagcatgttgagaaggtagatttttacccttggaatggcaaatatcatggaattgcttaactggtttctgtgagcatggaggaaccgggatgcatggtgaagaaattttttttgagaagtgattgtgttgacccaaggtactgagtagtagaagcatgggcttggtttataggacatttgcaagatataatacatcgttgttatatctttctccgcatccggaaatgtttagtcagtatgggacttgttatccttgagtgtatttagggtttacacgatgcagttgtatgcgctcaaaagagtgtagcaggagctcactagctgacctgacgctcgatcctttttggtagaagaaaggtgtatctttatgaccaaatttttcttattgggcatcttggaatattaagatggaaggaaatcttgtgcataagtttgttgtactaatttgtggtgacttcgcagatgtgcgacaagatgggagcgtaagcatccaatcaattccatcgagtttattgagc

SEQ ID NO: 25821 - DNA, 687 bp, Zea mays
  Clone ID: MRT4577_123560C.1
attgggtacctcgaggccggccgggatacgcttcgcccgactctgcacgccctaggtgcgatgtcagtctcgggtgtgaccctgacctcctcagacaagcccttcgccggcgtgacatccgcctcttcatcatcgggacgctgctgtcgtgctcctgacctccgaatatcgcggagaactctacgagaagggcgctgcgcagcaaccgaaggaccaggcgaagccacacaagaaggacgctggccatcacaaataatgctcctcgaagaatatgaagacagatgccggcgagtcaggacaagtacgaccgaaacgtggagaagatcgacaacgagaagatcaaggacaacaatgagcacgacgatgcccaccaccacaacattgtgcagaacagcagcactagggacagcgactgagaactgcaaggcgcatgggcaacaccttgatggatgttggatggagcgaccacataccagctcctgtgcgatgatgcacagtatcaccggggtcatgtatgtaacgcctattataatcaacatagggaacagaaatcaaccgtccgcggatggatagtgtaccatgtcatcttgaacattaccacttaaaggatggctgctgcactgtgctgctagctagcttacactaacagagtggacatctacatgctcgacaggaatggactccgtg

SEQ ID NO: 25822 - DNA, 332 bp, Zea mays
  Clone ID: MRT4577_123561C.1
ccgggaacaaacccctgttttttggcacttttattcactgggtctagcaccgaatccaaaagagtttgggggctccatataggccacggactgccaggaacacatttccacgtccggcctttttgccatgccgaatgaccagttaaacacctccgggggccaccccctcacctggagacttggttttctacttgcagatcagcccccccccccccagtacccctcctagagacccgtacgggacacacacgtacatgggctgcccctaaacacttcgcacttaccccttcgcacttacgcaaataaaaaatggggggtttattttccaacaa

SEQ ID NO: 25823 - DNA, 612 bp, Zea mays
  unsure (1)..(612): unsure at all n locations
  Clone ID: MRT4577_123562C.1
atattcngcaccaggacatggggatgagggggggtgctgatttcattgcagtcgcatggggccaaccgggtgggcaggaactatccccaatacaagattgtggtgcttgacaagattgagtactgcgccaacctaaagaacctcaatccttcacggggttcaccaaatttcaaatgtggggggggggagattgcgagtgctgacctggggaattaccttctgagcaccgaggcaattgagaccatcatgcgctttgctgctcaaacgcatgtggataattcttttggggattcatttgagtgtcacaaaaaacaatatatatggcacccatgtgcttcttgaggcgttggaggtgactggtcanatcaggaggggtattcatgtgagtaccggcgaggggtgtggtgaaactgatgaanatgctgtggggtggtaaccatgaggcgtcacagctgcgtccaacaaatccatattcagctacaaaggcgggggctgaaatgcgtgtgatgggtacgggaggggttatgggcttcctgtgagtaccactcgtgggaacaatgtggatgggccaaatcaatgtcctgagaaactcattcccaaattcattctttt

SEQ ID NO: 25824 - DNA, 479 bp, Zea mays
  unsure (1)..(479): unsure at all n locations
  Clone ID: MRT4577_123563C.1
gctatggggtnntttatgaccaaaatgtgagaagggagggtgtcaatgtgtccgcctgtgggaagaaatattctctgattgcgttcaactgcgctgcgccatccgacgcgtcattcgatgacaangatacctgtgcgatgcatgggtgggcgctctcgcgccgagattgactagtgttgggaccatgagtaaaagatnnattgagcgagcctgcgtgagaatnntcctgagttatgggtgctccctgtgtgagtctgcgtttggtgctgagtcctanncccccnatgggagaaggggtgggggggagagtgacaggggggtgtctcntgtacgtttnggggcaaataaacttgtgagaggttttgggagaagaatgagtctcgatcttatatgccgagctcatcaggtgtgtgaaagtctatcttctatcctgtgttatcaggtatttttgggtctctgatctttacctgacgatgctg

SEQ ID NO: 25825 - DNA, 412 bp, Zea mays
  unsure (1)..(412): unsure at all n locations
  Clone ID: MRT4577_123564C.1
ggccccaacgaagcttttttttcctgcgctttcgtacanttttttttgtttttttttttttttttctaaangggaagnttaacntaaaaaaaaaaaaaaaccattactttggaanatacccgcctggaggtttgtgtacggggggccttcatccagcggaaacttttccacagcgatgggcaaccttgcagtgcaaaagcccttggggggggggccttttccaacgcaaaccatgacttgnatcctttcccctgctgcccttgccgggcttttcagggggggagctcacccttaggatggggattgcttgttacatgcaggccatgtaaataatcagggggcaccacccccagtgggaaaaaacaggattctttggggnaaaagctttttagtttttatgagccgtttattg

SEQ ID NO: 25826 - DNA, 356 bp, Zea mays
  unsure (1)..(356): unsure at all n locations
  Clone ID: MRT4577_123565C.1
ccaggaactataattgtactatacttgcattgaatagacagcctgggggggaaaatcccttgattgttttaaaacggggatcactactacaagtaaaaagaacacctttttaactggaaaattacctgagtattttcacactggaattacaaataaggcactccctcaagggtgaacgatccaatccatcattttctaagttggaatccacctggaagacggatagaaggctgtggaaaacatccactccatgaagcttggggaagaactgaggatgatcttgaatccgaatggcctcacagcaggggaggccttctgggagtttggttccgncccgagaaaaaattgaacccaaa

SEQ ID NO: 25827 - DNA, 371 bp, Zea mays
  Clone ID: MRT4577_123566C.1
acccttcaagcgaaggcagtcacttcgacggttgtgagtcatggactgctcctcagatacacaggggcacatgaggaacataaatacaccagatgtacggacacgcacggagccagggcagacaggaacaacaggggtgctgactgatgcatggtgaacgcacccacctgatgcccgctggtcacctatgttaaagtatcccgtgcagagtgatccagagcttctgggctgaaggcgacggctcattgctagggcatgacgccgtgtcgagcataaggaagactggctatagctgtacgccgggagagattgctatgggttcccagtttcacatatcataccatccggtttgatcatgcgtaaaggctgga

SEQ ID NO: 25828 - DNA, 456 bp, Zea mays
  Clone ID: MRT4577_123567C.1
caggtcgctgtgggcggacggggcgctcggctccgttgggtagctacctagtgagcgcctcggccgctggtatgagggcactgtgcagtgcgtgctggaccactctgtcgcgctgtggttcgtcggggccacgttcttcgggctcactggcctgcatttgaagtgaaggtctgtgctctgggaaattgtacgctggcatcttgacgtgtcttatccctgggcatcttttcattgaggcattgggtaactgacacaccaaccctgagatgtatctactctgactggagagatatgcttgtgttggcttacaatctgtgggcggggtgggtcaatgggtaacagaacaaaggcaggctcttttagtactgcggctgcttcttttcactgtcttgagcgatagaaaagtgcaggcactcatcaaggattacgtgagtgacagatctgtatttatgtgca

SEQ ID NO: 25829 - DNA, 350 bp, Zea mays
  unsure (1)..(350): unsure at all n locations
  Clone ID: MRT4577_123568C.1
ccttncaaaaccacaaacaacacacgcatttcgacttgtcaaaaccggcaaaaccgggggaacctagacgaactataanctatagctgccccacacccccttacgttccataggccaaagccattctatgtgtcgaataatctgcccaccctgcaaacatgccacccagacaatatctgcatgtttattaaaaacaacaaactattcatgaagaacaaaacaaccaacaagaaccttgaacatccttaggaacgtaggccagtcactcacaagagtactcataaccgtttgaagaacggaaccggaacagactccaatccaaagaccaacacctgccaagaaaatccaca

SEQ ID NO: 25830 - DNA, 705 bp, Zea mays
  Clone ID: MRT4577_123569C.1
ctccccctccccctcggcgcacgcggccggttcctcccgtacgccgcggtgctcggccacctgtccgcggcgtcgggcgtggcggccacgcaccatcaccacctgcacgtcgccgaccacctcctggcgctcttcggcgccgacgccagcgccaagttccaactccaggtcctccaccgccacggccaccacggcgccggcgccgacgccgggatcctgctgagcgggtgtcagacggacgagacgtcggcggacgtggcgcaggatgacgacgcggcgctcggcggcagggcgtgtggggcgttcagcgccgcgctgcaggtcgtgctggcggcgcacccggcgccgttgacaaaccgcgaggtggtgtgccgcgccagggtggtgttgagcgaccaggggttccaacaacacccctgcctctactgcagcgacgccaacgctgacgcaccgttcctgggacaggacggcaccaaggccaagagcaaatgagcaaggagaggggttccatgcatgcatgatccacacgctcgacactcgcttgcttgatccgctgcaatttatgcgtacgattattattatctctacaactattaaaaggggagtgtagaccgatactgtgcccccgcctccactccgcgcacaggctgctccgaccgcaaacatcgcaacggcgccaaatcgccagcaacctccgtggtcctt

SEQ ID NO: 25831 - DNA, 489 bp, Zea mays
  Clone ID: MRT4577_12356C.1
ccggccgggaaaaatgcccatcatcaacgccgacgtccctcccacctcaaccgacgacacccactatgtcgtctactttgcctcaggcgaaccctcatggtgccctgactgccgcaatgccctccctgcgctgaacgccgtctttggcgatgcatcagcccccaatgcgcatctcgtcatggcgggttcgcgagaagagtggaggggaaatcctgacaataaatatcgcaaggcgccttatgacattcagtgtcttcccactgtcgtcaaggtcaaatacggcgaggagattggacgtctgggagataatgagagtcagaatgagtctgatcttcgcaagcttgtgaagctatgagggaaacaatcctggcctgggttatggtaaattggttgcgggttgctcatgaacgataaagcatgggcagaaatggccccagcacgtataaaatcccggcatttcagaacatgtggtcatccccttgactccca

SEQ ID NO: 25832 - DNA, 560 bp, Zea mays
  unsure (1)..(560): unsure at all n locations
  Clone ID: MRT4577_123570C.1
ctcccataggttactaataaaaaaggggggtggtaaactaccttaccattacatagcaagggccttacagaaaaattagcatgcaatagaggattctaaggaaaaattcatgtcttcaatgacgggacagacaactggattctccccaccnaggaggggagagaaactccaccctntttttctaatctagaaccacattctaaagtcatgcgagtggatccataaccattaccttagctgtacataaggctttgtaaaaaactggcgacatagtatacaccacttgctactacaggacaacctatgcaaagtgtaaaactggtatactagccgagctcacggtcatgatcagttcaagactctcgcatgaataaaatatgaaactacattcaattttgacatacgcattgcatgggaaaatatattaatctagttctttatttttataatgaatggatattaactaacattaataattgcttaataaaattatccaacattattaaaacaattatgaactttaactcccattgtttatcagttttacacattacatgaac

SEQ ID NO: 25833 - DNA, 362 bp, Zea mays
  Clone ID: MRT4577_123571C.1
aatccaaagtagggggggtcaggctcattcattagagttgaatggaccttaacatatccgtgccaaaaaccacaagtgagaagcatatgtagcgacagatattgcagtcttcacgaatcaggcaggaaagtgctgatccttacaccacaacagaactttgctggctctgacaaagaacccacggccaaaacagggtcaggagactgtcgctacccgaccggtttcgccacacattgtattcttgggccccaatgaattactagcctggcctgtggacgaaggccgggccaacctctctgtgctggagcttggccatcccttgctgctggaccgtgctgcaggactccctgaatggtccttct

SEQ ID NO: 25834 - DNA, 318 bp, Zea mays
  Clone ID: MRT4577_123572C.1
ttgtataaaaaaaaaaaaaaaaaaaaaaaaaggggggattataaaaaataatcggcataaaaacacaaaaccaaagaaaacatatgaagaataagcctagtcaaggcggggcggcccgtttacagggtccagtttttcgtccgcggccacgcaacttaatacttttttattggggggcccaaaactaaattacgtggccgtcgtttcccacccgctcgactggaaaaaccttggcgtcacccaactaaatcgctttgcacacaattcccattttcccggtgggggtaatatcaaaaaggccccccccgttcccctttc

SEQ ID NO: 25835 - DNA, 579 bp, Zea mays
  Clone ID: MRT4577_123573C.1
ggagcctcccccagaggttgtgagggcgccggcagctgagtggccggctgctgggaatgacgaggagtgccggtggagggcgcaggagaagtggtgctgcccatgctgccaggtgcagtgagcgcagcaagggcagcagcaggtggagccttcgccatggtgagctcctcaagagcaagatcgtcgcggacctgcaggaaactgggcagggggtatgtgcgacgaagatgcagacccagcgcaaggaagtgctcgttaagacctcggatgatgttgaggacaagcgttctatcggagacgggctcgccaaggtcgcgaagatcctcggcaagctttttgtagcgacggcagtattcggcaacaggaaggtcgccctgggaggagcggaactcttggtcggcgtagagagcacgggtggtgcggttccctaggaattgtgattcgatagagagccacaggacacgatctgtgacgccgcgctgggatacagcgtcggcgaggtcgtcggagatggtgttgaggatccaagtacggacgacggcgttcatgcgaaccaaatcggggaggtatatgcagtga

SEQ ID NO: 25836 - DNA, 600 bp, Zea mays
  unsure (1)..(600): unsure at all n locations
  Clone ID: MRT4577_123574C.1
cgggctcgacgacgctcactaggtcggcggtccgcccttttttctttctctttttctttttatgtctcggatattttatttaacatttacaancccagagggcagtggataaaacatgaaaacacgtactagattattgtgtacagagcanttatcatatatatatccatgtactgggttgtgcagtcaaagggtaccagaacatttcatgtcgtcagaaaaaataatatgagcttcgcggtttaacacaatccgagggctcgatcctgttcgggggtataaaagaaatatcaagagactctatacgcattggaggagagggggtctgttttctcctggtagttccaaacatgaaagagggatcttcggagtagtgagttatggacaagatatccccaatctcgaatacgagtctctcagaagaccctggatgataccgagattcgttatctttaaaaaaaaccagtgaaatatatgaaaggggatatttataccctatagagcttcggcatgataatcaactatcaacccgattcacgatcaacgaactagaatatcggaaccacattttcgaaataaaaagagagaggagacaacaaa

SEQ ID NO: 25837 - DNA, 293 bp, Zea mays
  Clone ID: MRT4577_123575C.1
ctggtcctgacggtcccacctgggacccttgagagtatcaggtctcccacgtgggagacaagaaatccctgtttaatatttaaacagcagtgttcaccatctgggtccttgcaccccgcactctggcctcagccggctgcacagcggcccctgcatccccttggctgtgaggcccctggacaagcagaggtggccagagctgggagacatggccctggggtctcacgaatttgctggggaatctcgtttgtcttcttaagacttttgggacatggtttgactcccgaacatca

SEQ ID NO: 25838 - DNA, 287 bp, Zea mays
  Clone ID: MRT4577_123576C.1
taaaagtcatgccgggacatgattcttatattgaaccttttgttcactctatactgtatttgttaactctaaacagcaccgccttctgtttggtcatactcaaaactggcgaaaaggctatggtcgttcaacgaaaaacttgtcaagatctatgcttatatgtcacaaaccacacccgccagcgaaaaggggggaacccccggttccaaaaacgtttttcaaaacaaggggcgggcctatatgggggttcgatttttactttttgtgcatgtccccttgggccccat

SEQ ID NO: 25839 - DNA, 367 bp, Zea mays
  Clone ID: MRT4577_123577C.1
ccggccgggactctcccccggcctcctcccgcctcccactatctcgctcgctctttgccagatgcctcgcagcttggatcttctcatacctcggcgaatagaattaatactgcacatccctccagggcaatgtgcacaccagattgttgccaagttctgctacgtgtggtgtcataaacatgcaattgaccctaccgcgctatacactggctcttcctaccttcatactgatcgcgccaatgtctactacacctgaagtctcctgtatccgatttgttccccgcactgttctcatggatcttgcgactggaaccatgaactgcgcccgcacctgactctataaccagatcttccgccctgacaactt

SEQ ID NO: 25840 - DNA, 828 bp, Zea mays
  Clone ID: MRT4577_123578C.1
gggaagtcaatgcttcgagaagaggtgactgacgtggacattgctgagattgtgagcaagtggactggtattccagtgtcgaaccttcaacagtctgaaagggaaaagctgctgctgctggaagatgtacttcacaagagggttattggccaagacattgcagttaaatcagtggccaatgccatccgccgttctagggcaggcctatcagatcctaaccgtccgatagcaagcttcatgtttatgggacctacaggggtgggaaagactgagctgggtaagacactggctgaattccttttcaacactgagaatgccctaatacgaattgatatgagtgagtacatggagaagcacgccgtctcccgtttggttggtgccccacctggatatgttggttatgaggaagggggccaattgactgaatcagttcgtcggcgaccttactcagttgttctgtttgatgaaattgagaaagcacaccaggaagtctttaacatattgttgcaactgttggatgatggaagaatcactgattcacaaggcaggactgtcagcttcactaactgtgtcataatcatgacatcgaacattgggtcaccattgatccttgacacacttagaaacaccacagacagcaaggaggccgtgtatgagataatgaagaagcaggtgattgagatggcccggcaaacattccggccagaattcttgaacaggatagatgagtacattgtgttccaaccactggatacaaccgagatcaaccatatcgtggagatccaggtggattgggttttgaaccgggtggggcggcggtgtgtgggt

SEQ ID NO: 25841 - DNA, 283 bp, Zea mays
  Clone ID: MRT4577_123579C.1
ttaaagtagattgcaatgctaaaacattttcactgatagagtgggacgtggaaacacataagagaattgtctgtacatcatctaggacacgatcagaatgttgcttaatcaccaattcatcatcagattcttggacaacaacttttgcaatattttttcctacatgttaaattttgaaaagggatttagattgtggaatccatgtaagataaattatgaacaacgtctaaatccaaaagcaccttatcctacaacgtttcttgttgctcaagttgatgttttc

SEQ ID NO: 25842 - DNA, 371 bp, Zea mays
  Clone ID: MRT4577_12357C.1
tgtatatctatatatatacgaggtgcctatatgcgcacagcaatgctgtcgtaatcttgttcgtgctcatttaataaacactttctccggggctgcgagagacatgacttatcttatctatgtgtgaacacaaccggtgataggacggtgcgtacggagcacatatccatcagctctaggacagaagcgcacgtgatgcacactgctgtcagcagttccaccgcgacctgaaatctcaggtgatctactctcccgacgccttccatgcacacacaacacaaccactgcgcaagggcacaaataaaaacctatctaccatatttgcatgggacgatgagcgtacacggggcaaagatgagcgtctcgcaagc

SEQ ID NO: 25843 - DNA, 286 bp, Zea mays
  Clone ID: MRT4577_123580C.1
tggctggagggataaggagtggctccgagattcctggggtcacccagggcttcttctgtctctgggaaatagtctggtgaccacatttaggtctcgaaccatccacctgcttctcctctttctcccaaggcctgactatggtacctattagggatgtgatactgataggatagcttatctgggacattactggcagtaggctctggaggccagtccctagctccccttgccccgtatttcttccctgcttccctcgaacccagagatttctgagggatgatcgggt

SEQ ID NO: 25844 - DNA, 468 bp, Zea mays
  Clone ID: MRT4577_123581C.1
attatcatggttttttgtcttttcattgaaaaaaatagcagggttaaggatatgtgttgattgaaacaacaagaatggctgaaaaaaaatggggccggggggggggataaactcaccagggaaaggcatagtctgaccgggaacactaaaaaaagcatcagtggcgattaaaagggggggaaaaaagaggaaaaaatttaaaatttaaaggggatgcccaggatttttcccccggtgaaaccccttggcgcaaaagatatcataaaactgtgcccccccaaaataaaaggggggataaaatgataaaggcggggtttttggggggaaaagggttgattggccggatttaaattcgggggagaaccctggggaaatcaaggggaggggacagggggttaaaggttacaagtttctgaacccgaaagataaggcttttggtcgccctggggggggggagggtgcacaaaa

SEQ ID NO: 25845 - DNA, 743 bp, Zea mays
  unsure (1)..(743): unsure at all n locations
  Clone ID: MRT4577_123582C.1
ccttctatgtctttgctctatgttggcattccagtggagaccataatgcagaggcatactgaaatggttgaaaagcaaggaggtccatcaaacagggacgatctccttactcatagatatgttaggagactggaaaggaaaatacgtcgttctgtttatgagcttgatgatgacgacgctattagtattggcttatgggttgaaaataaccaggattgtgtgttcttctatgaagatttttcggatacagacacctttgtcttgggcatccagacagattggcagctacagcaaatgattcagtttggcagccatagtttaatggcttctgattcaaagtttggaacaaacaagctaaagtatcctgtacatagcatccttgttttcgatcagcacaaaaatgcaattcctgttgcgtggattataacccccaattttgcacatggtgaaatatataaatgggtgggtgctctttatgatcgagcgcatacaaaagatcctacttggcaattgggtggcttcattattgatggtcccttgactgacgttcgcacaataagagaagtattccattgccctgtgctgatcagtttatggcgtatccggcatgcttggcataaaaaatttggttaacaaaatgttcagacgnttgagaagcgatcggaaatgggcaaacgtcttggagatgcaatttctattatatgcagagnaaactgggtgatggttgaattattttgagcttt

SEQ ID NO: 25846 - DNA, 639 bp, Zea mays
  Clone ID: MRT4577_123583C.1
gctctctttcttgctgcctgactcaagagatcccctctggtctccccgtcccccattccactcgccgccgccgacgcgccccgtgtgtatctcacgagtgtcgataagctcgcgacgatgcaccgtggtgagcccactggcctgaaaggacaacatgcacgtataagattagaggcagcccacaacaccgcccccaccgacgaccagcaacaccgtagcgcggtgccgagaaccggaatgaactcgtattccggagatttcttcggcttgatctgcaaggtagtcattggttatccagattcctgataccctgaaagtagcccgtcatcctcttacctgcaacatacaatggcatacagacgagtgagcaccccgagacacacaagacctcactgggacctatctgccattgagttatcatagctagctgccgcccttgataaccgtggaaaactctctacactatgtgctgaacattgccagaaacaagaacctgccggctgaaacaacggctgaggctgtgcaacgaaagatgacgatgtcccttaacttgacccagaagagacactttgatcacgactgaagcttgtgaaggaggaggctgaacctacacctgaccagaacatagactcgcaattt

SEQ ID NO: 25847 - DNA, 491 bp, Zea mays
  Clone ID: MRT4577_123584C.1
gctaacacacgcgtagtgcaagctctcgccacctaagaaaagcgcgcctgacaagcatgagctgcagagccgtgctgttcttggctctgaagattctgatctgcactggcgggcaacgcctgcggaaagtgaccgacaccaacgccgacgaaggacccaccgacgacccctcctgataataccccacccccttcgcgcaggctacagtgcccgatcaacgcgctcaagtgcgtggtgagcccccatgtgctgaggctaagacaaaggtaccgtcgcacggtgacggcaaagctatgacactccctgatgaaacgactcgttgacagccaggcccgcatgtgactatcgacgggcatactggcgaagatactgccaccaagacggtatgagcacatgaagataacggcgcgtgcgaaccagtgggcatagcggatgaagcagggctacctgagcccgtgagcaactctcaggcgatacaccctgatccctgg

SEQ ID NO: 25848 - DNA, 489 bp, Zea mays
  Clone ID: MRT4577_123585C.1
cgcgtccggcggttttttaacaataaaatatatcagaatttttatcaaaattgaacatttcgatttttaaattttgtttatacgtttttgaattatcttcttaaaatgccagtttaaagaacttttttcaggaacaaaatgagtaaacttgggttttaagaagttgagaaatggtttaaaatttttgatcgaaaatgttcagaatattgttatttttggttttttcgattctaaaccatgctgatggagacgtacaagtcttcacgagatttatatatgacgatccacttctcgtcgatgaaattgaagacatcccggctatttttggcgatgatattccacagggaggagtgattgtaagttatcttactgaaatccctaatagaaacaaccagggttgccatttttttaggcaaattttgtgtatgcaagcccaaagtttgcatgcacaactatagcgccttcgtcgacatgaattcaactggagca

SEQ ID NO: 25849 - DNA, 454 bp, Zea mays
  Clone ID: MRT4577_123586C.1
ttggattcagattaaagtcaagctagcttttcggactaatttataatgacaaaataacatagaagcattagaagaacaggctcgtagaatgcttgcatcagttcatctctgatgctgtgaattggtagctagcaaagcaaatgcaatgcaatgcaaccaaccaagggccatgcaagtcatcaattagctgttgtttcgtccaccctaccgcccggaatcaatgccatgcaagacaattacacgctagctgctcccttgctccgacgacgcgtcctcgtagtagtagtacggcgacagcttcccgtccctgtccaccaccacccgcgccggcggagcgcgcacctcctgcagcatcttcaccacgcgccgcatcgccggccggttgatcggcagcgagctcgcgcacaggagcccgatgtggagcacccggaccatctcctccttgaaacccatg

SEQ ID NO: 25850 - DNA, 1487 bp, Zea mays
  Clone ID: MRT4577_123587C.1
cggacgcgtgggttcgccagttactccacttgcccgccgcgctgctgctgctctgcgccgcctcgctccgctgctcggccaccgcgcgcgggaggctctgggccggtggggtctccatcgcggcggcggggagtggcggcgaggaggagtgcgacctgttcgacggggactgggtctgggctggcggcggcggcgggtacccgctctacgactcccgggactgcccgttcctcgacgtcggcttccgatgcgccgagaacggccgccccgaggcgtcctacaccaagtggcgctggcagccgtcgcgctgccatcttcccagatttgatgccaaaagcatgctggagaagctacgaaacaaaagagtggtttttgttggtgattcaattggaaggaaccaatgggagtctctactttagactataattgcacgggcaagagttacagtcccttattaaccacccttcaaggccgtgcaccagcaggagcacctgagattgtccggtacagtattcgagtggatgcaatggattggatgtccgaccggggtaaatggaaggatgctgatgtactgatcttcaacactgggcactggtggaacaatgagaaaacaatcagggggggtgcctactttcaagtaggcgatgaggtcaaaatgggcatgagtgttgctgaggcttacagaagatcgatagagacattgtccgattggcttcgcaaagaagtcaacacgagcaagacccatgtcatctaccgcacatatgctcctgtgcatttcagagatggtgactggaagactggtgggagctgccacttggaaactcttccagacgcgatgccagtgaagtccctggacgaatgggccgacttgctccaacccgtggacgaatttctagggagcgatcttggatccgagctggctggtgtagacctgcttcgcgtgacgggaatgacggcccagagaaaagacggccacctctcggtctacctgagcccctcaggacccgtgccccgctacagacaggactgcagccactggtgtcttcctggagtccccgatgcctggaacgagcttctctacgccctcgtcatgaggaggcataagaagatggccggcactaggacaccggacgctgaagagggagatgtcttcagcagtggatcatcatcgtgacaaaacgagcttcgtagccatccatccatcctggctaggcgatgacagctgctgtttcacataggatgccggaatggcgagacacgtttttggaccatgggtgctgtttgcaagaagctgagctagacgtcagtggtagtatagctttgtgttgtggtgatggcaacttgtatggctaatggggaggtatttggaattggcagtgtaactagctagggtcgctacagcgaatgatgtacatatgtattcttttagcactcgttcggtgattcatattccatgtaggttttgatgggattgaaaagataattat

SEQ ID NO: 25851 - DNA, 344 bp, Zea mays
  Clone ID: MRT4577_123588C.1
atgctaaccctctccgactgagactcttgagccgagcgcgcggccaccggccagtgccaggcaacggccagtaccggaggcgggcgtgcacaggccggccgcccggcgcgcgctgtgatgtgagtagccatagctaggatctgtgttatctcgtttgtttgtttgtttttcccttggctcgctcttcttttgctgcttttcggtcggtgcctaatctagctatctactactagcactagctagctagcatctcaagactgagctccgtatggtcaatttgtaatgctcgtctgtgactgaactgaagaacaagaccattttaatcggcttcttgcttccagcaa

SEQ ID NO: 25852 - DNA, 440 bp, Zea mays
  Clone ID: MRT4577_123589C.1
aaaaaaaaaaaaaaaaaaaaaaaaaaaaaaaaaaaaaaaaaaaaaaaaaaaaaaaacaaaaaaacaaaaaccacaaaaaaggcaaaattttgaaaaaaaaaaaaaaaaaaggggtttggccctggcccgcaccccccctgggggggatttccgcggattccccccccccggggggccgttcggcctttcttttagggggcccatttccccctttgggggggcccttaccaattcccgggccggggtttccccccttcgggccggggaaaccccgggggtacccccccttaatccccttggaccaaatccccttttccccggttggcgaattgacaaaagggcccgccccgattccctttccaaaaatttgcccaccttgatggggaatgggcccccccctgtccgggccctttaaccccggggggggggggggttccccc

SEQ ID NO: 25853 - DNA, 746 bp, Zea mays
  unsure (1)..(746): unsure at all n locations
  Clone ID: MRT4577_12358C.1
ttatataaatttagtcaaacctagaattgcatcctttttggaactgagtagtcagtatttagtagtatgccaaagatggcattcactccaaactgttcttcatcattgttcaataagtgctgcagctttgtcctgtaatattaataggaaaatgccttttagaatccagagagttcttttgtatcatctaagttaggtgcaaagagtaaacattattgaagccgatcgctcagagcttgctgcggctgctgctgtagcagatggactttttttctctctcagtgaaacactgtggagtctgcagcagcagcaaccttttcttgctgccgaacagcttcatagacttcaggccatcgattatgaattttgcttttccatttctgatacatcatacaattgtgtaatgcaggccctgatggcttgtttgagacgaaggaccaccactgagccctgattagcacaccttcaggagctggtgcatgcttaaaagagttatatggttgtttcagtgattttccttttcccttgagacctatttgctgcaacaagaaataagaatgaccaaactcttgtattgacagtgaggttttaactgtgttagctgttaccggcttgtctatttttctttgccgtccacgctatatatggtcacctgtaagttggtcttgcccggtgtcaggaaacggcatcacaattatcaaaagctgttatcgtaaaaaanaaaaaaaaaaaaggcccctagggcc

SEQ ID NO: 25854 - DNA, 459 bp, Zea mays
  Clone ID: MRT4577_123590C.1
aaagcttaaaaccagtaaggattaagaaccagccggttgaatacttgtaaataattgtgaatggaattcccacttggatgggcaacatgctaaatttagctgggcgagctaccttggtgaaggtcacacactctgcaattccgatattcatctccattgacacctgtttgtcggtatgggccattgaacagattgatctgtcaccctactgagcttggtagggtatgccctcatattaaggtgggaatggcttcacataactgacccatatcgtacttggattgatcttctgagtctggcttgatggttcctcaattaagcatgtggctgatctgtgcaactgtgggtagataaattcattggatttttttttgctgaggttgttttttttgcatccgtgtctatgtcgacatagaggcatcattatggtgcatgataataaaaactatttgtaaacct

SEQ ID NO: 25855 - DNA, 405 bp, Zea mays
  Clone ID: MRT4577_123591C.1
gggaaagcaggcaccccgggaggaaccggcacggaaaacccgggacgacccacgcgaattttaacgcgcccgcacgagcgcaacaccagggacccaccaaagggaagcggaggcgaccggcaacccgcggcggagacgacaggcaggggcaagggcggcaaggggcacggaaagggcggcacgaagcggcaccggaaggcgccgcgcgacaacacccaggggaacacgaagccggcgacccggaggccggccaggaggggcggcgcgaagcgcaacgccaggccgaacaacgaggagacccggggcaggcacaagaacacggacgagaacgacaagcagaacgcggagaccaaacacggagcacgcacggcgcaaaaacaacaccgagaaggacggcgggaacgc

SEQ ID NO: 25856 - DNA, 305 bp, Zea mays
  Clone ID: MRT4577_123592C.1
caccacgcggcgagagacgggacctagcacctacaaggggaaggttcttctcattgttaacgtcgcattccagtgaggcttaaccaactccaactgcgctgaactggcccaggtgtatgagaagtacaacgaccaaaagctttgaaatccttgctttcccatgcaaccaagtatggtgtgcaggagctctggtaccatatgaggaagaggggtcagtttggctagcacaccgcttcaacggctagtatccctcatcttctacaaaggttgatgttcaacagtagcaaatgctgctccccatctac

SEQ ID NO: 25857 - DNA, 368 bp, Zea mays
  Clone ID: MRT4577_123593C.1
ccgaggcttaagaggcagttcatgaacgatgcgcatgagcatggctcgttttagtggacagggactatcttgtagctgtctgagatgatgcaagcatgaaatatgcaactatgcttacttgggtagctagatcataacactcaacttattaattaacatagacataaagctatatccccacttgaaacatgcgactatcgagctcaatcttctgccattgctactatgatatgctatatgcatgacgacaccaatacgactataaatagacatacgctctgatgagctctgagagtgccgattggactgatcatatatctttgcggtgcattattctgtacagatgttggctatgcaagatgcaacgg

SEQ ID NO: 25858 - DNA, 233 bp, Zea mays
  Clone ID: MRT4577_123594C.1
gacccacgcgttcgttacccccgcgggcgccggaacacacggcgtgaccatagaaacaaagggcgggtccacaccacgaccaccgaaggcgacggatacggcgaccgcaccgccggggaaagggcgcagaacacggacccaggggggcctgacgacacgacaagacaccacccgccgactctcgcggacaggagcgctaagaccaaaagggacaacaggatataggccaacaa

SEQ ID NO: 25859 - DNA, 296 bp, Zea mays
  Clone ID: MRT4577_123595C.1
atggcgggaatgcccaaccatgtataggccagggtggacaggcctcatttatagtgaattgaaggccttacttaggcctcctccaccttccctgctgctgctatgtcgtctagggtgttcgttgttttcaaggctacctccccaactcccatccacatactaatattattgcaattttggctttggcttgttgtaatcatgtctgtctgtgtgtgaactaattaaagggtttatcattatatacttttacaaaattaaccgtgtataatcaaaagttaattcaaattgatccttaa

SEQ ID NO: 25860 - DNA, 743 bp, Zea mays
  unsure (1)..(743): unsure at all n locations
  Clone ID: MRT4577_123596C.1
gggaaaaattaaacggcctgacccgtgtcgaggaggactcccgaatgtacaccctataccgctggttcccgttcccaagatagagctgccccagacgctccagaatccaaatacctttccatcgattcttggcatcgccgttctctctaaaccccaactcctcgactcgagcaatccctaggtctccgcgcgaggcggtggtggctgtgaggggattttgattgatttggctcgagatgtcggaggacaaggtgcggcggatcttcgtcggcgggttgtcctggaagaccacggagcgcacgctcgagcgcaccttcggtcagtacggcaaggtcatcgaggcacagatccacatcagagcctccattttttgtttggttaaagagtacaatagagcggagccgcttcgttctcttttggttggagagtcatatgagtgtataggccatgagaggtaggagaatgctcgtatctggttgtttttatggagcgggataattctaactatttattgtaatcgtcatatgagtgtatagggtaggagagggagggggatggcaatggggcccgattccccgcggggaattccttagggaatgggggatggtttttcccacgcggnngatgtaaacgggaaaaatcctccctcgacggtcccgttccccacggngacccgtcaaacttgtatnatgataatgttttcatgtaatatataatgggaaaaacaaataattatatttgtt

SEQ ID NO: 25861 - DNA, 217 bp, Zea mays
  Clone ID: MRT4577_123597C.1
cttgtcaaaaaaaaaccaggcccggtgcaattgtccggggggaattaaagtaggggggggtggttgcacactgttaggaagagtagggcttttattatggggggggttttgtcccttggtagaaagagacctggggtttacaattttggtccgggtgtaaagccaacattttttttttttctctgcattttttaaaggagggttgtgtttattatac

SEQ ID NO: 25862 - DNA, 732 bp, Zea mays
  Clone ID: MRT4577_123598C.1
aaaaaagggggctttagggatttccaaattttaggtttcccttttcgggaaacccccccccccctttttttttattcccctataaggggggttttttttccacttttgagggtgggcctttttttaaaaaggtatttttgtgggggtttttttgtatttcaccacatgtggaaaaaggggtttttttctaaaagtattttaatttgggaaaccacaggtttttttccctctccacagtttttttaaaccgcgggcccatgttatttttttattcgccctcctttataggggccattttgggccccttataaatgatattcttaaaacggccccccatgttttatggaatatttgcagaaattcgccccttttataacgggcggccgggacaagaaaaaacttttttttttttttttttttttttttttttctttcctttttttttttttttttttttttttttttttttttttttttttttttttttttttttttgattcattaaaaccagaaactttattatgaccatgcatatattattggtcataccacacatgataatgtgtgtcgccttactgcattattacatatatagatagagagggatggatggaggagattttccaattatgaggaatgaccaatagtggcggcatggccgtggtaacgccacaggggttgagggcggaagctgggcagatggaacctcaggccgagacgctggtacggctg

SEQ ID NO: 25863 - DNA, 524 bp, Zea mays
  Clone ID: MRT4577_123599C.1
aaagggtgaaggcaagagcatcttaacaccccaccgctagatcacaactgcatcaacacaaccacaccaaagctgatgaagtcaaaagaacaaaacgcagtacagtatgactactaactactggaatattaatactggccatctaagaacctaacgtatattagctcagcttgaaacctacagttacaatagatagaacaaaaccgtctaccgaaatataaggttttttgaaaaagtaacatcgaagaaaacagtggataagattacacgaactcccaaaacgagagatcatataagtctattgagccaccacaccaagctggatagctggaataataatggaaacaatgcttggggaaataatgattctcttctgagctctggctgacatatgcttggttgaaataaacattggccaaccaatatacatgtcccatctttgaacttttagtaaacagggacctacagttactactggtaattggcgtaatcaaggacaccctgacagctatgctcaatccata

SEQ ID NO: 25864 - DNA, 315 bp, Zea mays
  unsure (1)..(315): unsure at all n locations
  Clone ID: MRT4577_12359C.1
agcagtggtaacaacgcagagtacgcggggtttcgtccaaatttgtaacattcattcttcacttcataggagtgacgtacgagggacatttggttgtttagcccaggcgtactgtgttttcgatgagacgcttcttttccacggttcaataatgtcttctctgagaaaatgtactactgtattggttgcaaagtgcaaaagatcaaaaaaaaaaaaaaaaaaaaaaaaaaaaaaaaaaaaaaaaaaaataaaatgaaaaaaaaaaaaaaaaaaaaaaaaaaaaaannactttgggttnttaccactgcttaaggg

SEQ ID NO: 25865 - DNA, 351 bp, Zea mays
  Clone ID: MRT4577_1235C.1
tagagcgcggcttttttttttttttttttttttggtttttttggttttggggtttaattctgaagaggcgctttcattgaaaagataaccagggcagattttttacaaaaggccaaaaaagacaaagccacaggaagatacaaaaacgcacgatcttattcaaatggcttctgatgagctctggtgcgtctgaatctggtggtggtggtgaaagctaacaagcttgggggaggcgcccgtcttgtccttgatcaggggcttgggcgccccctgctttattattttggcggtctgcaaaaccgagaagacgttgggagtcttgaccggtgacaggcggtgggccaccataac

SEQ ID NO: 25866 - DNA, 401 bp, Zea mays
  Clone ID: MRT4577_123600C.1
aaacccacctccccaaacatttttatggggggggggcaatcaaccccccaaaggaccaaaaacttacttacctggcccgggtttaaaaccccctattcccccccgggtaaactacccctccccaaaaaaaaacaaaaaaacccttactttcatgcaaaactcccgaaaggaggggaaaaaacaaaaaaagggcccaaggggctttcgggaaaggacccccagaaaaaaggctacccccccacattaaaatggcccttggtttctccaggcgggaaaggaccaaggccaattttgccaaacaaggggcaaactttgtcccccttttaaggcttggcccctttaggatataaaaacgcggggctaacgcccaaccccccttttataggggggcaatcgacccg

SEQ ID NO: 25867 - DNA, 243 bp, Zea mays
  Clone ID: MRT4577_123601C.1
gtttgtttgtctgtcgttgtgttcttctttaaaagggcacagtgcgattcaattgccccatgtgcccattttaagtggcacataatccatttttaaacccttcaacacgtcctattttggcaccatgcggaaaaactgctcatttgtaaagaaagctttgggattatacatatagccaacaaattgcggcctggccaaaaaaaaaaatcgccaaattgtgccctagtggggcgactcaatgtt

SEQ ID NO: 25868 - DNA, 367 bp, Zea mays
  Clone ID: MRT4577_123602C.1
aaagtttatcaggcatgatactgtcataagtttacttctgagatttcggtgcatgaacatatgctgatttgatagaaattggaatgatgtagctattaaatttgtggatttttcagatgggatatgttttgcttaatcatttgcttttgataattgtcatcacaaatcacatgccatcgcattttatacagtggtactgtatccattacaagtaatgtcttagaactttggattcctgatatctgaagcacctgtcgactcctgttttgtaaatattagcgcttaggttttgcgattttttctggaactacaagtttgacaactaggttctatgatagtggtaccagatgttaagcgctatatgagc

SEQ ID NO: 25869 - DNA, 584 bp, Zea mays
  unsure (1)..(584): unsure at all n locations
  Clone ID: MRT4577_123603C.1
caaaaaccgagcctagggttttagggggagaccagagaagcagagggaggctccatggacaaccccgagatgcagcgattcattcaggtgagaaccggttcttcccgctcgtgaatcgtgatgcgttattggcgagggcacgctgctgctgctatcacaaagagcagcagaaggcgatgatgaacgagatggtcggcaagctaacgagcgcgtgctgggacaaatgcatcaccagcgctcccgggagcaagttcagctccggggaatcaacctgcctgaccaactgcgctcagaggttcctcgacatgagcgtgctgattgccaaacgcttcgagatgcagtgaggcgtcgtcactcgaagctgttgcctggtcaatcgccctaagcttttcctttgatttgaggttccattgaggactttcggacgattcaacacagagtttagtgttttttttatgtcttacccactgccctgtttaggcaacgtgttaaagtgtgtttgagcctattgaaattggatttgtacacctcctgctcttaaacaagatctctcatggcaaaaaaaaaaaaaaaaaaaannnnng

SEQ ID NO: 25870 - DNA, 807 bp, Zea mays
  Clone ID: MRT4577_123604C.1
cccacgcgtccgcccacgcgtgcgcccacgcgttcgcccacgcggccggccgtacttgtaccagccggcggcggccgcatggccaggcccacatccctcttctgcaatcaaaaaaccgagctagggttttagggggagacagagaagcagacggaggctccatggacaaccccgagatgcagcgattcattcagaaagagcagcagaaggcgatgatgaacgagatggtcggcaagctaacgagcgcgtgctgggacaaatgcatcaccagcgctcccgggagcaagttcagctccggggaatcaacctgcctgaccaactgcgctcagaggttcctcgacttgagcgtgctgattgccaaacgcttcgagatgcagtgaggcgtcgtcactcgaagctgttgcctggtcaatcgccctaagcttttcctttgatttgaggttccattgaggactttcggacgattcaacacagagtttagtgtttttttttatgtcttacccactgccctgtttaggcaacgtgttaaagtgtgtttgagcctattgaaattggatttgtacacctcctgctcttaaacaagatctctcatggcatacctgtcagcatcctaggtacttcgatttatttcagtatggtgagctcggatatcaggcgaaggagatctatgagatgtaagatatagtttcgcccactggtactattttccattgccagataaaattgtcatcgtcaaggaataaacagtggagaccattctcctcgacgggtgcgactttgagcacgggctcgtcgtcatggagttgt

SEQ ID NO: 25871 - DNA, 206 bp, Zea mays
  Clone ID: MRT4577_123605C.1
acccaaagcacccaacccaagaagtagaaaaccataattttgcggcccaccaaatgaatacaaacgatacatactctacatttcaacaccataactctcacaatgacattacatcctatttttttataaacatcctccatgcccaacttcaatgattcttctaacccctatatatacaacattatcatctataaagcctataaacc

SEQ ID NO: 25872 - DNA, 354 bp, Zea mays
  Clone ID: MRT4577_123606C.1
ggaaaacacccgtgggggtcctcggggcatgggggcaaaaggacaagggattcccccttccaagggggggccgacaatccaaatttggggatccaatgggaagacggccgctttcatttcggggtataaccaaagcccccccctccccccagaaacataccccaaaaaaaaacaccccctccaaacttaaaacacattttggaacggcttttccccccaatgggggggtaccctaaccctaaccccaggggaggggggggaccccccaaattttttaaaacaaacggggttattccgggctttaaaaccctggggctttaaaacccctcattttttggttggcaacctgggtgc

SEQ ID NO: 25873 - DNA, 305 bp, Zea mays
  Clone ID: MRT4577_123607C.1
gcccacgcgtcaaatccccagcagcagggatggagacaggacaatcaccggagcacgccgagtgcggtgcagcagcgctgcgagtctgcagcgatcaggacatcacgggacatgacctacgatctgcgactgcgaagcggagatggcaacacccgagatgcaacatctgctgcagggcttcaaacgggtacagcatgaccctccggcagggatcagtggtgctcggcaccacaacaacatgatactctgaccagcagtgatatacggacatgctcatcagcagtcagatcaaggcacatgcaggc

SEQ ID NO: 25874 - DNA, 255 bp, Zea mays
  unsure (1)..(255): unsure at all n locations
  Clone ID: MRT4577_123608C.1
accacacggttcgagaacaacggtacgctgtacgcttaccgtgtacgtacgtgtcactgtgcgtggtactctccactatccagggaccgcatccagcaaatgctactggtgattcggaaggagacaggggaatcaagaggggtagctgcatgcanaaaaaaaaaaaaaaaaaaaaaaaaaaaaaaaaaaaaaaaaaaaaaaaaaaaaaaaaaaaaaaaaaaaaaaaaaaaaaaaaaaaaaaagggcggccaaatg

SEQ ID NO: 25875 - DNA, 676 bp, Zea mays
  unsure (1)..(676): unsure at all n locations
  Clone ID: MRT4577_123609C.1
aattcggcacgaggatggaaaaagtttccaattcccacactagagatactacgaaatcttgcttacatagatgtaagaacttaagaacacaacaagaacacacagatttatcccgaggttcggttacaccacaaaggtgccctactccccattgaggagcccacaaaagcccaggtattttccaaccctaatcctacacacgccgactagcaaggtcaaggcaatctctttctcaactttctcaacgagtgggtaatacaaacttcttgggatcgtccacaattttggagacccccaagcaacctcacactgtcaaggaacacgaaggttccaagagcaacaaatccacacaagattgaagtttgcaacaagctcaaaaaagtgagtggggagagagtgaggaaatccacaaccagttcaccaacttcacctcacacaaggatcctccaatagattgaagaggatgagatttggggtgtgagagggagtgaatgcacttatttgagagtaggtcaatagtaaattcatgagagggtgaagaagtgaatgaggagagagagcctaaggggtatataaaggcactgaaaagctgctgaccgtttggctttccagcgcanaactcggttcaactggcttttagcagagctgaactcgtcccagatccttgatgagtagc

SEQ ID NO: 25876 - DNA, 256 bp, Zea mays
  Clone ID: MRT4577_12360C.1
gtcctttcggaggatgaggacatcaggtttgaagaggccggcgagagccaggaagagtatgacaaatccaaggcgcgcataacaaagtcctgagatgcatgatgatgcctactgcacccaaggcccttcaacttgaggccaataccatacccatacacacacacatatacatactaccctcccattcgctttcggtattttgataagattctatgctctttcatgtaaatgaaatacgggcgtcatgtccccatct

SEQ ID NO: 25877 - DNA, 825 bp, Zea mays
  Clone ID: MRT4577_123610C.1
ggccgcaaattttttttttttttttttacggccgcttctatagtgtcacctaaatcccccatttcttcccttgctgagttggcgaatgacctttcccaaagttagcaggcttctgttaatgtggctgccttccttaagcctcataccagctgattgtgtctgagaggcacgctcacttcctgctaaatcaacaaaattcacacaagccagaagggtgcttgagtttcctcgtcccatgaactgctttgctgaactctcgatcgtcaatctgagtatctgatgagatctggagctcgcttcattcatagaagtttccccgatctgtctttgagcttcacacactgcaaggagctccaagagatggcctttgtccttgagagtttcctcggtgagtttctctaccacagttcctttctctggatcatccagtagccttagttgtgttgcaacaggtcttaagagatccctcacggcttcgttgtatatctccatcgccgaaaatttcaggacgaattccctctcgggatgcttgtcaatgtagtcgtagatgtctgacatgctgcgctccgtgatgccgaccatcgtgtacgtcttcccgctgctcgtctgaccgtacgcaaatatgcttgaattgatgccgctgagcaccgacagggccacctgcttagccccttcctcgtacacctggcgcgtgctgcacttcgggttgaacaccctgtcgtaggtgtaggaggcggggaacatggcgcgctcagggatgttgccgcggaacatgagggtggtcgtgctcgtgcactcccagtcggagccatcgccgcgctccgc

SEQ ID NO: 25878 - DNA, 314 bp, Zea mays
  unsure (1)..(314): unsure at all n locations
  Clone ID: MRT4577_123611C.1
gggggggggggcttccttttctgagcgagcgggggggggggaacccgggcgcctactagcgccagctggcgcttgcatcaagcccatttgctgtggcgaacggggttgcaaaccagtctctttttcttctgtttgagtttctgtctgtggtgggggggggagcctttctgaaccctgtcgcctacctactacggtgggaagtgctttcatctacccagttcgttgtggccatatgctgctacatacctgccgcagccggngttgtgctcattttgtaccgcccatgactcagttaggagaggggaagcctgctg

SEQ ID NO: 25879 - DNA, 363 bp, Zea mays
  Clone ID: MRT4577_123612C.1
gagtaaacttaaatttaaattatcatgagaaataaatatgcgggggagataacgtcggtttgcctaatgacatgagcattcccacatacctgagttcttttttgaccagcttgcgacattgagaatgtgaacgacagagctacagtctgtttacaaaccatgctcgaacagatatataaacccattctgggcaggaatcgttttagcttaggaacattgcaatacacttgtacagctacaagagagacatgcttcttcagtagagattgttgtaagtgtagagtgttgctgcgatggagactatgcagatcacaagaggtggcagaagagtgacattgagaaggaggtccgtgcctagataac

SEQ ID NO: 25880 - DNA, 480 bp, Zea mays
  Clone ID: MRT4577_123613C.1
ggagtttgaacctcaaactgtgatcgtagtcaggttcagtttccttcaatatctgtgatcctaatcaggttcagtttcctccaatatcttttatcttggataacagctcaatttctggataatgatttatatgctctcaagcaactgtaacatggggtgttgaaagtaagaattggaggacattgaacatcattggtaatccttattgcctggaagggttcaatttcctctaatatcttatcttcaacaactgcataattttttttcttgaatctcaataatatatatccttttatggaacattttgaacacatatgtattcgtttttcctgatctgattggtttggatgacgatttgatttttcgatccaatcttgctaatgttcaattgctataaaaacccctaccaaagttcacaaaagatagtatagggtcttattcctgtatcaaacactcacataatcatacttctaagtgttt

SEQ ID NO: 25881 - DNA, 318 bp, Zea mays
  unsure (1)..(318): unsure at all n locations
  Clone ID: MRT4577_123614C.1
gcacgagaccggacatttctgctacatcagctagatcaacaagagcaacttctacggcgacncgagcaacaggcagtggccgtgcgcggcggtgcagaagtactacgggcgcggcccgctgcagatctcgtggaactacaactacgggcccgccgggagggacatcggcttcaacgggctcgccgatcccaacagggtggcgcatgaacgccggatcgcgtacaaaaccgctctcttagtactggaatgaacatcaggggggggggggggatgctctaaattatcatatttattactcactcattatgatatcttatc

SEQ ID NO: 25882 - DNA, 348 bp, Zea mays
  Clone ID: MRT4577_123615C.1
ttggaatttggatagagcatgcacagcactttactgttatgcctcaccaggccaactactgggtgatgaaaacacacacacacacatggcacgcggacaaacatggcgagctgaacacattacaccaccgctaactatgactgtgctttccttgcgctgcacgcagggaccctgcagttcaccagacgtcgagtttctgatgtccaaatatctaacactacatcatgtaccaaccagcaagagatctacaaattcttcaaccgaaaggtagggaagccctaccgccgtgcacctttggcagaatcacactctgtcccctgctgctgagattgaggcaacgcgttagct

SEQ ID NO: 25883 - DNA, 238 bp, Zea mays
  Clone ID: MRT4577_123616C.1
gatcgagcacaagaacatagtgcagcacacaccgtcgtccttgtacgtagctagcactagcggtgatagatggcgatgttgagttcctacgccatccggagcccggcgctgcgttgggcgacctcacgcaaggagtcccgctcccgggctgctctcttcacgtgccatgcggataagtactacgacaacgacatccaacccagtgtcctggtgtaccctcgatagggaaaagaacgac

SEQ ID NO: 25884 - DNA, 382 bp, Zea mays
  Clone ID: MRT4577_123617C.1
aatataaaggataacgaagtatccaaatgttctaaaactttaaaaattgagcgttcgaaattacacgagcaagagcaagttcttcgcgtatctagagcttgcctccttgcatatggacactgtttacctattcatagggagttagggacagcccatcgtacaacttcgtgtgaagtcaactacagaatctactagggccatcatcgtttttctctcaaagccttggtgcacatgttggtaagtcctttcttcgttttcttgccattgccagcgtgcctcgtctgcgcactttaagccgaagcttcttctattccacttttgacctacattagtgaccttcaagaaatataaagtgggtgctcctgaaataaatcacaaaatg

SEQ ID NO: 25885 - DNA, 542 bp, Zea mays
  Clone ID: MRT4577_123618C.1
aattcggcacgaggggagagccctgcctggacatcggtatccatagttgcggactccgctgctgttgtcggacatggggactgcgctagcgatcggcctgcgctggacgactagcactcctccggtacgttatcggtgacgcgtacaggggaaaggccgagactgcgtccgctcacggcatgcttgcctccttgtactgtccgaaaccacttacctaagcccgcccctggtactggccgccgcttcccctgcccacgataaccctctatacggtcgcttacgacaacctgtaggctcacgccggtattggctccctgaacaaggacgtcggcgcgctcaccgcgcaggcggactactacgagggcagtctactacggtacacctgttgctggcatggggtgtgaagaacgctgagaagcgtgtgatcgttttcaggctgacacaggaggagctacgccttatgctcaacaatatcctgcacgagcacgaggcggacacattgtcgattccgtacctacactctgctactcatggtggcgaca

SEQ ID NO: 25886 - DNA, 298 bp, Zea mays
  Clone ID: MRT4577_123619C.1
catcggcattacctacaaaagagtcgactctaggccaggctagagcacagacatctaaggcattgctcgcccagggccagtcctcagaacaagctgctaagggatctacactggatctggtcacctcaaaggacactgtcggaagtgccacaactgaccagtgtgcttcagtagcagctacagaacactcagctcaccagaccacgtcaggggaggaggcttcaggagacactgagtcattcggaacttctccatcctcaaatgctcagctagcagagcacaggagcttcacctctgc

SEQ ID NO: 25887 - DNA, 420 bp, Zea mays
  Clone ID: MRT4577_12361C.1
ttgggttttcttttttttttcatatttttcagaaaccgactttgtggtattccacactgaccccttttttgtttcttttctagagaggaatatctttatcccaaaaacccaaaaaggggcccttgtttaaaagaccaacactttacacccccattggggtaaacgaaaaagacaacgggtttattttaagcacacatgttccccagcaaaatgataatttccccctttggccccccggaaaacccacccctcttcagaagaaaaccaagcgcctttttttgcggtcggccaaacaaagaagaaaaaaaaccaccccgcacacgggggaaaacccctaatttgtgggggaaaaaaacccaggccctaaatagcccccaaaaaatgtgggaaacaccccctcggagaccctgggggggccca

SEQ ID NO: 25888 - DNA, 475 bp, Zea mays
  Clone ID: MRT4577_123620C.1
ggggaacaacatatcaagatcattggacaaaaatagctgcgaacaaaaacctagctaattcttatatcgtgtagtttcatagcgggagcaaacaaagggaacaacaggggtaccagcacgtaatccaaaggtaaaacggtcactaacacggtgacagaagcgaacggctacacgatactatacgatagataagataactcgggcgaagccaggatgggcccacacatcattccttccagccgtcggcaccgtcgccgtagacttcatcaccaaccttgcgcccaccggcggagacgtcaccgactttgtagccgccgtcaccactctcagggcgcccgttgtatccgacaacgaaggcataaccgtcggcacggcacccgtcaccataatcttctgaggcacgacagacgtcggaggaactgagaacaccgtcaccggaggaggattgggcctggttaatcgcgatcatacctgc

SEQ ID NO: 25889 - DNA, 439 bp, Zea mays
  Clone ID: MRT4577_123621C.1
atattttttttttttttttttttttttttttttggtttttttttttggtttttttttggggggggattaggaaaaccaaaaacatggtttcggccctttttttgcctcagggttcaaccgccaaaaagccccccttggggttttccggagggcccccaaaaaaagggtttgaccagaaaaatcccccaaaaccccctggggccgggggactaactggtcacagggccacccatattggcccccggcttatgggggacagggtttttgcccccccaaaatcttggcccaaccggggttctgcatgccgggggggatgcccctcatgggcaggaaggggggggcccccaggcctgggggggcccccctctgggggggtaggtgccccagctcccccgggtgtcttttgggggggaaccccctggacaggggggggtggggg

SEQ ID NO: 25890 - DNA, 799 bp, Zea mays
  unsure (1)..(799): unsure at all n locations
  Clone ID: MRT4577_123622C.1
gtaccctccgnggtctctggccgggtctggggtgccctactacgtcatgctcaagtggctgttcgctctgctgatcggcgttggtactggattagctgctatattcataaacctggctgttgagaacttctctggatggaaatatactgcgacatttgctataataaagcactcgtattttgtgggattctttgtgtacacagttttcaatttagccctggtcttctcttctgtatatatagtcacaaactttgctccagcagctgctggatctggtattccagagatcaaaggttacttaaatggagtggatacacatggaatcctccttttcaggacattagttgggaaatctttgggagcattggatcagttggaggtggattggctctaggaaaagaagggcctcttgttcatactggggcctgcattgcttcgcttcttggacaaggtggatctgcaaagtaccacttgagttctaggtgggtacggatttttgaaagcgatcgtgataggcgagaccttgtgacatgtggatgtgcagctggagttgctgctgccttcagagctcctgttggtggggtactatttgccttggaggaagttacttcctggtggagaagtcatcttatgtggagagtattcttcacatctgccgtggtggccgttgtggtgcgttcagccatgaattggtgcaacagtggaaaatgcggtcattttggagctgggaggttttataatatgggacatatctgggaggtcaagaagattactcataccaggaaattgtttcctatgg

SEQ ID NO: 25891 - DNA, 655 bp, Zea mays
  Clone ID: MRT4577_123623C.1
gtaccggcgccctctctcgagttttttttttttttttttttttttttttttttttttttttttttttttttttttttttttttttttccgactggaaaaattttatttggcctttccaaaacgggccatttttggggcccaaacgggcaaaaccacgttccccactaaatcccatttttccgttttgaaagggggaagcgaaccatcacagcaggtttttgggtcacggccccaaaaaaggcacatgccggccttgtttaagggtttagccagcagggggggaaaaagtttacccttcacagggcaacgggccctcctaaaactccatggaacataggaaatatcccctctcaaaaataaggaactcctgcaacgggggggggctgaacagaggcatatttccaaactgggttgaaccaactaactaaacaggttggccacagttttcaacattccgattcccagccggggagagggcgaaccatgcctgcatagatcttaaaattgttcaaggaaggcagcaccttcgacacagccctcgaattatgtaagcaggggggctttccacggaccccctccggtcagaataccaagcataaagccgggaaattgccttcgaaactccgggtgggaaccgcctgggttcccctttaag

SEQ ID NO: 25892 - DNA, 1230 bp, Zea mays
  Clone ID: MRT4577_123624C.1
tatagtgagtcgtcagtcgaggagcaaaacagatcccaagtgctgccggcgagccagccggcctccagcttgtagcgaccgttcgtgacgtcgatgggtgacttcgtgggccacgtgctgccgggcacgctgctgctggcggtgggcctgtggcgggtgtgggcgtcagtggcgcgcttcgcggccgacccggcggcgttccgcgtccgcgcctggaaccccgtcccggcggcggggccgcggctgctggagctgcacgtggtggccggcggcgcgttcctggacatgtgcgtggagctctactacgccaacccgctccgcgtcctcaccggcggcggggtcgacccgggccacctcggcggcctcgagcacgccagcatgctcctcatgttcttcctcttcggcgcgctcgccctcgtctccgagaagaccaggtacctgcctttatcggacggcgcgctgagcctggtgttcgcgagcgcattcacggcggagttcctgctcttctacttccactccaccacgcacgcggggctggagggctactaccaccgcctcctcctcgccgtcctcgccctctgcatcgccgcgctcgtcgccggcgcgctccttcccgccagcttccccgccgacctcggcgccggcgtcctcatcgccgtccagggcctgtggttctaccaggccgcgctcgcgctgtacggccccatgctccccgcgggctgcgtccgccacttcgactcccctcactccgacgcccgcatcgagtgccacggcggcgccgcgcaggagcgcgccgagcagctggccaacttccagctgttcgggctcgtgttcctcgcgttcgtctacgcgctcgggtgctacgccgtggccgcggcaaggtatgggaataacctggagctgacgacggtccatcacacacatgtcgctgcgactgccatgtagaaggagaacaaagttcacgatctagtggccacggatctctttttttcttgttcggttcagagtacgtagggcaggcgagtacatgaatggctgggctgttcaaaagaagctcgagtgtgatcttacctaccacatggacctgtcactgtaaaatgtcaagttcgtgcctggcaagggtggttggattaatggaaacccccggggggtctccttgggcggtgggaaaaaaggaaaaaaaaaccaaaaaaaaaaaaaaaaagggccctaagggcgcgggcggtccta

SEQ ID NO: 25893 - DNA, 251 bp, Zea mays
  Clone ID: MRT4577_123625C.1
cctaagtgtagcacttttcccctgtttttttttctggaaaattcacgatcctttttctcaaacaagcaagagagttgtgtgtctttatattaaaaagatgaaaaggggcgtaaaaaacccctaacaaaagaaaacaacccaagcatgataactctcttatctgtagttctgtaccatatgacaccagacataactgatacagctcaacaggaccttggaggtgtagcatgcactcatccgtcgagataaaa

SEQ ID NO: 25894 - DNA, 283 bp, Zea mays
  Clone ID: MRT4577_123626C.1
ggaaaaatccaattgtagctttttggggcggaacacgaagaaactgtcctaatgccagggcaaccaaacagaacaagcgccaagcatagaactgcaatgttctaaggaaaaaacgcaaacacaaaggggggggctaacacaaaaacgaaaccagggacttacctccaaccccgggaataaacgaccgggaccctctaactaacaaacgaaacctaggacgaggcctcccacgagcttggcgtagggccggccatagatccataatgcccgaaaagggggtcac

SEQ ID NO: 25895 - DNA, 528 bp, Zea mays
  Clone ID: MRT4577_123627C.1
tcttcttttcagcctgccctgagctgttgacttgagttcaacttgagctcgatgtgatgtacctttgagacataaattcatttttttggtgcagattgttgcaataagagatatcatacctgctccattgagggaggcattcaatgatgtgtatattgcctatgaattgatggatactgatctgcatcaaattattcgttcaaatcaagctttgtcagaggagcactgccaggtacttgattcgatccatctaagaaatgcttattgatatttttttgctattgcgtggaattagctcgaaatctggtatgtttcgatccagccatatccattgtgacgtttttgcatagaaaggctttgattgggggttgggcctgagaattcgtgctgcatttctgcattttgagagggaatgcagcattttacctattttcttgccaagtatcagatcataactccccaattattgggaaggttatttggtctgggcacatcatgtttggaaattgttggttgattacttttttt

SEQ ID NO: 25896 - DNA, 516 bp, Zea mays
  Clone ID: MRT4577_123628C.1
gaaaatattatttgaccatagatgaatggttgattagttttagcttcaagcctctgttgtctctactctttggcatataggcttgtggttaaaaccagtcgactcttaagttcattgatgatgggtaatagctatgagatccgagggacaaaattacctgtgtccttttgatctaatcctaattgtgcttgtatctttggtcatctgttttgtgattacagtttgccttccatttgttgtaagccctgcccaacttgatctgtcaaatttagtctgacatttaacgcacgactccactatgaagttctgacttttttatgcttaattaatgtcgattgttgcaggcttgagcgtccaggaggtttgattggatacatgacaacgtcgggtcgaacctctagagcatctttatcattagcagagcatgctgtttatgtagttttggactttaagctattagacatgtctggatttgtggatcttgaatttttggagaaataccaatttgcctcgttc

SEQ ID NO: 25897 - DNA, 484 bp, Zea mays
  Clone ID: MRT4577_123629C.1
aagattcaaggcatgccccgttttataaataaaatagcaggggtaaccatgtttcaacaccaattccattttcaaccaggaaaaacaaaactggaattttatcaccaggcttactactttcaaaacaggggcacagaagttcaaacatagcacaaattcgaagaccccaaaaaccaaacaagagcccaccaagaacgctagggcttaaacgcaacctcctggccccccttttggactcgagcagggggaggatgtcaccctcggggacgggccccttgacatttctaatgaagagccggttctgggcatccaaaaacttaactttgacctggggcacctgacccctggagccggtcctgcccattacctttaccacaacaaaaaggttcacctgggggtccatgctctcgcttctcgcggggacggaagcccacgagcttttaatcacccaaggggagttggggcgggggcgggccttgcccgg

SEQ ID NO: 25898 - DNA, 261 bp, Zea mays
  Clone ID: MRT4577_12362C.1
cttagcttttccatctacttttcttctccaccgaaaaagattccactgggcgggttctttatgtttttgtatgactctaaaacccgccatttttttagctataaatggacccctctgtcatgctttaatttcctttacccctctcccctaacttccttgctaagttaccacgttcttctgcccttcacgccctccctcatgtgatcatctatctcactctttcaataccagcacaagcttgttactgacacacaccccctg

SEQ ID NO: 25899 - DNA, 446 bp, Zea mays
  Clone ID: MRT4577_123630C.1
cgctgtcattgtcttcggcggcagcatcggcattgcctggctgctcttccggcaccggaaggagagccaggaggcgacggactggaagatgacggcctttacccagctcagcttctccgagtcggacgtgctcggcaacatccgcgaggagaacgtgatcggcagcggcggctccggaaaggtgtaccggatccatctcggcagcggtaacggcgccagccgcgacgaggagggcggcggcgggaggatggtcgccgtgaagaggatatggaactcgaggaagggcgacgagaagctggacagggagttcgagtcggaggtgaaggtgctgggcaacatccggcacaacaacatcgtgaagctgctgtgctgcatctccagccaggaagccaagctgctggtgtacgagtacatggagaacggcagcctggaccggtggctgcacc

SEQ ID NO: 25900 - DNA, 164 bp, Zea mays
  Clone ID: MRT4577_123631C.1
acttatattttttttcaccacaattttaaaaaaccgggagggttaaattttaattacggcagggacacattcacataattaaattgaccaattagctagccccctatcgcaaacatagagaccagacacagtctcttggttaagagacgtggcctggcccttcc

SEQ ID NO: 25901 - DNA, 473 bp, Zea mays
  Clone ID: MRT4577_123632C.1
atgcacgcacacgtacgctcgctattagtttggagccagggcagaggctttttttatggccgaagacagaaatgatttgaaacgggtatgatcattgatgactgtctccaagatcaccaagcctaatggtagaggacggaagggagtgggcatgggccaaggtcagatgctgataactgcacacccacagggccgatgtgggtccgagtaattagcaggcctatatggggcgaggatgccagatgggacaaggggctggacactgggacgagcaaagactctacagtacgggaaattgatatggttgaacaagtgccctgactgctatggccggggtagaaccttatataaagaagctgggtaaaatcgtacagaaaacctttgcttttttttatgggacgtcggatcatagtgagcgttctttgcatggaatggaacacagaccaaaggctgtatgggtacggctttttctt

SEQ ID NO: 25902 - DNA, 552 bp, Zea mays
  unsure (1)..(552): unsure at all n locations
  Clone ID: MRT4577_123633C.1
gaggcagtggggtccaccctcaccatgnagcgcgtcgccgnccgcgaanaagttcatcgagagccactaccgctcgcagatgaagaacatccaagagcgcaaggagaggtacccgtaccggccctgctgatccgatctctccgcacgcccgcggctggccgcaaatcctagctactgctcgcgcgcggctgcgctagatctcgcgcgtgcgagctcgatcgaaggggtctgagctggggttggccgtgggagggagtcgtccgagctcgcgccgctggagcttgcccatccgggctgccaattttgggcgccagcttttggctgcttttgcttctgtacttgtagcctggtggccatgatttcacaagttctagagtagcctgtggtgtagtgcaacgttatagattcgggaattgacacctctgtctgcaatttgaggtccgagctcggcgtcacatagtttggggatgatcgatagttccaggcttccagcacggggaggacagtagagctggttgcactggttgtttctggatgcttagtgtatgctaa

SEQ ID NO: 25903 - DNA, 594 bp, Zea mays
  unsure (1)..(594): unsure at all n locations
  Clone ID: MRT4577_123634C.1
gttcagttgaattgatgagatctatgttctttctttttcagtctgtccataggcaggtcattgataatgggattcttccatacttgtgaagatagagaagaaaaaggtgacttcttttcattgaatttatggtggcaattgtgagaaggctagagctggggacatatgagaacttttttactttattcctctccttgattaacattatttgattgaatgttttgttttagcatttctagggttgtaattactataaatgttttgattgaatgttttgtcgcagggaagctccttagtgaaaaaaaatggaggtgatcaaggtgtaaagggattaaagtcccttagagtaagggatctctcttatcgcctcactatatatcttacttggccctttatcattttcaaatgccaatcagtgaacaccaaattttaggttttgttaaatgcctgttacccagtcagaaatgagatattatctttaggagataaataaanaaactgggaactgggaattgtaccactattgtggtgtacttaggttcctatctatttccttggtttatccttcaattaccaaatttctggggaggagga

SEQ ID NO: 25904 - DNA, 710 bp, Zea mays
  unsure (1)..(710): unsure at all n locations
  Clone ID: MRT4577_123635C.1
gacttcacatcccgcatcacagacaacaacggcggggagggcgacacgatggcggcctgcctccgctgccgccgccgcctccccctctcccctccggcggcgccgctggaagacgacggcctgctctctgagaacctcctccgcctccccccgcagccctcctccctcccgcgcgcctccgccgtctgcagccgcctcctctccgaccccgccttccgccgccgcttccgcatccaccaccgcggcagcgctctcctcctcggctccttcatccattaccccggaatcaccttccagccagcgcccgacgcccccgaccgcctccccctcgagcaattccgcctgaagctcgacgaccactacatcgccctcggatgccgccatggcctcgcgctcttcttcctcccgatccggctccaggtgctcgtgtgggaccccctcgccggccaccagctccgcctggccgttcccccggatttcgagttccagggggccaagggtgatatcagcggngcggtgcttcgcgccgccggagacgtcgaccacttccgggtggtcctggtaggctgcgacggggagcagcctagaaccgcgctcgcctgcgtttactcgtcggagaccggcgtatggggtggttgcgtctcaacgccgattccatccgaggggttggtcattttcaagggcgagcccgctatgttggcaggggatcg

SEQ ID NO: 25905 - DNA, 510 bp, Zea mays
  Clone ID: MRT4577_123636C.1
agatggcctctctgttccggcatcacttaggctgacgcttttgcgtattctggtttctatacacgaggagcatattttttgctgataatctgatgtcaaaggcaagatcatgaaattaagatggccacaatgttctatttctgaagtttattgttggacaccgttcggttggttgatgcagtatagcagtcggtgcagtgatgtagttggtaggtcgacgcagttcagatacaatgcagtaagaggaagaagttgagcggccatgtcactgacatgacgacggttattttgcaggagcatattttgtatctgtaccagcaccatttgggcgcttcatgatctgctggcatctactgcaacatgcagacacagtgaaagaatggattaatcaggcaacttaacagcgaccctcttaccagaggggcgcgaccctactggaaagggttgcctctgcacaaatggtcaaccagtcaacaagagaggtatcgcagcggacgaagccgacgatga

SEQ ID NO: 25906 - DNA, 963 bp, Zea mays
  Clone ID: MRT4577_123637C.1
tgtgcggcgctcgaggcggccggtcgggactttgttctttatgttggtcgattctacccagtttaaagagagactaaaatgtgggcgttgttgcttgtgtccatccatgccacaagctgtaatattttcttctaataagcttttatacattacctctcttgttgactggttgaccatttgtgcagaggcaaccctttccagtagggtcgcgcccgtctggtaagagggtcgctgttaagttgcctgattaatccattctttcactgtgtctgcatgttgcagtagatgccagcagatcatgaagcgcccaaatggtgctggtacagatacaaaatatgctcctgcacaagatatatatatatatatatacatacatattcacgtgagtttgttctttcttacatccagagctacagtactatcagaagctgaatagattgctgctggaattagagcaaaggagtggaggagtttctgaagagagcagacctgcaaaataaccgtcgtcatgtcagtgacatggccgctcaacttcttcctcttactgcattgtatctgaacttcatcgacctaccaactacatcactgcaccgactgctatactgcatcaaccaactgaacggctatatgaaacgacacaatgtcagccgtcagatatgaatattaacttcataaaagtaattgtaacttgtgtgggctggttatagcttgtgatttcacatttcatttgttagcggccaagatttatttctgttagtttatgaccaccactcaggaaagttgattgattctccattccaatctttgttagacctgcaagttgtttgctaacagtgatccttcagagaaatggggacatgggaacaaacagaaccagaatgactaaagaaacaatggttgcttgaggaggaatcgatcgaaaatgaaccacctcccgagttccagttacgtactcttatcggg

SEQ ID NO: 25907 - DNA, 1423 bp, Zea mays
  Clone ID: MRT4577_123638C.1
cattgggtacctcgaggccggccggcactccggcattcgcccccaaaaatcgagccgaaaaagatcaaaagaaaaaaaaaaagaagaaaaaaaccctaaccactccgatcgaatcatccgagggccgcagcagcccggcgaggctatgtctcaggcaaccgccgcctcccgggatcgcttcccctggtgatacaactcgggccgttcatttcgtctttccgtagggatatgagggccgctccaaccgatccgcccacggcgccggcgaagtcgatgctgaggcggctgttcgatcgccagctcctgcggatctcaccagcggagcgtctaccatcggcgggggcgggagagaaggatgaggcggagccgagctccgtgtgcctggacggcatggtgcgcagcttcatggaggacgacgtcggcagcgagaaggctgcccacgggggccggtactgtaactgcttccacggaggcgataattcagatgacgaggaggacgacgaagcggcggcggcggcctccgacgtcgccgagacgatcaagggcctcgtccactgcgccacgcttcgggagcgcaacctcctcgccgacgtgtgcgcgcacctggagcggcatcgcgaggcgggggcgcggcggcgcgacctcctccgcctggtagcctcgtcgctgcgcggcgcggggcacgacgcctccgtctgcgtctcccgctgggacaagtccccgtcccacccggtcggcgagcacgcttacatcgacgtgctcctcccggcggcctcggaccgcggcgcgcgcgagcgcgtcctggtggacgtggacttccggtcggcgttcgaggtcgcgcgacccaccaaggcgtaccgcgccctgctgcagcggctgccggcggtgttcgtgggcaaggacgacaggctccgcctcctcgttgccgccgccgccgacgccgcgcgcgccagcctcaagaagcgcggcctccacctcccgccctggcgtaagcccgagtacatgcgcgccaagtggctctccccctaccaccgcgaggcgccggtggccgaagaggcggcctccgcctccgcggacgaggacgacgggtacggacccggaaccggaaccgccgcgtgacaactggacacttgcaatttttgtcttggaagaggttgtagctgcaaaagcttgagattctcttgaaattactctttgttcgggggttgtacctagagtaactatggactacggtgtgtgtgtgagagagagagaggtatgcatcactcatcactgtgctgagtaccgcgcgagaaatgaaggcgaggggtatatcatgggtagtgctagttttaggaagagaaataaagcaaaatatcggattaatatccacttttggtgaaaaaaaaaaaaaaaaaaaactcgaggaggggccgcgggtacc

SEQ ID NO: 25908 - DNA, 217 bp, Zea mays
  unsure (1)..(217): unsure at all n locations
  Clone ID: MRT4577_123639C.1
gcagtaccggtccgnattccgggcgctctggtacgagcgccaagcaataaaattagcacggcgagcgacgaccggcctgggccactctttgggccgagcgtagccagcaggtcgttgtcttcgtcgtcgtcgcagcacccgtcctgctagcatggccagcgaggaggcagtggtggtggtggtgcctgctgctgctgtcggcgtggtgctgcgccgg

SEQ ID NO: 25909 - DNA, 120 bp, Zea mays
  Clone ID: MRT4577_12363C.1
cccacgcgtccggttgttgtgtttaagtacaaaaacagtatatgaccttagaaaacgctgcccgccaccatggcatgcagcgttttctaaggtccatatactgttgttgtgtttaagtac

SEQ ID NO: 25910 - DNA, 179 bp, Zea mays
  unsure (1)..(179): unsure at all n locations
  Clone ID: MRT4577_123640C.1
gggcccaatatataccccactctttcgcctnncctttctggagcagctaggnngttccgtcctcgagggcgatgccgccgagtgcacacctcacctttccccactgccgantcgaattcgatgcgcccgccgagggtcgatgaagtaagtatgatatacccgtctaaaagctctcgatg

SEQ ID NO: 25911 - DNA, 370 bp, Zea mays
  Clone ID: MRT4577_123641C.1
cggacgcgtgggctacactactggatatctttaagcttcagcctcatcagaattttggccttccattttagcaaatactatcggtgtacccattttatttgcagtttgtcttcaaattttatttcatgtaatataaacactgtctataatattttcaatcctttttatgatcaacaatatatccatctcaaatatggaagctaaggcaaaggaatttaatgaggtcatacaagaacagtattatccttggtttgcacaatacatggtcatgaaaagggcaagcattgaaccaaatttccatgatttgtatctgaagttctttgataaagtaaactcaaaatccttgaacaaggaaatactgaaagccaca

SEQ ID NO: 25912 - DNA, 651 bp, Zea mays
  unsure (1)..(651): unsure at all n locations
  Clone ID: MRT4577_123642C.1
aattcggcacgagggtgaggagaaaacagagagcgagagaagttctcggagagagaaactaagcgagcgagataaaagaagcgaaacgcgggcagctgttgctgaggcgtggagacggaggcggcggcgcggccgaaccctagccgacggcggcgcgtttgaggcgggaccctctgcaggcgacgcctggcggccggattcgagctgccggcgtcggcagcttcagatcggcggtcgcgccgacggaatcggcggggatcccggcgggatgggcgcggcgaggcccgtgctctggtcgtgagtttgcttggttcgtgggttctggctctgggctcccgagcaaggttttgagctcggtgtagccgcttgcttgcttgctgagttgctgctgtcgctttttgggcggtttggagcgggtttttgcggggggtttgggagggatctgccgggaaggcccgaggtttaggccggtttttgagagctggaggctccggccgggatcgggggagccatgtcgtctcttagcagggagctggttttcctcatcctgcagttcctcgacgaggagaagttcaaagagacggtccacaagttggagcaggagtcgggcttctacttcaacatgaagcacttcgagnacctcgtgcaggc

SEQ ID NO: 25913 - DNA, 708 bp, Zea mays
  unsure (1)..(708): unsure at all n locations
  Clone ID: MRT4577_123643C.1
ccgaccgcgnatgtcgcattggccatgaggagatgttcgctgatatcattttgcaactgcaaattcctagtaaccagattctatgtctagacattaaaacacagtggaacacaacctatctcatgctgcaggcagctctggactataaggaggcgttcaccatgctggagaaatgtgatggtaactacagtcaagcaccttcggcagtggactgggagaaagtcgaggttgcttgcaggtatctgaagctgttgtatgactctgcaaacaacattatggcagtggaaaatccaactgccaacatatttttccatgatgcctggacaattcagagagagatttcaaatgccacagatcatcaagatcctaattctgtttccagcagcatcgcaaaaggcgtgcatgagacgtttggcaagtactggaaagattgcaatgttgtgctagccattgctgttgtgatggatccccgtttcaagatgaagattgttgagttcagttactccaaaatctacggtccgacgaagggcgctaagtatgtcaagttggtggatggtgttgtacatgagctttacaaagagtatgttacactgacacttccgttgatgccaaaccatgttggggataagaacattccaagagatcctacttccattggcaatctacaatcaggcttcgaggtctccattgtcaagtcggagctagatc

SEQ ID NO: 25914 - DNA, 296 bp, Zea mays
  Clone ID: MRT4577_123644C.1
aattcggcacgaggatccgtcggccctgagcatgcaagctagggacagacgcggaggtgatgggcagcggggtccgggcgctgatgcgcctgaagcaggtagactccgagcggacgcgcgccgccggctgcgcccaccagttgcgcaaggagctctccgtcacccaactggtgcacatcggtgttgggtcgtcgattggagctggcgtctacgtccttggtggcacagctgagcgggagcgttgcgtgccggcatagacacttgcattgctgatagccgtaatagcaggtgagctt

SEQ ID NO: 25915 - DNA, 194 bp, Zea mays
  Clone ID: MRT4577_123645C.1
cctcctaaaatgttccccttatccccaactaacacgacaccccgcttaccttactgcgatccccacgcctcccccaaaatccgacgcggaatcgacggcatggccgccgacgggaagctgctcctcctggtcgccgccgtcctgatggcttacctcgtcgccgacgcgcgaccgtgcggtcacgcgcagacgcg

SEQ ID NO: 25916 - DNA, 152 bp, Zea mays
  unsure (1)..(152): unsure at all n locations
  Clone ID: MRT4577_123646C.1
tttagaaggacgganagaggcttctttataaacaatgtaaccggcaacactcggccctaataggccctccacccagactaattgtctctgctcaacaatcgcatggagatgatggaccacctcgctatacctacatataacagccagtatgg

SEQ ID NO: 25917 - DNA, 761 bp, Zea mays
  unsure (1)..(761): unsure at all n locations
  Clone ID: MRT4577_123647C.1
gttctcttctcttctctccgtctccacacaacgggaggaagctagctagtgaggcgtgagagtgtgagagcaaggcagtaccagcagcggcaatggagacgctaatggcggccgagctgccgcagcagaaggcgggggggctcgcgcggaggcttgcgaggctcctccgcctcaagcgctcgccggcggggtcgggcgtggcgtattctgcggccagcgatgtgtacgacgagtccctcgacagctccatcaactcgctcagccagctcaagctctctgggaacatggctgccgcctactccctcgacgcgttcttcaagactgccgccaagaagaagggcgcgccgcgccagtctccggtgccggcggcggacgcgcatgcgtttgtcgcgagccttttcgtcggggtttccgcggtgaaggcgtcgtacgctcagctgcagctcgcccagcacccctacgacgccgaggcgatacagtcggcggacgccgcgttggtcgtggagctcggcaagctcttggaccacaggaggcagtacgtcagggacccggtcggcgccgccaagaacgcggaggcgggccccgccgcaatcgccaacgagaagcgccacctcattcggacctatgagatcacggcgcgcaagctggagacggagctgcgcgcgcgggacgccgaagcgcagcgcgccaggggcgagctcgccgacgagctccacgccgcgcgcgcactggaggagcgtgntcaccccggtcgcacgctc

SEQ ID NO: 25918 - DNA, 241 bp, Zea mays
  Clone ID: MRT4577_123648C.1
aattctcgggacgacgtgctcactagccggcggccgccctccccttgggtgggttttttacaacctttttgggagatcaccccccaaaaaacaacagataagcaacaggcaagattgcaagctacatagggcccaacacgaccgagactgagacacccaccataactgggaaccacccctagctctaataacagaaagcctattacctcaaaacaaggaacagaagggtccagccaactca

SEQ ID NO: 25919 - DNA, 193 bp, Zea mays
  Clone ID: MRT4577_123649C.1
gttgcctgaaggcatagcagccaaaacatgtctgtgctgcgtacccatttagaattataataatattaacaacaacaacacacgagagctactcggagccggacgagttgccggtgcccgactgccggacgctccgtttggcggaggcggtggactgtttcaaagcgtgcgctgtcccttcgccgtccaggga

SEQ ID NO: 25920 - DNA, 268 bp, Zea mays
  Clone ID: MRT4577_12364C.1
atattataatctattggttcttttttgggttcatgtatttacttctttgtttgtttcggttctcttaaccacaacaagggaggagacagcagcttttttggggctgactgaaacatggttaactggggcgccggaacaaaagtggtcagggagaataaccgggaaaggggcctttgtgtaaatgccaaaacgctgagcgggcggatttttgaagggctcaggcctgcccaccatacggaaccccggacatagccgccaacagagcgcc

SEQ ID NO: 25921 - DNA, 1823 bp, Zea mays
  Clone ID: MRT4577_123650C.1
tcggccggggtggcgcaacgcggaagtgttggccggcgaggcagaaaaatcccgtgctcattttcacatatataataagcttatcttctcgggcttggaaacaccccactgcctaacgttctcttgtagcaccggagagaggcagaggggcgaaggaaggctaggtaggctagacatggccgccaaagctcacgtgctggtgctgccgatgccatgccagggccatgtgacgccgctgatggagctctcccacctcctggtcgaccaaggcttcgaggtcaccttcgtcaacaccgacgtggaccgcgcggccgtggtagccgcgctggaggcctccggcggcggcggcggcgtggcggcgctgggcggcggcatccacctggcgtccatcccggacgggctggccgacgacgaggaccgcaaggacatcagcaagctcgtcgacgcctacacgcgccacatgcctggctacctggagcgcctcctcgccgacatggaagctgccgggcggcccagggccaagtggctcgttgccgacaccaacatgggctggtcgttcgaggtcgccaagaagctcggcatccgggtcgtgtccttctggccggcggccaccgcgtgcttagccttcatgctcaagatccccaagctcatacaggacgggctcctcgacgacaaggggttgccagtccgtcaggagacgttccagctcgccccggggatgccgccgctgcactcgtcgcagctgtcgtggaacaacgccggcgagcccgaggggcagcacatcatcttcgagctggtgacccggaacaacaagctgaacgatgagctggcggagatggtggtgagcaactccttctacgaggccgaggccggcgcgttcaagcttttcccgggcatcctgcccatcggcccgctgtccgccgacggggcgttccggaagcccgtgggccactacctgccggaggacgagcggtgcgtcaagtggctggacgcgcatccggacgcgtcgtccgtcgtgtacgtggccttcggcagcataaccatcttcagcgcgcgccagttcgaggagctggccgagggcctggagctcaccggccgcccgttcctgtgggtggtgcggccggacttcacccccggcctcagcaaggcgtggctccacgagttccagcggcgcgtcgccggcaggggcatgatcgtcagctggtgttcccagcaacaggtcctggcgcaccgtgcggtggcgtgcttcgtgtcgcactgcgggtggaactcgaccatggagggtctgaggaacggcgtgccgttcctgtgctggccctacttctgcgaccagtacctgaaccggagctacatcgtcaacgtgtggaggaccgggctggcggtgacgcccgacgcggacggaatcgtaggcagggaggagctgaggagcaaggtggagcaggtcgtcggcgacgccgacatcaaggacagggcgcgggtgctcaaggacgaagcccaccggtgcgtcgccgaaggagggtcctcgaacgacaacttcaaaaagctcgtgaatctgctcagtgaatgatgagaaccgggagactgggagcatcgtgtccagtgtcctggcgttgtaaatgttggtgcacttagggcttgtttggtttgatggctaacttgtcatattttacctaacttttgtgtctaaagttagttcttcaattcgaacgactaaccttaggtaaagtgtgacacatttagctacgaaccaaatagccccttaagaagcaaatcaagcagttagatcatatgctgaactctaccttgactggcattgagaggac

SEQ ID NO: 25922 - DNA, 203 bp, Zea mays
  Clone ID: MRT4577_123651C.1
tcgaaaaaattattagataagaacaaaaataaatatctatataatcgacatataacaaatagtactgtcgcagtatagtgaacatgatggggcaagcctcactggtcgttctactcggcgtctgggggctgctgttctacggtctcctcccgcaggcgctgagtaagggtaggggaggcagcctgcacggtggcaccttaaac

SEQ ID NO: 25923 - DNA, 280 bp, Zea mays
  Clone ID: MRT4577_123652C.1
agtaatcatccaaagggtaccgcctctgattctaatacatccttacaaaaagaggaccagggtgctccaagggcacgtttacagaccgtcgtacccatcctcttaccgtacaccgaaggcggacttaatgtgaacgagtttaaaaacacgcgcgtagcgatctactccatgctcggttaattatcccaggcgatactcgcggtgctgagccccataatgaacatcatacacaacacggtcgagtcgctcatcaacaacccctttgaatacttcaacaacc

SEQ ID NO: 25924 - DNA, 725 bp, Zea mays
  unsure (1)..(725): unsure at all n locations
  Clone ID: MRT4577_123653C.1
cttatgagnaggcagcgtatccaagaatggcttgaattcttgaacaggcacataggacacttgaggaattcccctttgaagttgataagcttgagaagggctacaaccttactgaacatgcaactggcctgtcaaaaatccatggagtcagcggggacagcacaaatgtcatttacacatcctcccctaattgctactctccacatcgagcgtctcatatggtcctatagagcagcatgtaccagtcaccaatggagcttacctttccgcaacagtggtatgtacctgttgccaatggagcttgcctttccacaccagtgttacgcgttaccgatggagcttgcctttccgcagcagtgtatggtagtcaccaaatgacctttgatcccaattcttgaggtttttaagcaatgagcttgagagttacctgtaaattctagttttgctagggagcaaactgctttctagtagaaagctatttgctggtagagaactttaattgtgtattcttgaaattgtcacagccgacatcaatgcggtagtgaatatgggcaacaaggtagttgtatagggctatatccaacataccaatttgccctagttatcaattttgtcaccaatgagaatgtgaagatactagtgtaaccacgagacatcgagtcaatctccatgttgaacttcatttattaaatctgacaaaactcgtgcatcacagaaaataaaaa

SEQ ID NO: 25925 - DNA, 396 bp, Zea mays
  Clone ID: MRT4577_123654C.1
atagaggtcccgcgacatgaggtcactgctcctcgaccaccacgcctaccccagtgtccggacgctggacggagtaccccgctcgatggctacgcggtctaaccttcaagttcctgttcaagggcgccgggcccgggctcacgcacatagagcccaacaagctgaggctctgccttgaactcgtgcacaccgcggtgatggtgaccacgctcgaagaccacaccggggcagggggaggaggaagcgatgcaccctactacagcttggggagcctcaccatgaactccacgctcatgtaccattgccaggatatatgaagggccatggccctctaagtcagaaaagggagcggaagttcacgatggagcccgtccaacttgtacttccccactgcct

SEQ ID NO: 25926 - DNA, 492 bp, Zea mays
  Clone ID: MRT4577_123655C.1
taagctcggaattcggctcgagctcgagccgatcaggcttgtcataagaagggatctctttctttacgaagcatgaaaagaagggaaggtgttttttcgccgaaggctcaaaaacggtatgtgtgtaaatttcatgcatcacaaagaaataaattacaataatttacatattcgattcaaagttacatacatcaaatgtcacatagttttgttataatagaaacttaatgttcattccattgtcccatacatcaagcatttcaaaatattattacaatgaaatatattcttctctaaggactttttccgcaacttcgttcaaaagtttattgacgacttcgtcaataatggagtccgccatgcttataatgcccagtgctttcttcatttctggatcagctagggggtcgtacggttctggcgcggggatagttcagctggagtaggtacaatcgattagttcgcagccccatagcaagtaccgtacccacc

SEQ ID NO: 25927 - DNA, 346 bp, Zea mays
  Clone ID: MRT4577_123656C.1
cccctacaaaaggtccatctagcgaggaaattttaaccaagacccacagcttcctttccacaatgcagtccgtgtaccattgtaccaccgacaaaccgatccactacttctcaaacgaccaccttcattcatgactcttacacaatcccacatgcctcgcgagctgcaagacctgtaccaagaccaacttgacgctggtatccggcaagagtactatcactacgcccacgtactcctagaagagcttgcacaacacctgccactatatacgatcttcaaccaaccacaatctcctgtaaacctacagttcatactggctgcttaacatcccacacgatgctcccca

SEQ ID NO: 25928 - DNA, 751 bp, Zea mays
  unsure (1)..(751): unsure at all n locations
  Clone ID: MRT4577_123657C.1
gggtacctcgaggccggccggagcgctgtctcccctcccatatctcatctgcgacgatctcctccctcccgatcccgctccgtctccccccaccgccaccgctgccgctgccgcctcccccactgaggtcttgtcttcggcgatccatccggagcccgcgacggcgacgatgtcacggtcgggagatgctgtcggtcgacatacacgatgggttcctggaggccttcgtgtggtgtgaccgctcgtgcctcctcaccgacgccgactacgacaacctctgtcggtgcgagatcctcgacgacttctatgatgctcgtcaccgccaccgagctacggagcctacctccataacgaagcttgacctcttgcacacaacgacaattgtggagaggcgttctcttagactatgctatgagtactagcacatgctgtgccatgacactgtaccactatgtactctcttgcagtatataacttatggacacatgattgacagtgttgtccttattgtaactgtcacactgcatgagagatatgttaacaaacttttggagaactgccacccattgggcatgcttgacagcattgattcacttgctgatgctctctcatgcgggagctttatagattggctctagacgatactgcagtggccccttacttctcatgagtattacatctgaggatgtggatgacgtgactattgtgattatgagtgacgctctctacanagcatatcttgaggacttct

SEQ ID NO: 25929 - DNA, 283 bp, Zea mays
  Clone ID: MRT4577_123658C.1
cccacgcgtccgccgactcgttggcggactcgcgggtttacatcacgttatgtgtaataggccactttttttgcactgatgttttcatattcaacacagcagacattatgagcattcaggacgcgcatgtcaacaagctgtcaaacagaacgggcacgcttatgtgcgagagcgtcgacgctctgttcaactacatgacccggaccgtgttacactacaccacggggcacgtacgcgacgcgttacaagtggccagacgcttgccgggttcgacggcgcttgt

SEQ ID NO: 25930 - DNA, 385 bp, Zea mays
  Clone ID: MRT4577_123659C.1
cgaggcggtgcgggaggtggaggaggccgcgggggtggtcggagagagtcacgtgtagagggtgcgttgacggtagcggagaaggaggtcgccagcgagggcctgcagctgatgtccggcgcggagctcgccggggacggtctagtgcaggccgcggtggtcgccgtgcgccgacgtcgctcggtgtcgtcgtggacctatccgtggtaaatggtatccttaagcccgacgactagatggtgtacgctgctgggccttgtaatttccgcctaatacaagtgtttgggctttaacgctttcttgtctgtgtcgctgaaaatagctgaagacctcttttatgtgtgaactgttttattgttgcctgagttgcttccatttattcatc

SEQ ID NO: 25931 - DNA, 220 bp, Zea mays
  Clone ID: MRT4577_12365C.1
aatctaaatcttggtgtctagtatttatttagttactgtgctttacaatcaaagcagatatgagagaatacaatttctagcagaagcagatttgggaaaatgattttttcagcagaaatcgtaggagcatcagtcagaagatgcattctcccatctccctccatccacctgaactgaagcaaaactacaattcagccaaaggacgcaaataagtcggaag

SEQ ID NO: 25932 - DNA, 292 bp, Zea mays
  Clone ID: MRT4577_123660C.1
ccatgaaccattatccattcttccatccatcaaaaaaaaaatcagttcttgggaccaatttaaaaaatggagcctgccggttttgatggccgactcggcctaaacttattcttacaaacgggacaggggtacccttttgaaatacccatgggtaaacgggttacgattattgcttcccaaacccttacccgtttacccaatggggggaaattttggcccatatccatacccactgggacaattttgggctaatacccgtaccctaataggggaatcccccaagggttatccg

SEQ ID NO: 25933 - DNA, 212 bp, Zea mays
  Clone ID: MRT4577_123661C.1
taataatgtagctagcagcatgcatgtaggcgatcatacatacgtacgtacacaggtacgtgtgtgggatcatggatgctgccggaacagtttcctgaatttatgtgttgccctacgataatcttgcagttatggaaccttattatatcgtatcctgcaattggtttttttgcatcttataagagtgattttatttgatgagtcttatgctt

SEQ ID NO: 25934 - DNA, 306 bp, Zea mays
  Clone ID: MRT4577_123662C.1
cgccgaaattaaattggtaaatctctggaataccttgtctggaaggtccttcattccgagtacatacatgtgcaggacatgggaggattcctctttcctatgccaaagcaaagtgcctaaattgaccccagagcctgatttattcaaaacttggtttctggaatccatttcatcaccaggtcctaacactttttgccaaaaatttggattacacaaatcttgactacgtgtagagccctagagaaacaggttgagaaccagagcagcttcagtaatgccattaaggcctaagttcctttttttcct

SEQ ID NO: 25935 - DNA, 476 bp, Zea mays
  Clone ID: MRT4577_123663C.1
cattgggtacctccgagccggccgggaggcttttcggttttcgcgccgccgccgccgccgattcctatcctcgccgagcgatgccgcgacaagaccttccggatcaataacaagatgcagaataagaggcgccagaaccgccccatcccctactggatccgcatgcgcacggacaacaccatcaggtacaacgccaagcgcaggcactggcgccgcaccaagctcggcttctgagcgcgcggatccgtcggatcctgcgacggaattctagggtctctacctttcctttggacatatcgaaggctcatgtggttctgcaagctagcaaacacttccagaaagcttttgttaagagttttatgacgctgagaagattgaagccactatagctggaatcaggaatccctgctgccttgcgatgctaaactaaagaacctctggtacctaaaaaaaaaaaaaaaaaaacggccctccaa

SEQ ID NO: 25936 - DNA, 739 bp, Zea mays
  Clone ID: MRT4577_123664C.1
aattcggcacgagggtctttgggatcctggctcgctctcttttcccttctccggttctcccctgaaagcgagcagcggatagataaagctcgggtcggctttggtgccacgtactggccttcttccccttcgctctgacactgttcctcttccctcctcctcctcctcctccccccacccacctcctcctgctctttccccgtgtgtccgtcctctcctccccggcgggcggccatgactgctgtggcctccctctagcctcgctgggcggctgctgtgccagctctagaaagatacgacagctgttggccttcagctgctggcgctgctcgactgcactgcacaccatagagaggaagggagagagagagagagggagggagaggcagaggcagaggcagaggggggagtgtgtgtgtgcgtgtctgtgcctgccatgtgtgatagaaagaatctggaattgctttccaagtcattgaccgcccagttccagtttccttccccccctcgttttgtccccctcctgagcctccttgattcctgtgttgcttgctgttcctccctccctccctgcctgcttgtgtgtgttgttgctgttattccctgcttggctgttcatgcatcaagcaagctccccagcatctttctctcccatatatacccccttgtctgatgcctgcttctgcttctgcttgcccatcccctccttcattcttgacgagttaaatgcatgcctttc

SEQ ID NO: 25937 - DNA, 231 bp, Zea mays
  Clone ID: MRT4577_123665C.1
caacgagccaacgattactggagacggaggcgcaacaacggcgtcgcacgataccttcgcggatcagaatattctccccaacaagatgcgccaaagccgccccatcccctactggatccgcatgcgcactgaccatacgatacaatacgacgaccagaggagggactgccgccacaccaagctgccgcttctgagcatcgggattggccgtgtgctgcctcccgaggctag

SEQ ID NO: 25938 - DNA, 218 bp, Zea mays
  Clone ID: MRT4577_123666C.1
aaaaaaatgcaaaaacttttagcttaagcctttgcaacttttttggtggcgagcccaaaagcttaaaacccctttggtagggggcaggggcaagggcaagggcaagggcaacccaaaggcagagcttccccaaaggcccaaacccttaaaacctgaaacctttcactggcgcaaccgggcaaaggggtgtttcaaccaaccagacacattacacatta

SEQ ID NO: 25939 - DNA, 912 bp, Zea mays
  Clone ID: MRT4577_123667C.1
aaaaaaaaaaaaaaaaaaaaaaaaaaaaaaaaaaaaaaaaaactctccctaaaaccctaacctctcccccgcctccgccccccaaacccctcagccgccgccggcgaagcgcgcggcgagatggcgctctacctgctcttcgagtccgcgtccgggtacgcgctcttccacgcgcacggcatcgacgagattgggcagagcgtcgacgccgtccgctccaccgtgctggacctcaagcggttcagcaaggccgtcaagctcgccgggttcacccccttcctctccgccgtcgacgccctcaaccagtgcaacgccatctccgaagggatcatgactgacgagcttaggaacttcctggagctcaacctgcccaaggtgaaggaggggaagaaggccaagttcaccgtcggcgtcatggagcccaaggtcgggtcccacatcaccgaggccaccggaatcccttgccagtccaacgactatgtccaggaactgcttcgtgcagtgcggctgcatttcgatcaattcattgagcaactcaagccatctgacctggagaaggcccagctaggtctgggacatagctatagcagggccaaggtgaagttcaatgtgaatcgtgtggataatatggtgattcaagctatctttctgttggatacacttgataaggatgtcaattccttctctatgagagtgagggagtggtatggatggcattttcctgagctggtcaagattgtgaatgacaactacctctatgctaagcttgccaagtttgtggtaaacaaatctgacttgtcggagaaggacattccagctttagcggatctaattggagatgaagacaaggcaaaagaaattgttgaggcagcaaaggcatctatgggccaggatcttttcacctggtgattg

SEQ ID NO: 25940 - DNA, 2720 bp, Zea mays
  Clone ID: MRT4577_123668C.1
cattgggtacctcgaggccggccgggaaaacctaaaaaggactaaattaaaaaaaggcggacagcccagcccatctcgtcttgtctcggcgataccggctaccgccggcgaccttccgtctatccaactcgcagcgtcccacgccggtgaccccgctgggcggcagaaggagacgtcgggtgccgcggagcgccgcggagcgccgccgccgtccaagctgcctccctcggctggtggactgtatcactgctcctcagacacccgctgttctgtccggcaacgtgcctccgccgcaaacccgctcgatcagcctgaggcatcgcacgatttctgactcatactttatcgccaattggctggggtggagcacatctctacccggacttgatagattccaatccttcccaactcaacgttgggcagatggcgcagatccccaatcttgacaacgcgccgctcaaccttgcggccctcagggagcagtcgcagaaggacttgttcggcatcctaaaaaatataaggggaaagaagtgcttggttatagatcccaagctcgctgggactctctcattggtcgtgcagacatcgctgctaaaggagtatggcgcggaagtgcggattctctctcccgaacccctgcagacggaatgccccaaaattgtatatcttgtgcgctctcagctgaggttcatgaagttcatcgcaagtcaaatcaagaacgatgaacctaaagggctccagagggaatacttcctttactttgtacctcgccgcactgttgcttgtgagaagatcctggaggaagagaaagttcatcagaaactgacattcggagaatatcccttatatctagttccattggatgatgatgtcttgtctcttgaacttgaccattctttgcaggaatgccttattgaaggagatacaagttctatctggcatgttgctaaagcgatccataaattagagtttgcctttggagttatcccgaatgttagggccaagggtgtggcgtcaaccaaagctgcagagttgttgaatagtatgcaactagaggatccagtcaacatggatgatatggggattccagagataaacactgttattctgttagacagagaggtggacatggtaacaccaatgtgctctcagttgacgtatgaaggcttgttggatgagatgctacaaattaataatggttcagtggaagttgatgcaagcatcattggagctcaacaagatgggaaaaaggttaaggttccactgaattcaagcgataagttgtacaaggagattcgagacctcaattttgaagttgtagttcaggttttacgtcaaaaagcaacatctattcagcaagattatgcagaagtgaaatccaccaacactcagtctgtttcggagctcaaggattttgtgaggaggttgcactcgctaccggagatagctaggcatgttcatttggcacaacacttgcaatcgttcacggggaaaccctcctttcatgcccgactagacatagaacaaacaatactggaggttcagaactttgaaatatgctttgagtacattgaggagatgatacataagcaggaagttattgaaaacgtccttcgccttttggtgttactttctcttacaaatgccgggcttccaaagaagaattttgattacatgaggcgggagatacttcatagttatggctttgagcacatgcacttattatacaatctggagaaggctggccttcttaagaggcaggaatcaagaagcaattgggttggtattacaagagcactgcagcttatagttgacgtaaatgatacagcaaaccctactgatatatcctacatcttttctggatacgcacctcttagtattcgccttgttcagcatgcagtgagatctggatggcggtctattgaagaactgttgaaactattgccaggcccacatctggatttgaaaagaggtggtttgacaattaattcatcaccggaggtacatccaggtttaggggctcaacagagtattgacagggttggtcatcgctctctggttttggttgtattcattggtggtgtcacatttgctgagattgctgcccttcgcttccttagtgcacaggaaggaatgggctacgactttcttgttgcaacaacaaaggttgtcaatggaaacacaatactcagacccattatagcaaatagcaaagaggggatgatgtaattttattccttttctgtgcatgtgttttttgtaattgcaattgcagacaaacccaagcttgtgggttttcttgtttggctgtgagttcgtgtttggtcagcaactggacgataaggctaaccacgcttgttgatagatggaatccaacagtcccattttttgttctgttctgttctgtagtacatccgctaaactgtaaatcctgggtttcatgtgttcgtctgtctttttattcaataattgcttccttgaaggccgtttatgttgtttgtggaccaatattgtgaaaaaagaaagaatgtatggaacctgttgcaaatcaaaaaaaaaaaaaaaaaaaaaaaaaaaaaaaaaaaaaaaaaaaaaaaaaaacaaaaaaaaaaaaaaaaaaaaaaccctgcgcaataagaacagctctagctcccttcgtcgtggttttttcctccgcttcccggtcccccgttccccgccgcccgccgcataaaaccccg

SEQ ID NO: 25941 - DNA, 265 bp, Zea mays
  Clone ID: MRT4577_123669C.1
cctcctttttttaaataaccatatcaatgtttttttttttttactagggtaatcccacaggcccaagccaccgaaccaattacaagcacccaccacgggacaaaacaaccatgagaagccgaacatcaaagtggtaggtagaaaagtagacaacaccaacaacaaagacaggggggcttatacaaggtcaacttggtgacgaccaaagaacgctaagagagacccaataaagccagctcacttgaaaggactaggccagggggaa

SEQ ID NO: 25942 - DNA, 231 bp, Zea mays
  Clone ID: MRT4577_12366C.1
tcgccacgcgtacgcccacgcgtgcgcagacgcgtgggtaggcacgctcagaagttgaagatgttcacgagacatctgcaagggcactatggaatcttgcattctattctggtaatgctcttcgcatagtccatgaatgtagggttcctgttcttgtaaaaatttgcttatcatcacaggccaagatggcacgtcttatgtctgcactagcactagcatatatgttcgacc

SEQ ID NO: 25943 - DNA, 272 bp, Zea mays
  Clone ID: MRT4577_123670C.1
tcataaaaggacaaacagcggcggccccacgggtgggcggaggcagggaaaagggcccgaacccccctacccgcggggggccaggcccgcgccacggggcacgagccccgccgacgccggcagacagccggcacgaggggcagcaccaccaccgtgccagcaagaaacacgggagggcagaacaccaacagcaacgacagcggcgcagacgccagaccaaaggacaggcgggcaaaggagcgagagccgcgagacacacgacgagggaaaag

SEQ ID NO: 25944 - DNA, 969 bp, Zea mays
  Clone ID: MRT4577_123671C.1
tccggttctatctccaattatggtttaggtagcacttccgtgggtaagcggacacacttccttggcggagatacgtggaatacatcatgaattgctgacatatgagatggcaactttaactggtatgcgacaggtccacaagtctcattgatttcatagggcccaatgtagcgaggggtacggtttaaaggattagttgagggaaaccccaggggcctcggcgcaaactggttttcattaaacccttttaactttattcttttaaatgcatacaaaacttgcaaaattcataactcaaatttgatccagccaaatttggtcaaactaattttgctaggttctaaataatatgaactacttaggaaaaataacaaacaccctaagtattgcaagattttttagtttgatttaaataagtatactgcctaaaactaaataaatagaagataaatagaaatacttttggactgagggtaaaaaaatcagaggcgtgcccaactactaactaccatgtttaaaaatgttggactccctagtatattagatttagaagaaattaaccacaaaaacttgttttagtccaaacattaaaaaatggaaaaggggattaaaaatatgaaccagagggcaaccacatttttcctagcttacttgagtaacatagtttacaagaaaattttgttgaaccctttgttagtacaaaagaaatgcaccccattttatttcttaaaaacaatgagaacttagaaaaatcctagggaaataatcctaaggagaaaccaccccaatccttgggataactaataatatgctagtttgaatctaggaaaaatataagttctgttgtttgacatttttcaaatggcaagttagttataagtacattttttatattaaaccttagaaaatcacagctaaataaccattaggtcactttctgtgatttttggcacagaggcctattatccc

SEQ ID NO: 25945 - DNA, 375 bp, Zea mays
  Clone ID: MRT4577_123672C.1
gcatgatcccgaccgccatggccgcgggataccttactggtcgctgtgggtctgggcgggcctggagccaaaaggcgactactgttcctccccggagccattccaggtggggagggaggggggtttcagacttgtgttcctctccctcgtcctcctgtctccttaggctcagtagaagcggtggggaccctctaccagcttcctgagccctgcctgcagttggccacccagcactgattggggacaagggctgaactgctggccaccagccacacctaggaaggagctggggcctagaagctaggcagccttcggcctcaggggccgcttcgtgccctcccagctgggaggggtcgctgtttcgccttgtctgtc

SEQ ID NO: 25946 - DNA, 896 bp, Zea mays
  unsure (1)..(896): unsure at all n locations
  Clone ID: MRT4577_123673C.1
aattcggcacgaggcgctgccctgccgctgccgctaattaaccacaagcggccgtcgccttcccccctcccctcctcaaaaaggcggagaggtggtggtgctcgtgggcacgcagtggagcacccagtacagcagcagcgctgcggcagtggagttaggagcttagcactccccctccgttcccatcccgcgcgcagccgtcggccgagcctgctcagtgcccatcatggtgaggaagaagagaactggccctggcggctctggagaaacttctggagagtcttcaggagcttctggacaaggttcctcacagaggcctgaacggactcaacaacctggggcaggacgtggctgggtgcctcagcagggtggccgtggtggcgggcaacaccagggtcgtggtggacattatcaaggccgtggagggccaggtccacatcaccctggtggactgcctgagtatcaccagcgtgaataccagggacgaggtggtgagtaccagggacagtaccaggggcgtggtggtgcccgttccagaggtggaatttcacagccatactatggtgggcataggggaggtagtgttggacgaaatgttcctccaggtccatccagaacagttcccgagctgcaccaagccccatacgtccagtatcaagccccggtgatttcaccatccccatcgggacctggctcatcctcacagcctatggcagaggtgagctctggacaagtccagcaacagtttgagcaacttgccattcatggtcagagttccatgagtcaagaagttcaagtggcaccagcatcaagcaaatcggttcgattcccattacgccccngcaggggcacttatggggacaggtgcattgtgaaggcgaatcattttttgctga

SEQ ID NO: 25947 - DNA, 120 bp, Zea mays
  Clone ID: MRT4577_123674C.1
atggcgctgaagtacgtgctgcgctggcacaatcggacgctgtggcgccgacgtggcactgagctcggcgccaagatctatggcgccgagctcggttggatttttcgtttatgtcgctga

SEQ ID NO: 25948 - DNA, 645 bp, Zea mays
  Clone ID: MRT4577_123675C.1
accccaccagagcaaatatacgccacgccttgtgagttctgtccaggctgtgacagttcagattgtaaggatgaagcttgggagcccaagccgaaggacaggaggattcagcgaagccctcagggaacaaagatcaaagctttatatcatctcgcggatatcaatatcggtgttcaacccactggacctaaatatccgtccgcggccgagcacacaccaacagattttcttcatctagcgcatggctcccgcgcctgtcggctgcctacttccccacgaagctcatcccacgcgcgtcatgctcgatccagacggcgaggcctgctccccaacctggccccgacccaggcgatcaaccccgctgcccagtcaccagggcgcatcctcctccccacccgtcgacggccaccacccgccggtgcgcctcagtgcgcaaacaaaaaggaagaaaaatacctgttgtttgtggccggagtgcacagggtgcgtggccagagtggagggctgactctgacgcaaattagcaggatccggcggcgttgaactacgcctgtaccagttcacgcaagagaagatgtcaacacagtgccggccaattgcaggataagatcaagtgggtttaggagtcgctgttagatctaaaaa

SEQ ID NO: 25949 - DNA, 404 bp, Zea mays
  unsure (1)..(404): unsure at all n locations
  Clone ID: MRT4577_123676C.1
ggtccacaacagaatccagggcacaagccgtgcatggttcctttgttgcaaacccccaaggtccaggtgagcaaacacttcatatnctatgtatgtagcacgggatttaatgtgaaatttcctttctcacactaataaaacctccaaaacacgctacaggtgttttacgcacagatagaacccttactgattgactgttaagagtaggacaacacggatctttaggtggacaagctgcaaaaaaggggtttgaactactaccctccaagattggccttgaccgtatgtttcaacggaatacacattcggggaggggaaccattccacctacccctgcaggaaggggatatttgcaatggtgcaatctggcaaataaaattggtctgggagaccatgttatatcg

SEQ ID NO: 25950 - DNA, 413 bp, Zea mays
  Clone ID: MRT4577_123677C.1
caaatcattcgcgagcagggcgccctattttatattatcatcatttgagcagctgcaatctggattcatctaggtcagccgccatcaaaggataccacctcacgcgtcgcacaacggtcacgcccgcagtgggcatggacggtagatcggacgagacggttccaacaccattccacacgatagacgacaagctcaagccggactgagtcaggtaccagcagattccagtgggagggccgtcatgtgctgtgtaccctgtgcggctcaccgccggtgtacgtgacctgcgatttcgcctgggacaagtggtgggatagccccgcgctattcgcagacccggagactttctacaaccatcgcaaagtgtctctcatccacaaccgcttgactaagcatcggcacccccgggtttg

SEQ ID NO: 25951 - DNA, 276 bp, Zea mays
  Clone ID: MRT4577_123678C.1
gagtccccgcggggctgcaggagattcggcacgaggcaccaaccaacaagcaagaattcccaatcctctcgggtgcgggctaacatgtatggccgcggaaggtcgtgagggcctgtcaagggcgaatcaaagcggaaccggaaggtgctgtgcgacatcatgcaggggatcacgaagtcggagatgcggaggctgaggcggagaaggttgtgaaagggcattttggtgcttatgtacgaggagacccgggggggggtgtggatctgggtggagaac

SEQ ID NO: 25952 - DNA, 391 bp, Zea mays
  Clone ID: MRT4577_123679C.1
gtcagatcttgtaaaaaatggaagcgctctttcaaaaagggagattgggtatacacagcccacctttgggcacaggacaccggctagactaatgtctcacgaagtgcagtttcaagatttttgatacaggaccgctgttccatgaatacatgattaacgctgacaagcctctcattgagggcagccgtcttttacaaaacttatatatatgttcaggatactagcagattaaagaccggattgatagaagacgcggacggaccgcagtacggatgacaagtctttacttaccatgacaccgacttggtcataatgttggggctagcattgagcttcattttcggggaccaagggcatgggggcgaatgttcaaacaaccatggtattatat

SEQ ID NO: 25953 - DNA, 144 bp, Zea mays
  Clone ID: MRT4577_12367C.1
gccaggcagaggggggttttttaaaaataatttgcgctatacaaccaccaaggtaatggtatgcatcacacaacacatgacatggaccacagaagctgaattggtacatacatccgatagatatcttaatttgcaaaacagaaa

SEQ ID NO: 25954 - DNA, 1410 bp, Zea mays
  Clone ID: MRT4577_123680C.1
ttgggtacctcgaggccggccgggctcctccctacctctgttcccccctctcctctggcggtcggagccggttcctctgacgtactgcaggggcagtagggtcactgcgcgcgggccctgtcgcacgcgggggccacgcggcagtgcccaccccccacgtcagaggatctcgttccctggcggtctggcctgtagttctagctcgttccccccgcaagctcgcgacctcgcctagcggccaaaccacgctagagttcgcagttggaagaggggaggaggaagaggacgagatggcgagggatgacgggttcccggtgtgggaagcggcgctgctcgctggcgtggctgccgtcttcgctgcggggctggctggcgtctacatctccatgcctcgctccgactacagcttcctcaagctcccccgcaacctccaggagctccaagtcctcactgtccatctggagggctacagcagtgactacaccatccaggtgctggtgggctactgtgccgtgtacatattcatgcagacgttcatgatcccagggaccattttcatgtccctgcttgccggggccctctttgggcagctcggtggtctagccctggtgatctttgctgccactgccggtgcttcttcctgttatttcctgtccaagctagtagggaaaccactggtcttctcgttgtggccagacaagctcacgttcttccaaaagcaggttgcaaaaagaagagagaagctgctgaattacatgcttttcctgagagtcactccaacactgcccaatactttcatcaatttttcttcacctatagtgggtgtgccataccatactttcttctttgcgacggccattggcctcgtcccagctgcctatgtgactgtcagggctggaattgctttgagcgacctgagatcgttgaatgatctgtatgatccgcagtcgatagcggtgctgttcctgatcgggcttgtttcggtggcgccaacgttgctgggcaagaacgagaagccaaccagcgcatcggacatggcagctaacaccaactgatcactagtacacgccactccagctctcttctcatgtacatacaaaagtccagcgtttggtagtggtggcttcgagactctggatcaaataggacatgtcgccggccacgaacatggcgagggtcccaatctgtagatctgtcgacacttctgggaaacttttgtgctgactgctgattttgcagaagtgatgtctcatgatcacctcatcgtgaatcttgctggcaaaacgggctgggaacatctctctttcggttgctttgttttacattgtttcgctgttgtatcttgcacacgtcaaccagattcaatcaatacagccgattcagtgattcattcaaaaaaaaaaaaaaaaa

SEQ ID NO: 25955 - DNA, 478 bp, Zea mays
  Clone ID: MRT4577_123681C.1
ccggccggggatccttctggccgtgctgctttgggtgttcacgatgctgcgtatgaagacactgcagggaaaactcctgcctctgctgatcctgtctcagacaagggccttcgtccagctattggcgaaagcctagggacacccgttgcttcagccacagctgtctaaccttatgtttatcacccagcaatgcttgaaacagcaaaggttgtccattgcttgtttcagtttccttccgatcatgtttttagttccatcaatcaagcaatggagacatgcttgtgcttcatacttggcagcatcgtgtttgggttttcactgggcagtactgtttaatttttatggactgaaaagactcagttttgtaaatattcgtcactgtgaccaattcctgtggtggtttatgtgatttgcagattgcagtggttagtggaaaaaaaaaaaaaaaaaaaaaaaaaaaaaaaaaaaaaaaacacac

SEQ ID NO: 25956 - DNA, 294 bp, Zea mays
  Clone ID: MRT4577_123682C.1
atggtgtgttacttaaatttttttttctttttatttcacacacgacataaagagacaaccataaaaccccactagtaacaatcccaaccacttaccacaagtaaacaaaaccacccagttgcgccaacacggcttgaccgaggaaaaaaaagacctcaacaaacccctggccgttgggcaacatcgatctggatccagatcctccggcatggaaacatggcgttgccgtcccctgggcaccccttcaatgggactgctgctaccttacactaactggatgcccacggacctcac

SEQ ID NO: 25957 - DNA, 1037 bp, Zea mays
  Clone ID: MRT4577_123683C.1
ccggccgtttccaggtaccaaaagaaagaattccatgatgaaacatgtcggaagataaaagcactacatctgtatgactgcttgagagctaacaaagcaacttctgcctggggtgttgaggctcgtgttccattccttgacaaaagtttcatcagtgtagcaatggacattgatcctgaatggaagatgataaaacgtgacctcggtcgaattgagaaatgggttatccgtaatgcatttgatgatgaggagaggccctatttacctaagcacattctctacaggcaaaaggaacagttcagtgatggtgttgggtatagttggatcgatggattgaaggaccatgccagccaacatgtctccgattccatgatgatgaatgctggctttgtttacccagagaacacacccacaacaaaagaagggtactactacagaatgatattcgagaaattctttcccaagcctgcagcaaggtcaactgttcctggaggtcctagtgtggcctgcagcactgccaaagctgttgaatgggatgcatcctggtccaagaaccttgatccttctgggcgtgctgctttgggtgttcacgatgctgcgtatgaagacactgcaggggaaactcctgcctctgctgatcctgtctcagacaagggccttcgtccagctattggcgaaagcctagggacacccgttgcttcagccacagctgtctaaccttatgtttatcacccagcaatgcttgaaacagcaaaggttctccattgcttgtttcagtttccttccgatcatgtttttagttccatcaatcaagcaatggagacatgcttgtgcttcatgcttggcagcatcgtgtttggggttttcactgagcagtactgtttaatttttatggactgaaaagactcagttttgtaaatattcgtcactgtgaccaattcctgtggtggtttatgtgatttgcagattgcagtaaaaaaaaaaaaaaaaaaaaaaaaaaaaaaataaaaaaaaaaaaaaaaaaggcccctagggcc

SEQ ID NO: 25958 - DNA, 263 bp, Zea mays
  unsure (1)..(263): unsure at all n locations
  Clone ID: MRT4577_123684C.1
atangcctagaccaagnagtnatnaaacncgaactgacacngagcnacaacccaaacaacccagctctcccnaagcttcaaactagactactncnccataanatncatccctgtagncatngtgcggtacatggtncancatagaantctcactgtgatanatnaacncagacncaaaacattaatcagttcttcaaatanctactgcatnttcctaantaccatactaatcttagtgaccgcnaacaacctattccaactgg

SEQ ID NO: 25959 - DNA, 2357 bp, Zea mays
  Clone ID: MRT4577_123685C.1
cctcgaggccggccgggattccctgcctaaaactcccatttcgccgtccgtgacgcgagagacctcttcgcatcccgaggcggcgcttttggggtcggaagcgacacgggcgcccggcgggtccgcgggtggtggtgctactgctagcaagcagcagcaggcgacgctaggcgagagccccagtcggagcaggccaccatgtgcggcatcctcgctgtcctcggcgtcgctgaggtctccctcgccaagcgctcccgcatcattgagctctcgcgcaggttacggcaccgagggcctgattggagtggtttgcactgtcatgaggattgttaccttgcacaccagcggttggctattatcgatcctacatctggagaccagcctttgtacaatgaggataaaacagttgttgtaacggtgaacggagagatctataaccatgaagaattgaaagctaagttgaaaactcatgagttccaaactggcagtgattgtgaagttatagcccatctttacgaagaatatggcgaagaatttgtggatatgttggatggaatgttctcctttgttcttcttgatacacgtgataaaagcttcatcgcagctcgtgatgctattggcatctgccctttatacatgggatggggtcttgatggatcagtctggttttcttcagagatgaaggcattgagtgatgattgtgaacgcttcataacatttcccccagggcatctctactccagcaagacaggtggtctaaggagatggtacaacccaccatggttttcagagactgtcccttcaaccccttacaatgctctcttcctccgggagatgtttgagaaggctgttattaagaggctgatgactgatgtgccatttggtgtgcttttatctggtggactcgactcttctttggttgcatctgttgcttcgcggcacttaaacgaaacaaaggttgacaggcagtggggaaataaattgcatactttctgtataggcttgaagggttctcctgatcttaaagctgctagagaagttgctgattacctcagcactgtacatcatgagttccacttcacagtgcaggaggggattgatgccttggaagaagtcatctaccatattgagacatatgatgttacaacaatcagagcaagtaccccaatgtttttgatgtcacgcaaaatcaaatctttgggtgtgaagatggttatttctggcgaaggttcagatgaaatttttggtggttacctttattttcacaaggcaccaaacaagaaagaattccatgaggaaacatgtcggaagataaaagcactacatctgtatgactgcttgagagctaacaaagcaacttctgcctggggtgttgaggctcgtgttccattccttgacaaaagtttcatcagtgtagcaatggacattgatcctgaatggaagatgataaaacgtgacctcggtcgaattgagaaatgggttatccgtaatgcatttgatgatgatgagaggccctatttacctaagcacattctctacaggcaaaaggaacagttcagtgatggtgttgggtatagttggatcgatggattgaaggaccatgccagccaacatgtctccgattccatgatgatgaatgctggctttgtttacccagagaacacacccacaacaaaagaagggtactactacagaatgatattcgagaaattctttcccaagcctgcagcaaggtcaactgttcctggaggtcctagtgtggcctgcagcactgccaaagctgttgaatgggacgcatcctggtccaagaaccttgatccttctggccgtgctgctttgggtgttcacgatgctgcgtatgaagacactgcagggaaaactcctgcctctgctgatcctgtctcagacaagggccttcgtccagctattggcgaaagcctagggacacccgttgcttcagccacagctgtctaaccttatgtttatcacccagcaatgcttgaaacagcaaaggttgtccattgcttgtttcagtttccttccgatcatgtttttagttccatcaatcaagcaatggagacatgcttgtgcttcatacttggcagcatcgtgtttgggttttcactgggcagtactgtttaatttttatggactgaaaagactcagttttgtaaatattcgtcactgtgaccaattcctgtggtggtttatgtgatttgcagattgcagtggttagtgtatcttcccaattttcactcctttaacacttgtggttgtttgtgacgtgtgtgcagatttatcttttcatttttcaatcaaggttttcatttcttaaaaaaaaaaaaaaaaaagcggcc

SEQ ID NO: 25960 - DNA, 355 bp, Zea mays
  Clone ID: MRT4577_123686C.1
gcggtcagccctcgcccggcgctgctgtactaggttacctacttcgccgaggtgtaccaaatcataccatggcgttggagaagaagcagtcatacccgatgcgggagacgaacgttcagaacctcgtgctcaacatctctggcagctagagcgcagatcgcctgacccgagccgccaaggtactggagcagatgagcggccaggcatcctctttgtcacaaggcaaggtacactgagaggacgttcgcgatccgaaccactgagaacatcgcatgctatgtgacggctcggcgtgagtacgcaatgcagatgctagagagtggctcgaatgtaaaggattactacctgatgatga

SEQ ID NO: 25961 - DNA, 500 bp, Zea mays
  Clone ID: MRT4577_123687C.1
taaaaaaaaaaaaaaaaaaaaaaaaaaaaaaaaaaaaaaaaaaaaaaatttttttaaaaagaataaaccaaaaaataaattttaaaaatttttctgtttttccttttttcggggggggggttttatggggcttttttttgctgttttttttctggggggggggccttttggggcttccttttggttgggccccatttgcccctttgtttaggggtgttccttttttggttgtctatcccttttatgacggggtggggttgtaaaacctttgggctcccctttcttttttgtcttgctgcttttccccctttggccgctttgggtattcccgagttggcctgtaccgtttgccttttccaacggtttgcccttttggacgtgctcttgttttccctttgaatttggggcatttggggtgggggtttttgggggtttttttcagtggggcctttccattttccagccccttaaccccctaacttttcccttttttcggttcc

SEQ ID NO: 25962 - DNA, 482 bp, Zea mays
  Clone ID: MRT4577_123688C.1
acagacaaggaggacaaaaccacttgggcaaccttaccaaatatacaaaattttcagatataagctaaccaacatcaagggggaaaaaactacatagacgaccttcccacatataaaaaagccttaaaatggcccccatgggtggggcttttatagaaaaccagggacaactttggctgggggggggccctttccggggggaacaaaaaaaaaaagggcaacccaggctcagaaaatctaaaagcaaatgggggaggggtcacacgggaggttcgacaaacttagaacaaatttaacagaattccttccagggcccccaggggttaagggcaacctccgggcctccctttaaaactcggggggggggggagagggcaccctaacaaacaggaccctttgacgttcctaaggaggagacggtttgggtcatccaaaaacttcactttgacctggggcacctgaccccgggagccggtcctgcc

SEQ ID NO: 25963 - DNA, 909 bp, Zea mays
  Clone ID: MRT4577_123689C.1
aactgcatggtgagcgactacagtgtcgcggtcctggcagcggcgatgcagctcaagcggcgtgtcctctcgctgtctggctgtatgaaggtgacacagaagagcgttcctttcttgggcagcatgtcttcatccttggaggcgctgaatctccagttcaacttcatcggtaaccacaacatcgcttccttggagaagcagctctggcggtgcgacatccttgcttagagggaacaagggcgattggttgctggagactctgggtcagcaacctttttttctccagatgcagatacacgaccgtaggggtagcatatacttaagtctaagcctcgttagttgagtctggtttctggctcgtgtttgtgtcttggtggggggtctctcccgtttgtcttagggccggttgttttccgaggggcgtttttttgccgaggctcgttttttttgcaggtatcctcctgtgaggatctctgttcgctgagcctttggcagccattaccatgtggcaccctgcccccctccataccaacctaagcccttgtgatcagtcattccaccatgcagtttctctcaagtcagtgtttgaagctcaagtattctgtcaagtgcgcgttcttttccactactactggttttagagttgcagacatcaacactcctttgattgcaaatcttgctgccgagtacctgcaagtcagtgtttgttggtcatgggtggttgctattttgcggtgtccggttagggtttgccttattgcatgcaggttcgttctacagagcctttgccttgacaaccctgtgtggttgtttttcttctccggagacctgattttgcaggctggtggttggaacaccgtaatatttgcaacctcttctgaagataaataaagctgtgtttctgttctg

SEQ ID NO: 25964 - DNA, 396 bp, Zea mays
  Clone ID: MRT4577_12368C.1
aattccctggtcgacgttgtttttagtcggcggccgcccttcattttttttggttttttttcgggggccattgaaagatacacatcaaaacatccaatggccaaacaaacacaatgagcacattctcccaaatttgttcgacaatagctcatctaatgtgcatcaaagcacagcgtgtaacaaagataacccattgcgctatacgttttaggaatccaacctgaccttgccatccaataaaggaaatgcttcaaaatatgccttgaaatgctcatatgagtagctaatatcgacagcggggcacattactataatgctgtgccatgataattggggtggtgcaatatcaacaatgcgaataccaacaccactagcaagtattcggccattgtttta

SEQ ID NO: 25965 - DNA, 293 bp, Zea mays
  Clone ID: MRT4577_123690C.1
aaagaatgcttcatcagtgccacatgcccaaccctcaccaccaagtgtagctccagaattggcacccactggtagatctcatgctcagggatggaaatccagtaatcccaataacaaaacaaatagattacctgccccatcttatccaccgcctcgtgctcaagggcccgaggtctcacaaagcccaagacagactgggactataaactatactcaccatgcgcctccaccattccctcaaggacaccctagctttcctgtacactcgtcatccccttcacgagcctcatcgg

SEQ ID NO: 25966 - DNA, 480 bp, Zea mays
  Clone ID: MRT4577_123691C.1
gagggaaaaggggaaattatttttaccggaattgggcaaaaggagatttttttaaaacattgggctagaggttaattggttttaaaaaaaagggttctaattaggggtgaaaaaaagggataacgctttggacttgggacgactaaacaaaaaaaagggttcttattaggaaaaaaattttgggggaagaaaaaccatgagaatggtttaaggtacagggcttttgcccttttttctttgtaggttttttatgtaaaaataaaactttttaccctcaaggatgtacccataaatttgggcacacttttcagggggggaaaaaaagaattccaaaaaccgtccactggcaaaatggttcttaatgggggggggaaggggacggccctccttgggctttttaagatttcttgtgacaaggggggttttttttgtttcctcaagtggtggctaaacctcttgtccctcaacattattcttttt

SEQ ID NO: 25967 - DNA, 139 bp, Zea mays
  Clone ID: MRT4577_123692C.1
aggacgtcaaaacatacttaacagagtaatcataaaacctgttcagaacctgccactacaaaagagatcttaacacccgatggttcccatggtgcttgacgtcggctctacacctgcagttcttttaaagggaaacagg

SEQ ID NO: 25968 - DNA, 175 bp, Zea mays
  Clone ID: MRT4577_123693C.1
gtcgcttcttaaaccttagtactacggatgttatgagctaataaatatatgtggtgtctgaaatgttctagaacctctaaatctattactaagagcaacgatattgtcgcttcttaaaccttagtactacggatgttatgagctaataaatatatttcgctaatgtgatgcagtt

SEQ ID NO: 25969 - DNA, 1113 bp, Zea mays
  Clone ID: MRT4577_123694C.1
cccacgcgtccgcccacgcgtccgcggacgcgtgggtttacaagttcaccactccctctcccccatcacctctcttttctctataaccttacttctcaaacctcaacatggagctcccctacgtaaccctcgacgtcttcacccgcacccgcttcgccggcaaccccctcggcgtgcggaccatccccgcctccggccccaagccaacccaggcccagaaacaatccatcgcccgcgaattcaacttctccgagacaatcttcatccacgacgtcgccgacccggccaccaacaccacccgcaccatcgacatcttcctcaccaccgccgagatccccttcgccggccacccaaccatcggcggcgccgtcacgctactgtcccagggcgtcacccagatcatcacaaaggccggcctcatccccgtcacgcccaccggcccggactccgtctccatcggcatcccgcacaacgtccacctgcacgccaccagcctcgcctcctacccgggcctcgagcccgcggcccatctccagcgcaatgagaccattcgccagctggagcttgcggcgcccgtcttcagcctcgtaaagggcatgacctttgtgcccatcgagctgccgtcgctggagctgctcgccgccgtcaacgtcagcagcatggagttcaaggccgacaatttcctggacgccgactggcagcaaggctttgtcggccgcttctaccatgttatcacgggcacctcgaccacggacgacggcgtgccggtaattcagctgcgcactcgcatgatggcccatgacctggaggatcccgctacaggctcggcttcgtgttgtctggcggcctacatgagtatccatggagcggacaagcagacaacgcaaacaagacggtacgaatttacccagggtgttgagatgggcagggagagcttcattgttgtcgacgtcagcgtcaaagacggcgcccttgatacagtcacacttgctgggtcggcggtccaagtcatgcgtggacatgttaccatttagtagagccactactctgatagaaaaataacttgccccggcgcctttgtcctcaaaaaaaaaaaaaaaaaaaaccccacac

SEQ ID NO: 25970 - DNA, 389 bp, Zea mays
  Clone ID: MRT4577_123695C.1
cctttgttttttttttttttttttttttttttttttttttgttttttttttttttttttttttcaaaaaagaaaggggcggtttataggcattttatgaagccacccatccgggggaaaggttactgtaaaacaggcgagccaaggaatgtatacaaaaacaattttggggcccgggggtaatcttaaggcgcgggtcccctacaattgcattgtagtgcaaaactacagattcctgaaaacactaaggcgtttaatccagtctgaggaaaaaatggaaacctcctaaaacgatttacattttttgccggaaaacggcggactgtatgtgtaaattaaagaatccaacacttttgcggaaagaggcctgtttggaaacttgggggcttg

SEQ ID NO: 25971 - DNA, 367 bp, Zea mays
  Clone ID: MRT4577_123696C.1
catgggggttcggggaccggaacagattgctcatttgacatcccagaacaaggcttgagcggggatgttatctacaatggaatggggggcaggccaataaacattttctggcgaaccaatacatgtgcattgatcaaagggaagcatcacaccaaccacaatgccatcactacgcactactttgccccttttataagccgttacaacacatgtacagcttccatacctacagcaagaccttggggaactatgcttacaggggagggttcttttgcccttaccacctagtatacaagcccaaaaaacgggtccaaggtgaaaatatgggaagggaaacctgagtacaaatttacaaccaacaaacaaa

SEQ ID NO: 25972 - DNA, 445 bp, Zea mays
  Clone ID: MRT4577_123697C.1
cgcgacttgccaggaaaccaatgagcagcttgttgtatgctcacatgcatggtatggctacactgcatgtctacctcggcccggcgcccgtttccacccaccttcgatcctccgaatccgattgagtgcttgcaccgcatccatggacacccacatcggatccgtgaacggggcggcgtcgaaccagacggtctggctgcccggcgtcggcggactgacccgatggcgtccacgcggcgcccggtctgacctctgtggcggcgggatgcgtcgctgggggccacctcgcgcgtcgctcgtgcaggtcggcgtcaacgagctcttcgcggtctccgggggacttcaagctcacgctgctcgaccacctgatcgctgagcccgccctgcgactcgtcggctgatgcaacgagctcaacgccgcagtacgcagccgatcggtacgcgc

SEQ ID NO: 25973 - DNA, 159 bp, Zea mays
  Clone ID: MRT4577_123698C.1
tggaccctcgaggccggccgggactagagtatactatagctgtttgcggcgcacacgcaccgacaccaattcgccagtgggcttcatcttggagcaaccgctgcaacatcagatccgcaggccgctgctccgatgctcagcctctgagctctggcacac

SEQ ID NO: 25974 - DNA, 395 bp, Zea mays
  Clone ID: MRT4577_123699C.1
gctcggaattcggctcgagctccagccaccgcctaaaggttttctctctggcgttaggaaatcggctctgtcccgcggaccttacaggcagagacagatgctgatgcaagagggggcataacccatctggactatcatgattccaggggtttctccatgttggcctagtccatcgctacactgtctcgagcctgccactctgctgctacctgtccgtcacactcactggaagaagcacatcgccctctggtgccccaagcaacacatatgtgagtgcgaagggaatcgctcgaacaatgcaagtctgagcgtacgaaagcgacatgaacatgctcatctgtgccttatacgtcaagctgttgagtgtgcccttgcttggacaacaggtcacgtgc

SEQ ID NO: 25975 - DNA, 1012 bp, Zea mays
  unsure (1)..(1012): unsure at all n locations
  Clone ID: MRT4577_12369C.1
ctctaggaaggcaaaaaagagagcctttttcatcttggtttgctaaaccagtttaatgatgaggttttggacttaccatgctttctgatacatgtaattgcaatcaggaatcagggatccgacaaattccttcgcattccatgcaccaccttcatgttccccacatcaaaatctgggtgaagttcggagatccatcacatatcagtacataatatgatgatcccacagctggagattagacagagatctttcgaagatgctagctgcaggctccagctgctatgatagggacaatgccaaggggacaaataaaatgcagcacgaaggaaaggaggaacagtactgcgtacaccccatgtgcccgggtcgatgcctcctttatcattgtgctctgccttgtagctaggcactgtgaggctctgattgcaatcttgttgccaaagctgtatggatcatactaagagcaattccattgcacccaagggacagcaaaatcttgaggtacgaggagaaatcatgtcctgcttgtgcgtgtgactatttgagtgctctgctgggcgctggaagggaaccacgccccgttgtctcttttgtttggtacagtgctttacgaaggtgccatcggggtgactacttgcatttgcttttcagcagcgtcggtgtgttgtgttgtgtgtacctcttctctttgggaaactgagatgttggtttggcctggaaacttcggaatatcataaatatatgtatatacggggacgaaaataatcatcactatgacgnaaaaaaaaaaaaaaaaaaaaaaaaaaaaaaaaaaaaaaaaaaaaaaaaaaaaaaaaaaaaaaaaaaaaaaaaaaaaaaaaaaaaaaaaaaaaaaaaaaaaaaaaaaaaaaaaaaaaaaaaaaaaaaaaaaaaaaaaaaaaaaaaaaaaaaaaaagggggggggcggttttgggggaaaaaaattttattanggggtgaagggaaaaaaaatattttttttttttggggcccc

SEQ ID NO: 25976 - DNA, 374 bp, Zea mays
  Clone ID: MRT4577_1236C.1
agatagagtaatatttgttttgtgtttgtcttagttagaataagggtgagagttataaaacattggagaaaatcaaaatactattgtgatccatgtgggtctgatgcctgactcggtccacattcagcctcggctcggcagttgactcccgaggaacctgatccatgtaaaagatggtcatgagtatgcctttgtgccatctgccgtgtcaacgggccggtgcggcggcgggcggtccggcggtttgttgccgctcgctgcttggtgcatgcctgagcctgagaagcggatacgcgcgcggccattgatatttaattttctggaggccaaagttaaaatgccttcacgtgccatttgccaagcgtgttagccct

SEQ ID NO: 25977 - DNA, 334 bp, Zea mays
  Clone ID: MRT4577_123700C.1
cgacccacgcgtaagcggacgcgtgggaaaaaaaaatgagcaaaaagaataagtctaggagattgacgatcaatgggaatgatggttcattccacatgaatgtaaagggcagatgccctctaggctgtgggctaatttcacttgactggtcggctggatcccttccgtgacttagaaatctgcgaagtgggggctcttgttctacgtgctacagattggtatatcactagctggcctctgtcttaactggttggcacgaattacccttctcaacagtggcgctaacccgaatgtggaatgggacgttccatctaccagttcattgatctccctg

SEQ ID NO: 25978 - DNA, 599 bp, Zea mays
  Clone ID: MRT4577_123701C.1
ggcgattgggtatctcgaggccggccgggaatgtctctgctgcaatataccaccgcgcgaggccaatcgcacatgtgccgcgaggtacgagatagagagaggcgcgaagtaaaacaatggaggtctaaaaaagaggatgtgatgctgaccgacaacaagttctcgaactaccagccatcgacatcgtggcgcaggacgcctatgaccacaacgtactacaacgagctccagacggtcccgatggaccaggcctcatcatctcacgtattagttgttctaccgtctgagccttcttcacttgtaccacatcttcctcttcatgatagatcataatcatcgcggtcctgatattgattaaggctttcttggaaagggccacccctgacttcaggttgagcttatgcttaatccctgaacatgtgttcatgctcgagtactgcaacgtattgatatctctttctcactacctacagactgctaggttcagtctagttttgagatgaaacagtagagaatcgccacatatctcatatagtgcacagtgttctgacatagcaagccaatcctatacgattcatgtactttccttgacataccag

SEQ ID NO: 25979 - DNA, 820 bp, Zea mays
  unsure (1)..(820): unsure at all n locations
  Clone ID: MRT4577_123702C.1
attccttggtcggtctccttccctccctccctatcgtctgtttccttcggccgaaaagctcccctgttccctgcgcctcctccgcctctcctcgtccccggcctccgctccgtctggtaagcgccccgaatcacatacgcctccctcctttcttcgccggattttcgtttgggccgcgcgcttgtgtccccgggtctcgtgcgggtctgtggtcgttgcttgttcccgtggatctgtggatcctgctgtggtggaaccatcatatatgtgtggttcctggttcttgcccgccatgggagggagaagatctaggggttcatggggtttagaggcgtgctggttttgggttttgggtctggaaagttaggaaaagatgtgtacttcttggttgaatcttggccgtccaagctgtgcataagttactgctattttatcagctattgttagagttgcgttggttagcgtctggagatgaggattaaggaaataaaatatttccgtggtcttgatggtctatccattccacggagctgttactgaaaacggtcctattgctgtcctttcgtgatgaaccgcttacttttaggagtcatatgggggcacctcttcggttactttttactgtccagtgactgctttgagctaaccgtgtaggattcatgagattagcagcttgcaattcttatcagttctggatgaaagtccgtacgaacagtacggagcactgtgtgngatgaganatgaatagcgtacggcgtgggctggntatcacgataaagtgtcagcaattatgctatgcatcacttcgctttctttctta

SEQ ID NO: 25980 - DNA, 522 bp, Zea mays
  Clone ID: MRT4577_123703C.1
cgatcttcatagattttatcttcaatcgtcgcagccctccctcagtgatttcttacgtactcagcgcatttttgctgactgaatgcgagcactgctgcctaccatactacaacaccatctgcgcccacgctggatctcctctcagcacataaagggcttgctggtagatgaagaattggaagaggtaccgtttatatgattcaaagatactctgctcctggggcatgaagttatactcccataccgatgatctcatttacgcttaaccgcctcattgcctgcctttgctccctgcatattgaagatgctctgtgcactaccttgacgttgccatacgacgcattctcttggaatactacactacgaacatattatcacatgctcatagctgaggattccatctgatggtgcaatgtttttacaatgagagtgttaacggtcactacgagactgcatccttgatgctggctgatgccacatcccacgacctagtgcttcaagctaactccatcgatctgatat

SEQ ID NO: 25981 - DNA, 1186 bp, Zea mays
  Clone ID: MRT4577_123704C.1
ccgccgccgccggcgttggccggttcggcggcgcagttccgtgggcaggcgcagctcccgcgcttcgccgcgccgcgccgctacgacctgcgcctgcgccccgacctcgtcacctgcacattctcgggcactgctgccgtcaccgtcgctgtctccgcgccaacccgcttcctcgtcctcaactctgctgacctctcaatcgacagcgcctccatccgtttccgggatttggcgcctaaggaggtggtgtttttcgcggacgacgagatcctggtgctcggattctccaaggacctggtgctcggtgagggcgtgctcagtatgaagttcaacggcacgctcaacgaccagatgagggggttctaccggagcaagtaccagtataagggaaagatgaagaatatggcagtgacacaatttgagtctgtggatgctcggcggtgcttcccatgctgggatgagcctgcattcaaggctaagttcaagctaacacttgaagtaaatgttgggatggtggcattgtccaatatgccaatagctaatcagacagttgctggtcctatcaggactgttcactatgtggatccgcctcttatgtctacttatttagtggctatagttattggtttgtttgaatatatagagggtgtaacaccagaaggcacaaaagttcgtgtatacactcaagttggcaagagtagccaagggaagtttgcactagatgttggaatcaaatcattgcatctttataaagattactttggtactccttatccgcttcccaaattggatatggttgctatccctgattttgctgctggagccatggagaactatgggcttgttactttccgcgaagtggctttgctttttgatgaggagtcttcaatggaatccagcaaacagagtattgcaattactgtagcacatgagctggctcatcagtggtttggcaatcttgtaaccatggagtggtggacccacttgtggctaaatgaaggttttgctacatggatgagtaatctagctgtaaattctttctttccgcaatggaatatctggacacaatttcttgatgacacaaccgctggtctcaaattggattcacttgaagagtctcaccctattggagttgaaatacatcatgccacttgagttgatgaaatctttgatgccataagctacg

SEQ ID NO: 25982 - DNA, 878 bp, Zea mays
  unsure (1)..(878): unsure at all n locations
  Clone ID: MRT4577_123705C.1
ttgggaccctcgaggccggccgggacctagtcctatttggcttgttcccttccctgcaatggcgggaaggaagacgcctctctagattggatcgaattccttcgtttctctcctcaccgaggacggcggagagagacgaggaggaaaggcccggcgcgacggagaagctgaatatctgatatgggtgaaaccatgggaaggagaacagtcagtggccttcttgtcaccaaaggaggctcaattcttgtcttcagggaggaaagcccacgccacaaggccaccgcatgttgtacccgcctctggtgcagcagtaagcttttcccgaacaaagacacgaatacacgcagggcatccagggaaacatcggctcttcagagatcacaagtgtctaggaaatccaactggatgtcccatcaaggaagtatttcttatgatcgaagcaccagtaggaatacagcaagtacttttggtgagactcacaacaaaccaagagaaaaagaaaatcccgggtgtgatctaccgtctcggttgaaagaaaggatcaatacatccaggaaaagctcattgggtggactgggaagtcctaacaaatcatcaacaaacacatcaagcagtagccaatcggtttcaagatcagtatgtcggccagcatcgagaatgagaaaggatggaggaaggggcgcagaatctatgagggtgcatagagccagagatagtggtggtagctcttgnnggagatgtgttgacaagaaattctgaccaagattcttcacacaggtctctatctcgaaacgtgttgaggcataggagcagatctcagcaagggccaatatcatcattggaggataatttagatgattccagtgaatactgggcat

SEQ ID NO: 25983 - DNA, 158 bp, Zea mays
  Clone ID: MRT4577_123706C.1
caagatcggaactatatgtgagtcaatcacatctctgaatgtcgacttgtctagtactgcctctatcaagaagtcaccatcgttgctatcggcggtatctacctccagtgcatccagagcatttggtacgagtttccaggatcagaatcccactggtt

SEQ ID NO: 25984 - DNA, 740 bp, Zea mays
  unsure (1)..(740): unsure at all n locations
  Clone ID: MRT4577_123707C.1
ttgggtacctcgaggccggccggggaaggggacgcctctctagattggatcgaattccttcgtttctctcctcaccgaggacggcggagagagacgaggaggaaaggcccggcgcgacggagaaggcgtcaacgtcaatttggttgtgctggttcagttttgtcagagctctttttcattcttgcaagcaaatttccgcagctgaatatctgatatgggtgaaaccatgggaaggagaacagtcagtggccttcttgtcaccaaaggaggctcaattcttgtcttcagggaggaaagcccacgccacaaggccaccgcatgttgtacccgcctctggtgcagcagtaagcttttcccgaacaaagacacgaatacacgcagggcatccagggaaacatcggctcttcagagatcacaagtgtctaggaaatccaactggatgtcccatcaaggaagtatttcttatgatcgaagcaccagtaggaatacagcaagtacttttggtgagactcacaacaaaccaagagaaaaagaaaatcntcgggtgtgatctaccnggctcggttgaaagaaaggatcaatacatccaggaaaagctcattgggtggactgggaagtcctaacaaatcatcaacaaacacatcaagcagtagccgatcggtttcaagatcagtatgtcggccagcatcgagaatgagaaaggatggaggaaggggcgcagaatctatgangatgcatag

SEQ ID NO: 25985 - DNA, 240 bp, Zea mays
  Clone ID: MRT4577_123708C.1
gaataaaacattgagtcaggcaaaaatgataaccagcgacactttattgttcagggcgatactagtcaagaattatgcgcttcgtatagagaggttcaaataaaatagtaaaaccaaagctattaacggcaacataaattcttgggcgcccaagctttaaagtaccagtatacatactctttgatacagaagcatagcagaagatcatctagctgtcatagcatcaaagcttaatattgt

SEQ ID NO: 25986 - DNA, 787 bp, Zea mays
  unsure (1)..(787): unsure at all n locations
  Clone ID: MRT4577_123709C.1
gtgcatgcanaagtatcaaaaagnagaccagacacatgttgatgaaacatctaaaaggtaagcaacttgaaccactgttttcttttcttgtttcccnatgagaaatcaacatatgttatccacagatcttttacatggaccctgtagttatttttttccttatcgtttttagtcaagttttctgatgggaaagttaagtatacctaatcccccccaaaaaaaacacccacccaccaaaacacatgcacacaaccaaaaaacaaacaaagaattaaaaaatttgtatgttacactattagtctgcttgtggtgttgttttggtaattgctggtgtacttagctgaacttttgtttcattactatagttttgatccttgtccttttgtttgtgttatagcatccatgctgctttgatctaaaatatactgttgaaaaagcaaaactttaactggagtttgaattccatttaaatcatgctatttggcatatcgattgatccctactacatagatcaaattatgtaggcatttcatacgaattattgtttaaacgcaaccatcaacccacgctcttggaatgattttttttcttacaataagttttggcatttaggtcctggaatctgaatgcacaaatgtggaaaccttatagaaaagggcacaagcacacatgcatcttgctgatcttgatttggcggaggcagacatcaagaaagctctagataaactacagatccagacatgttaatcatatgtactactgaagttggcttaatgaatcttttgag

SEQ ID NO: 25987 - DNA, 368 bp, Zea mays
  Clone ID: MRT4577_12370C.1
caccaaatctgaaaaaggatgatggaacctttcactttccaaaaaagaaacgcgaacaatcttaaagcctatcaaccattcacctactgcatgtttgaaccctatgtgtgttacgctatacaaccccaggagttgtgctcccatcttattacaattttattcacccgaaaaaaacggtgaaagattgctgagccttgccctcctggggagacattatttgatcccacctataaagcaaggctcttatcctcgccccctccggcaaaactcaattaaatgcaaacctgtgcccgctgaaggcgactcctgctgctactacttgtgcgatgaaggaggatggggtccatactgtcacccgcggtaacagt

SEQ ID NO: 25988 - DNA, 393 bp, Zea mays
  Clone ID: MRT4577_123710C.1
atgttgccttttcttaactcatagcatttgagaacaagtccccaacagggatctcatgtcagcatgttgcggtatatactaaactgtgtgtgcatagtggtcatgagcacatctgcatgtctagcgtgtcagggtggaggcgtgcatgtaatatcacattaaatgtggccactattgaggttattccttggtaatacaacgatatgtcgactatctagctaggcattataatctatggaaagggtcaattgtccggtccacatcggacatgcactgttcacggtccggtgtcctagccacgtcagccaaccgttggcgtctgtagcagtcgaccgttggatccaaccgttacccagactgtctgatgcacaccggacattctggtgctacagc

SEQ ID NO: 25989 - DNA, 440 bp, Zea mays
  Clone ID: MRT4577_123711C.1
ataccatgagcattctgtaacacaccaagcgaagcacattatccgcaaccttacagcagtggctaccaagatattattctctctcttgcgctttttgagctgtatgctgagcgcatcaaatgcgttgattattgcagactgctacacttgctccaagatccattattacacagtgcacttcaccagttacgttaatgtgccttctaacacgcatctgtgcaagcctataggctatcaacaagcaattgcagctagcgtcttacatcaacgtattttccagttgcaacaacaatccttggcacatctaacaatacaatcaatcgcaacggaacaagaacaacaattagtaccagcaatgagcgagctaaccatggtgtacaatgccgtgtactttcaacagaagctgcttgcatgaaagccacttgctcttgcaaacgtag

SEQ ID NO: 25990 - DNA, 815 bp, Zea mays
  Clone ID: MRT4577_123712C.1
acatgagcagctctgattgttcctcaagctcggtctcggcgtaggaagaagaaagggaagcctaggataggccctgctcaccttccgccgccaccaaacgcttcttggtggggcaaggaaggaattgccggaaaagcctctcccctgcctcccgttctcttcttctttaactagccttggcgattgcctagaggttcagaagggcagagcgcgggagccggacagagagaggggcaggtttgtggggatcgggaagatgatggcgaggcgggccttggttgccattgcggttcttgcggcggcggcggcgctgcttgttgcggcggaggcccagcaggcgccggcgcagcagggccaccagacagagaggatctcagggagtgctggtgacgtgctggacgatgaccctgttgggaggctcaaggtgtttatctatgacctccctggaaaatacaacaagaagctgctgaagaaagacccaaggtgcctgaaccacatgttcgccgcggagatcttcatgcaccggttcctgctgtcgagcgcggttcggaccactaatcccgaggaagcggattggttctacacacctgtgtacccgacatgcgacctgacgccttcgggtctccccttgcccttcaagtctccgcggatgatgcgcagcgcgatcgagctgatcgcgacgaaatggccttactggaatagatcggagggggcagatcatttctttgtcacgccacatgactttggcgcttgcttcattatcaggaagagaaagcaattgggcgaggaatctttcccttgctcagcgtgccaca

SEQ ID NO: 25991 - DNA, 162 bp, Zea mays
  Clone ID: MRT4577_123713C.1
agcggctcttttcctgaaagctatgggttacccttccagcacaaggatctacgtcgtatcaggcgaaatatatggtgtgcgtagcatggacgcgttgaaggccgaatatccaaatgtctacacacattatagtctggcaacagtaaatgaattagagtctct

SEQ ID NO: 25992 - DNA, 246 bp, Zea mays
  Clone ID: MRT4577_123714C.1
aataaaaatataaaaaataaaaaaaaaaaaaaaataagaaaaaaaaaagacaaaaaataaagaaaaaatggggccagaatttacgagagtggggctctcgtactgcgggcctcccgggtcacgtcccttggctggcgtcgcctatcttcttgtccccggccgctttttttcattctctggtcctgctttttccctgtctgttgcccgacttatccctccggttccccgttttgttccccaggtctc

SEQ ID NO: 25993 - DNA, 263 bp, Zea mays
  Clone ID: MRT4577_123715C.1
attatacctttctatttcccgggaggaagcggattgatttttttccccttaccttgcctaaaaggaacggcccttagttttctcatgaccccaaaaagggcgcgcgattcgtgaaatacggactaatcttttacaaggggggggcccccacccccaggtctaacaaagcccagcttgctaacaccgaatttgaaagtataacccgttgatggcccaccaccctgtctcttggggcaactctcaacgttccagaccctattaga

SEQ ID NO: 25994 - DNA, 451 bp, Zea mays
  Clone ID: MRT4577_123716C.1
cccaaaccaacttatgggtaattaatcctagaaagggggggggacaggaaggcataaaaaaccggggcccagaagggacccccagataaggataagtcgggggggtccgacacccagaaacccctggcacgctttagcaaaagccagctcaagccaggggaaggtctgggaagcaatccttgggggaaacactttttttccgattaaaggggaaatacaggggggttccgtctccaaagccaaggaagttactgggggccaacatccttaaacgggcaaatttgttcctcccccatggaaaacgggacagtcacaacaagatccttcccgttttcaaacccttccttaattggggccacaagagtctaatcaggggggagtctaaaatcatccttaggggggccatctgaagaaagaaggctcacaaatccatcctaaaaaaataaatcag

SEQ ID NO: 25995 - DNA, 513 bp, Zea mays
  unsure (1)..(513): unsure at all n locations
  Clone ID: MRT4577_123717C.1
aaaaaaaaaaaggggttgctttgggatcatgtcgacgacaaaactggggccaggggcttttgtagccccccaaattcaggaaatttttttccccccccccctcgccaaaaaaccccccgaaaaccaaagggggtggcgcagttaatgggctgttttttgttcaccacaccccggtttttttccaccaaaagcccccccccccgggccagatgatgatttttccaacggggatgacaaacccatagccccaccactgggccaaggggccatccccggccccctaaaaaacgggagcgggccccatccccgaggggggggccccccccatggggttcgaggggaatgaaaaaaccatggcgggaaaaagcgacggggggcccagggccctcccccccgccaggaacccggggaacattgttccgatgggtgcggcgcccctggcgaaaaaatagggcgggtagaagtaccgnagccccccccccccgaaggggagttgccttgacatgccaagcc

SEQ ID NO: 25996 - DNA, 455 bp, Zea mays
  Clone ID: MRT4577_123718C.1
gccggacgcgcgccatcgccgccgccctcggccccgacgacgtcaggctctgcgttcttcgcgcagcgtccggcacgtgctgaagctggagccgggctactacggcaacgccatcttccccgtgaaggtgtgcgcgccggcggagaaggtggccggctcgtcggtggtcgagctcgtcggcatggtccgggacgcgaagcgccggatggccgaggagtgcctgcgctgggccgagggccgcaccggcggcgtcgacccgttccagatgaccttcaactacgagtccgtgtacgtgtcggactggagcaagctcgggttcgccgacgtggactacgggtacggcacgcccatgtccgccggcccgctggtgaactgcgacctcatcgcgtcggtcatcgtcatgagggcgcccgcgccgctcgccggcacgcggtttttggccagctgcgtcacca

SEQ ID NO: 25997 - DNA, 431 bp, Zea mays
  unsure (1)..(431): unsure at all n locations
  Clone ID: MRT4577_123719C.1
ggaatccaacagttaaatattattcattttgttcacaaggaattataagacaatgatctgggggatgcattaatctaggtagctatttactttaagtgcattttgactaacgatttgttgctatgttcctgaggatctatggatatttgctttcctgttggtactaaggaagccaacaggaaattttggactactgcctagattaatgctcgagaaaaaaggtgcatgacatcaatattgctattctatttgttctatagaatcttatatggaaacgtgcattacacagtcccagcctactagagactatagctttttattcactacactaaaccagntaacttncttcacacccgtgcacccaaaacatggtattgcaatccttgggatcgagcctcagagctagaggaaagtattcatgtacatggata

SEQ ID NO: 25998 - DNA, 206 bp, Zea mays
  Clone ID: MRT4577_12371C.1
ccctctccctcaggtcgggttcgggtacgtgatgtctccggggttcgggttctgggtgagcggatcacatgcggcctcggatgttgactacagcagctgcatctgttgactcgcctgggccagggacgaggaatcccaccacatccccattgatcaactactagccacgtcctcgagtcgacgatgatcctcaatgggtagaccca

SEQ ID NO: 25999 - DNA, 315 bp, Zea mays
  unsure (1)..(315): unsure at all n locations
  Clone ID: MRT4577_123720C.1
gagctctctatccggcggccgccctgncnannaagaggttgttttttttgaaacgatcctccctttcttcccttacgggcttttttttttttactgtcttcttttcatcaacaaaaaaagggcccctgaccggggcccaacccatgcctccccctaaatgtccctgaaaaaccccacttccaccacccggcgcaaacaagtcctccccggactaaggcccaaagttcctaatgtctggtggcccaacccttccccacatatgagccttttgagggatattttgcccgacaagggtcccttttggagaggccccct

SEQ ID NO: 26000 - DNA, 245 bp, Zea mays
  Clone ID: MRT4577_123721C.1
ccctctccccttttttttttttttttccccccccccccctcctctggggggaaaggggcaccacaaaaactgagggctccccttttatctaaaattgatccatgtttcttaccgaaccagggctagtcttataaaaaaaacaaaaaaaatgggacccgtgccccatacatagccctttatcaaatcaaacaaagggggatagtttggtccgtccccccaccccttttattgtcccggacccctgg

SEQ ID NO: 26001 - DNA, 733 bp, Zea mays
  Clone ID: MRT4577_123722C.1
ttagcaataacatgtctttccaggcaataaatccatttaacacagctacagacagcacaacagcagcaataaaaaaaccacaggtccacagctacagcctacaagcaataaaatgctacagacagtgagacaaacagctacaggcaaatcacacatacagacatacagtctcaagttctcaactgtcaagttattacacacaggcacacagctcacagtcacaggctcacagcctcacacaactctttgctgaccgtggactggtaagctgcaacctccaggctttttgtgatcttgtaacttgtaagctgcaacctccaaactccaaacctccattgcatgaccaatgtatgaaaggctacagccttaagtagcaggtctttcatcagatttagagggagggcatctaatgctgcttggcgttgattgagacttggaagtggtaggattttctttcccttttcctttcccaccaaattcttcaattaaatgttgcaagattcctctgatgttggtgccgttcttcaatgttggcttcactacaccacgagctcggcaccgggcagtcgagcgcaagtcgcgggcgtgcaccgtggcaccgtgctgggctcacgcaaatcagcctgggcgcctccgcggtcggcacggcggtcagctgggcgtcgtcgtacgcggctcggtgcaggatggtcggcagtgacaggacggcgacgtggcgcggtggcggactggt

SEQ ID NO: 26002 - DNA, 389 bp, Zea mays
  unsure (1)..(389): unsure at all n locations
  Clone ID: MRT4577_123723C.1
ggcgacgacgacgcgcacggcancgccgacctgccgcgcagcgcgctgcatcgcgacgacgatatcgntcagccgaccaccgcgcacaccgtcaactcgatggcgccgcgccagaatggtcggtattcgcgtcccgacgttgtggaaacccgatccgcaggcgcggccgaagccgcgcagcaagacgccgccgcgtccgcatgcggaacccgtcgcgccgtcgggctggctgaagccgaccgcgcccccgcgcatgccggtgccgncgcccgcgccgttcccgaccagcgcgatgccgtcgncgacgaccggtagtacggtcagtcttgtgcgcgcggtagtgaacgcgcaagtaacgtgctctgattctgccttgttttctgccggat

SEQ ID NO: 26003 - DNA, 309 bp, Zea mays
  Clone ID: MRT4577_123724C.1
gcgtggaccaaccatcacgggagagctcggccgctaccacatgattcctaacactggaagagctctgagcatcatctaaaattcccaacatctggcccatatgacatgctctgtcatgtgtacacggctatctcagacccagtcactgaggtcagaattttcgtaggtagggaagaaaagaagaaggcgcacttgctttctgctgaagatttagagccatcactgatagaatccaagaccattcctgaccctgttgactagatgccggatgacggagatgagagagctataattcctgacccacatgca

SEQ ID NO: 26004 - DNA, 421 bp, Zea mays
  Clone ID: MRT4577_123725C.1
ggttggaggaaaaccaagccgaacaaaaacacaattgggcttacaatggctcatttgatttacagggaagtagacttcaaagcactcgttccattgaacacattactattttctggctgaaaaaaccactttcgcaactgtcgttctacaggagaaatctgttgtattcactgaacaaaatgcttccaatcagatccgattctggaaccaaattaagggggggaccccaacattagtgccaagattggaacattttaaagggatgcaaattcttttcagttttctcaggggcatttcccccgtcatcaggaattaaattttgggaattaccaacttgcgctttcgattatgtgggtttgccattctggagagaaatcactggttcaaaagcgcccacttaaggttttaccttggtttttct

SEQ ID NO: 26005 - DNA, 278 bp, Zea mays
  Clone ID: MRT4577_123726C.1
cacaggccaaccaattgttatgaattcctgaaggcttatcaagatcctggggatcgacaacctttaacgagaagagtcaagctagggataggatagatgacccacaccgtccccaaacagaaaccatgcttacagtttaggcagcaatttgctgcattagacacctactcctaaagggtttatatacgcaccatacttttggcaacgggtgccccttcataaatctctgaatgaccttcatggccaaggacacctgctagcccaccgcaaacacaaac

SEQ ID NO: 26006 - DNA, 243 bp, Zea mays
  Clone ID: MRT4577_123727C.1
gaaaacccggctcgacccactcatccgcccactcatccacccacacgtatttcgattacaacaccaccaacatccaaacgagctttgtttaattctaaaactcaccacccccaaactcctacacacaactcaatctatacctcatacctctatccacacacatacactcatcaaaatataccttacctaataccactcctccacatctatacatcctaccatcccaataccactcatcaccaa

SEQ ID NO: 26007 - DNA, 616 bp, Zea mays
  Clone ID: MRT4577_123728C.1
aaaaaaaaaacccccttttttttttggggggggttaaattccttttccccggggcccgggaaccccccaaaattggggggccctcccctaaaaaaaaccccttttaatggccccgttccccgggggggaaaaaaaaaaggggtgggggggccccaaaaggaattttgccccccccaaaaaaaaagggaaaaaaaaaccggggaaaaggaaaaaccccttttattttttccccccagccccttaaaaaaaaaaaaaaaccccagggccgggggggccggatttttttggggggaacccaaaaaaggttgggggggttggtttttaaaccttttggaggttttggcaaaaaaaaaacacccaggggggggggttttgaaaagggttaaaaaagggcccggggggggggccctttccaatggggcccccgacggaaaagggggaatcctcggggtcaacctgggaaaagctttaacgggccttaagttccgggggaaaaccacccgggtatgaaagttttttatcccgcccaagttgttaagggtccttaaaccctttaaaagggcccacccagggggggggggccttgtggaactttatttttttgggggcttttgga

SEQ ID NO: 26008 - DNA, 349 bp, Zea mays
  Clone ID: MRT4577_123729C.1
tacgacggcggggccggcgggttctatacatacacgcgctataacatgcgctatccactgcgaacaacagtatcacagtggggaccatgatattgtatgtgcttgaggtctttgttgttcccgcatgcgttgatcacactacaatacttgctcattagctaacaagctcgtatctgttccattattatataatactttctatgcattgatagccttcagtgtgctgaaaacccatgtattcatgcgtataggcttcaacaagccatcgccgcacgcaagatacctttatcacccttgttgtttcaacaatggccagccctattttttgtgcagggattggtacctgcta

SEQ ID NO: 26009 - DNA, 358 bp, Zea mays
  unsure (1)..(358): unsure at all n locations
  Clone ID: MRT4577_12372C.1
gggtatactgaccagaccttaaaccctaagagcgccacacctgcattgtctgacggacnaaaacgcacgaaggatggcggacggcaccgacgtgtcgcccgagtcggaggcgacggcggcagccgggaagagcggggagatctgacgaacgctggaggagctgctcctggcgtgcgccctgacgcggcacggcacggccagctgggactcgttggccatggaggtacaaacacgaatccccgtagcagcacgttcaagcctgacacctcacagatgccgtctccggttacggcgcctacaccgccgattgttcaccgtcgncagcagcagtgtcgagtaagcctaggaggaaacccac

SEQ ID NO: 26010 - DNA, 477 bp, Zea mays
  Clone ID: MRT4577_123730C.1
aaccaaagggatccggatttgcctttttttttttttaaccaaaaaaccccccacatataaatagcttttttttctttttttttggaaaacaagcccaaaatcaccttttagcaaaaaaggccttaaaatgaaagggggggaaataaagggcctttcacaacccccgtaatttttggaaaattgggcaaaaaaataccctgggttcatttacccaaagggaaaggggggttttaccttctatttggggcggagctaaattctccacgaggggattttccccccccccggaaaaaaaaagcttccccgaggccggggaaacaaaaagtctttgtttccccggggaggggacttttgggaatccaagttgggggaaagggagcaccttcgcccagtttttttgggacacggggggggggaaaaggggcagaaaaacccccggaccccctgggtttttttccccggggcctttttcggaaa

SEQ ID NO: 26011 - DNA, 273 bp, Zea mays
  Clone ID: MRT4577_123731C.1
atgattagcgtcgagcgacgacagacgctgtacggctatcacaacagctaagccaagcgtggatctgccgtgataaaggaagctgtatctaggatcaagtaatgctgctgctacttgataccgggtaggagtgcgcattagttgcggcctacccgaattatgattgaatcagatcaagctaggcctgttacaggatcgcaagtactgctactagcacttgtacaattgtactcgtgcctgctactgtcgttatctagttgaataactgcactg

SEQ ID NO: 26012 - DNA, 261 bp, Zea mays
  Clone ID: MRT4577_123732C.1
ggccggggaaagaagagactgaacagagtgttcgacgccattggctttgtttaccccgactaccgctacccgctgcgtggacagggcaaaaagagaaaagctgctacttcggccaccccagatgagcatgtgccaaagggaaaaaagttgaaggttctgactcaccggccgcgttacatcgaaccggccgtgatacctgaatttggcgaaggggcctcttcggctgccaaagcaaaagaaactgttgctcctgcgtagata

SEQ ID NO: 26013 - DNA, 145 bp, Zea mays
  Clone ID: MRT4577_123733C.1
gtattcgatgattgtatagtcgatcttgcagtacacggagaaaatggtggcttacaccagttacgaaaagaacaagtggaatgaaactatcaatcttacacatacagctttgttgaaaatgtggacttttagtgagaagaaacaa

SEQ ID NO: 26014 - DNA, 802 bp, Zea mays
  Clone ID: MRT4577_123734C.1
ccggccgggactgaaggtctgtagttcgatcctgcatgggggccacattccaattattcaaaatggttacccttaccgaggtcgaggacgagcacttccagcacggccaggctggtcccgatgtcgaggaggacgacgaggattactcggacactaattccgagatttccaacgaatccgactacgacccttcagatgagactctcgctgagcgattatatgcgctgcgcgatatcgtacctcccactactcgctcttggatctccggcaaagccagcaccgtcagcaatgccgcctggagcgttctttccttcagcggcaagggtgcttgggtgatcactacctcggccctcttcttcggtgttcctttcgccctgtccttcgccgaggaccagcaactcactgccatggagcaagagtacaacatgcgacaaagcggcagtgaccttctgaccgctggctccgagcagagcaccgccgatcaggttggcgcagctctcgagggcaagcccgcccagccgtctctgtaaaccattagcttggtgtcacatattcgacaaaaacctcgaccttgtgtttctgggtattggggaagatttagacggcgcgccttttattgctgggcgcagtcgttgttggaccgcataaaaagaagtacggccttccaagtgtacaatatctattcacggcgtaaacggccgacggaaagccccatgacggatgcaattgggctgaaccgggaggaacgagaagcgtaacgcatccatggcgcatggtcaccggtgtaaagtataggatgggg

SEQ ID NO: 26015 - DNA, 1915 bp, Zea mays
  Clone ID: MRT4577_123735C.1
ccggccggggcaactggccgcgcccgccgccgccgcggttcccgtagctggggttcagacgctccgtcctactcccgcgccacgtctcctctgggccacttaacaatctcggtaacgcacgacttccccgcagtttagtcccgcccccgcatcttccaccaccgggtccggggggccatctgccgtgcttgccaccccgcggtcgcgatcgatgattcctcgagagcagccgccaggtatgttccggccgccgaatgcctttggggcgccgcccccctttcttcctcagcctccaccgttgcagtggcagtggcagcaaccgcccccgcccccgccctcgccctcgccctcgcctgcggttaccttctggcagcgagacaatgtgcgggatcatgtgaggaagctgcaacagaccatcgagttatcaactgcgctaataaaagagctcgaggaaattgcggcggccggaaatcctggtgatggtgccacagaaacacgagaatctgcttcgtcctcggcggaattgccgtgggggtccggcgattcttcggaggacaagcgcctcggtttcgttgagctggctaggtccatggggattagtcaggacactcatgagtcgatggcaacagatgcagccaattacctttgccaccagcttcagcatcttcttgggcctatctcttctgcgacgagccaaagtggcccctgggaggagaggtcggcgatggttaggttgactcagaagctgcagaaatataagagaaataagcggtggcggcagaggagaaggaagcatgttgcggagctttttcagaaggagcgtgcggattatgatagagttgaccaggaagctgatgaatggagggctaagcaaatagccaaggacattgcaaagcggagggtggaaagcatgcagcagattgctagaaagaaaacaaatgaggaaagaaagcgcctagaatctgagctggagcttgccctaatggtcgaaaaacttcaggagcttcggtctataagagttcaaaaaatgaagaaacaaggccattttcttcctgaagaggatgataaatacctcgagcgtgttaaggctgcagttgaggaagaggagcgccaagctgcatctgctgctcggactgatgctgttaaggatgctattctgactgctgaggagtcaaggaagcctctacagtatacaaattctcaggaaggtggttctgaacagcctaaaagtggaccatctgaagacgaggaccagggagatggcgggatgagtgagagaaatgaccaggcaagccaaaaaacagaacatgaagatgaaggtcatagatttgaggggaaagggcatggacatcatgaccctgtcagcaatctgccttttgagttctaccattattatcatggaagtgactatgacatggggacactcattgaggtccgcagaatgtgggattctttcatcagtcctggaggaagccgtatacctgggcactgggttcaaccaccccctccagctgatgaggtttgggcatcttatttggtacagcacaagtaaatcaccatgggtatgagaaatggtcttttctgcttcaaaaccaccggaatctttaatggttcctgcaaggtaatctagatacttaagttagaacttcgagttttgttagaatcctcggaattccgagatgtattggttattcctgccattaattgtcgttagttaacttcagtaccttctcataaattatagaataggatgtattctacctcttggtacgtcatgtcaactaatgatatagagaagttgtataaagggtgcaagtgattgcagttacctgggttaaatttactacttcacccatttgtttgttgtataaacattttatcaattcttgattttcttccagactatgcatggatt

SEQ ID NO: 26016 - DNA, 182 bp, Zea mays
  Clone ID: MRT4577_123736C.1
cccatcttccggtaaaatgataacacgtgttgtagcctgcaaagacgcggcaaatttagcttgtttgagtgagcattctgacgtcgacatcgtccactgcatgctcttaaaccgaaaaatgtaccaacatccagtagaaactgtcacatacttattcattttccttaatttattctttattt

SEQ ID NO: 26017 - DNA, 138 bp, Zea mays
  unsure (1)..(138): unsure at all n locations
  Clone ID: MRT4577_123737C.1
ccgtccgagaaaccattnnngctttatctaaactccagagnncgcagaagaaacnccgcattccgacaccanntgagggtggttgcgtnncgttgcccnttcgctctccctgnngctctcgctttgcgagcccgccac

SEQ ID NO: 26018 - DNA, 175 bp, Zea mays
  Clone ID: MRT4577_123738C.1
ggggtacaggaaaataccgcacacgaacaggttggccttaaccccaggcgagctctctgcaacaaattaattggcgataactgaagaaacaacgggctgctaacaaatacagacctctcttttaccaatctccacataacgcgtggacaacacacctttgagctcgcaccacatg

SEQ ID NO: 26019 - DNA, 618 bp, Zea mays
  Clone ID: MRT4577_123739C.1
tttttttttttttttttaagatagagcgttcatgtattattttcaatgaggaaccgtttattcactcaacagctggaatgtatgtgcattgctatccaatagatactcgtgaacatggtattccaggtcccaggatcgaggtttccatcgcatgttggaatccgtacagtctccgctgaggacaatttgtcacgcgcgcagagttattaccaccatcgggcgaaatcaagcaaacgaatgatatagccaccaagtcagtgcgagctcaatccaccaaataaataacttcatgttctttattagaatcatctacccatggcttgaactgatcttcatgtactgcgttctgcaaccagaagagaaacccgcgcatcagagctaggccattacgacggccattgttcataatttgctccgccagatctgggtaatggtccaaatatgaactgcccatctcttcggtaggatagaattttgtttcgttgcggacctgccgcagcttcattaacggagtacggatagtaaccgtgtcaaacaatctatagtattccttccgagcaactggttttgtaagggccttgatcaaccttcgcttgaaatctgaatctggcctcgtgc

SEQ ID NO: 26020 - DNA, 631 bp, Zea mays
  unsure (1)..(631): unsure at all n locations
  Clone ID: MRT4577_12373C.1
ccggccgggctcgtcattttccccgcagcgacgacgattcagtgaggcacccctctcctggcctcttctcgccttctccgtttccgcgaacccagctgcctcgtagccccaccacaccgccgagcacgcggtctcccgcgccgccttccacccaagcgaagctacccctgctcgacccagaattatcttctaccagcgctagtccgctccgcctctctactggctgccgtggagtggggatccgtccggacttccttctttcgctgattctttcgtggcttggggttcaggcgttcagcacatgaatccaaggtggaaccgaaacttcagtatgaagactgcacaatcaaaaaagaacaagctggttgcttccttactatttgttgcccagccttgaaactctcccacgctcaccatcatcgctgatgtacttaccatgactcagttccatccttatatataggtgcaaacaatggtcttaatattgtatgttggtagaatctggtggtattagcctccaaatctggattgctgaatcgtttgtgttactacatttagccaggatttgacagtagacacaaggagtgctgtaagatcctgtatgtacaacgtgcttcagntggtgtattgc

SEQ ID NO: 26021 - DNA, 846 bp, Zea mays
  unsure (1)..(846): unsure at all n locations
  Clone ID: MRT4577_123740C.1
gttgtcatcttcagctggcagcaaggggctagggcgattacctccctcgaggccggccgggagccaaaccgtggatggctcagaagctgttgcggccaagtcagatgctcctgaaattggttgtcaggtacctggttcctctccattacatgacaaaggtagtgaatcctcggggtcgccagtgaaggacactcctgacgctggaatcagattgccaggatcagataactcagttatggcattttctgcactcccacttgttgatgaagcacctgggacaagcagcagagcagctgacacgcctgtgccatgtgatggcaatgagtcgaaagaggatgttccactagacaacgctgaaagcaccaggaaactggagccgaacggatgaactggctcctcttgcgagcatggatgcatcgcatcgagtttctgctaatacagccaacgaagatgggtggatgaaatgatcattagactcgagctagttagctcaacattcctttcttttgcgttcagcataacactgggattttccctctcccaatgtttccagtgttgatctcgtgttgtgtaatgctttagtgcaggtctcgttgcagataggatgaaacgcaaagggctagtggtacttagcagtagttgggcactagtccgtcgggggagcaactcgtggaaacctgtatacaagaaatgtatattttgctaatatggtgctggttgggtgtgtagaaggtagaccgctattcgtttatttatgcgtatatggtttagtaatttgccatctgtctagcggtggctgtaagagtagacgtgatgatgatattgcctagcctngactcgttggcc

SEQ ID NO: 26022 - DNA, 1144 bp, Zea mays
  Clone ID: MRT4577_123741C.1
cattgggaccctcgaggccggccggggaaaactaatccggacagggttgaagttgaaggcggccggcggaaccggaccggacgacgaacatggcgacctcctcctgctactgcgtctcctcccacggccacggcctctcccgcgccggccccgctcggctccgcatcgccagcctccacctccacctagtattcccctccaccccttccccgaggctctcttcccgccgaatccccgcctcgcccgacccgccgctcgacgtcgccgccggagacgcgaccggcgaggtcgactggcccgcgcctaacgacgaccaggaggatcgcgacgagggcatcggcttccagatccaggtgtccaaggtcgggaagcggaaccggcgcctcgtgcgggctcgggttcgcgtccacgcgccgctcgaggccgtgtgggccacgctcaccgactacgagggcctcgctgacttcatccctgggctctccgagtgccgactcctggaccggcacgatggcttcgcgcggctctaccaggtcggggagcaggacctcgcgctgggcttcaagttcaacgccaagggcaccgtagactgctacgagggggacattgagctgctgcccgccgccggggcgcgcaggagggagatcgccttcaacatgatcgacggcgatttcaagctcttccaggggaaatggtctgttgaagaggctggtggggagaattctgaggagcaggaattggagacaacactgtcttacgtggttgagctggagcccaagctctgggttccagtgagactccttgaaggaaggatatgtagcgagatcaagaacaaccttgtctccatcagagaacaagcacataataggaggatccagagattacagcacgagctctagcagaagcagaggatggatgttgacgccgcaactgtacgaagctcacgtactaccttacctctccaaaaaaaaaacatgtcaacagctgatggatgtcctgagtttgttgcttggcaatcatcactaatttgcttggggttgtcatgttaacaagcttgtaccaaaattctatcgatttttttccccttttatgtattgtgtatgcagatatatataatgtatgtatgtatgtatgtatgtttcaagga

SEQ ID NO: 26023 - DNA, 274 bp, Zea mays
  Clone ID: MRT4577_123742C.1
cgaggtagcattcaccccggcagcatcggggggggtgcgtgacactcgggatgcgactagccacgacgcctgccctcggtaagcccgcctcccgcaccgccaagcccgccgcggctccgaagccgaagcctgccgccgccaagccgaaggcggccaccgctggtgcctcccacccgccttacttcgagatgatcaaggaggctatcacggcgctaaaggagaggaccggctccagcttgcattgcgaacgcctagtctgcgggtgacaagcacg

SEQ ID NO: 26024 - DNA, 733 bp, Zea mays
  Clone ID: MRT4577_123743C.1
aattcggcacgaggcctagctattctcccttattgcttgctgctccccgatccccagctatgcaactgaacctatcaatggtgctctggtacagtctagtcctaaatcaatcgcaaccggcattggttattttgatcaatgagtctacacggctgtcgtgcgttttgtcattgttgttataactgtagcataattttggtcgcaaatgtgagtgcgccattgttattttgatcaaagagtatacaccgctgtcatgcgttttgcataggctggtggggagaattctgaggagcaggaattggagacaacactgtcttacgtggttgagctggagcccaagctctgggttccagtgagactccttgaaggaaggatatgtagcgagatcaagaacaaccttgtctccatcagagaacaagcacataataggaggatccagagattacagcacgaggtaactttcccagctgctgctggatatactattattacgacatccagaaggcacccaatttcttgattaccaagcgcgtccacataacagcagcaggtcgccacagaacattcagcattcggtggttttttgcagctctagcagaagcagaggatggatgttgacgccgcaactgtacgaagctcacgtactaccttacctctccaaaaaaaaaacatgtcaacagctgatggatgtcctgagtttgttgcttggcaatcatcactaatttgcttgggg

SEQ ID NO: 26025 - DNA, 363 bp, Zea mays
  Clone ID: MRT4577_123744C.1
accttttactctttttgtctgttttgtatgagggaacacgccttgatgtgccatgtaatgggcgtactgcctcatttaacctgacgacaccgcatattactcgaccaattcttcacctactccttatttggatctgcaaaggcaagtcctatgatgggaccctaggaaaaacggctcatttttaaagcgctgtgtgattatacattgccactaagttgcggcctaggcaaaaaattggcaaagcgtgccctagtggacgataggatgccctgggtgtctaaacagccagctcaatgatcttgaccacataggaatcacccactttttggctaacgaccactcggcggtgggaatggaccacgc

SEQ ID NO: 26026 - DNA, 685 bp, Zea mays
  Clone ID: MRT4577_123745C.1
aaagcataaaaccatacattaaggagtattaaatttattacaacagcatcggagttttaccaaaagtagtgatcattgttcagaatgcagcggaataaaactaacgataaataagtggaaggatggggaagcttgtcccatcactcctcatgctcctcctcaaccgaggtaggatcccactcgactgtccaacccggtggcaagatggacggccaagtcactccagcaaccatgtcctccagagaaccttccaaagctgaggcaggcagatcctcgacagcaggctctggtgctggatcctgggctacctcctgagcaactccttgctccgacacgaggatgtactccccgtcagcgagattacagtcagtcaagacgggtgctccctctggaatatcatccatggtggtgaagttcagcctgccttgcctcacttgcgcattctgcctcttgccttggttctgattggaattctgtccctgcctctgctgatttctggggcaatttttggcatagtgtctagtgttaccacaagtggaacacatgttgtcattggcctgacggtactgctgttgtggctgattgttgttcctctgcactgggagctgagaaagcgttgggtgtctgctgctgctgctgctgtggtcggatcacccaacatccttgctgctgctgaggtcccctg

SEQ ID NO: 26027 - DNA, 400 bp, Zea mays
  Clone ID: MRT4577_123746C.1
aagtgttcacctatcatataggtgagtgtaacttttagacattggacacgccaaccaagctaaccacgcaagttcggcaacaacttatatcacactccagttgatgctgcacagcatgctcgcactgggagccacaacatttaatggttacttctaacccagacaagactgatgtccattcaaaataaaagctgctagtaaatgtgcctcatatttacatagaaatgacggggccataacttgtgactctgatatcaatgaataactatccaaacctacaaacacttattagtgactaatgcacagaccgactaactatacttttgcttggatatccacatctgatgtaaagtgcttatcataggttaggatcgcatcctcctatgcaaacactgaactt

SEQ ID NO: 26028 - DNA, 692 bp, Zea mays
  unsure (1)..(692): unsure at all n locations
  Clone ID: MRT4577_123747C.1
ctccggggttcggtttcgtgggtgggcggatcgagaggcggcgtcggatgttgagtaccgctgcttcgtcggccggcctccctgggccacggtactcancactccctccacaaccccttcagcacctacngcnaagtcctcnaagtccaagacatcccccnaccggnagacccanaggccccccggcctccgctttccaaccttttccccgnnnaagccancccggaaccccctnnnngcccttaaccgcatggacttgattgttttacccccccccnnaannagccccaccccccnnnccccccnnnccccccccccccccccccccccnncncccccccnccccccnccccccccccccnccccccccccnccncccccccccccccccaccccccccccccccccccccncnccccccccccccccccccnccccccccccncccccccccccccccccccccccccccccccccccctttttcttttttttttttctttcccccccccttttcccccncncttttttttccctcccctcccccccccccccccccccccccnnccccccccccccccccccccccccccccccccacccnnnnccccccccccnccccccccccccccnnccccccccccctcccccccccccccncccccccctctcccccccccnccccccacccc

SEQ ID NO: 26029 - DNA, 1114 bp, Zea mays
  Clone ID: MRT4577_123748C.1
gccccacgcgtccgcgcagagatccgagcgagcatagaggtagagatccaaaaaaaaccataccaacatggtgaccctagaaaacctacgccgcatatatggccatgtagtggagagggcgaccctggcgcgcgacctcctggcccccgccgccggccaactctccggcaatctgcacagccgttgtattctggcccagcaactcgacctgtccttccccgagaaagacgacgacttgcgtgccgatctggagaagttcggcgccattgaggcgatcgctttatgccgacacctgttcatggcggtgattgtcttcagggacgaagcgagcgtgccggtcgctttccggaggcaagaggaaatatcatctgggctgtacagcgccgtcccgcctccccaccttgcgctctccacgagttttattcatccaaacagtatcaaggttaatttgtactccaacacatcaactgcgtcgtctggagattcaacaactgcaaaacatagcacggagccaactactacagaggcagcaacaagcatcggacaatcaatgatgccgctatggatggaatcgaggccagcgactgtgttccaaaactaccttggcgatggcagtcggttcgtgccatcgaggaggtcacagatttatgggccaacactgggtgcagatggtcgcttgtggatggaaggcttcaacattgtccagtgtggaaattacgcacaatcagtacctacggccataccagttgctcaggtgcctcagctactttaccagtcagaggatgaactagcggcgaggcgaacacgcagttacatcacaatctcatcgtcagttgggtcccctataaacccgctccagcgctctccgatcagagcgactccattgcgagtcggttcatacccccggtcgacagaggtgtccgtctgtactgctgtgaatataggttcggcttttccggccattatgatcagagcccgaaaataggagctcaaagcacggctcgacacgaaatttatttaatttagtaagataacgactttatattgttgtgatatttggaggtttatgtgtttaaatgatgctaagattgtttaatacctttaatttagtaag

SEQ ID NO: 26030 - DNA, 573 bp, Zea mays
  unsure (1)..(573): unsure at all n locations
  Clone ID: MRT4577_123749C.1
attgggtacctcgaggccggccgggaggagatcccagcccttctgcagtgaatatacgcaccgcgaactgacctgagatgccngctatgtgaatctatccacaacagtgatgcctacttcgagcggtatgaggggaaataactgataagggattgtcggcaaacggactatcggggcgcaatttcgcagcataaccacgaacttcacgaggacgtacaccaccacacacatttctagagcgatctactcaacaatgacactccgacacccatacatctgctgctaggatatgcactgcaagtgctcttgcttctgctgactcacgtgaggtacctcaatacggacaccaatgtcagccgagcctctatgctcctgtatactgaaatgttcttctgatatttctgccagcgatcatagctggagttgaaaatgacaacataacattcatgtggaccgtgcagtgccacgattgtctctgatgtgcccaatgatgataggaggccttgtaacagctctctaatatgtggatcttgctaggactaccacggacaacccggacatgggagcccacga

SEQ ID NO: 26031 - DNA, 412 bp, Zea mays
  Clone ID: MRT4577_12374C.1
ccggccggggagatgaacggcttctagtctccttggccaatggccatctctctctcctgcgcacgcgcgtcgtctgctgcagcagcaagaccccccagcgccgccgcctccgttggttttagcctcagctcggtcctgatcgggggaacactgaggtgttccgtccttctcgaatgtcgcagcaaccaacgctgatgtctcctcggaccattgtgaaaatagtagtgtagcgaatggagtgggcggcgccagcggcaaagcttttgctacgttttgaacaggatgaaaacagtcactgttttcaatcaaatgttgtccgagagtactgtacaagtttctgagacgaaatcacggtctcattgatggagaaatcactttttcgaccaaaaaaaaaaaaaaaaaatttgcggcc

SEQ ID NO: 26032 - DNA, 506 bp, Zea mays
  Clone ID: MRT4577_123750C.1
cattgggtacctcgaggccggccgtcctgcctgcccgctctctttccccttctccatttccgctcgcttacgctatgacggctccttcccaatcccccaccgagatgtgcgactccgcgcccgcacgacatgccgtacgactacgatcttcgtgtccaccccatgctgcgacaagcccgagggtcgcacctgacctattgcattctgtgagactatcatagaaagcttatccctctctttcgtaggactgagactcgacaaccaggcttatctcgatctctcgtcccgcgaaaaaactgatgacagcgtcgcgcagcaggtagcagacgctgctctccagaacgaggcgaatatgaatggagccaccattactccacatgtttcttgctctcgggactgcagtctgaacctcatgtagaagagcccctattgctatcttgctaggcacctatatacatgcttctgtgttcatagagcctattatatgcacacacgttccaagactt

SEQ ID NO: 26033 - DNA, 843 bp, Zea mays
  Clone ID: MRT4577_123751C.1
cagcattcgactgctccagctagctgcagtgtagagccataccaaagcctgcttgtgttgtgttgtgttctcttctgctcctcgctcgcacgaataatcagttcaaaccaatggttcgtacgtcaggctaattaattttctactaattagcttagctagcattctgtggttcattcattcattcatatatagttttgcagctccaaaaaatgacgatatatacattatttggtagtgacagtcaggacatatatatatatatagacagtacctgcatatatatatatatgcatgcaatgctgaataatctgctgattgctgcctttggttaactaggacgggaagaaggtgcaggagagggcggcatggggagccagcgacggcggcggcaacctggtgcaggacgccgtcgactacaggggctgccgggctgacaagtccagcacgggcggctgggtggcggcggcgctcgccctggggatcgagctgtgcgagcgcctcgccaccatgggcatcgccgtcaacctggtcacgtacctcacggccaccatgcacctgcccagcgccgcagctgccaacgtggtcaccgacttcatgggcacctccttcctcctctgcctcctcggtgggttcctcgccgactccttcctcggacggtacctcaccatcgccatcttcgccctcatccaagccatcgtgagtactgtactccgatccaactcgaacgattgctctggcatgcatgccgtgacgtcagctcatggtagctgatccatgcacgtgtcgtacgcacacatggcagggcacggggctcctggcagtgtccacggaggtgcggcagct

SEQ ID NO: 26034 - DNA, 523 bp, Zea mays
  Clone ID: MRT4577_123752C.1
aattcggcacgaggcagcattcgaccgctccagctagctgcagtgtgtagagccataccaaagcctgcttgtgttgtgttgtgttctcttctgctcctcgctcgcacgaataatcagttcaaaccaatggttcgtacgtcaggctaattaattttctactaattagcttagctagcattctctagttcagtcattcattcattcattcatatatagttttgcagctcagtaaagtgacgatatatacattatttggtagtgacagtcaggacatatatatatatatatatatatatatatatatatatatagacagtacctgcatatatatgcatgcaatgctgaattatctgctgattgctggctgatacagcacgttgcttttgtgtgcttgcgtgcctttggttaactaggacgggaagaaggtgcaggagagggcggcatggggagccagcgacggcggcggcaacctggtgcaggacgccgtcgactacaggggctgccgggcggacaagtccaccac

SEQ ID NO: 26035 - DNA, 598 bp, Zea mays
  Clone ID: MRT4577_123753C.1
tgcggttattcgattcacagcgctcaccacaccaaacagcaagtgaaaattccccaatcctctcgctctctgcgtcgatgatgccgtggcgtggcaaggtgcggctagcggcctagcgcaatgaccgtcgctcaaacgtcaccgatacggtgctgccgcgacaacatccaggggatcacgaagccagctatccggaggctggcgcgacgaggcgacgagaagcgcatctcgcggctcatctacgaggagacccgcggtgcgctcccgagcttcctgtagaacgacatccgcgacgacgtcacctacaccgagcacgcgcgccgtatgaccgtcaccgccatgtacgccttctatgtccttaagggcctcggccgcaccctctatggcttctacgggtaagtttgccgcgttcgtgcctcgcctcaccgtgggtgcggctctggtgttgctgcagatcacaagcagtttgtggagggtgaaaagatgctagctactgtataactgcaaagccgcacgccacacatggcgtggttgcctgaacaattgctgtcaatgctgagcttgctctggactcacacatgctccattctgtgtacaa

SEQ ID NO: 26036 - DNA, 367 bp, Zea mays
  Clone ID: MRT4577_123754C.1
aaaaaaaatttggcaggaaaacagggcccggcttttaaggttggtcccgaaaatggacaaagatccaaacttttttttacatactatggggggggggggggtcaacagggacagagaccggccgctggggcccccttttttacaacccaaaggggggggttagttttgggaaaaaggggccgttggaaatatgccaaaatcatctcccaggggggggggcaacaaaaaggggggcgggaaaacagggggaaacacccataacacaggggggtaagggaaccaccagggggtttctttgggggacctcccatggggacagttcctgaaatagcgatcgttttggggggggcgttgttttgttgggggg

SEQ ID NO: 26037 - DNA, 468 bp, Zea mays
  Clone ID: MRT4577_123755C.1
agctttcgacctctctcttctcattcctttgcaacttctcacttctcgaattccttctctggaaaatcagaaatggctcaagtggttgctaccaggtcaattcaaggctcgatgttatctcccaacggtggatctgtgtctacaagatccgagaagctattgaaaccagcgagttttgcagtgaaggttcttggcaacgaagcaaagagaagtggaagagtctctgtaagaagcagaagagtggttgatactactgtgagatccgctcgtgttgagactgaagtcattcctgtttctcctgaagatgtgcctaacagagaggagcagcttgagaggttgttggaaatgcagcagtttggtgatacatcggtagggatgtggtcgaagccgacagtgaggaggaagacaaagattgtttgcaccgttggtccgtcgaccaacacacgagaaatgatatggaaattggct

SEQ ID NO: 26038 - DNA, 489 bp, Zea mays
  Clone ID: MRT4577_123756C.1
gcaaataaaacatagttgcttgaagaagcaagggttgcaaatgataaaaaggaacccacatgagttgtagaacatattaatcttacctggctagacaataaagaataaagagaagagcttacatggaatctcaccttttgattcctgaagaaaataattaaacgggcagtcgttttagagggttacagaaaatgaaagactactgtctacagttttcacatgactagttattttaccactcatatcatcatagcttttacaaccaagaataattttttttttacaatgaagataacacaagcttctagctgatacatctttggccttacaaaatcgaactcaacaacctggccaaagtccaatccaccccccttcaccatccaatccgtacattctatatttatacagcctcagggtttgaccaccagatgcaacagtgtgaaatgctttgtttttctgatgtgaactctagcagcagttaagccaaac

SEQ ID NO: 26039 - DNA, 750 bp, Zea mays
  unsure (1)..(750): unsure at all n locations
  Clone ID: MRT4577_123757C.1
gggttgatatgcacctagntatacagtatatgtatctagaaaagccaaaatgatttaaaatttggaacggtggaattagttgataagaaatactgttatatgtatctagagaatccaaaatgacttacaatttggaacggagggagtagttgctaagaaatttgaatagttcgaatgcttatagatcactattctagatatacaaatgctttgttggcccctcacatattcattattatattgatccatattgtgccatcttgtgttatcatgtagaatttgcaagttaagccagaatataagtacctatgaattctttatctctatagctttctatatgcgaaaatactgttttctggccattcatctggtattagacattttcagtttatctcacttttgatgatttacttacgtgagctttcctttcccacaagcagtatcgccaaagatacagcatgccgctgaaatcttatgtgatatgagaagaagcattgaatcgttgagtggccagggatacagcaatggggtgattaagtggccaaaatcaccatccgaaaaggtgatgaaagcacggaagccctcatcccagtttggtataactgagagctcatcaggttctcgtaacaacgatgcaacttggaacggtagcagtcactctaccaagaaattttgtgacagggaagaatgattctgcatgcttgaattacccctggtaggaaactataaggtgccctgtgcctgtggaag

SEQ ID NO: 26040 - DNA, 365 bp, Zea mays
  unsure (1)..(365): unsure at all n locations
  Clone ID: MRT4577_123758C.1
aaaaaaataaataatataaatatgaataaaaaatttaataaataaaaaaaaaaaaanaaaaaaataataaaaataaaaaaaaaaaaaaaaaaaaaaaaaataaaataaaaaaaagggggcggccccctaaaaggtcccaactttacctccccggccatgcaataaaaaaacttttttatagggccacccaaataaaatcaacggcccgccttttaaaacctcccttatagaaaaaaccatgcaataaccaaactaatccccttagaaaaaaatccccctttccccagttgggttaataataaaaaggccccacccaatcccccttccaaacaatttcccaccctaattgtcaattggcccccccc

SEQ ID NO: 26041 - DNA, 2824 bp, Zea mays
  Clone ID: MRT4577_123759C.1
tcgaggccggccgggaacgactctcggcaacggatatctcggctctcgcatcgatgaagaacgtagcaaaatgcgatacctggtgtgaattgcagaatcccgcgaaccatcgagtttttgaacgcaagttgcgcccgaagccttctggcggagggcacgtctgcctgggcgtcacgccaaaagaagagaaaaaaaaaaagaaattcccgggacagatctctctcggccccgtgcccagcgctccgaaaccctagcgccgccgcgggtgccaggccgcgagcgtcgccatgggcatcgtgtttacgcggctcttctcgtcggtcttcggtaaccgcgaggctcgcatcctcgtcctcggcctggacaatgctggcaagaccaccatactctatagactgcaaatgggagaggtcgtctccacgatcccgacaattggattcaacgttgagacggtgcagtacaacaacatcaagttccaagtatgggatcttggtggtcaaacaagcatcaggtaccggctctttatcatgatagtaaattcctgactgtcatttctgaagtaaataatactattgcatttatttaatcaccgaggaaaagcagtgcaatagaggtactctaccactacctttttgtttattataagtaattggtggagagtggagacagtaccttgttaataccctgccacttcagtttccacaagctaaattatgatgctgtaagattggacaagtgtaaagaagagaagaaagttatatttctttcccattacagtaagagtcttaatttatgttaaaatgcaacgaattattcaaattcctcgtacaagtgtttaatgtctcgctatccatctagaaatcaagctttttctggtaagagctgtaaagagaatgggaacgtgttggagctggaagttggctatgccacaagacggtgagggaggactcgcgtggggaagttgggcaggttggacatggcctgttatctcttcatcctcttattatgcatcatcaacaacaacgacgacgaagacgatacagatctgcctcgccctgtgtggattagtcggtcggtttgctgtttgtgaaaattaggcagctttactttaataagaaaaggcacccaatttcacctaaatgagtactcgttggtggcctggacttaagtccacatcctcaaccagttgatcaaggctgtcacactatgatcccaagtgttatggtttggccttggatcatttcataatttggtgtcacaaccgcacaacatatatgacattcatgtatagtgtagtggatacacaatgaaaaatagttgtgtagttgaaggctagtaattccagtagaactagtttatagagtcgaaaatgtgagcaaggtatggtagtctagtctctatgacgctgtgtctagattcatttgtaacattatcctcagttgccaataatttgtttctatattcctttccatgtgagctccgctttaggggggaaacttggatagtgtttggttctggtgctggcaacatgacttatttacggagggtaatagatcctgttgcatgctgtttgagcgtaacgctcctgccactgtgctatctgataccaccattgtctttgctagccatgacagcatgtctccgtcaggttccctcacgtggccgttggatcaggatagcgtgtcgaaaacaaaatgacaggcggagccccactctgctttgttgtccagtagctactgtgttaaagttaccaatatctaaccaaacggatcaagtaattgcttaccatatttacgttagcgctgtttatccattccccttacatttgtgtttctttatcctaaccaaacactaccttaagggcatttcaagtattctactagttgtaagtattttttttctttttatacttgcataagtgttggaatgatcctttatgacatatagcatgattttttcaatcctgagactttttgggtttcttagagaaaactaacatgtcaactagtttgaattttcattgccacttctgtgcttttgaacatcagaactataaccattacttttgcatgatgcattttttcatgaactaatacatttaattttccattaatatcattgtcatgtgtgcatttcaggccatactggcggtgctactttccaaacacccaggctatcatatatgttgttgattcaagcgatacagataggcttgtaacagcaaaagaagaattccatgccatccttgaggaggatgaacttaaaggtgcagttgtccttgtgtatgcaaataagcaggatcttccaggtgcactcgatgatgctgccattacagagtcattagaactacacaaaattaagagccgccaatgggcgattttcaaaacatctgcaataaagggagaggggctcttcgaaggtttggactggctcagtaacacgctcaaatctggaagcagctaaggagcctccgcctcgtcatgaatcatttgctggatggtaaagaatagccgatgcttgcaagtcagcgcgcaaatcccattctctttgttttaactccagaagttctacaccgccatcaattatctgtaaagtgcgtgttaaattttttggatactacattagatgtacccccaggttgagatcaagaataggtctgtggaaaatgacgagcaaactgtgctactgtctttacccgtaaatctcatggatcatgacaagtttttttttgtaccccagtatgattaaacttactccacatttaaaaaaaaaaaaaaaaaaaaaaaaaaaaaaaaaaaataaaaaaaaaaaaaaaaaagcggcc

SEQ ID NO: 26042 - DNA, 481 bp, Zea mays
  Clone ID: MRT4577_123760C.1
tcgagcggccgcccgggcaggtctttttttttttttttttttttttttttttttttgttttattgcttgttattcccaatcctaggaaaagtttttattcgacacccttggtgtccaatttcacatttgaatctggaaaagcaacttcccccaactggggggacagatacatcagcccacccacggagacacagaattacaactaataatgcaaactaaaagagggcaccaccgggggggcgcagcacggacggaagaagctgggtttgtgaaagcaacctggacaaagggcaacaaggggggccccccaaagaggggtgcggggtaagacgcaaactgctttgtgcaaagcaggatctgcaagcggcgacaaaaaggaagcacgacaagagggagcgggctcgctaaatagccgttgtattaaaaggtgcaaataagcggtggggtaaaaagaaaccaaaaggttaaaaggaagaagttg

SEQ ID NO: 26043 - DNA, 439 bp, Zea mays
  Clone ID: MRT4577_123761C.1
aaacgcgcagcctccctacttacgtattatactcgagacaaggcatcacgcagcacaccggagacttgtgcttcttcacctgctgtatcctcttaccatctgcatctgcctgctcctggattgagaaccaccacctgaggtccatggcaaccaagaaccccatcctgtacacctcctgcatcaggctcctgctcccaccgagatcccatcgcactcaacctaccaggtgtacattaccaggacaatccagcacaccctacgacacatccacattatcaaaaaatccatccactccaatatattccaccattactacatggcgacatacccctacctgattctcttgccatctcattgcatttggaacagaagcatccccagcatccactcctgcctaaccagctcaccacgaacctcctaaccctgccagtgcaaacat

SEQ ID NO: 26044 - DNA, 428 bp, Zea mays
  Clone ID: MRT4577_123762C.1
cgaacaatgcagtatggtacaaaaagaataagcaatagcacaagatcacaacgcccaccagggggagacagggacacaatcaacacagcccatgactgctacttctacgtataccttgtgttgaggcgtgtgttgtatgaataaagacgatggatctcgttcgtcaaaaaaaaaaaaaaaaaaaaaaaaaaaaaattataaaaataataaatttatataaattaataaaaaataaaaataaaaaaaaataatataaaagggaaaaaataatataatttataaaaaattaaaaaaaaaataaaaggggggggccgttttaaagaatccaagtttttttccgcgtgcttgcaaagtaataattttttttaagggccccctaaatttaaattccttggccggggtttaaaaacggtggggattggaaaaac

SEQ ID NO: 26045 - DNA, 365 bp, Zea mays
  unsure (1)..(365): unsure at all n locations
  Clone ID: MRT4577_123763C.1
ggccggaanaacccgggtccgacccacgccgtccggttactccgtcattacccgtgttcaccagatttggaggtcgaaactcagtacgaacatgtattgcgctggaatcttttgcgtggaccaagagtgacttgctccactagggcaatagcatttatgaccaatgctgagactacattcgacttcaccacagaagccttgagggctgtcctgcgtgtggaaccggtcgcagttctgggaaggatgaccaacggacccttgccacttcgtcggtcacgggatcttcaacatatcacgaaggaggccattaccctgaacacgggaggagttcatttgacgcatgttggctgatgaagctcaagatc

SEQ ID NO: 26046 - DNA, 462 bp, Zea mays
  Clone ID: MRT4577_123764C.1
aacagcccacctacggctttcaaacagcaatgcatgtgtctttgcaccaaagtgtccgtcatgcccagccattccagacttttaggagcccttatatcctacaaacgatcccgctggtaacattccacgtacagatgacaaaaggtgcacacaaaatatgcctgggttggaccacatcctgatggagcaaataaggattccttgcgactgggttaggtcacttgaacttgctattctgcgcttcggagacagcccacccgggaagcacttctatgctgtaggggctccgcctcccacgaactggcttggagctggactgctcccatgcagcgcgccctggactatgtggggtacacccggcaatttgtcttcctccggatacaccccctgggctgggtgagcttggtaactgcagcatctcttgtggcatttgcttacactatgccaagaacgtctctctat

SEQ ID NO: 26047 - DNA, 428 bp, Zea mays
  unsure (1)..(428): unsure at all n locations
  Clone ID: MRT4577_123765C.1
gggttgaatgcggtaagcggcaagcctatctgtgctgttttggcaattttctttgaacttcttggaatctatggagaaggaaagtttgcgtggaaatacgggtatccatatttggctgttgtcctaaatttcagccagacgtgggcattatattgtcttatacagttttatactgctaccaaggagaagctgcaacctataaagcccctgtccaagtttcttactttcaaatctattgtatttttgacctggtggcagggtgttgctgatgtttttcttttctcaactgggctttttaatggacatttggcacaaaggtttcaaacacgtatccaggattacattatatgccttgagatgggnggttgcggcagtggtccatttaaaagttgttccagctaaaccttaccgacgtngggaaagaaatg

SEQ ID NO: 26048 - DNA, 354 bp, Zea mays
  unsure (1)..(354): unsure at all n locations
  Clone ID: MRT4577_123766C.1
actcctaatatatagtagtgagtgactaggtggtatgtgtaggactgtactatgttttcgccatatgcatggtgggcgcagcgcgtaatgaatgtaatggcagtactgctactacgtgctctgctacttccaaaaaaaaaaaaaaaaaaaaaaaaaaaaaaaaaaaaaaaaaaaaaaaaaaaagggcggtcggtataggggggccgggggaaaggaaaacgggcatgggaaggaaaaaggnggaaaaaagggaaaccaaaaataaaattaaataaaccagggggggccaccgttaaaaggagaaaaaaccctgggggggcccaaccaaaataaagtttttttaaatgggcactt

SEQ ID NO: 26049 - DNA, 361 bp, Zea mays
  Clone ID: MRT4577_123767C.1
catgatcttttcttttcaagtttcatctccaggtttcgaatgacagcctctgggtttctaaagccgcacaacaaacctgtaaagcatagatcagccccgaaccgatgacagggctaacatacacattcttgcgaagtgctaccccttaaacaggatcaccttcaaccgattccctattctaactctcacaaagctaaagcaaccaactctttaacccctgtcacatattcatcgccgaagactatacatcagcagacaagaccccacaccatcagcttcatgagcagaaacagctctatgactcaattggccttctaggagataaaaatatcccgttcataatgtcaggcaaaatggattg

SEQ ID NO: 26050 - DNA, 1675 bp, Zea mays
  unsure (1)..(1675): unsure at all n locations
  Clone ID: MRT4577_123768C.1
ttttagttgcttcacttggtgtcttagcggttcgtgtttgtaagtctaagctcctcttcccagccaccaactcgatctgccctagtcttcccatctcctacttaagtcatggtccagtaggccgtgcagtcctagagctcgagtgatctccttggctcttgtagcctatgtttccccggagttaatcccctcccaatatcttggtccatctgcccagagcttggtgtaccagtccctaggtggtgaccatcatcggcagttagtccacctcgccgtgaccagaattcccaaaagaagaagatgaaattcaagaagtggtttctgaagaggagtctgcttcagtgcctgttcatcaagtgatgggagccatctaactggggtttaatagagggatttagacctccgtctctgcaacaaaggcaagtcccggtgcatttgccaccttccttgtattacaaaattttatcacttatatgctgcattaggtaataggagttgaataattaaacacttgatgcattaccatccttgaaagattgattatcataccttgttacctgttttataaaaactagtaatgcttagttatgcttatagattaagaaaaatgtttttgatctatgactcatgatttttaaaaagaaaaagggcttgggatgatggaggcatcctcccgtggggatgaattcatcattcaagcagggtacctctgccaggtatcanactttgagaatttgtttanaatgagaccagacgttgagctggacaggtcgcccgtctgagtcgattaaggaccgtaccgattgttggcctcttgatctaggaccttttatctggccacatacctcgtcatgggtaagcttgaacccggctattccatacatgaaaagacaatcgcgcactgggagtggagagatggcgagagtggcacgtaccctcctggcaacagaccgcctaaaagggtggtgtgctctcgggtgctgcagacctgttcatgtggtggaggatccgtgggaatggtagacatgtgcaatagagttaagagaagcatatgtcatgtggttggagatctccagctgggtattaatcaattcggatcgccgaacttctcggatatgaagactggatctttgaccctcatcgtagataacaagcgaaacaaaggttggattttaaaagaaagctagtgtaggacaagtgaatgctctagattaggcaaatctagattcaggaaaagtacttaacttgtgatgtaaaattttggcttaaggatccactcatagtaagcttttctgcaaaacagagtctttgattcttgataagccataccttgaacccctctagccagcatacccttgagagtcttttatttagtcgggtaagtcttgctgagtaattccatactcagggttttattccctgttgttttttagttatagttttgtgctgctgatgatggtgttaagtgccggtgggctcggtcttcttataagtctaagtaacttttctatacttcttattgaggatggtcacttgagctagcatatatttcaaacttataaataatttataacatttcaaagtttatcactttgaactacttttgtaaccactccgataaatgtaatgtaaatttgttgtaacttgtaaaatttggtaataagatttccgctgc

SEQ ID NO: 26051 - DNA, 371 bp, Zea mays
  Clone ID: MRT4577_123769C.1
agatgagcaagaagagtatcatgaggtaaatgagtactacgaaaaagatactgggcttgaaggactgcaacacgagttcgcatcgatgggagattgaccagatgaagcatgacttgaactgaagacctagaatgaccgccgaagatacgcctaatacattggttttggaaagtatcaagtggatggataaatttagttgtgagaggactaatcgcaagaccataatctaattgagcacggaccatttggctgtaaaaacgacatgctaataaaggtggaaaacctttagaattgagaccaatagcagcaagttggttcattgtgagagatgccttattgatattgtgttgaatcataacaagatagtctag

SEQ ID NO: 26052 - DNA, 402 bp, Zea mays
  Clone ID: MRT4577_12376C.1
gggacaaaacacaggggaaagtttgtttcctccggcccgggattttttttttgttaaaatttgtaaaaccccattggggatgcggccccctcccggggaaaataagggggacagtctcgttgacagttttgccaaaattttatttgtttttttataaagggggcgaaaataagtttttttgaggcggggataatttttttaaaaggggcggaaaaaggagttttttttttataaaaaatttctcacatgatttatttaacatagaatttttttttcccttttaaccccctaatcctttaaaaaaacttttttttttaaactataactttgattttaggcgttctcgaacctacaatctcgaaacaggggggaaaatattcttacgtttttggtcatatgctt

SEQ ID NO: 26053 - DNA, 472 bp, Zea mays
  Clone ID: MRT4577_123770C.1
gaaaaaaaaaaaaaagtgtgaataaaaattgaaaaaaacaggggggcaaaaaaccgaagagggggggggaagaagggaaacaggggaatctacagaaacaggggggcaggggaaaaaacacacacccccccgcgggggggccgaaaaaacagacagaaccccgagaacccacggggggggggggaccccccggacgaaaacaaggaggcccgggaagcaagagaagcccccccgggcccacatggggggaaaacccggcgcacacaccctctgagcgcagagaaaaacacccccccgaccggaggaaccacccgggggcccccgtcaaagaagaaaggaccagaggaaaatttcagggggaacccaggcacaaaaccccaacaaagagggaaaaaaggcccccgggggggcccccgaaaaccgggccggcacccccgggggggccccccatccctatatagagggggaaaaa

SEQ ID NO: 26054 - DNA, 305 bp, Zea mays
  Clone ID: MRT4577_123771C.1
atcgaagcctgctcgagcgaccatccatcctgtataacgcacactcttggacagactcgacagggggatccttcgtggaggatcaagccttctttactgggcaaaaacctcactagcgatgacacagcttcgagacatcggacgaccaacacttatgttcatgaacacaggagagttgatactaaaccgtgccaatgtaaacaatcatgcaaagaccgtaccttcgaagttgttagataacgcgcagatcggaaatgcagaatcagtgacacacgcatggtaagccatcaccagctgttgtacat

SEQ ID NO: 26055 - DNA, 159 bp, Zea mays
  unsure (1)..(159): unsure at all n locations
  Clone ID: MRT4577_123772C.1
tagccttaaccaaccctgctcccctcgtcgctcgacttanccgacgccgacgccggggggggggcctctccgaaccaacgccatgcccccgcggaaaaggnngangcacnggcatccgagncccgnnncgacgcncaacagccaganccnggcggaggc

SEQ ID NO: 26056 - DNA, 332 bp, Zea mays
  Clone ID: MRT4577_123773C.1
acccgatttccattagagccggcgatgatggcccaaggtctggtcacgggcagccgacgcctaggcgtcgcagctcctgcatttgaagttgttgctgctcctcgtacctaagtactgaagttagactcaacaattacttttgcgaaacattacctgacatccagatactattgctactgcatccgctgtgatgacagactttgttatcatagagaatcttgaagaggaacattcctcgagatcctgctcttatacatttaatgaggcctgttgcatgattgatataatcaagcccatatgtgtgccctgtgtcgtaactgtatctcatgcac

SEQ ID NO: 26057 - DNA, 336 bp, Zea mays
  Clone ID: MRT4577_123774C.1
aggagtgatgatgaagaacaacgcgggcttgcttccgtggacccttgggccatacctagctagaggacgcacaggaagggccctacccccactatcgggcaacacgccttcgctgagaggctacgtggtcgatccggagatcaagtccgctgagggctagaggtcgagatagctctctcgtctaacggaacgaatagggtgcccctcccccccggctcttgactgacatatagggctctcaagatcagggaaacaaaactggaaccactcgttctggaaccgaacctattttgactcgaaaagaaaaataagatacggtggaccctacgactgtcc

SEQ ID NO: 26058 - DNA, 291 bp, Zea mays
  Clone ID: MRT4577_123775C.1
gcagccgacaactctctaccgtccgagaccccaagcaccagcgcggcggcggcggcggcggcgaccattgctgtcgggaagaacaagaggctctacaagggatagatgggtggcatgaaaaataccgtcaacactttctctaagaaggattggtatgacatcaaggcaccgccggtgttcagtgtgcgcaacatcgggaagactctcgtattcaggacacagggtaccaggattgcttttgagggtctgaagcacagagtcttttaggtttgtctagctgttcttttaggc

SEQ ID NO: 26059 - DNA, 476 bp, Zea mays
  Clone ID: MRT4577_123776C.1
acaacattgccaggcaaaccccgggaaagggttttatttccgttttttcccccggggggaaaggacaggacagttagcgaaacgtaaaaacctgtacccactttggggggaatatttgttcctaaagtacggatcggagttgggatcgttgaaatgggaaggttttttttccgggggcttaagggggggagggggggggccgaaggcaacccccccgtttttttcgggggggggggggggggggggaaccctttccttggaaaccttggggggggcccctacgggagggggctcgggggggccgaaaaaacccgcgttttcctgccgtttggaggacctgggcttgtttgacagggccaaaaaacccctgagctgggagggtttcgggcttttcggggccttgggggctgccgtttcggttacggggttaggggcgggggctgtctcgggccgaattggcgggctgttgaattttt

SEQ ID NO: 26060 - DNA, 210 bp, Zea mays
  Clone ID: MRT4577_123777C.1
gtcactgacgttcgttccgcttgcttgattgttccaggtattagcagtcgaccggttcctcggagcacgatgaagtttgttgctgcctacctgcttgctgtcctcgctgggaacgccagcccctccgctgtcgatttgcctgccattctgccgtcctgttctctgcctcgctcggcggccctgctgtctttttcgggccgctgggggggg

SEQ ID NO: 26061 - DNA, 1756 bp, Zea mays
  Clone ID: MRT4577_123778C.1
ggccccgccgccgccggcgaaggtcgagccgccaccgaaggagaagcccccgccaccagcaccgaaggaggagccaaagcccgccccggcgccggcgccgccgcccaaggtggtggaggtcccctacccgtggccgtacccgtgcccgtacccgtacccggcgtggccgtccgactgctgctgccaccacgggcacggcggctgccactgctgctcctgcggcaaggcccccgaggccccggcgccgcccccgatgccgcagtacgtgccccagccgtacccctgcggcggtggcggcggctaccggatcgtctgcgatgaggacccctcctacgcctgcgccatcatgtgattcattgtcccgttacgcgcccacaacccaccacaccagtgtcagtcatctcgtcatgccgtgccgtgccgtgcctcccgtataatcgccgtacagattcatcatccacacacacacaacacagcagagagattactacgatccaacagttctagagcaagagagaggaagacacaccgcagagttagcaggctaataacttgcaggagcagcaggaatggcggcgacgcgtcgcctctcttgctttctcctcgccgtgcttctggcaggagtggccgctgccaccgccttcgacgaagcggctgctgccggcttcgggcttggccacggcgcgcgtttcgcgcgcaagcatggacgtgctgccgctgagatgccccagccggagccagaacctaaaccgaaacctatgccacatccagagccaaagcctgaacctcaaccaaagcccaaccctgaacctcaaccaatgcccaagcctcaaccaaaatccaaaccagagccattgcctacaccgaagcctgaacctaagcccgaacctaagccagagcctaagcccgaacctaaaataaaaccaaagccaaaacctgaaccaaaaccagagcctaagccagagcataaacctgagccaaagccagagcctaaacccaaaccgaaaccagagccaaagccagagccacaaccaaaaccagagcctaagccagagcctaaacccgaaccgaaaccggagccaaagccagagccccaacctaagccagagcctaagcctgagccgaaaccagaaccaaagccagagccacaaccaaagcctgagcctaaaccagaaccaaaaccagagccaaagccagagcctaagcccgaaccaaaaccagagccaaagcctgagcctaaacccgaaccaagaccagaaccaaagccagagccaaagcctgaaccgaagacagacaaagccagagccagagtaagaaaccaaaaccagagccagagccacaaccaaagcccgagcctaagcccgatccaaaaccagagcctaaacccgaaccaaaaccagagccaaaaccagagccccaaccaaaaccagaacctaagcccgaaccaaaaccacagccagaacctaagcccgagccaaaaccaaagcctgaccctccacacatcccaccagcagctatcaactgaggaagtggctattagcaattattgtagtgtttaaataaaatgtcatgttgcagcatgcttttgtaggtgctgctacttgttgtatctattctatcctttctttgtcatttttgtatgttatgctattatatgatcttagtgcagtttagcttgttccgtgtatacacgcatttatgcactcagtgagtttttttatatgttggttgttataacaaaaaaaaaaaaaaaaaa

SEQ ID NO: 26062 - DNA, 316 bp, Zea mays
  Clone ID: MRT4577_123779C.1
accccccaattgctcccttaggcctcacattcagcgcttcgctattgcgaacgaagggggacgctgcggacgatggcgctcgcgctcaccgaagcccttcagccggctctttgccacgaagcgagatgcgcatcctgcatggccgggctcgccgcctccggtaaaaccaccatcgctgtacaagctcaagctcggggagatcgtcaccaccatccccaccataggtttcaatgttggacctgttaactacaagaacattagcttcactgtctgggctgtcgggggtcacgacatgacctgacctctttggaggcat

SEQ ID NO: 26063 - DNA, 390 bp, Zea mays
  unsure (1)..(390): unsure at all n locations
  Clone ID: MRT4577_12377C.1
cggaanncccggggcggacccacgcgnntccgggagaaacaggtgaaacaaatgttggggctcattggcgatggagagttctctacagaaaaagctgaggtgttctatgagaagcgacctttacttatttctcatgtggagaacttctatcgtatgtatcgtgctcttgctgcacgatatgacagtgtaactgaacaactgcgcaaaaacattccatcatctcttcaatcatatggctcatttggtgtctctgaatcagattctgagacacaacgttcgtcatctccagagtctgatgtccaagaaaatatgccacggcaaaagcaaaagcctggaccagatttccttgacatctctgctggctctggagttggctgagatgtatcaaag

SEQ ID NO: 26064 - DNA, 1052 bp, Zea mays
  unsure (1)..(1052): unsure at all n locations
  Clone ID: MRT4577_123780C.1
ttcgatgggtacctcgnagccggccgggccgggactccacagcagagagatacaaccagcacttctagagcaagagagaggaagacacaccgcagagttagcaggctaataacttgcaggagcagcaggaatggcggcgacgcgtcgcctctcttgccttcttctcgccgtgcttctggcaggagtggccgctgccaccgccttcgacgaagcggctgcttccggcttcgggcttggccacggcgggcgtttcgcgcgcaagcatggacgtgctgccgctgagatgccccagccggagccacaacctaaaactaagccggagccccatatgcagccactgccccagccagaacctaaacccgaaacctatgccacatccagagccaaagcctgaacctcaaccaaaagccaaccctgaacctcaaccactgcccaagcctctaccaaaatcaaaaaaaaaccacacacaacacggcagagagattacctacgatcacccagttctagagcaagagagaggaagacacaccgcagagttagcaggctaataacttgcaggagcagcaggaatggcggcgacgcgtcgcctctcttgctttctcctcgccgtgcttctggcaggagtggccgctgccaccgccttcgacgaagcggctgctgccggcttcgggcttggccacggcgcgcgtttcgcgcgcaagcatggacgtgctgccgctgagatgccccagccggagccacaacctaaaactaagccggagccccatatgcagccactgccccagccagaacctaagcccgagcccaaaccaaagcctgaccctccacacatcccaccagcagctatcaactgaggaagtggctattaacaattattgtagtgtttaaataaaatgccatgttgcagcgtgcttttgtaggtgctgctacttgnntgatctatcctatcttttctttggcattttttggatggtatgctattatatgatcttagtgcagtttagcttggtccgtgtatacacgcatttatgcactcagtgggtttttggtag

SEQ ID NO: 26065 - DNA, 261 bp, Zea mays
  Clone ID: MRT4577_123781C.1
ttatttttcaacaactccatcccccgggggggcgtaaacatatttcgggggtccaaactaaacaacagctccagacgccattaacgtacaccacgacgacatgaagctcaagcacgacatccatacgctcgaccagcaacactcagaaggctgttacaaggtcaagtatagcattctattgaacacactatcggccccacatatctctgaaacactactctacaccatacgtgtccgcaacaagaagaagaatttccccta

SEQ ID NO: 26066 - DNA, 2757 bp, Zea mays
  Clone ID: MRT4577_123782C.1
aaaaaaaaaaaaaataggcgcctttttttttttttttttttttttattttttttttttttttgtattaaaacaatggtttctgttagttagctgctcgaaacagcgaacatatatacataacaaccaacatataacaaaaacccactgagtgcataaatgcgtgtatacacggaacaagctaaactgcactaagatcatataatagcataacatacaaaaaatgacaaagaaaagataggatagatacaacaagtagcagcacctacaaaagcacgctgcaacatggcattttatttaaacactacaataattgttaatagccacttcctcagttgatagctgctggtgggatgtgtggagggtcaggctttggtttgggctcgggcttaggttctggctgtggttttggttcgggcttaggttctggttttggttggggctctggttttggttcgggtttaggctctggttttggatcaggcttaggctctggctttggttgtggctccggttctggtttcggttttggttcaggtttaggctctggctttggttctggttctggtcttggttcgggtttaggctcaggctttggctctggttttggttcgggcttaggctctggctttggctctggttttggttctggcttaggctctggctttggttgtggctctggctttggatctggtttcggtttcggctcaggctttggctctggcttaggttctggccttggttcgggtttaggctcaggctttggctctggttttggttcgggcttaggctctggctttggctctggttttggttctggtttaggctcaggctttggttgtggctctggctttggttctggtttcggctcaggcttaggctctggcttaggttggggctctggctttggctccggtttcggttcgggtttaggctctggcttaggctctggttttggttgtggctctggctttggctctggtttcggtttgggtttaggctctggctttggctcaggtttatgctctggcttaggctctggttttggttcaggttttggctttggttttattttaggttcgggcttaggctctggcttaggttcgggcttaggttcaggcttcggtgtaggcaatggctctggtttggattttggttgaggcttgggcattggttgaggttcagggttgggctttggttgaggttcaggctttggctctggatgtggcataggtttcggtttaggttctggctggggcagtggctgcatatggggctccggcttagttttaggttgtggctccggctggggcatctcagcggcagcacgtccatgcttgcgcgcgaaacgcgcgccgtggccaagcccgaagccggcagcagccgcttcgtcgaaggcggtggcagcggccactcctgccagaagcacggcgaggagaaagcaagagaggcgacgcgtcgccgccattcctgctgctcctgcaagttattagcctgctaactctgcggtgtgtcttcctctctcttgctctagaactgttggatcgtagtaatctctctgctgtgttgtgtgtgtgtggatcccggcccggtccgcatcatcgtgccagttcacggttctggtttgggtctgggtcaaggcttggggattggtttcgggttgggttcgggcttagggtctggatagggggctccggcttagttttaggttgtggctccggctggggcatctcagcggcagcacgtccatgcttgcgcgcgaaacgcgcgccgtggccaagcccgaagccggcagcagccgcttcgtcgaaggcggtggcagcggccactcctgccagaagcacggcgaggagaaagcaagagaggcgacgcgtcgccgccattcctgctgctcctgcaagttattagcctgctaactctgcggtgtgtcttcctctctcttgctctagaactgttggatcgtagtaatctctctgctgtgtggctcgcggcctgcgcttttttttttttttttttttcgccgccggtgcgtcggctggaaatcgtagctgggtagcatgtcgtctgatgtgccgttgacgctgctactacgccggcgacggagacggtcctcgtcctcctgggggatcgggatcatcagatcgctgagatccacacccccaccgccgcgccgccgccggacggggaggcggaggcggcgagaccgaggatctgcttgtccatgaactgcgacgcgttcatctcctcgtgtcggtggagatgttggtgcggatggagtggtcccggccctcgaggtaccctatagttttttttttttgtttttgttattttttttatattttttttttttttttttttttttttttttttaacaaaaacccactgagtgcataaatgcgtgtatacacggaacaagctaaactgcactaagatcatataatagcataacatacaaaaaatgacaaagaaaagataggatagatacaacaagtagcagcacctacaaaagcacgctgcaacatggcattttatttaaacactacaataattgttaatagccacttcctcagttgatagctgctggtgggatgtgtggagggtcaggctttggttcgggcttaggttctggttttggttggggctctggttttggttcgggtttaggctctggttttggatcaggcttaggctctggctttggttgtggctccggttctggtttcggttttggttcaggtttaggctctggctttggttct

SEQ ID NO: 26067 - DNA, 199 bp, Zea mays
  Clone ID: MRT4577_123783C.1
cctgagcaatcctcttcttgccctggtaaacgtgtctgcaccctatgatgaacagatcgccatatggagtggggccgatatatatcaagagaaaaaggcgatcatataggccctctgaagctctcgctcgcaactgggacactactactcatgcaagggacaagtattgactgaacaaagcgagctatgcctgctacac

SEQ ID NO: 26068 - DNA, 1582 bp, Zea mays
  Clone ID: MRT4577_123784C.1
tgacaggatgccggtgagcgatcacggtctcaggcagctcatagtcaacagcccacaggattgagcggatgcagtaccatccaacatcaccgaggacacccaaggcgtcaaggtctggctttaccctgatgtcattcttgaggaattcctcggatgcccgaaagctgcacatactgtttatcactctgacgtcgccaaaggcgtccttgtcgctgacgatctcccgcatcttggcggtgcgcgggttgtggatccacatggtggtgtccatgaactggaccccggaggcgtcgcaggcgccgaggatggcgtcgagttcggcagtgcagagcgcggtgggcttctcgaggagcaggtgcttgccacgcgcagcgacggctgtggcccagggcacgtggagactggtggggagcgggaggtacacggcctccacgtccgggtcctctaggagagactcgtaggacccgtggacgcgcgccgcggggaagccgatttcggagatgaagcggcgggccttgtcatcggagcgactgcctacggcggcgatggtggcggcgcccggagggagcatcagcattgcgcgcgagatcttacgcgcaatgtcagcgcatcccaggacgccgaagcgcaccgcgcgcggcggcggcggctgcaccggcgctgcaggggacgacattggcggcggcgtcgttggttggcctcggttccgaccggtgtgtggagtgatggatcgcctgcgtcagttatttgttgtgtgcggtagttcagctttcgggttcaggataatcatgtcagggctccagtgctccacatacatacaggaggcggcatgggggcgaggaggcccaggaagagctcacggcaacagcctaggaacctgccattgcgtagcccagaacaggtagaaggcatgcgattagagcccactttttttttttttttttgcttttttttttttttttttcacggaacaagctaaactgcactaagatcatataatagcataacatacaaaaaatgacaaagaaaagataggatagatacaacaagtagcagcacctacaaaagcacgctgcaacatggcattttatttaaacactacaataattgttaatagccacttcctcagttgatagctgctggtgggatgtgtggagggtcaggctttggtttgggctcgggcttaggttctggctgtggttttggttcgggcttaggttctggttttggttggggctctggttttggttcgggtttaggctctggttttggttctggttctggtcttggttcgggtttaggctcaggctttggctctggttttggttcgggcttaggctctggctttggctctggttttggttctggcttaggctctggctttggttgtggctctggctttggatctggtttcggtttcggctcaggctttggctctggcttaggttctggccttggttcgggtttaggctcaggctttggctctggttttggttcgggcttaggctctggctttggctctggttttggttctggtttaggctcaggctttggttggggctctggctttggttctggtttc

SEQ ID NO: 26069 - DNA, 2101 bp, Zea mays
  Clone ID: MRT4577_123785C.1
gggtacctcgaggccggccgggccggtcctcgaggccggccgggactggcgcctacgtggtcgtagcatttaaaaaaaaaaaaaaaaaaatgctcgaggccggccggatccacacacacacaacacagcagagagattacaaccagcacttctagagcaagagagaggaagacacaccgcagagttagcaggctaataacttgcaggagcagcaggaatggcggcgacgcgtcgcctctcttgccttcttctcgccgtgcttctggcaggagtggccgctgccaccgccttcgacgaagcggctgcttccggcttcgggcttggccacggcgggcgtttcgcgcgcaagcatggacgtgctgccgctgagatgccccagccggagccacaacctaaaactaagccggagccccatatgcagccactgccccagccagaacctaaaccgaaacctatgccacatccagagccaaagcctgaacctcaaccaaaacccaaccctgaacctcaaccaatgcccagccggccggccgtgacacacaacaaataactgacgcaggcgatccatcactccacagtgtccacacaccggtcggaaccgaggccaaccgccgccgccgccgccaatgtcgtcccctgcagcgccggtgcagccgccggcgccgcgcgcggtgcgcttcggcgtcctgggatgcgctgacatcgcgcgtaagatctcgcgcgcaatgctgatgctccctccgggcgccgccaccatcgccgccgtaggcagtcgctccgatgacaaggcccgccgcttcatctccgaaatcggcttccccgcggcgcgcgtccaccggccgggggattctctcctaccagcactaaacgtccggatcccatcagaactccgaaccactgcgtgcttgggcgagagtagtactaggatgggtgacctcctgggaagtcctcgtgttgcattcctaaccccacacacacaacacagcagagagatttagctaacgagccaacagttctagagcaagagagaggaagacacaccgcagagttagcaggctaataacttgcaggagcagcaggaatggcggcgacgcgtcgcctctcttgctttctcctcgccgtgcttctggcaggagtggccgctgccaccgccttcgacgaagcggctgctgccggcttcgggcttggccacggcgcgcgtttcgcgcgcaagcatggacgtgctgccgctgagatgccccagccggagccacaacctaaaactaagccggagccccatatgcagccactgccccagccagaacctaaaccgaaacctatgccacatccagagccaaagcctgaacctcaaccaaagcccaaccctgaacctcaaccaatgcccaagcctcaaccaaaatccaaaccagagccattgcctacaccgaagcctgaacctaagcccgaacctaagccagagcctaagcccgaacctaaaataaaaccaaagccaaaacctgaaccaaaaccagagcctaagccagagcataaacctgagccaaagccagagcctaaacccaaaccgaaaccagagccaaagccagagccacaaaccaaagccagagcctaagccagaaccaaaaccgcagccaaagccagagcctaagccagagcctaaacctgaaccaaaaccgaaaccagaaccggagccacaaccaaagccagagcctaagcctgatccaaaaccagagcctaaacccgaaccaaaaccagagccccaaccaaaaccagaacctaagcccgaaccaaaaccacagccagaacctaagcccgagcccaaaccaaagcctgaccctccacacatcccaccagcagctatcaactgaggaagtggctattaacaattattgtagtgtttaaataaaatgccatgttgcagcgtgcttttgtaggtgctgctacttgttgtatctatcctatcttttctttgtcattttttgtatgttatgctattatatgatcttagtgcagtttagcttgttccgtgtatacacgcatttatgcactcagtgggtttttgttatatgttggttgttatgcaaaaaaaaaaaaaaaaaaggcc

SEQ ID NO: 26070 - DNA, 605 bp, Zea mays
  unsure (1)..(605): unsure at all n locations
  Clone ID: MRT4577_123786C.1
tcgaggccggccgggaaactgctggtagagcagcagagtgagcgacacgatcgcgagcgcacggatgtaagcacgttgtcggaagctcaagctagaagaagcaccagtgcctgatcgatggtggaccaggctctcctctccggtcggcagctgctgggacgccccgtgcaatcggccgcgtctaggtcgtcgtcgaggaaggcgcccttcgtcgtcagggccagctccagacctccagacaagcaaggtgccgacaggcagttgtggctcgcgtccaagtagtccctctcctacctcgaagggacgctgaccggtgactatggctacgacccggtgggactctcggacccggaggtcaccgggggattcatctagtccaagtggctggtctacgtggaggtgatcaacggtcgctacggcatgctgtgcgcgaggtgcgacattgccccggatgatcttccgaaagatgctcatcatctccccgaagagcgagctgacgtgtttccagacgattgtcatcccgcccgtcgaaagctacgactacagagnagactcctacacgctcttcgtcttcaacatggcgatcatgagctttcgccgagcac

SEQ ID NO: 26071 - DNA, 1184 bp, Zea mays
  Clone ID: MRT4577_123787C.1
cattgggtacctcgacgccggccgggaaggctctgataccctgaaggatatctcttctttctgctgtagcgtgtatccacacacacacaacacagcagagagattactacgatccaacagttctagagcaagagagaggaagacacaccgcagagttagcaggctaataacttgcaggagcagcaggaatggcggcgacgcgtcgcctctcttgctttctcctcgccgtgcttctggcaggagtggccgctgccaccgccttcgacgaagcggctgctgccggcttcgggcttggccacggcgcgcgtttcgcgcgcaagcatggacgagctgccgctgagatgccccagccggagccacaacctaaaactaagccggagccccatatgcagccactgccccagccagaacctaaaccgaaacctatgccacatccagagcccgaaccaaaaccagagcctaaaccagaaccaaaaccagagccaaagccagagccgcaaccaaaaccagagcctaagccagagcctaaacctgaaccgaaaccagagccaaaaccagagccccaacctaagccagagcctaagcctgagccgaaaccggaaccaaagccacagccacaaccaaagccagagcctaagccagaaccaaaaccagagccaaagccagagccccaaccaaagccggagcctaaaccgaagccagagccagagcctaagcccgaaccaaaaccagagccaaagcctgagccctaaacccgaaccaagaccagaaccaaagccagagcctaagcctgaaccgaaaccgaaaccagagccagagcctaaacccgaaccaaaaccagagcctaaacccgaaccaaaaccagagccaaaaccagagccccaaccaaaaccagaacctaagcccgaaccaaaaccacagccagaacctaagcccgagccaaaaccaaagcctgaccctccacacatcccaccagcagctatcaactgaggaagtggctattagcaattattgtagtgtttaaataaaatgtcatgttgcagcatgcttttgtaggtgctgctacttgttgtatctattctatcctttctttgtcatttttgtatgttatgctattatatgatcttagtgcagtttagcttgttccgtgtatacacgcatttatgcactcagtgagttttttt

SEQ ID NO: 26072 - DNA, 339 bp, Zea mays
  Clone ID: MRT4577_123788C.1
tttccggggcggcccggtgataataccgggggccggcctttttttttggggtggaatttaaggccgtggcaggagttattccgcacaaatatgcgagcattgggagaaagcagagggaaaaagggttttactgccaaggaattgggtaatgggccatattattaaaaagagggtagcccccagacctaaactggaatttctcttcctccgatttggcgaagcgcatgcttagggcgtgagtgggggtgggggctaacagatgcagggcttttgtggagcaggatggaatttccaagacagcggcagtgtgattggtggatgaaagaaaaagttcctgca

SEQ ID NO: 26073 - DNA, 1077 bp, Zea mays
  Clone ID: MRT4577_123789C.1
ttcttaagcagtggtaacaacgcagagtacttttttttttttttttttttttttttttttgatatttaatacaatgaaaaattaaagcacgattccccataggaatatgtacataagggggatctgtagataataatgctgttcggacctggagtttccctatatacagattagggaaacatttattcttattctattttattatgccattcaaaataatgggggggaataccgatttaagagtcgttcactactgcaattcaaaaaaataataataataatattatatttattatattattatattatagttttattttattatattatagttaattatattattatattctaattttattatattatagttaatggttctaatttgttctgaattttgcagcctgcgactggaaatccactttttcttcttttcttctttgtcatctcaatagaatagaaagaagcgggaagttttctagtgttagcaatgtgtgttttaagatagaatccatcgaggagaatcccgcgtactctgcgttgttaccactgcatccaaaaaagcagaatctattttttgaaaaagattctaaaaaagtaagtagaattagattcaagataaaagaaaaaaagattttagtaattagtaaaaaaatgtgaatgaatacttgctcttttctcgattttagatcggattttttggcggcatggccaagtggtaaggcaggggactgcaaatcctttacccccagttcaaatctgggtgccgcctgatcaataaaatacttaggattatagtactgatcaaactcgacaaattcgtacccccctaagttggggcacgagagtaactaggtttggcgatactggattttcccccccccacaccatagttctaccctcaaactagggtttgttttgtgggcagtggcccaaacggctaccaatagggatgaggtagcgtttccttattcttttattaatttaaatcgattcgattcgggaatttaaaactacgagactaagattcctgactccttagcctcgtagcggacgcgggaaaaacgctgggtcgac

SEQ ID NO: 26074 - DNA, 761 bp, Zea mays
  Clone ID: MRT4577_12378C.1
ctgctcccgtcaccgcccgtcgcagggacggctcatcttggttccgtcgcggggatcgtgagtggtggacgattcgcctctccaaatacatgtctatcccttaagcgaagggattttgtgtccttccgcttgtgacggctgaatcggttgatgcgtcagatccgtcagtttatgtcatctgcttcctgttcgcatgccgctgtggatgtttgtctccgtggaacgccacccctgctggttcatcttcactggtttatgatgcccacggccaacgccaactgatatcttctccgacgacggttggtggttaagctgaagaatgctttcttgagtctttctcgtaaggcgccagaaggaaacgggccatccaatatatggtttctgtttgccgatcaaatgatgtacgtgttcccttctgctcacaagatgattctggcctgtctccaaacatcacagaaaggtaattgtgttggtaagctgatgatgcgcatgcgaggacgtgcgtattgtacaacttgatgtaccaatacattggtagggtaggacggcctttgccatgtcgggtgcgctcgcttggcaggccacaagacaataaaaagtatatttggtggtgtttgcggggtggagatcgcacgggaacaatctatttgttctattttgcccgggttctccaccctgccatggtgtctctgtccttctcctgtgttgttgattccaccgcatcatctgaagtacaccgcgatcctacatagctaatatgt

SEQ ID NO: 26075 - DNA, 296 bp, Zea mays
  Clone ID: MRT4577_123790C.1
gtgagtcgtattagaacgaccaacgccatcagcggccgccgccacgacggacgagtcgcgtgcggcaggatgcactgatcgtcgtggcgacggtcacctgcgccgtccgcggcgttgcgtccgtcaccgtcgggcgggtcgacgacgaccctcggtcgatctgggttcaatagccccttgtcagtcacaatcgtaagcgccacggtcgcagtggagtcgctcctcgtatattctattcagatgcccgccagagcaggagcatcaacgggccggagcagatgaaggtggacggagat

SEQ ID NO: 26076 - DNA, 739 bp, Zea mays
  Clone ID: MRT4577_123791C.1
taccaaaatatgggaacggtagcaagagagcaggcaccagtaacaggaacaggaacgttttaaacaaaaaaaatctaagggatacttttaaaaacgtttcactaagcttttaataaaatttatgaatcctaggttggtcaaaactccctgaactgccataccgctaaagacaagggcaacttaaggatatcacccagctttcctaatatcgtgcactgggaggtaagaccaggaaaaataaggtatttaggactgtacacttgctcaactacagcttttatgctgatggttcttcatttttcataccccactgttcctcactattgtttccattcacaaggacagcaccaccagttgcctcaataacctcgtgaacagtatcttcattatcatctggtaccatctcttcatggacatgcatatttttaaaaacttccccttaacttttatttgacctttcagcatgaatcatgtactcctcggccggtggatagatactccttttagaggcaacagcagcttctacgttgagagcaatctgccagtcttcaaataagtttgggtactcattaggatcagccagcgactctgctgcttttgagtttaccttctggagatcctttttccacaatgctacaatctcagggactttgctgggaccataacctcttgccatcaatgctgcttccgaaatacaaatgctttctattagcaattgaagacactcttccagctttcc

SEQ ID NO: 26077 - DNA, 317 bp, Zea mays
  Clone ID: MRT4577_123792C.1
ggaaagaaaagcgccaattttcttttgggtggacataatgaacaagtcaggaacagggtaaaagctgacaacggtaagtggagggaaatttcactgcaccatgggatcctggatcccaggagcaagtatatatggcaacgaaatctcaagctccaactgcatagtcaccgcaggggttggctggaacacctgggagagacatttcttagtaacactctgccgtatccatcgctaagtgagcgagacaatcctcttcggagtagtcactatccagggtccgtagcatgggtaagactatctgtgggacggacatatcc

SEQ ID NO: 26078 - DNA, 1774 bp, Zea mays
  unsure (1)..(1774): unsure at all n locations
  Clone ID: MRT4577_123793C.1
tcgannnnnnnnnnntttttgtgggggtttttttgctcaacgcaaattgttcacaaaactactaaaagtctattaaagaaaacatctgctgtaaatttattcgccaccaattgaaaaggtgtaacacaatgatacaaagctcccaagtccgatgtacatcacaggttaaaaacatcctcaattcaacaagctactatatgcaccatgtaaaataccactccgatcacctacatccgatacaatttccgcgaaacggatacacaatacatgtcaataaaatctctactgcacctaatacttgttcatcaagttgaaaagaaagcacaaaatttcttaactgacacaaagaatatccatttgagtaataatagagtacgtttgatgaatgtttctgtgaaccaaagaaccctagatatctttaaaagaggaaggagaaaatatccgaacatgatgtactctacatagcagtcagcaacctttacaaacttaaccgctgatgcgaagttgctgtcccgtttatccactattgctcagtcagcaacttgctcaactttactctctattgcatccaccaacctttactcaaccaccagctcgccaagatccttctccttaaaccactatagctcaggagtctgcaacttgctcaactacagcttttatgctgatggttcttcatttttcataccccactgttcctcactattgtttccattcacaaggaacagcaccatcagttgaatcctcagcctcaacctcaacagcttcatcctgactttcttctactccgtcatcctctgcatcaacctcaacagcatcttcttgactctcttctactccaccatcttcaataacctctgaacatactcttcattatcattggaccatctcttctagcatgaatcatgtactcctcagccggtggatagatactccttttcgaggcaacagcagcttctacgttgagagcaatctgccagtcttcaaataagtttgggtactcattaggatcagccagggactctgctgcttttgagtttaccttctggagatcctttttccacaatgctacaatctcagggactttgctgggaagataagatctggccatcaatgctgcttccggaatacgattgctttctattagcaattgaagacactcttccagctttcctagcatgaagaaacaaaggaaagaaacattgttctttccttgttctttggctacagatgccaatttgttaatgccttcagcatccccaagggaagaatacaaaagcaacaaaccactgaggtccatagcatgtagaagacactcctctgccatctcaagctttccacttgacatagctaactcccctaatatcttccacttggactcactttgcgcctcggtagcaatcgccttcgcaatttcaagtcgaccaagttgcacagccaggtcaaatctgtaattagtgtcagttgctatctcgagggcttcctccaacattccacgtgattccaagaaacgtgccacactgtcatattgttcctttggtatagatgataaaacatcatttgcgcgatcaaaatccccacgcattacaagtgtcttatattcgatcaaactaaggagtaaagtataccccacaacattaaattgcttatcaataagatagacacggctttggtttgcaagatatcctagtaaatacattggccgatccaagtgaaacaaagttgtgacctctcctcctacaccccggccggactaaaagggtacccatctcaa

SEQ ID NO: 26079 - DNA, 398 bp, Zea mays
  unsure (1)..(398): unsure at all n locations
  Clone ID: MRT4577_123794C.1
caaaatctaaaccaatatattcgattattctctaggaaacacatgccaggtttagagggcaccacttatcagagtacatgctgatactggaatnctaaaaagataggcaccctccaacgatagggtttgcctgcctcgactaagacaggattcactcaacagagaacccggtttgtataggcaatcaatttgtttgctcgctgttaagaagagcaccccaccaactgggttacgccacctgccaataggatctaagtaacctgtttgtcgcttgttgtaggtaccgcaaccagagttccaacctagttagtctggttagaatggaagccccctgttgcaagttggcaacagggtttgccacagctagctgagttagagcttggtcaatctgttgcaac

SEQ ID NO: 26080 - DNA, 241 bp, Zea mays
  Clone ID: MRT4577_123795C.1
gtcattaatcgactgtgttttgaggaagctggggcccatgctgggctcaagcagctaatcaaaacaaaggctaggggttcccctacccccacaatgctgcgagctcctcacatggggagctatatgacggtgcaacaccaaacacacgtgtaaaactgtcgaagcgcacaagacaccgagtgtacaccccgtcttgggtagccttaaacggtggtcatgctaaagggcaaaaaggaacttt

SEQ ID NO: 26081 - DNA, 452 bp, Zea mays
  Clone ID: MRT4577_123796C.1
agatgctgttgaggtcgatgcagaggatgacttgtttttagaaagtcaagatgaagctgttgaggttgaggctgagggttcaagtgatggtgctgtccttgtgaatggaaacagtagcgaggaacagtgggtgctgactgagcaatagtggattaacggatcagcaacttcgcttcagcggtgtagtttgtaaaggttgctgactgctatagagtacatgatatccattttttccccagcggtattaatcaacactttcatctttgtgcccgataggaaattttgtgcttccctttctacatgtagatcaggccttaggcgtcgaagacattttatagcctaccatgaggtactcgtttcacggagatggtatatgatataggtgatcggagtgatattttacatggtgcatatagtagcttgtcgaactgagaatgttttacctgtgatgt

SEQ ID NO: 26082 - DNA, 615 bp, Zea mays
  Clone ID: MRT4577_123797C.1
aacgggcggggggggggtggtttttttttgaaaacatctgctgtaaatttattcgccaccattgaaaaggtgtaacacaatgatacaaagctcccaagtccgatgtacatcacaggtaaaaacattctcagttcgacaagctactatatgcaccttgtaaaatatcactccgatcacctatatcatataccatctccgtgaaacgagtacctcatgataggctataaaatgtcttcgacacctaagacctgatctacatgtagaaagggaagcacaaaatttcctatcgggcacaaagatggaagtgttgattaattgcgggtgcaacttcgtatatggataagccaatcctcgagcacatcacatgcttaataccgctggaaaaaaatggatatcatgtactctctatagcagtcagcaacctttacaaactacaccactgaagcgaagttgctgtcccgttaatccactattgctcagtcagcaacttgctcaactacagcttttatgctgatggttcttcatttttcgtaccccactgttcctcgctactgtttccattcacaaggacagcaccatcagttgaaccctcagcctcaacctcaacagccccgg

SEQ ID NO: 26083 - DNA, 715 bp, Zea mays
  Clone ID: MRT4577_123798C.1
agcaaaaaaaatttaaaaaaggctcagtaccagaaacaggaggtttcaagcaaaacgttctacggagtacttttaaaaagctttgaccaagctcgtaataacattagtgaatcctaggttgatcaaaactccctgaactgccatactgctaaaggttagggcaacttaaggatatatccagaatagatcacccagcaggagtttcctaatatcgtgtacttggaggtaagaccaggaaaataaggtatttaggactgtacacttgctcaactacagcttttatgctgatggttcttcatttttcgtaccccactgttcctcgctactgtttccattcacaaggacagcaccatcagttgaaccctcagcctcaacctcaacagcttcatcttgactttcttctactccgtcatcctctgcatcgacctcaacagcatcttcttgactctctactccaccatcctcaataacctcgtgaacagtatcttcattatcatctggtaccatctcttcatgtacatgcatatttttaaaagcttccactaaactctcatttgacctttcagcatgaatcatgtactcctcggccggtggatagatactccttttagaggcaacagcagcttctacgttgagagcaatctgccagtcttcaaataagtttgggtactcattaggatcagccagcgaccccacgcgtccgcccacgcggccg

SEQ ID NO: 26084 - DNA, 2333 bp, Zea mays
  unsure (1)..(2333): unsure at all n locations
  Clone ID: MRT4577_123799C.1
agcacaacgcaaatcgttcacacacttactaaaanaggctattgaaaacatctgctgtaaatttattcgccaccattgaaaaggtgtaacacaatgatacaaagctcccaagtccgatgtacatcacaggtaaaaacattctcagttcgacaagctactatatgcaccttgtaaaatatcactccgatcacctacatcatataccatctccgtgaaacgagtacctcatgataggctataaaatgtcttcgacacctaaggacctgatctacatgtagaaagggaagcacaaaatttcctatcgggcacaaagatggaagtgttgattaattgcgggtgcaacttcgtatatggataagccaatcctcgagcacatcacatgcttaataccgctgggaaaaaaaggatatcatgtactctctatagcagtcagcaacctttacaaactacaccactgaagcgaagttgctgtcccgttaatccactattgctcagtcagcacccactgttcctcgctactgtttccattcacaaggacagcaccatcagttgaaccctcagcctcaacctcaacagcttcatcttgactttcttctactccgtcatcctctgcatcgacctcaacagcatcttcttgactctctactccaccatcctcaataacctcgtgaacagtatcttcattatcatctggtaccatctcttcatgtacatgcatatttttaaaagcttccactaaactctcatttgacctttcagcatgaatcatgtactcctcggccggtggatagatactccttttagaggcaacagcagcttctacgttgagagcaatctgccagtcttcaaataagtttgggtactcattaggatcagccagcgactctgctgcttttgagtttaccttctggagatcctttttccacaatgctacaatctcagggactttgctgggaagataagatcttgccatcaatgctgcttccggaatacgattgctttctattagcaattgaagacactcttccagctttcctagcatgaagaaacaaaggaaagaaacattgttctttccttgttctttggctacagatgccaatttgttaatgccttcggcatccccaagggaagaatacaaaagcaacaaaccactgaggtccattgcatgtagaagacactcctctgccatttcaagctttccatttgacatagctaactcccctaattgcttccacttggattcactttgcacctcagtagcaatcaccttcgctatttcaagtcgaccaagctgcacagccaggtcaaatctgtaattagtgtcagttgctatctcgagggcttcctccaacattccacgtgattccaagaaacgtgccacactgtcatattgttcctttggtatagatgataaaacatcatttgcacgatcaaaatccccacgcattacaagtgttttatactcgatcaaactaaggagtaaagtataccccacaacattaaattgcttatcaataagatagacacggctttggtttgcaagatatcctagtaaatacattggccgatccaagtgaaacaaagttgtgacctctcctcctacacagtaattaagacgccatgaagaattattgtagatgaaacaatcgccaacccatagcccagtccggacacgttcattgatctcatgaagcagttcaaaggcatcttccacaccttcctcaccagctgaaccccctccgtctaaatgagatgaaactacatccctattatatttcaaaatgtagaatgacgtatcacttgcaattgttactaaatcaccactgtcagcccagtaaagattcttcacattgacatcgattcggcgtatcaatctgcattccacccaatcatagaagcaaatgaagtcatttgtacacatagcaagtaacacaccaccaaatatccgttcaaccgaaaatgatggtcttatacttttcctctcctggaaatttttactataaatctttatccttgaggtgctttctctgatggcatattctccatcagttgaccaaacaaattcaagtgcagacccaaatgatctgtttctccatgctaatgctgtgtatattatgtattctccatctccacatacaactacaaatctcccattcggattgtgccttaaactttgtggataaaggtcacagcttcccaactccttcacggccaacggtaaccgatcaccatctgcgatctcattgtctgcaccaacactcttgatgttaacagtttggatttcattatgctttgcccatataatttttccactgctatccatgctagcaaca

SEQ ID NO: 26085 - DNA, 442 bp, Zea mays
  Clone ID: MRT4577_12379C.1
gcctacgtaagctcggaattcggctcgaggtagaagacaaagaacatggtttgtttggcggctcctgctggccaacgtgatggggagaagaaaaagaaatagaaggctgaggaggtcctggaaaagcctgttgcggctggtggttcagaatttttgaagaagaaaaagaaccctgactctgagggtgaggacgcctcaatgtctgctggacacccatgtgagaatgagactgcaatcgaagaataaggcgtgctgatgatgagtgagacattcacactggatgagaatttgcggggaccaaactaccaaaaggtgggactaaaactgttctgtaaaaaggatttgcgggttgaaaccatttcgacaattaattttttggaccccgcttgttttaaggacctggtccattccaggtaaaaaaggatttaagcttttgttgttt

SEQ ID NO: 26086 - DNA, 359 bp, Zea mays
  Clone ID: MRT4577_1237C.1
tttgacaatttggccccgtgttggctcaagtgttacgggaacatactaaaacttctcttgtaaagacagtttgtttaacaactcaatgtggtcaaattcattcctaaacaaatattctaacccaaatgtatcctgtttcgcgctcattgcatgaggcttttttttactatggaacaacaatattggttgccactaaaagacaacccttttgagcatggttcctagggtctccactatgactgatgacatcaaaattgtactcatgctttttcaaatgcttatatgcatcttgccgacccacattttctttaacaagtttcttaggtggcagttcggcctcctcctgcactgccttgttg

SEQ ID NO: 26087 - DNA, 606 bp, Zea mays
  unsure (1)..(606): unsure at all n locations
  Clone ID: MRT4577_123800C.1
ctnctcacagtccatctttccccttccctccataaatcccgacacctcctccaatggaggcgctcgctaccgcacccgcgccgtcacgtccaggccccccacccccgacccgctgctcccatctccgccgccccaaagccctagccacctccaagctccctcgccgcgtcatcgccgcccttcacatggacggcccccgcgccgcgccccttcgctgcactcccgccgagacggacgcggtggcgacgacctcggaccagaccgagacggcggcggcggtcgaagccaccgagctgggcaacaacggggccccggccccggcggcggacgcccccgccgccagcatcgaggggctggacgggataaagatccggaggcgcccggtcacgggcccgtccgtgcaccacgtgggccccttccagttccgcctcgagaacgagggcaacacgccgcgcaacatcctcgagaagattgtctggaacaaggacgttgagatttggcagatgaaggagaaaatgcccctgtacaggctgaaaggtccgctggacaatgcgcctccggccagggactttgctgctgagctgaaagcgacctaccatcggactg

SEQ ID NO: 26088 - DNA, 258 bp, Zea mays
  Clone ID: MRT4577_123801C.1
acagcaaggggatactgtggtgtgttagactgagaggaggttcctaaaaatagacaccacacgaggaaaatcttggatgaggaccatcttctccaaattctccgtgcccccgtgaagcaccaagatgtaccaatgaaatgaagcccctatgatggtggcccagaatggctagggaaattcgcccaatatgttcagaaagtgacacgtgtcatcgggataatggcaagccacttaacatcagctggccccttgcaaccc

SEQ ID NO: 26089 - DNA, 306 bp, Zea mays
  Clone ID: MRT4577_123802C.1
acccacgcgtccggcaggttcatacctcgatcccccccactattatatcctatcccaccaacccgtccacgccgcgtcttttccattctaaaaggtccacaaacaaacaccaactctccgaccacaataaacaaattctaccgatccaacatatcctgaacctcaaactaattacctctcatcatatttttcttttgtaagataaaacccaattctataatcctacaccaaccaacaatcaaatacatctcgcatcctacctttataaaactttcttctccaacaatcatcaaccctatcacatca

SEQ ID NO: 26090 - DNA, 395 bp, Zea mays
  Clone ID: MRT4577_123803C.1
ggaaagaacaaataacccaatgattgcggttcaccagcaaaatgataacaactagaggaatcccaagaggcccaaaaaatcccaagccagaacgagctttaaccagtctatgaggggggattccaactcaacaaccacactagtgcaagggcactcccttccctccgcaacagagagggctaaacagctatgattccaggcaaggacactcactagaaacttttggcgtaaagcaagggcgtccccttaaaggggtacgggtcactcataagcagcattgagaccctgctgctgcagcctaatgcaaagatgcccactttggtccactgggggagctacatggaaaacacgtttagcattacaaactggggaacatccgggccaccgaagaacca

SEQ ID NO: 26091 - DNA, 606 bp, Zea mays
  Clone ID: MRT4577_123804C.1
tgagaatattggttcagaaattaagaacatcaaagatttggtttggggtctggatgggaaaattgattcgatggaagctaaacaggacttttcatgtgctggtgtgatgtacctctgccaattcattgagcaaaatggtgggaagcttccggatcgcctggaaggccccaaagtgactacaaagcgttttgcagatcaaaggttcatacagggattgcaactggcaatagaatcagggaattgtggcaaggacaccattgacatgctgttgaaaaatgctgattcctctgataagataaacaggacgtcctccatcaaatcttccagctaaattattctctggtcaacaccgagcgtgtgacatctatctatctatcaagatttgatgcccaatcggaatattgtataggattttcattacaagtaaacatgtaaagagctgcagccttttgcttgcaggaagtgctttttatttaatttgtaagcttgcgtaaaaatgctactagttgtactacttaggaacctaggccatgcttcaattttgtggcttcgctttgtgatgtgagaatgcagcacgtaataaataaaaaacactatggtcttggc

SEQ ID NO: 26092 - DNA, 1194 bp, Zea mays
  Clone ID: MRT4577_123805C.1
tgagtactgaggatattttcctcacgcctttggtctggccttgttggatcatcgcaacgactgcgcgtatcgtgtttctccttggaggcattgttgttggagagccttattgggacccaagtgttgcttggatagtggatggacttaaaaattaagttgtgtggtgtagttcactgtgacatgatagcttttgtcatgttttttcctttttctcttggctgtgtacacccagtggtggagtactcgtatacctaaacttttaaaatcgtaatgcttataacaactgagggattgtggtgtggtgttaaggattttggcctcgaatgtgcgggtcttgtgttcgactcgtggagccttcagcattgcctccttttttctacctatattcagccatacctaactttttttgtgtcctccgtcactgtgtacaccctagttgtgtagagtccggaagttatctcagtgtcttgtatcgccctgatgtaattcactaaggtcagtaaaagctttcttttccaaaaaaactcaggttttttcctcacgcctagcctttctgtttcttttttctttgtcatctatggctctaagcttctcttttgtgatctcataaacttggtaagccattgactcgccacaccccttggtcgctcaagcatagggcggtagtcaattaccacgtccaccttacttctttaataaccatgatctatggcactgcaaatttgtatgttgacagttgatttcacttaactttatttttttgaactgcacaggaaggctccaaagtgactacaaagcgttttggaggtcaaaagttcttgcagggattgcaactggcaatagaatcagggaattgtggcaaggacaccattgatatgctgttgaaagatgctgattcctctgataaaataaacaggacgtcccccaaatcaggcagctaatcattctttggtcgatactaggtgtggaacatatatatctatcgagattcgttgctcgatcggaatattgtaaagggttttcattacaagtaaacatataaagagctgcagcattttgcttgcaggaagtgttttctgtttaatttgtaagcttgcgcaaaatgctagttgctaccaaagaacctaggccatgctttaattttgtggcttctctttgtgatatctatatatattaaacggtataataaacggc

SEQ ID NO: 26093 - DNA, 1334 bp, Zea mays
  Clone ID: MRT4577_123806C.1
gggaacccggctctgacaataggccccaccctcacggcctaacctttctctttctctctctacctcctcgcgcgccctcgtcagaccagccacgcgctcaactccacgggccttgagctagggttttcttcgccgctacctccctacgaggcgggcgtgcagccatggcgctggtgcaggcgggcatgggccttacccgggtcgttatcctcgtcggcgccggcgttgccggctccgtcgtcctccgcaacggccgcctcgccgagatcctcggcgagctccaggagatactcgacaaggggaagaaggtgaaggatggaggagggggagacggggaaaccgatctcaacgaggctcttacctcgcaggtgcgtcgccttgccatggaggtccggcaacttggtaattcacgttcaataactgttctcaatggaggttctgcacaatcaggagtatcaggcctgatagtacctgcagcaactgtaggagcactgggttacggttatatgtggtggaaggggatctcgttctcagatctaatgtatgtcaccaagcgcaacatggcaaatgctgtttcaagcatgactaaacatttggagcaagtgcaaagttctcttgctgctgctaaaaggcatttgacacagcgcattgaaaagttggacgataaattggatcagcaaaaggctctatctggacaaataagaaatgatgttactgatgcacgtctgaagcttgagaatattggttcagaaattaagaacatcaaagaattagtttggggtctggatgggaaaattgattcaatggaagctaaacaggacttctcatgtgctggtgtgatgtacctctgccaattcatagagcaaaatggtggaaagcttccggatcgcctggaaggctccaaagtgactacaaagcgttttggaggtcaaaagttcttgcagggattgcaactggcaatagaatcagggaattgtggcaaggacaccattgatatgctgttgaaagatgctgattcctctgataaaataaacaggacgtcccccaaatcaggcagttaatcattctttggtcgatactaggtgtggatcatatatatctatcgagattcgttgctcaatcggaatattgtaaagggttttcattacaagtaaacatataaagagctgcaaccttttgcttgcaggaagtgttttctgtttaatttgtaagcttgcgcaaaatgttagtagttgctaccaaagaacctaggccatgctttaattttgtggcttctctttgtgatatctatatatattaaacggtataataaacggctggtccaaacttatcag

SEQ ID NO: 26094 - DNA, 594 bp, Zea mays
  Clone ID: MRT4577_123807C.1
gccggccttgttcggaacagaggaacgactcctggcggacgccgccacaccatctgaaactgacggcggcgggcggccgctggttcgtctcccttctccgttcagatgcggcgactggcgtccctcctccgccatcttccctacccgcgacgtggcgacgagctgtgagccatgagctgttccgacattcctgtcctagtgtcagctgaaaggagaacataaaacaggagaggctaggtcgttggattccgagaccgagccaagctctctccagggacggtgagggctcgatatgggagtccagcagtggaatcctgctgcttcggggtgcctaatccctctcgcgacagtgaacagatggggtccgactgtgcggcgctcgagccggtcgtctaccttaccatctccctgatcagcaacgaatgggcgcaacatcttgcatgcgcttaggagattcgatcaggccaccaaggttatactcgacgaggccgctgagaggctatagtctacacaggagggaaggcaacaactttgttcgtgtattggtaatgatcagcgctgggggataaacgttgtgcaactaggttgatgaag

SEQ ID NO: 26095 - DNA, 270 bp, Zea mays
  Clone ID: MRT4577_123808C.1
gaacactgcgtactccatttttttttgtatggcccaagggacagggccccaccagtataaagatacacaccttttcaaaattacaagaagggcgcttggggccgcaccgcctgcaacaaaaatgagggtgacctaacgccgtggaacaggggtaaggttccaaacaataaattaacacataaccacgggcggcttttgtggtcgacaaaacacggagagaacaaatgtgacacatttgggcccgccttcaagggagagcctgaacaaact

SEQ ID NO: 26096 - DNA, 598 bp, Zea mays
  Clone ID: MRT4577_123809C.1
tttgttgtgtacaaaaagaagggaatgtgtttttcgccttcggctcaaaaaatacaagtttcgtccacagcaaagcaacttgtacatggatgaaaaggtaaaaatatattacaaggtatggacagttatacataacattgttcaatccttgattacagtttttttctacaaagttaatacaaatgttactaagctctacacaggcaggcctaagagaagcttcaacagccttcggaacgtgcttcggactatcaatcttcggcaccgccatcctttattgcagtgaagaggcttaagacctttctacccaataaccagttagatagctccatccacttgctgaataggcactggagcaaactcctcttccacaaccacttcgtcttgaatttacactccttctgctcggagctcttgctgagttgtcttggccacggcgacatggccaaactgaccggcgtggtcactactggcagaccgatggtgtgccaacacttgtgcagagcaaacctagtggctgggaagagactggcatcaactggagcacaaggacttccacacttttacactggtctagggctagaatccgaaggccagg

SEQ ID NO: 26097 - DNA, 201 bp, Zea mays
  Clone ID: MRT4577_12380C.1
aaacagccacgtctcccagatctaactccctgcgactcacgaatcccagagagcctgcatggcgacgcaccgacactgcctccgactactgctcgtggacgccgacctcgccctcgccggcgtacctgctcgcgcggcgctgggctgaggtcgcggccagctgctgagcggataggacccgatccctgacgtgagcgactc

SEQ ID NO: 26098 - DNA, 3092 bp, Zea mays
  Clone ID: MRT4577_123810C.1
gggagagcagcacatctcggttgatttgaagatggaacgcacggcaggctgcggtaaggcagcggatctggttccgtttagctagggttccgtctccctccaccagacctgctcaacgccttccacgggcgcacctcgacgtgccttgagctagggtttcctctgccgctacctccgttttacgcggccggcgcgcagccatggcgatggtgcaggcgggcatgggcctcacccgggtcgtggtcctcgttggcgccggcgtcgccggctccgtcgttctccgcaacggtcgcctcgccgagatcctcggtgagcttcaggggatactcgacaaggggaacaaggggaaggacggaggagggggagacggggaaaccgatctcaacgaggctcttacctcgcaggtgcgccgccttgccatggagatccggcaacttgctaattcacgaccaataactgttctcaatggaggttctggacaatcaggagtatcaggcctgatagtacctgcagcaactgttggagcactaggttatggttatatgtggtggaaagggatctcgttctcagacctaatgtatgtcaccaagcgcaacatggcaaatgctgtttcaagcatgactaaacatttggagcaagtgcaaagttctcttgctgctgctaaaaggcatttgacacagcgcattgaaaagttggacgataaattggatcagcagaaggctctatctggacaaataagagatgatgtcactgatgcacgtctgaagcttgagaatattggttcagaaatcaagaacatcaaagaattggtttggggtctggatgggaaaattgattcaatggaagctaaacaggacttctcatgtgctggtgtgatgtacctctgccaattcatggagcaaaatggtggaaagcttccggatcgcctggtttgagcatttccacttatggcctgtgtagtcctatactttttgcacatttgcactcagttaatattttgagatgttttctgggcagtagtcatgtagctaggtagtatttcctttctatgtctatggcacgattattaaggtgttgcttcagcatcagagagatacaaggttgctacatgccgagttggtcatgtcccacactgtcacgtgtctcactccacgagcgcagtcggcataggagatgctggctgtgctgtcaccctgacgaccacttccttgcctccttcggcccttccatctgccccacggatgtgctgttggtctcctggcaccgctcccggcttctcgaattggctgcggcttctcgaattggctgcggacacgtgggggagatgctggttgggatgcctccatctcttgatgtttctgcgctgccaccactttcatcagtctaaactgtgacttggctgcgccgccgcagatgccagctagagttttaccatgcaatcagcatgccacgtgcgagatgggagttgttagaaactgtatcctggctgtcgcctggcagatatgccggccgccctatatggaagtattgtctgatatagatagagaggattaggggaggatctcaatcactatgattgaggatctcaatcactatgattgaggatctgattgtactctagatctttccttaggtgtagaaggcttccttttacctctcaccttcctcccctatatatacctgtacatgtgctgtctatcttcatcaatataaaaacacacgcttccaactctctcacaggagtgtctgtttggtgatattcctgggccagctcctcggcctacaagcaaagatgaatggacagagagctagagaggactatggccaaattagattgggccagaagaacttagatgagtactgaggatattttcctcacgcctttggtctggccttgttggatcatcgcaacgactgcgcgtatcgtgtttctccttggaggcattgttgttggagagccttattgggacccaagtgttgcttggagccttggatagtggatggacttaaaaattaagttgtgtggtgtagttcactgtgacatgatagcttttgtcatgttttttcctttttctcttggctgtgtacacccagtggtggagtactcgttatggcgtagcgtggcgtgcgccatacctaaacttttaaaatcgttatgcttataacaactgagggattgtggtgtggtgttaaggattttggcctcgaatgtgcgggtcttgtgttcgactcgtggagccttcagcattgcctccttttttctacctatattcagccatacctaactttttttgtgtcctccgtcactgtgtacaccctagttgtgtagagtccggaagttatctcagtgtcttgtatcgccctgatgtaattcactaaggtcagtaaaagctttcttttccaaaaaaactcaggttttttcctcacgcctagcctttctgtttcttttttctttgtcatctattgctctaagcttctcttttgtggtctcataaacttggtaagccattgactcgccacaccccttggtcgctcaagcatagggcggtagtcaattatcacgtccaccttctttaataaccatgatctatggcactgcaaatttgtatgttgacagttgatttaactttatttttttaaactgcacaggaaggctccaaagtgactacaaagcgttttggaggtcaaaagttcttgcagggattgcaactggcaatagaatcagggaattgtggcaaggacaccattgatatgctgttgaaagatgctgattcctctgataaaataaacaggacgtcccccaaatcaggcagttagtcattctttggtcgatactaggtgtggaacatatatatctatcgagattcgttgctcaatcggaatattgtaaagggttttcattacaagtaaacatataaagagctgcagccttttgcttgcaggaagtgttttctgtttaatttgtaaacttgcgcaaaatgttagtagttgctgccaaagaacctaggccatgctttaattttgtggcttctctttgtgatatctatatatatattaaacggtataataagcggctggtccaaacttatcag

SEQ ID NO: 26099 - DNA, 244 bp, Zea mays
  unsure (1)..(244): unsure at all n locations
  Clone ID: MRT4577_123811C.1
ctctttcgcctcctcgcttcgcttcctcggcggattcctcctccctcgaccgtcnccgtcaccgtccccttccggcgcgcaactcgcccgagatggcaacgcgagatcggtgtcctgtgatgacgatgcatctcagtcgggactgcagtcgagagctcacgttctacttcagatggacgacagtcaagagatcgttgtgacagtcggaccgcacactagagctcacacactccgagatgctgcg

SEQ ID NO: 26100 - DNA, 302 bp, Zea mays
  unsure (1)..(302): unsure at all n locations
  Clone ID: MRT4577_123812C.1
ggcgcgccgcttttttttttatatttttttttattattaatattttttntnnttttttanttttttntatttttttttgggaagagaaacacacccctgtggtgtgaaaacaatttcacaaaaaaacgctgataccccatttgggataagcgttagggtggggccccacatagccacttatagggggggccatttttgtttagaacaaactttttggggttttgtaagtactaaacaggggcctactgggatatcagtcagccactacgtttttccaagccctggttgattttgggctttgg

SEQ ID NO: 26101 - DNA, 447 bp, Zea mays
  unsure (1)..(447): unsure at all n locations
  Clone ID: MRT4577_123813C.1
ccgggccggantctcgggacgaccgaaaacccgcaccaacagaggacaccgcacgccgcccacgcgcaaggcggccacgcgcagcgcgcgcacgcaacacacccaggagcacggtgcgggccgacacggcggccgacggaccgcgcccgcagaacccagccagcccccctttccgaaagggagggggacaacccgaccaggcacgtggacgaaacacaccccaccgggagggggggggagaacccccacggggcgcccgcccgcacgacgcacaacccccacacgagaggagaagaggggccgcgcgcccgcccgcggcaggagacgagccacaggaaggacgggcaaccacaagcggagggagccgcaccaagacaagacgacaagcgagccgaaaaagccacggccgaaggcacgcccggacccacggaagcgagaccgggggaa

SEQ ID NO: 26102 - DNA, 172 bp, Zea mays
  Clone ID: MRT4577_123814C.1
actgaaaggtaccacaagtgtggtacggccatgagaggatgacaaaacattaacgcgccaccaagcgtaaacagacatattacgcctgagttttgagtaggctcaccacgactacctgaccaatagatgacctagcttgatgattataccggtcatactcagcccacggtac

SEQ ID NO: 26103 - DNA, 230 bp, Zea mays
  Clone ID: MRT4577_123815C.1
gtcacacttgcgttcaagagtccagccatacttgagttaagttgagcccatatatacgccagcttatgtgctgtatgaaggatctagctgtgattgacccattctttctgttgaatattcgcccgtgatgttactgctctgcatcttatacgcgaaagatgtgtatgtacggtacactgctctgacaatgatgtgatacggctgtgtatctttgaaactgcgctaaatca

SEQ ID NO: 26104 - DNA, 544 bp, Zea mays
  Clone ID: MRT4577_123816C.1
taaaaaaaaaaaaaaaaaaaaaaaaaaaaaaaaaaaaaaaaaaaaaaaaaaaaaaaaaaaaaaaaaaaaaaaaaaaaaaaaaaaaaaaaaaaaaaaaaaaaaaaaaaaaaaaaaaaaaaaaaaaaaaaaaaaaaaaaggggggcgctgtttttaaagtatccaaattttttttccccgtgctttggcaattttttaatttttttttttggcccccttaatttaatttcttggccctgttttttaaaccgtttggtttggaaaacccttgggtttcccaattttattttttttgaagaatttccctttttccccagtgggggaattaccaaagggccccccacgtttccccttttcaaatgttggctacccttaatgggaaaggggaaccccccttttacgggccttttaagcgggggggttttgtggtttcctcccgggggaccttttaattttttcaggcctttagccccggttttttcctttttttcccttttttttttcgcccttttcggggtttttcccggaaaagttttaattgggggg

SEQ ID NO: 26105 - DNA, 352 bp, Zea mays
  Clone ID: MRT4577_123817C.1
acttcaacttagatcacagccttctctagttttcaaagcaccactgcttcactcgctgtgccgcaagacaggaacgcagatgatgaggaggggaagagagatggtgcaaggtccccgttgcgtcgcgttgctcctgctcgtctgcatggctgctctcgtggcctcggacaccaccgacggcctcctgccgaacggcaacttcgaggaagcgccggacaggtcgcagatggacgggacaagggtgacgggccgctacgcgataccgcggtgggaggcctgtgggtgcgtggagtacatctgctcgggccagaagcagggggacatggtcctgccggtcccggagggcgcctac

SEQ ID NO: 26106 - DNA, 434 bp, Zea mays
  Clone ID: MRT4577_123818C.1
aattcggcacgaggcccagccgtccagcgcccacggtggtgcttcctctccgactccgagacaccgctcgccggacctctcccgagtttgggaaactctggcgccatgaatccaatagtatagcacacgtcgcatgggagaaggcacattccaagagcagatgatccacacacacgggtggcagcccggtggcccaacggcgcagctatcaccatccagtaacatccccggaattcaccactgccttctgttctgctgttcaccccgcgtgcgcgttctccctctcgtgcgacaactgggcgaccggcgccgccgtcctacgggaggggggcacttgttgagagggtgcttgggtggggacgagcaccgaccaggctctggaagaagggagggtgggcggctggggcgtgggggctggggcgggggctgggggg

SEQ ID NO: 26107 - DNA, 464 bp, Zea mays
  Clone ID: MRT4577_123819C.1
gtgaaggaactgcagtttcgagtctgcaagcatttgagatgtattgccattccttaagggaaaggaagggaagaaaaaaaatttattacctggttaaaaaggtgaaccaccctttggttggggaccgaacaaggaacagaaaccggcgcgcttttggcattttgcaaccacgaacttgggtggttattcacctgtacattaaatatgggccggcgtcgcccggcgtttattggtatcgtcgtcgccgcccttttggctagttcttcttggactggaaggcttccacccttttcttcgtggccttgaaggcttccccctaaatgcccaccaacttgttgacttcacccggcctcatgaacaacgtccgcgaccttatgaatgcgtcgccagggacccttaccagcatggcgcgcttttgggacttttcggccaagattggacccaccccccatttggcaaggaac

SEQ ID NO: 26108 - DNA, 441 bp, Zea mays
  Clone ID: MRT4577_12381C.1
cttggttttttccttttttttttttttttttttttttttttttttttttttttttttttttttttttttttgaggaagaaacaattaaattttattgtttgggccttatggccataacatataaatgggatgttttacaaaacaaaactgttttttttgggggggtacccaaaaaaacacagcctttgtagtaatcaatttcaaccccaaattacaacattgggaaccttaccagtcacaaactcccatacatttcaaatgagaaaggatttttctaactaatccccaaaggctttttttgctttttatttatatggccaacctgctttggaacattgtaataattgccacctttatcccttttttttttccttttcttttttggggctaaaacaccataagagatttttttttttcttaaaaacctaaagggtttttttt

SEQ ID NO: 26109 - DNA, 342 bp, Zea mays
  Clone ID: MRT4577_123820C.1
cccaccccgttgggaaaggagcttcaagggggtccgcagcggagcgtgcgtcgggctggctcagccaagtggacggacgcttggggcgcgaacgccctaatctggggctgcgcgtccggctagcaaaggcgccaggtgatagctcggactctgaattagaggagtcacctcctaatcaggcaaacggtagttttcggccactggctttgataccaaggccatgaccaaatgtgtgattgaacgctgctgtgtccctatgttgcctactatagctgccccggctgaggacggtgaaactagcctgccttgcaactggctaaacacatatgatctaccctcttg

SEQ ID NO: 26110 - DNA, 383 bp, Zea mays
  Clone ID: MRT4577_123821C.1
gccagccagccagccgcggcagcgcggccatggcgcccagcctccctgccctcccctcccggcgccccggcgcagcagcgcgacagccgacagccggtcggccagccagcagcgcggggctgagcctgccaggccgcctgagttgacccctgtcctccccctccctgcgttttgttctgaggaagaaagcctgttttgcgaaaatgcctcgacaaaatagactgcaatacgttcctgagcttcgaggaatcgacagtcaagctttgacgaccaagtgatcaagctcttcgagttctacgagattgaataccctgagcatctgtttggtgaagggtgatgctggagacttcgctgatgacgatgatgagttttaagtccaacga

SEQ ID NO: 26111 - DNA, 442 bp, Zea mays
  Clone ID: MRT4577_123822C.1
ttttaatttttttctttttatttctatctttttggggaactatcaacgcaaacggggctttttactgtcaataaccccggagcaaagctggcaaattaacaacttttacaacattaggggttggaaaccacacaattctttagatccaccacacataaaacgatagacggggcaactcttgcctgaacaggttataaggggacgccactggcctgatgctgggcaataaaaaaacttctctagttctcgacacccttggcgccatcctcgccctcatcgaactcagaaccgaccttcttgtagtccttctcgagcgccgccaggtccttatgggccttaaagaaataaccttccttcataccttaaccgacgtaccaatgcacgaaggtacgcttggcgtacatgaggtccaacttgtggtccatgcggaagaacaccttca

SEQ ID NO: 26112 - DNA, 258 bp, Zea mays
  Clone ID: MRT4577_123823C.1
ggtggccgctcgaaggagtcgacgtctcacaggctccctcgacgcgacgacgaatgccactcgacggagtgcgcgcctcacagtcacagtgagatgtcagaatacaagaacgtcgatggggggatgctaaagctgaagggtaacgcactcgacgtgaaggaatgtggagtcgagaagaaaaacaagaagcatccactcgaagagtcgtctcagattgagcaagaatgactccacaaagggggggactctggcttacca

SEQ ID NO: 26113 - DNA, 558 bp, Zea mays
  Clone ID: MRT4577_123824C.1
cttgcagttgggtcggttctgagaacccgccactggtcgactgatgtacaggaacgtttacggttgataagagtgaacgcagacacaaggcaccagagagaaccagaacagttatgaagcatggacaagttgtcttgttctaattattggaatatatgtagttttccatttatcaaacgcttcaatcgagtggcgcaccgacaatcaaggccagtgagatgtcttttctggattacaaaagtcgataagcaggtgttatttagaatggtggacccatgctgtctaattgtttccttcctcgtagaggataatgcaaatatgctgatcgcaatggtgcccgcgcggccgaattttatcttctgctgaccgagaaacattccatgttttgcatttggaatgaacaaatgtggaggtttggaagtgcaaaatatctgaacactagaaagcaaactgaatgcagtgatatattttctttccgtggattattttaatcatgaataaacgacatttttgtctcttcaaaaaaaaaaaaaaagaaaaagaatatagagaagaaaa

SEQ ID NO: 26114 - DNA, 260 bp, Zea mays
  Clone ID: MRT4577_123825C.1
gagaggggttttacattgtggtgggttttctatttttttttttccttttttttttttctttttcttacacaaacacatgtcgagcccatcttattcttactccccaaaactaaaactaattcttttaaactactactccatattattacaccctaaataattccccctattacatcatactcttacttggatctctaaccataccccccaaaaatataaatcataatttaaccactttgttaaaaaatatttcccccccc

SEQ ID NO: 26115 - DNA, 288 bp, Zea mays
  Clone ID: MRT4577_123826C.1
agagcctgcaaaaaagttattaatttttaaccctaaccaatggggaggcccaaatgaaacctggttgggccctttcccatgggggccttggagagtcccccccaaagaaggcccggggtgtaaatgccgataaaaacccccattttggcataaattttaaatcccgccacagatccggcaggatctaacgggggggaatctcccaccctgaaaccccgtggttgttataaccaaccccagggatccaacgcggttgtggatccattcccatgggcttaggggggtgca

SEQ ID NO: 26116 - DNA, 315 bp, Zea mays
  Clone ID: MRT4577_123827C.1
ataatttctttttttttttctttctggaagggggggaattaataccaacagggggtaaaaatagctcccggtcattatattatatcacaagaacgatccgcccgacttggggactggctgacgctcattctgcctttggtcgtcagagctttgatgctggtctgagcttagagctgggatcaaaagcccagctggtggagcggccttgcaccatccgtgccttcttcacttggaaaaggagctcgagggcttcctcaaaaggagggctcgcggtttacttcaccttgtgcatccagacagggatcttctcatgag

SEQ ID NO: 26117 - DNA, 439 bp, Zea mays
  unsure (1)..(439): unsure at all n locations
  Clone ID: MRT4577_123828C.1
gcggagacagatcacacagcactcagataactgcatttcgatgcccatttgaaaccaacccatcctcgtttcctccgtctagcaacctctcaccctcatggccaagatcaagagcgggatcaaagggttcggcaggatcggaaggctggaggccagagcggacctgcaaaacgacgacgccgagctcgtcggcgggaacgaccccttgtcatcaccgattacatgacctacatgttcaagtatgacactgtgcacggacagtggaagcaccatgaggtcaaggcgaaggactgcaagacccttctctttggggagaaggaggttactgcgcctggctgcacgaaccctgaagagatcccatgggtgctcagatggcgctgaatatgttgctgagtctactgcagntatcactgaccaggagaacgctgcagctcacttg

SEQ ID NO: 26118 - DNA, 1545 bp, Zea mays
  Clone ID: MRT4577_123829C.1
aggccggccgggcccggattgcaagtgcatgcagtcgtccatcacatcgatcgactggacacactgacaggatcgcaggattgacagcaagagccgcccgcaatggcctccgcctcgcgcctcgtgtcattcgccgcgctctgcctgtgcctgggggcggcgctccaggcggcccggggcgccgacgcggccgcccgcgccttcttcgtcttcggcgactccctcgtcgacaacggcaacaacaactacctgctcacggaggcgcgcgccgactcgccgccctacggcatcgacacgcccgaccaccgcgccacgggccggttcagcaacggcaagaacgtgccggacatcatcagtgagcacctcggcgcggagcccgtgctgccgtacctgagcccggagctcgacggcgacaagatgctcgtcggcgccaacttcgcgtccgccggcgtcggcatcctcaacgacaccggaatccagttcgccaacatcatccacatctccaagcagctgcgctacttcgagcagtaccagaggcgcctggccgcgctgatcggcccggaggcggcgtcccgcgtggtgcgcggcgcgctggtgctcatcacgctgggcggcaacgacttcgtgaacaactactacctggtgccctactcggcgcggtcgcgggagttctcgctgccggactacgtctcctacctgctgtcggagtacgcgcaggtgctggaccgcctctacgacctcggcgcgcggcgggtgctggtgcagggggtgggacccatcggctgcgtccccgcggagctggcgctgcacagcctcgacggcacctgcgacgccgagctgcagcgcgccgccgagatgtacaacccgcggctcatggcgctgctggaggagctcaacgcgcgccacggcggcggcgaccccgtgttcgtcggcgtcaacatgcagcgcatccacaacgacttcatcgacgaccccaaggcgtacggcttccagaccgccaccgacgcgtgctgcggccagggccgcttcaacggcatggggctctgcaccatggtgtccagcctctgcgccgaccgcgacacctacgtgttctgggacgccttccaccccacggagcgcgccaaccgcctcatcgtgcagcagttcatgtccggctccaccgactacatcacgcccatgaacctcagcaccgtcctcgccgtcgacctccagaagcagcagctgcgtacgtgacgtgatgtcgtcatccgcttcatcagctgcctgatcagcttcgtgcgtcgccattgccacatcgtcagatcagtttcgtatgcgtgtgtagtgagagtacctagctagtgcatcatgtgccatcagtttccggatgtggttttctgcaggtttcgttcgttcgttcgtgtgtgtgtgctgcagtgcaggtgtttaattgtgtgatagtgacgaccatatcctgtcaattgtcatatagcaggacagcttcttgtaataatttatataaattttcaggcgattcataatttctaaaaaaaaaaagcggccctt

SEQ ID NO: 26119 - DNA, 401 bp, Zea mays
  unsure (1)..(401): unsure at all n locations
  Clone ID: MRT4577_12382C.1
aacgacaaagngggcccttttaaaaagaaaccccccgataccaacagcgcattatcatgtcagcaactctccccgaacgagccacaagcacaggagcccacatgcagcccaacaacaacacacatacccaccaaccaaaaagacatcccccccaacaagggaaaagaacaccattagccccccccaaaacccaaaaaaccggccacccccccccaaaaaacccccccaaacaaccaaaaattaccccccccaaaccccaaccaaaaaaacgcccaaaaccaagggaaccccaaccccaacgagaaaacggaagccccccaaaaaaccccggccaccccccaaaggcccccaaaaaaaaactcaccccaaaaaaagccccaaaaaaaaagcccccctacccc

SEQ ID NO: 26120 - DNA, 466 bp, Zea mays
  Clone ID: MRT4577_123830C.1
ttctccacgcgccggtgtacagggacgaggggtggcggcggtgggcggtgctggtggcgacggtgtggatccaggcgctgacggggaccaacttcgacttctcggcctctacatcctcgcattcatcaccggcatatatctcgtggtctttggatctttcaccgcaaccagctctactgcgtgggtcatcctcacaggtgccatggtcctcctcgcccttcctctcatcatccctgcctgctccagttgctcagatggccctgaccctgcatatgatgacccacataagccactcctcatcggtcagatggagtccaatgccatgatgcaaaagccaaaggagagccagaagcaggtcaagggcccgctggggacgcttggtgaagaacacagtgccaagaagctcatcgctgtgtggacttctggctctactacacagcctacttttgggagcccctgttggcct

SEQ ID NO: 26121 - DNA, 325 bp, Zea mays
  Clone ID: MRT4577_123831C.1
gggggggaacgaccttttttcaaaagttgcccgcaagctggggatcaaaagtagttgtcccaaacattttctggcattggggtaacaaacagcttggaacagggttgcacaaaatttttttattcccaacagttgctttcaaaatttcacgataaaaccccttcccctttccccgggtttaccgtaattttccaaccaaaagtaattaataccggcttttggaataactctcctttgacgattaccaaaaataattagcgccgggattttacaatccgttctccaaaaaagagcaaaacttcccaagggcttttttcttggcggg

SEQ ID NO: 26122 - DNA, 150 bp, Zea mays
  Clone ID: MRT4577_123832C.1
ggcggggagccacgcggtgatcacctataatgtattgggcattcagaaacacaccatgcgacccacattagcagcaacccaacaaccacggctaccaagatattatcgcctccttgcgctccttgcgctctcttgcagcgcaacaaatgc

SEQ ID NO: 26123 - DNA, 545 bp, Zea mays
  Clone ID: MRT4577_123833C.1
aactggcatggcttcctctgcctccgtctccgtctccgggagaggaggaggcttcctcttaccggccgcggtgctgctagcggtggcggtgatacacgcgcggggggctcccgcggcgccgtgcgttccgcgggtgttcagcttcggggactcgctggcggacacgggcaacttccccttcctctacggcaacgactcccgcgagcccgcgctcaggacgccctacggggagacattcttccgccgcgccaccggccgcttctccgacggccgcctcatcgtcgacttcatcgcggacacgatggggctgccgttcgtgcggccgtacctgagcgggcgaaccgcggaggacttcgcgtccggggccaacttcgcggtcggcggcgccatggcgctgggcccggacttctttcgggggagaggggtgcccatgggcgaccgcatgcaccttggcgtcgagatgaaatggttccacgacctgctcgatctgctctgccccgccgaccgggctgattgcatgggcatgatgaatcaatctctcttct

SEQ ID NO: 26124 - DNA, 749 bp, Zea mays
  unsure (1)..(749): unsure at all n locations
  Clone ID: MRT4577_123834C.1
ggccgctttttttttttttttttggatccaagatgggcaggcacaacaatgccgtccgatattaataaaggaagaacctttcaaaaaaaaggtattaacaaaagaagagggagaagtaaaaacagaataatccacaccatacaacgcaggtgcctaattacaaatccatcagatcagaagtacgcccaaatcagacaggaggccaggacatggcaagaacacaaacgcgccggggaatcgtgcggatacaatacaatttcacaatttgcaagacatgaccaacctaacctatgaggagacggccggatcggatcgtttggcgcacagacgacgacggcaccgcgcgcgatcccgtctcagatcagatcatgcatgtcacatcttggcgaaggagacggaggatgcggaacggctgtagtagtactcggggagggcgtcggggcgggagaagatgagccngaaggtccttggcctcgtcggggtcctcgtcgctgccgtcgtcctcggcggtgtggaggtggatgcaggagaagcgctccagggacgcgaagaaggccgacgccacgcccgtggccacccaacgggcgtacccctccatgttcccgtacgacaggatgccgccgttcgcgttgatgttcatggttgccgccgccgccgccgccgtacgccacccctgcctccgcgcgccgacggccaaaggggaatagttaagaagagttgcctcccggccggcctcgaggaacccaatc

SEQ ID NO: 26125 - DNA, 549 bp, Zea mays
  Clone ID: MRT4577_123835C.1
ccccttttcgagtttttttttttttttttttttcagaaaacctgttgccggcgaaacgaagcacgctgcctatgttgcgttgcattgcataaaacccagctacgaacgcccactcgcccagcaacatgtttaagccctactttagtatggacattttaaattcagatccaacctaaaggcatgtacatatatagtctgataagatagccgaaggggaggttgttctcggcttacgcccccggaggcaggcaggaagggggcgtcggtctaacaggggaaaaggatgggggacccgtcgcggcgtagccggttctcggtgaggtccaccttgctcatcttctcctcgcaccacagcagctgctccttgctcagcttccccatccggagcacccgcgacacgaccttgatgtcgatcagggcgaacagcagctggacctcctccatcgtgccttgccaagccttgctcttccacccctttcttttcttcagcaagctccttcaccttcgcctctttcttatcgagtgaagactgcacttgttgaatcgagc

SEQ ID NO: 26126 - DNA, 2180 bp, Zea mays
  Clone ID: MRT4577_123836C.1
gtgcggcgctcgcctcgaggccggtcgggccgggccggggggggagttcctcctgtgagagcttcagttcacctgccaccgcctaccgagaagagatcagcgccgccgcgcgcgaagtgcttcactggggaggagcggagccgtgctaaagttggccggccgtgcccggcggcctcacgagctctccctcgttgctctacgccggggctgggccttgtcctcgtcgcgcgtacgtgctcgccgccgacgcggcgcctgctcgctgcccgtgcggaacaacggtggcctgcgcgcctcgccgggccactcgctcgtcgcgaacgagagctcggattgtttaggaggcctcatccgctgtcctcactcccctggcgagcaaaatccctcttgaaattccgaggcttcgcttgaggatcttgctctccagagctcatctgagttccagatccgtttcgtccccgccaccaatttggtgcgctcgcgagattctatatcaccggagaaaagccggtgtgctccgtaaggtcggacatcctgagattcagttgcgctaaagaagaaggaagacgcgcgcgcgcatgacgggcaaatgaggaagaatctggggctcggctcgggccccgcgcgtccgttcggtgaccgccgctggctgctccctttcctcgccaccatgctcgtcacggccacgctcctactcgccgccgcgtgcggcctcttctcgccgccgtacccgggcggcggcagcgacgcggtcttgttcgacgtggtctccctcgccgactgggacgacggcggctcgtcgacaggcggcgacggcgccccctccgtcgaggcgggaatcaagaaccggctgctggaaggtaacgccgccagcgacagcgatgacgagaaccccgacgacgccgccgtcaactctgacgactccgatgccgagccgccgcggatcgcgtacctcctcgagggcaccaagggggacggcctgcggatgcggcggactctgcaggccatctaccacccgcgcaaccagtacatcctgcacctcgacctgggggcgccgccgcgggaacggatcgacctggcaatgtatgtcaagggtgatcccatgttcagcagggtcgggaatgtgcgtgtcatcgccaagggcaaccttgtcacctacaaggggccgaccatggtcgcctgcacggtaattcgggtcgccattctcctcaaggaggggctccagtgggactggttcatcaatctcagtgcgtcagattatccgctcatgacacaagatgacatacttcatgtcttctcttctttgccaagaaatcttaattttatagagcactttcggttatctggatggaaagttaatataagggcaaaaccaattgttctggacccagggctctatctgtccaagaaatttgatcttactatgactactgagcggagagaattgccaacatctttcaaattatatactggttctgcttggataatgcttacgaagtccttccttgagtactgtatatggggctgggataatctcccacggaaccttctgatgtactatgtcaacttcatctcctcaccagaaggctacttccaaactgtcatatgcaattctgatgattttcggggcacggcagttggccacgaccttcattacatcgcctgggactaccctccaaagcagcatccgttgatcctctccatgaaggacttcaacaggatggtcaagagcggcgcgccatttgcgcgtaagtttcccaaggacgacaaggtcctggacaagatagaccgcgagctcttgcaccgctcggagggctggttcacccctggagcatggtgtgacgggagctctgaaggaggagctgatccatgcctgtctaggggtgaagactctgttttcgagcctggacctggtgccgaaaggctgcgaggcctgatgaagaaggtgctctcgtgggattaccgcaatggcagctgttcctcgcttgcttatgatcagacgaagagggactggtatgttcctaagagtagaggataattctggtgtcttgctatgctttcttgtaaatgcagctcttgacttgacccctttccattgaaatgaacaacactgaggaacacaacccgttgaccaagaaaaatgagcttagtcttttcttgagctgtttgatcgctcgatc

SEQ ID NO: 26127 - DNA, 381 bp, Zea mays
  Clone ID: MRT4577_123837C.1
tggacctgttacctgttgagatattaattgcagtcttggcctccagatttgagtacacgaggatgaatccagcaaaaatgctggtgatggatttgtacttttacagggactgattgtttgcatgggaagttgcattagatgaggttcgagtggaagatgtgagaattggaagagactgatgtacgggatgttgctgttggaactgcagcccaggctggtcctcagtgacacaatgcgtcattttgtcaaacaggccgtgcacacgaggtatgctacgcccgtgcgctgctttagagatgcttttggtagtgtggagagtccactgttgaggaagaggagagctgccgttgcatgtggacctcctgtagctgctgcctgagg

SEQ ID NO: 26128 - DNA, 1570 bp, Zea mays
  Clone ID: MRT4577_123838C.1
tcccgtgaggcggctgggggcggccccccggcgtgccgcctgtcccggtcggcggtcgcgtcccgctgcgggggtctgacgcgcgctaggcttggccccgcgggtggctcctggcgtctcgtgcggtcttcgcgcggctcgtgaaaggcccagggtcactgaacacgccaaaaaagtctccaagatcagcatcaaaattggcgtctactctacgcagcctctcattcaaaagaaaggatgagctcccagaagattgtgaacaacttcaacaacagcaaagtgcagatgatccacatcagacacttgagactgcatatgttgctcatgtttcattaagctgggaggctctgcattgcacctatgtgcacctgagtcttattgttgcagcacaacctgataatcctacaacctacagctgtgctgctcaagcattccaacaattccaggtcctgttgcagagattcattgaaaatgagccatttgagcatggtacccgggttgagatatatgcacggtctcgcagcttgttgtcaaagttgcttcaggtccccacttttcaagtcacagataggaaaagcaacgctgaagatcaaacggagccagcgatttccgcacctgatctcatcaaactgctggaggagtctatcctaactttccgccttttcctgaagaaggacaagagaaagagcggtgttcttatgagcgctagtcatggccacgctggtagctcgattcaacaagtgcagtcttcactcgataaggtaagccaagtcttatcctgtgggccaactgataatgaatctctccttcataacgtgtttacacgatcgttcatttctgtaccgtccgtatggtcccacccaccgaaacagctagtagcaaggacacgtctttcctagcatttgattctgttcacagttgttgctgagtctgcgtaagttgcaaatgtctttgctgagtagtaattacatcacccacccaggcagaccttttgtgctgtattatactctctttttttgaatcgcatcgaaaaccccgcagaaagaggcgaaggtgaaggagctgctgaagaagaggaaagggtggaagagcaaggcttggccaggcacgatggaggaggtgcagctgctgttcgccctgatcgacatcaaggtcgtgtcgcgggtgctccggatggggaagctgagcaaggagcagctgctgtggtgcgaggagaagatgagcaaggtggacctcaccgagaaccggctacgccgtgacgggtcccccatccttttcccctgttaggccgacgcacccttcctgcctgcctctgggggcgtaagcagagaacctcccttactttgttagttcggcatgccatggcggtggtggcggcaccaggggtgtccgctcgtaccattcctttcggctaccttatcagactatatatgtacatgcttttaggttggatctgaattgaaaatgtccatactaaagtaggggcttaaagtaaacatgttgctgcgcgttcgtagctgggttttatgcaatgcaacgcaacataggcagcgtgcttcgtttcgccggc

SEQ ID NO: 26129 - DNA, 449 bp, Zea mays
  Clone ID: MRT4577_123839C.1
gcagaatgcgttagccatgtaccaattgcagttggagcagaacctgctcattttgacctcttgttggcaaggagcgcaatatctcaaggcacttatttgtcaaatgattggctagtgcttaaactacaggaactggtctcactttcataccagattagtactgggcaatttgaaggaatgcaaccaataggtgtgaagcttttgtgtttgataatggacaagttcggcaaggcagtagatccggaatttcctggccatatcttgctggaacaatttcaggcccaacttgtttctgctgttagaatggctataagcactgcttctggtccacttcttttggaggctggacttgaactcgcttcaagggttattaccagccacattattggtggggatagactagcttttagtcgcttggtttctctgataacacgcccgttaagtgacat

SEQ ID NO: 26130 - DNA, 314 bp, Zea mays
  Clone ID: MRT4577_12383C.1
aaaagactaaaatgaattatatttcgggactgaggtagtgttagagtgaacatggcctaacgccacattacaacgcagccattataagttataacgatgctatgttagagtttgggttgggtactgtaatgcacacacatggtgttcagccttcatgcccaattcaatatcttgttgatctaactacccaaaggcaaaattaaacagcagaggccacccaccgatgaagtgtgagcctgacgtgcgcgccctacacgttcactcatgagacgggctacgtgactgtgacgaatgaaagcatttccttgtgcccg

SEQ ID NO: 26131 - DNA, 202 bp, Zea mays
  unsure (1)..(202): unsure at all n locations
  Clone ID: MRT4577_123840C.1
ggccgcttttgtttttttttttttagggggggacgaatgactcagaaatgcatatcccttttggatgtccatgcgagataacttgtttcataaaactaggtgnatttccctatcccagacacggggcatacagcccatagatgttatctgatcgttgattattgttacatgttcatattaatgggggggggatgggaggacg

SEQ ID NO: 26132 - DNA, 371 bp, Zea mays
  Clone ID: MRT4577_123841C.1
caattcccaattccacccacgcgtcacgcgacccatgctactaaagcctccacatataatctttcacaaccatcactgaagccatggtcacggtgaccatacactgaacgtataacataatcaaactataaacgcatatcatactatgacacacggagaccttccgaagctcacagtcatcatctctcactagaatcaccacacctaactcttccaagcttattcaccacagaacgttccacctgaaactgtatttgactcctgcatacttcataccaaacattattatttctacattgacactcatgccagaccaattggtacttcaaagccaacccattaccatgtgcaacctgatgagattggcttct

SEQ ID NO: 26133 - DNA, 350 bp, Zea mays
  Clone ID: MRT4577_123842C.1
gtaattttggagatatatttgacgggaggcatttcatcaactttttgaaagatgaggggcgcgtaattgaacagtttccggagaggcttggtccaagagattcaaccattattatactggaaatgccacctgtgagctggtcaaatgaaaaatattacttgcatcaaatcctaccgttgttaaacaaatccagcttcatccatttaaccaaaccaatggctcgcttagccaatattggtttcagaccagagcttaattggctaagaggccgggttaattttcatgccctgaaatccacacttaaaatggagggattagggaataaactggtccataaactgcaggccagg

SEQ ID NO: 26134 - DNA, 268 bp, Zea mays
  unsure (1)..(268): unsure at all n locations
  Clone ID: MRT4577_123843C.1
gccggccgtttccgggntatcatatctttatatcaatgataatcatgatataaaatcaagtctcatctatcagcatcatatatcttctttcaagttaattaaattctgatggctgtatgtatttatatcggcaagttatagctgtctcttataatttactgacaacataagcatcatatgctatcaatcatcctgtatttattatcatcaatattagttgagataaattaggttgcttaaagaaaaaaaaaaaaaaaaaaggccccta

SEQ ID NO: 26135 - DNA, 478 bp, Zea mays
  Clone ID: MRT4577_123844C.1
tttgtaaaatggggtttttgtccttaccacaggtttttccgaagaaacttttttgggcccgtaccacaggatcaaacattaagaatcttttggaaaaggcttgtccttcccccaattaaaaattcaaatttttaagattgggggtgaccgaatccttatccacataaccggcataaggggagattggacaactgtgccggcaattggactcatttcactcttgcccattaaaaaacgtcaataaatccgtaactcgcattgcgggttaaagacttaaccatatccatccgttagggcatggaataagcgctcaaacatctggatccggaaaagaatgtactaatacaatctgtcaaactttctgaataaggctcacaccttcctttggtagagctttagaaactaggctttcatgctttccaaaggaaaaccataaaacctgtgtaagcaacctttgaaaaagaaaaacccaaaaggc

SEQ ID NO: 26136 - DNA, 454 bp, Zea mays
  Clone ID: MRT4577_123845C.1
ctcctctccgttccctccctcactgcctgctttgtcttccctccctcttcttactgctcaaggctcacctctttgattgcttcatcccactgctgcctgactgcctcttcttcactggctgacataggtggcaaaatcaagcgctccgtagattcagctctatttcctgctggctgcaactctctgtcaatctttagactttggatgccgcagagctttcagttctttgcttcttgttgctctgctctgctctgctttgaggggctcgcggtcgcggctgggaacagccggacaggagcggggcggcgccggagaaagatgggcgatgccacgacggagctggtggaggcattcttgcgagcagagtcttggcggttcggcggaggcgtttcgcttgtggctggagcaggaagaggcctgcgagcacgaagcgttagggttaggactagatttt

SEQ ID NO: 26137 - DNA, 530 bp, Zea mays
  Clone ID: MRT4577_123846C.1
tctgacggtgcactgttgatgcccatgacataccatgacgtgcaacatgggcagtggaggtacgccgaacacacacgctgtcacgttggtggactgaccctcattgggccctgctgtggttggatacttggacctgtaacgcagccgccggggtggacaggcgcgcttcatcggggacaagactactacacacgcgtactgcccggacctacttgaagcataacgagagccagcttgcgactactgctggttgaagctcagatgggggctgtccttctcggaggccagtgcacccgtggtcccggcggggcccgtgaacctcaccggctgcctgtccacggagtactgtatgagcttcagagggctgctcggccgcgaccccaatggcttcggcagccttcaacgtgaccgaggacatcggactcacgggcatctgccgcgtccgcgcgacggtggctgccttcatgtcctagtcctagaacctcacggctaaggtcgacacgggcatggtgctttaccacgcggtgccg

SEQ ID NO: 26138 - DNA, 653 bp, Zea mays
  Clone ID: MRT4577_123847C.1
ccggccgggccggtattccttcaggacgtgaaaggctgaaatgctttacggactccataggtcgccgcctcctctctactatatgatctccaccgatcccttcacgcagcacctgcaccagcgacagctgcacgcaacggctgcgtccctcagcacaagaaggggcgccaacaacagcttctgctcttctaggacggtgagcgcgcctactccggcggacatggcgatcaacagggcaagtgccctgccgaagctgacgacgttgtaagacatcctgttcgacatcgacagcacgctctgcaactccgaccccatctacttctgcgccttccgagagctcctgcagtatggcggattcaacggcggggtccccatcacggaggagtgctactgctcccacatatgcgggagccacaacgactacctcaccacgtctgtgttcccgaccatgaattaccctaaggcgatgcgattcatgaatgacacagaaactatgatcccatcgttgacgacatgtcagctgaagcccgtgaatgggctgctcgagctgtgcgtatggatagcaacgacgcgacatgaagcgcgcgtcgttgacgatcgccactagggcgaacgacgaactgatgctggcactgatggtgctcaccgacttc

SEQ ID NO: 26139 - DNA, 292 bp, Zea mays
  Clone ID: MRT4577_123848C.1
caggaactccattgcagtatttccaccccaagaccacagcacagagtcgggtccgaatccacaggagacgcagaagcacaactcactccccactccctccacccatcagctagccatgggcaaggagtgcggcaaacacggcgacgacgacctgcggcggtcgtgcaggcggctggtagccaccatcgtggtgctcgcggtgaccgtcggcgtcgtcgcggtgatcgtctagctggtgctccggcccacggagccgggggttctacgtgcaggacgcgtcggtgcggcaggt

SEQ ID NO: 26140 - DNA, 245 bp, Zea mays
  Clone ID: MRT4577_123849C.1
ttgtgttgtttatcagggagctgaatcctacacaccctcaacgggtaagacaatcgagaaacactggcacacagacccatcatatctcgtatgcttagacgcgcccgacaccaaactgaccatcacaacaataattaaactctgagctttcacggccgttcagctggttaccaaagcaagaactgcggcagataatgcacaaccatgtaccacacaagatacgttcacatcaaggatgcctcatg

SEQ ID NO: 26141 - DNA, 164 bp, Zea mays
  unsure (1)..(164): unsure at all n locations
  Clone ID: MRT4577_12384C.1
ggggtggggggatttggggcggggggnnnnnnnnaaaaacagcccaccgttttcttccggggtaattaaccatttcccagggaaaacccaaagcgccttttgggttaaccaagcgaatgaccccacccttttggggggaacttggaacccggaacggaacggac

SEQ ID NO: 26142 - DNA, 242 bp, Zea mays
  Clone ID: MRT4577_123850C.1
gggccgggatgttcctatcacgccgacaggcgccagagaccttctttctatccctgctgcgaattctgggacccacccgcccaaccaagaaacgtacttccatagacaagatcgaagatcgataccgcatatatgcaggcatatatgaacggaggccaggagttggggacttgctgccgccctgtctaccttgagccgaatcactacgacgcagtcgatctccctgtcctgctacgacctat

SEQ ID NO: 26143 - DNA, 429 bp, Zea mays
  Clone ID: MRT4577_123851C.1
aaacgtacacatgacccatcctcccgatccccttgcagccgtcatcgccgcccgaccatggagtcccggccgccagctccctggagatttccgcctccctaaaagtccaggtctctagtccagcgcgccgccacctcctaccccgcacgcctcaccatgcgcctccggtccgccccccgtcgccgcaccccgtcagtcccctgccccccgtcacagcgcgccgccggaccgcctaccgtcgctggctctccccagccccgaggtcacatctcttccggagatcctctccaacccgtagttcctcgcagagggcacccactcacaccggcatgttaagaggaggtacgtcgcccctccttgcggatgcatggacgagggtctcacgctgccgccggcagcggcaactgcagcggaccacgtgctccggcg

SEQ ID NO: 26144 - DNA, 638 bp, Zea mays
  Clone ID: MRT4577_123852C.1
cattggtacctcgaggcggcggaaactgctcacaccacgccagccagccatagtcacactggtgagatcgcaatctgattagatccaagcttcactgccttcgatgattgctccaaaggacacacaagatgtcgtcgcaagtagctagcactgataaccatcgtgcgtgcgtccaaatgcccaaggctcaccgacctgcacgcgtccgcgcgcgcagtgcaggcgtgccacagactggcacgcgcgctcgtccgaccgtccagaccacttaccaggataccagctgcgtccggggtggtagaccgataacggcctctgtagagactcggactcttgggacgactggactgatactgagaccaacgaagcccatgccgatgctgagccgacctaggcatagcccccggaaacagaaccggactgcgccgctccctatccagagacctgggacgagcaagcttatacggatgtctgcgcgcccaaagaatacacggaagctgctgctgccccggtcgaggctgctgagacacatataccagcgagacccaagaggtggcgtatgtgtatgctaaccatgaggaacatgaagcagcgcctgctgttgctgccgctcctgaggtccagcgacgaggttgaag

SEQ ID NO: 26145 - DNA, 219 bp, Zea mays
  Clone ID: MRT4577_123853C.1
attcttcttgctcttcctgcatgtactggctactcctcaaaactccctcaatgctcacaaactcgtattgtttgccttcttcccccatacctcccatcaattatagcttccgtatgttaaaacccatctcttcaaccatatacgctcgaacaagcaatcacagcaagccacataccttcatcactcctccttcaacactcggcagccgtatcttctgtg

SEQ ID NO: 26146 - DNA, 286 bp, Zea mays
  Clone ID: MRT4577_123854C.1
aaaaacaaagcccccttttttttaaaggggacacaaaaaaccaaaggaatttttttactaaccaaaacagtgacagtgcttattttcaaattactgccacttcacacccacaaatacaaacaaaaaatttatcccaaaatttattccaatttttatttgcccctattattttccaaaccaaaaaaacttcccaatctctaccgttttacttccattccaaacaaaaacaatttttaaccactggaaaatcacttttttttcccaaccccataaaacattttgtaaa

SEQ ID NO: 26147 - DNA, 388 bp, Zea mays
  Clone ID: MRT4577_123855C.1
acgtaagctcggaattcggctcgaggttcaggcaaacatagtggtctgatgagaaagaggacatatcgggggcgcttataaaaccggtgcacgtggtccatatatcaaagtgtcaccactcatttgagacctaacgactgtagtggaacattcaatggacaacacaacaccttccaggctttcaccactacacaccaccactgtggagggtgcttttagcaaaacctaccaaacaactacaaacggtcgatctacaatgagaggggaaggaagaatacgggcagcatgggcgccaatgctcacatgggcataagatatggcctcgctcagtaatgcacctgtggcgaataaataaaggacacaggtgtgagtctgccatgagtgcagg

SEQ ID NO: 26148 - DNA, 252 bp, Zea mays
  Clone ID: MRT4577_123856C.1
atggcggccacggaacaggcggtggacgtcggcgggtgggggcagaggttctcggttcgcgtgggtagagcgagagagagggcgagagagctgggcagagggcgcaaatggaagaggggaggtgggcgagcagggcgcggggggctcggtcgtggccggagaatgcgcagtcgtgggcgcatccacgacggggagatcgtgggcgagaggcgttactctttccttttcccttttcttctcgctaagccttga

SEQ ID NO: 26149 - DNA, 777 bp, Zea mays
  Clone ID: MRT4577_123857C.1
cctcgaggccggccgggatcagtactctcccaacggtttcttaacggctgcaatcatgcgtgtcaccgacattatctcgtgcgccctgctacaagcttcgatagcattatcgactccagttgaagagcttggagcaaaggctgttgtggcaaaacgcttcccgcccgtgccgtttctcccgggaaaggcatcctcggtgccgggttcccgaaacaagacctgcatgctcaaggctctcggtggtggcaaggacgactctgccaacatcctcagcgctgttaagcaatgcaacaatggcggccatgttgttttccccaagggccagcagttcaccattggcaccgccctggatcttacgttcctcaatggcattgatctagatatccaaggaaccatccagttcacaaacgacactgattactggcaagccaattccttcaagcaggttttccagaatgcaaccaccttcttccagctcggaggcaaggacatcaatgtctacggcggcggcaccctagacggcaacggccaagcctggtacgacctctacgccaaagacatttacatcctacgacccattctctttggtttgatcggtgccaagaatgccaaaatctctgatctcaagttccgctacagcccacagtggtacactttggtcgccaactcgagccaagtcgtcttctccaatattgacattttcggcgacagcaagagcaagaatcccgccaagaacactgatggctgggacacctaccgctccgacaacatcatcat

SEQ ID NO: 26150 - DNA, 219 bp, Zea mays
  Clone ID: MRT4577_123858C.1
gccgcggatggtaggttccgcatgtcccgctcgactacgctcccgcttcaccctgtgcatgccgctagaatcgccgccatgacaggatgaggtgcggcgcgtcggcgcagaagaggtcccaagctacaagttcggtggcggtgagaccgtgctagagattgtgcaggccagccagttcgctcgggacatcgtgacggctgccggcgttcagaatcgata

SEQ ID NO: 26151 - DNA, 574 bp, Zea mays
  Clone ID: MRT4577_123859C.1
cccacgcgttttcctacgcgtccgcccacgcgtccgcccacgcgtccgcacgtacagggacatggttttcgtaaaggacttgtgtccatgctgatggatctaaaaccacgattcctaagatttcctgggggttgctttgtggaaggtggttggctaagaaacgcattcagatggagacaaaacattggtccatgggaagagaggccaggacacttcggagattgttggcagtactggaccgacgatggccttggatattatgaatttcttctgctttctgaggacataggtgctgccccgatctgggtattcaacaatggaatcagctacaacgatgaagttaatactgctactattgccccctttgtgaaggatatattggacagcctagaatttgctaggggcagtgcgaattcgacatggggctctgttagagccaaaatggggcatcctaaaccatttccagtcaagtatgttgcaattggaaatgaagactgtgagagaaagttttatagaggtaattacctcaagttttacaacgctataagagaggtctatccagacattcaactga

SEQ ID NO: 26152 - DNA, 407 bp, Zea mays
  Clone ID: MRT4577_12385C.1
tcggaacccctccaatcccacccacaccaatatgaatcatttgctcttgtccctcctcctctcccggagaccacggaggttatccccaccttcctctccaacttctgctctctcctcaccacacacgacgcagacctgaccaagggcctcaacgcctatttcaacaagctcaacgacgtcacctccttcgacttcatcagcaagacctacttctacgtgcaccccttggttaccgagctcagcaagggcgcgccgaacaaagcggccaactgggtcaattggcaacttcaccctctggtcaccctcggtctcctcattgtcctagaggaacccctggttcacacgtttcaccttccccctttttcttttcaaaggccactacaagggcgcttgtacaagtacttttt

SEQ ID NO: 26153 - DNA, 623 bp, Zea mays
  Clone ID: MRT4577_123860C.1
cccagcgtccgattttccaacaacagctgttatcaggagggaaaaagagtaactccacattccggttattaccaaagctcactgaattagatctgaaatcatgtggcttaactgaaattcctagtttcttggtacaccttgatcatatcactatattggacctttcttgcaacaagatacttgggactattccaaattggatatggcacacatgggaccatagccttaggaatttgaatctttcaaacaacgcattcacaaatttgcagctcacttcatatattctccctaatagtcatttggaatttcttgatttgagttccaacagaatccagggtcaaatcccgattccgaacatgttgacaatggaaagcaattatgaacaagtcttggattattcaaataacagtttcacatctgttatgttaaacttcactttgtatcttagccaaactgtgtatctcaagctatccgacaataacatagcaggctacataccacccacactttgcaatttaacttatcttaaagtccttgacctggcaaataacgacttcaaaggggagggtccatcttgcctggatagaagaatggcaccttaaatttattgaattttgaggggg

SEQ ID NO: 26154 - DNA, 302 bp, Zea mays
  unsure (1)..(302): unsure at all n locations
  Clone ID: MRT4577_123861C.1
gtgcattaaactgctncaatgactttctaatccattgatccttgactatcttcggcatcttgatgtttagatgcattaacgatgtacaggaattagttccggtagtgcccaaatggaacttgtaatcttttgtattcataaatggaagttggagttcttgccatgaaggttgaacttgaatctctttgtgtgtagttttaccaatgcaattcatcaccttatcatattattagattggtaatatttttttgaaatttttatgtatgcattgaaactcataataattagaggaatcatttttg

SEQ ID NO: 26155 - DNA, 491 bp, Zea mays
  unsure (1)..(491): unsure at all n locations
  Clone ID: MRT4577_123862C.1
gtacactgttttttatcacctgaaaactgcatgacattcatactaaaaatattgagcttgaagctaatcctatctgtgcatgcagagcatgcccctttcacgatatagtagaggcactgacctgattgcccactgacctgagctggctcgcccaaagcacaagacatgcacccacaaggtacagctattaagcgaatcgatacagttatggaggggaccgagactctaccacagcgttcaaaggacatatccccgcctttaagggccatatgaaggagggccggcacgggttcaaggaggatgcgcgccctgtccgatgaaccgtggtcctggtctaaagacccctgcgcttgatccatgaggtgctgggccttatacttgatgctggggtccttgtgcatcaagtagaacacggacagncgagtgatcgcccaggcacgtactaggtacatcaacccagaacaccatagagcgcaagggacgatggaggg

SEQ ID NO: 26156 - DNA, 423 bp, Zea mays
  Clone ID: MRT4577_123863C.1
tggcttgggacctttgggctgatttatgtgcttgtggatgtgcgggtggctgtgcgggtcagcctcagactgtgagtggttgtttccaccggcggggcccccccctacgcccccccggcccctcctcggcgccctatgccctctaactcgtcaacgaaacggaagtattcgatgctagactacattcggcggtaatcacttaccaaatcgaatcccatcgcaatcgtatcgcctaactaatcgcagtggtcaaccagtcagtccgtcattcgttggggtcacggtaaacgtacaaatcgatacaagctattaggagcaagcgcaatctctgagcttcgtctccgccatcgcccgggcatcgatcgcgctatcttatcatcacccaagaactacagtagcaagcccatcagcgctctcgtcgct

SEQ ID NO: 26157 - DNA, 816 bp, Zea mays
  Clone ID: MRT4577_123864C.1
ccatccgtccaccaccgtatcgccgcttctcttctccaggcgaacctctagggttcgtcacgatccccgtcgccgcccgccggattcgaccgtcggcaagacccgccggattcccgcccgacgccggtgctgctgccactactcctccctccctcccggcctccccctctccgcctccgcctccgcctccgcctccaccaggcgcagcccccgtcgacccgcagcagatccgccgcctcgaatagcacccaagacgcgagagccgagagctcgatggggaagtcggagccggagtgcgtcaactcgtcgaacccggcccacgagtgcaacgactactgcctcaacaagatcgccgaggccaagcgccgcctcctcgaagagcaacccgattcgtggaagggccccccggaggaccgcaccgtgcaccctgactgcatcaacgcctccaacccctaccatgactgctccgagtactgctttaagaagattgccgacaccaatgcagcggcggagcgcggggagctagagaagcctgctggaggttctggcaaatcaggagtcactccagagcaggctgatggtgatgatgattccgagcgccaggaggacgccgctgcagcagaagacggttacccgcagatgaccggaaagcagaagaagctgtttgagctgcagcttaagatgaacgaagctaggaaggcgaatcagcaggcgatggttgcggagaagaaaggatggagcctcgtggcgagagcagaggcgtatctaaggagaagtggttggaagacagaaaaagaagattgggaagctgcttga

SEQ ID NO: 26158 - DNA, 603 bp, Zea mays
  unsure (1)..(603): unsure at all n locations
  Clone ID: MRT4577_123865C.1
aagtgggcagcgaagacctgctgcgtcaagaaacaagcaagaaaaggaactaaagaagcctagaaagactgncaacatagaaaatatgatgaacaaatacctagaaacgaggagcaagcaagtagaagatgaagctgcaagagaaaaggaagcaagagaaaaggagacaagagaaaaggaggcaactcaaagtgaagatttctccatcaaaaggtgcatatcagttctgaacacaatggaagaagtgaccaaactggagaaggcaaaagcatattcagtcttcaccaagagcaaagagaatagagagactttcatatgtgcatgtgaagcggatcaagaatcagctttgatttggctaagaaatgagatggcttagtaggtttgggcgatcaataggtgatgcttagcacatctggaggtttcttattttgaactgacatgcttagttataaagtggtgtttctttttagcacatctgttctatctcttagctgttgaagatgtcagtttatacctgtctatcaatccatgtcacaagttatacttgttttttcacatgcctcttgatcctggaatattatgctcagctctgctgatgaagag

SEQ ID NO: 26159 - DNA, 1483 bp, Zea mays
  Clone ID: MRT4577_123866C.1
tttgacgcgtgggcggacgcgtgggtggggggaaggcttctcctaaatgcagtggggcaaaaaagagtggaagttctccaagagtagtgaaacaaagagcggattggaatccaggccttgagaggtctcttgttgacattctccatgaatttaaagaaagtggataaagaggtgacaatggttggaactccgaagggtggaatagaatggtcaaggagtttcatgtgaggaacaagtatgtctcctttacaaagtctcaaattcaggataaagaaggtcagctgaagagagactacaagatgctcaaagcagcaaagcaacagagtgggtccacctggaatgagaaaaggaatatggttgaaggaccaccagctttgtgggagaatcttatggtgacatttcctaaaatcaagaagtttaacaacaacaaggcaaccttcccgctctttgatgctttgggagagctttatgatggacacttggctgaagggacttggaattgcacttctcttgaggcaccgcaagaggaagaaccgaatgagcaacttcaggatgcagaagatggaccacaaggctttgatctgaatgttgttcatgatgtagatgatgaagttgatgatgcactcactgaaaggaatgaagatatgcttcaaggaagggctaatactctgtcacgagatgaagaaagtggacagcgaagacctgctgcgtcaagaaacaagcaagaaaaggaaccaaagaagcctagaaagactgacaacatagaaaatatgatgaacaaatacctagaaatgaggagcaagcaagtagaagatgaagctgcaagagaaaaggaagcaagagaaaaggagacaagagaaaaggaggcagctcaaagtgaagatttctccatcaaaaggtgcatatcagttctgaacacaatggaagaagtgaccaaactggagaaggcaaaagcatattcagtcttcaccaagagcaaagagaatagagagactttcatatgtgcatgtgaagcggatcaagaatcagctttgatttggctaagaaatgagatggcttagtaggtatgatatttgtgtctttaccttccactcaaccatattcacttgggcctttatattcccatctaattgttctatttgtttggactggtttgggtgatcaatcggtgatgcttagcacatctggaggtttcttattttgaactgacatgcttagttctaaagtgatgtttcttcttagcacatctgttctatctcttagcttttgaagatgtcagtctatcaagactgttctttgcgtttgttggcaagactataatttatttggcaagactataatttacatgctttgttgttttaaaactattttggctttactactacgtaccaagtctgcagttggtgctctattgtagaatgtcgtccaaaacagaagcttttgctggacaggtgacgtgcttacaagctcagattgattcatg

SEQ ID NO: 26160 - DNA, 331 bp, Zea mays
  Clone ID: MRT4577_123867C.1
ccacgcgtccgcggactcgtggttgatcaaaggatgcaccatgaatctctacccatggcccactgtaaccatttcttatgagggcataccagatcaacatcgtgccttgatagaggaccaacacttctataaggacaatgactggctaaacactaatggctccaggcgagcacactcgcttgagcattaactgcatgcacggcctctccctctaagggctactgggccttaataatagcgttgacacgctccttctgtgccttattataaatgtccaccttggtccacttggatagctatatgttgtacacctcgtgcacccacgcgtccg

SEQ ID NO: 26161 - DNA, 296 bp, Zea mays
  unsure (1)..(296): unsure at all n locations
  Clone ID: MRT4577_123868C.1
cgctcaatgacagagtagattattacatcttgatcaggtcgtcggggagtacctgctcggtgaagttccatcttccgtagactggcgcgggaagaaggtcctctctaaaaagccgccggcgttgacgagcagctggcgcgcgctggagtattgacatcagttcgaggtcctgtatgaatgcactactcgtacgatatatcttgggcgagtgcttgctgaaataatcggacatggncggtggggctctctancgcgacctggtacaagagcgactctcctctgtgtacgtccggacg

SEQ ID NO: 26162 - DNA, 1494 bp, Zea mays
  Clone ID: MRT4577_123869C.1
ggagagagcacgtactttcctccacagccacagaggtaacccatggggtgcgcgagctccaaggccaacgccgacgtcgcggtggccgacgtctactgcccgccgcccaccagcgtttccctcttcgacatcaacgccgtcgaggagccctggctcatcgccaagcagaacaaagccgctgatgatgacgacgacgacgacgaggaggaggaggaagagacgaccgacgacgacgatgaggaccacgacgacgaaaagcagcccgccgccaagaccgtggtgccgctccctctcctcgacaagctcgagggctacgagctcgctccggcgtcgtggtccgaggtcagcaaggccctggaggacatgaagcccgtcctcgactccaagtcgccgcctgctcctgctcctgctcccaagaagaagaagactaagaagaagaagaagaagaagactaagacgaagcagcagcaacagccgatgcagcccgtggtgcctgctgccacggacgacggcgacgctgctgctggtagcaagaaggcgccggcgacgtcgtccgtcgacgacctaccagacagcagcaggcccgcgccgccggagctcgcgggtcggcgcgtcgtgaaggacaacccgttcctgacgcgcgaccgcgagagcaacaagggcgccggtgctgacggcggcccacggtggaagcggcgggacccgttcgagggctgccccgagcgccggcccccgggcgccgcgggcggcggcgtggtgctgtacacgacgacgctccgcggcgtgcggcgcacgttcgaggactgcgagcgcgcgcgggaggcggtggaggcgtgcgccgcggcggcgggcgtggaggccgtggacgagcgcgacgtgtcgctgcacggggagtacctccgcgagctgcgggagctgctgcccggcgacggcggcgcggcgcctccgccgcggctcttcgtcatgggacgctacgtgggcggcgccgaggagtgcgccaggctggccgagtccggcacgctgcgggagatgatgcgctgggtcaaggcccgcggcgaggcgtgcgcggccaaggacggccgcggctgcgagggctgtggcggcgcgcggttcgtgccgtgctgggagtgcggcggcagctgcagggtgctggtggcgccgccggacggagggacaccaaccaccaccacagagaggtgcgccaagtgcaacgagaacggcctcatgatgtgccccatctgccactgattgcattgcatgctcgtttcgtttgcattggattccatggatccgatgcaaaaatgaaacgtatattgttcaaaccacgatcattccatcagttgcagttttatttatacacagtacgtacgacgtgcgtacaacaagatttggacgtatccttgttatagtatatgtgtatatgtatatgtatattgtacacgtactatgcatgttgtcacaatgtatggttgtagggctgtgcaaatttaaatg

SEQ ID NO: 26163 - DNA, 374 bp, Zea mays
  Clone ID: MRT4577_12386C.1
ggggggcccccaaaactgaaacctcattggttttttttaacaaagcccaaaaaaactaaaacttgggaattcgttacagggcggggggtttttagttaaaacccaaaaaggcaacctggccaaaacccggtttgatcccagggccgggggccccggtaaaatttattttcagcataaacaagccaaaaaaatgggttgggaccaaaggccattggggcccccccacgatggggggggagaaatttttttttttactaatctactggggcttgaacatgggggggaccaggggaaccacccgggtggtggacccccacttgttgggcacccacgagacaagcttggtaaaaggggtttttagggaaaaccccgcc

SEQ ID NO: 26164 - DNA, 1227 bp, Zea mays
  Clone ID: MRT4577_123870C.1
aaatcaaacaaaaccaagcacgaacttcaacatggtttaggcatttccatagactatcagcactaacatggcttgcaaaataatatatatttcttttaaaagaagaaaaaagaaaaacaagcgctcctcagccggaagaaacctactctactgctctcggacctcggttctttcttttggtagctggcaccacacgtgtaacttctccagcacagacagatcgtgctgcacaatggccatatgaattcgttcatgaccatggtagacttctcttcctatcttgtacttgcacacactccagcagctcctaacttcgccgttcatgcgcgcgcgcgtacgaggccacgaaaaatcccaatggaactttgcagcctcagaaatcgtacttgatgaccgattgcaggcttatggcagatccatctggagtttcgttgctcgggaaggggagtagaggcgcacgacgatcgttattcccgtggccagcgcgaatatcagagcgagaatgatcatcagagcagagctcctggactccatggtcgtcgcgacgccaccttctccctgcactttgctgaccaggtcattgtgctccctcagctcaccgttagtgtaatcttgctctgtcttcatccccgtttcgttgggtctcggaaagtccagctctttcttcactactgttggcttaaccaacgatgacagtgctggtgagctggcaagttcagcgagtgctaccagatctttcttttcgtcctgctcgagctcacccttgtccgcgattgctctttcacctttctctgcttctgtttctgcaagagtatcttcggtgtctgtaacagtatcttcagtgtctgtaacaacatcttctgtctctgcaacagtatcttcttcttcagtgtctgcaacagcacctccagtttctgtaacagtatcagtaaccatgtcatctaagagttggtcttgatgcatcatcagctgtgctgtcggcgtgttctccatcgattcagcctcttgggcaccaccaccacactcatcattatgcttgctgaggatgatacctggaccgttgacgccgagcttgcttccatcagaggcctccatatctttattatcttttggggctatctctttctccaagtccttcttgcttgagtcctcttcctccatcttctccacgcttccctgaccaaacaaacgttgatcatttcctgcatgatggctcggacgcgtggg

SEQ ID NO: 26165 - DNA, 510 bp, Zea mays
  Clone ID: MRT4577_123871C.1
cacctctatctctactacctctcagtataagctgaagctgctgcgcctgccggtcccgaaccgcaggttcgagccagacccaccgcatccttgcatgccgttccataggcaggcactgccaactctcctgtagcagaaccatgacgaacctctccgactactgctatcctagcttggcgggctaccgagaccgacgcgcgtgctacacactggcaccggcaggcagatggaatatgctctggtccccatgattgctagcggagctatggttgggcagaccatcctgttctcccgcacatgctagagcctccgacgacgacgctggccctgcttggtgggaagatggccctgtgaggggctctgtcatgatctctgaagggacgcgttgctagctgctgagggcgagggagcgcgcactgacgagaatgtggaccacgctgatggctgcatcccccatagggagggaggggtctggctctcactcctagaaaaagctgtttcatattactc

SEQ ID NO: 26166 - DNA, 578 bp, Zea mays
  Clone ID: MRT4577_123872C.1
gaaagagtaagaggaagcatcgatcgccgagtgattcagatagcagcaatagtgctgcttcggtgttcgactctgactctgagtcatcgggctctgaatactcttccggaaccagttcaagttatagttcctcagactctgaagacaagaagcggcaacacagaaggaagcagaagaagagaaggcacaggagggacagcacatcatcatcatcttctgaatctgagtctgcgtcagacagtgattcggatgacaagaacagccggaggaagagtaaaagaaggggtggtaggcgctgaatctagtgagctgcacaaagcagtgtggatgttgaatatcatcattatatacttgtgttcaattcatgaataacttttcgtcatcatcagacccatgtgctgggctttgccaatccaagaaacaaatgtagcatttgctttcctgaatgctagtactgatgtttttccctgtacgaagaagcagttgggagcttttaggtgttcctattctatgatctttgtgtaacgatattcatatatggatttctaagtttggtgtgttaaaaaaaaaaaaaaaaa

SEQ ID NO: 26167 - DNA, 217 bp, Zea mays
  unsure (1)..(217): unsure at all n locations
  Clone ID: MRT4577_123873C.1
ggaagacgggaggacgaccggttccaggtccgcgtccgctgactccggccggcggtcgtcgtctcggctagcgcccgtggcgatcccgcacgtggacacgccgcgcgagataccctacaaggagatcgtcgccatcaccaacgacttctccgagtcgcaggtggtcgcggagctggacttcgggacagggtacgagggcttnctggacaccggccac

SEQ ID NO: 26168 - DNA, 317 bp, Zea mays
  Clone ID: MRT4577_123874C.1
ttgaatcctcttagcgccgcctttttttcttcttttttttttttctctttaacacccaaatactgatccgtttcatcaatccaaagccctgaccacatcacaagcaattcaacattccactatcacaaacccaaacttaaccaaactcccacagttacaaactaacaacatatacctttaacaactactcactgacgcaagtatcccatatttacaatacatacacacttactgatctatttctcttatcattcctactaatctttcaacctactacccccattgcctcaacttcttccctcttaacctcaccttca

SEQ ID NO: 26169 - DNA, 305 bp, Zea mays
  Clone ID: MRT4577_123875C.1
ttctaatctggtccactgacatggatatcagagaacatatttacccgggtccgtgcacagctctgggcgttgatcgttcggggcggaccacatgcgggcttgcaagctcacatcaatggatctataaatgttactagatatcggggatggaatatagacaacgcatcaatgctatcgaatctatctgtggctaaatcattccacactgtattgacctgtccaggctatgcggctggttgacaaaccaggctatctgaatactatgaacatgacttccttgtaacccatatatgaacttatattct

SEQ ID NO: 26170 - DNA, 343 bp, Zea mays
  Clone ID: MRT4577_123876C.1
aagaccgctttctaacaactagcattcatcttgtaatcgaaacattgcttcacagggggcaacaaagttagccaacagtgagaactggccagcaccgaaacacataaccatgctaaataaattttatcaacacggcttgcctagtcttcaatgttagccaggaggagcaaccacttcaggggcggatgaacgcgagatcctaccatggagagcgcaaggcaaaccttcgccacctatagagaattcggaaccccccccagggcctttaatgctgcaggctgatcccctaactgtccggatcagcagaaaaaaaataatcgcttgggttccccgtggaggatac

SEQ ID NO: 26171 - DNA, 444 bp, Zea mays
  Clone ID: MRT4577_123877C.1
tagagcaggccgcccaaacagatttcacccttgttcctccaacaaccagtagccctaaggcagcttttacctttggtgcatttgcaggctcaaaacattaaggcacaacaactacaacaacttatgctaggaaaccttgctgtctactctcagcaacagcaattactttcattcaaccaactggctacattagaactctgctgcttatttgcaacatcaactaccattcagtcagctagctgctgcctacccccagcaattacttccattcaaccaactggctgcatagtactcttgctgcttaattacaaacagtaacaacttccacaattcagtcagctagctgaagtgagccctattgccttattgacacagtaacaagtgttgccgttcttcctgaacgctgcgccttacgcagataccctataacaactagaacaattg

SEQ ID NO: 26172 - DNA, 301 bp, Zea mays
  Clone ID: MRT4577_123878C.1
ttttaggattataaaagttttatgatataaaatagaaccaactcaagaagcccggactcttcaaaaaatggtggactatcctataattgggtatacctcctaaaatttgcgaagcggtacgaatttaaaagggagcttgatatttggaaccccaatccttgtgcaaaatgaaacaggcccctttttcttggggcgggttcccctggcagaataaacgttttaaccggagcataattacggtttccaaaccaaaatataattgggccggttgaaaacacctaacaaggatgaagaggcgatt

SEQ ID NO: 26173 - DNA, 282 bp, Zea mays
  Clone ID: MRT4577_123879C.1
atattcactttttcatctaatatttctttaagtttttcaacattctatacatgctttacccgacccaaaacaactagggaaaacaacagctattaaccggttcctgggaaaaaaagtttagcgttttaacaaatggacccatgcttatcacaggcctagaaaacataacccaaggaaaagcgtgacgagttaatattgcaaagaaaaaaaaaaaaattctggcaccacaaagggttaacaagagcaaaaaaaaaccatcttaacactaaatacttgttacct

SEQ ID NO: 26174 - DNA, 488 bp, Zea mays
  Clone ID: MRT4577_12387C.1
tcgctcaccgtgaacccggggcctcgccgccattattgcgggggatccaagccgtcacggggaaggttgccttctattgccgcccgacccttgaagtgtggctgcagtagttcgtcgtgactcgtggagtcttgtgataagcctcaccgggcgtggaggtaaccgggtgagggggaattcctcatcgtcgtcatacggtaccttgtggccgtcgtacgccatggctagccaatctgccaccaccccatcagcgaggttacgagtcacctgaagagcaagttggtacctggaatctcaagtcccaggtcaagaacaggtaccgcaggatgaggcgcatgaaggatgttgtgacgacttcgtgagaggtgtaggccgtcatctcccagtcaactttgggttgctggatcgttgtctccttatgatgtaattatttatttattttgtacagaactcctattatatagtaaagatgtgacattgctttttgt

SEQ ID NO: 26175 - DNA, 134 bp, Zea mays
  Clone ID: MRT4577_123880C.1
cccttcatgattttctgaccacccagcgagcgggggcgggctttggttagatcaaaggcgatgggtttcacaagctgcggcaagtgaacactatcttcgtgaagctgacatgctacttcattaccttcacgagc

SEQ ID NO: 26176 - DNA, 474 bp, Zea mays
  Clone ID: MRT4577_123881C.1
cctcgaggccggccgggccggcactccatcctatcgttcctgtgaccacggcgtgagcccacgccttgccgtatggaatagcgctacccacttgaagctgctgccggagccctgttcctaggacgagactgcttcaatacggcggtgctctatgctgtgtgcggctgtgaccacctcgattgccgcggtggtccattcctcgtcgttcgtattcgaagttctgaacttggtcgtggccgagatgaactactatgagaattccggtcaagaacaggtaccacaagatgaggcacttggaggatgctgtgacgagttcatgagaggtctaggccgtcgtctcccagtcaactttgggttgctggaccgttgtctccttataatgtaattaattatttattttgtacagaactctgattatatagtaaagatgtgacattcgatctaaaaaaaaaaaaaaaaaaggcccctagggcc

SEQ ID NO: 26177 - DNA, 420 bp, Zea mays
  Clone ID: MRT4577_123882C.1
cttccaaattacaaagtgcatatcctaaaaattctgcgtctgtaggaaaatctatcgactctggagggtgtatgtatggcaccaatattggcagtcaggtatttagagcacagaatcaatcttgaacattaacttagacattgtacagagtgccttttattgcgactgagagatccatgacggctaggtcattagccacccgaacagggtattggtccccggcactagctaaaaagcgtgctcctcgtagatccgcccagtagaggagattcagggtacggtaaagaagatggatttcataaagtcaatgaaagtcatgatgtttggtccaaagccactattgatagtaagcaatcatgcatggccggaactggattacgaacctagatctgatactttcccagatgtgcagaatgagaa

SEQ ID NO: 26178 - DNA, 390 bp, Zea mays
  Clone ID: MRT4577_123883C.1
cggacgcgtgggcggacgcgtgggcggacgcgtgggaaaaaaaaaaaaaaaaaaaaaacggaaaaaaaaaaagagaaaaaaaaaaaaaacaatataaaaaaccacaaacaaataaaaacgaccatccatctaaaaacccctactttacggccccctacattcaatacactaaccttcattttgcccacctaaactagtacactcccccacttttccaacctaatcaccttgcaaaaccttcccctttccccacttattccccttgctaaaaatccccctttttccaacttccccaacagctccaaagtctgaaccgacagtgcttcccaccctttccccagccttaatgcccaataaaacccccccttaaacgcacctttaaacctgcac

SEQ ID NO: 26179 - DNA, 508 bp, Zea mays
  Clone ID: MRT4577_123884C.1
gtactttattgtgattttttgaaaataataacaaatttcaaaaaaaaaaaaaaaatgaagatccaatccgttggcaagctttccatccccgacaaggtcaccgtcaccggcaagggccgcatcatcaccgtgaagggtacccgcggcaccctcaccaaggacctcaagcacctcaacctcgacattcgcgtcaacgccaagaagaagcttatcaccgtcgtccgctggttcggccgccgcggcgacctctgctgcatcaactccgccatcgccgccgtcaagaacctcatcaccggcgtcaccaagggcttccgctataagctccgcttcgccagcgctcacttccccatcaacgtcaccgttgagggtcaagaagtcgagatccgcaacttcctcggcgagaagcgcgtccgcaagcagcaggtccgcccgtccgtcaaggtctaccgtaccgacgtcaagctcaccaaggacgagcttgttctcgagggcaactccatcgacgacg

SEQ ID NO: 26180 - DNA, 149 bp, Zea mays
  Clone ID: MRT4577_123885C.1
ggaaagcaagactgcaaactacatatttgaggtgaatgtgcaatatatctattatttgatttaacccctaaaatctggggaaataataaccgtcagtttataattcttttgtttggtcacttgtcttttacaaggaacttgatggttaa

SEQ ID NO: 26181 - DNA, 128 bp, Zea mays
  unsure (1)..(128): unsure at all n locations
  Clone ID: MRT4577_123886C.1
ctcttctcacngatgacttgcatattgcacatattgtagagacatctctgtgcacggaatagacctgtagtgttattaacatgacatccatatggcacatattgtagagacatctctgtgcatagaat

SEQ ID NO: 26182 - DNA, 506 bp, Zea mays
  Clone ID: MRT4577_123887C.1
cgtaacgcaatgtttgcctcttctgtgcctagcgccgcgcatcttgctccggtaacctagaccagggcgacctcccaggcgcagagacaaacctgccgctctcccgcttcgtccttttcgacctgcaaaaggggtgtttgacgctaacgaactctttgtagcgggtgattgacatttgagcagggggtttgcagtgcaataactacccttgatgggacctcgtgtggcataaagagtgcaaggtctaccgggagcaagggataggctgaacttgctatacatactatactgccatgcttgagaaaattagaattcggaggcatctcgctgagcaaaagggcacaataatgctgacattctttcctgctgttgcacaagggtagtatgactatacgcagaagcagctctttgctctgacatctactgaagctggaagcttggtaagtctcgggcctgctgaatcctgcgaattgtcccatggctcctctatgcggtcaagtcttgaa

SEQ ID NO: 26183 - DNA, 193 bp, Zea mays
  Clone ID: MRT4577_123888C.1
cctttgtcaacaacagcaacaacaacaaaaacaacaaagagacagcttttttccaggaaactcacatgtcctgggaggattacaggtgcagattcactttataggaacagcttcagcttcagtgatgaaaaactgaattctccaacagactctaccccagctcttctctctgccactaacacttctcagaaag

SEQ ID NO: 26184 - DNA, 601 bp, Zea mays
  Clone ID: MRT4577_123889C.1
gatattttattcttgctggtgctctgtcccctctctcgctctgggtcgccgtcgccgccctaagccacgtgctgaggctttcgatggtctcttcgccggcgacgatcacccagcagtgtctgtacaaatggctgatggtgacgacatccagcctcttgtctgcagatatggcactggaatggcaaggctggctttgctggcgacgatgcaccaagggcggttttccctaccattgctggccgtcctcgccacactggctgcctcggcacggatgtcacagaacgacccatatgttgcctatgacgtagcatgtccaacgagaggtattcttacgctcaagaacccgattgagcacggtattgtgagcatactgcggatgacatggagaaaatctggcatcatactttctacgacgaccttcttgttagcccagacgagctccctgtgttgctcaccgacgctcctttgaacccgaaggcctacagggagaatatgacccaaattatgtttgagactttcaatgttcctgccatgtatggtgcaatcctagcggcgctcttcctctatgctaacgggcgtactactggtattgtactccact

SEQ ID NO: 26185 - DNA, 456 bp, Zea mays
  unsure (1)..(456): unsure at all n locations
  Clone ID: MRT4577_12388C.1
cgcgtgcgtgtgctgggctggtattacacggtcgaccttagcgttcggtgcctttcttgcacagtttctatcactagtttgtttattgggcggagacacccttggggttgagggcaccatgctncgagcacgtgcttgatgtgagcgtattgcaggaacctattgcgctggggtgctgccttgcttggccgggtttatctacaagcactggttgcgtggcagcaattgctgttgctgtcagaagggggccacctatgggtggggcactctgccggcttctttcaatagcgttgcttgtgtggtacccattgctttggcgagcgtaggtgggttgcatggacagcgctgttgcaagaggttctggggtcggtcactcatcttggcgtggggaacggtgccgtctgcgtgcaccaacaacaactgcttttatttaggccgtttgctgtgggcaatggg

SEQ ID NO: 26186 - DNA, 104 bp, Zea mays
  Clone ID: MRT4577_123890C.1
gtgtgcttcaattgacatcgattcaggccgatggcatgttgatgataagggtacaaccatggagaaacatactgagatggctctccataagtagtctatggttt

SEQ ID NO: 26187 - DNA, 316 bp, Zea mays
  Clone ID: MRT4577_123891C.1
ggggcagcagttaattgcccctttttttttcaccattcacaaatggacatacagccagtggtgttcgagcatccgggcccaaaatgcttttgctaacagttttggagggggaaagaaaacaaataacggaaatttaaccccagcccacagatgacccaatttcacaaattttgccgtgaccgggagttatttacgaaaaactggcgctcaataaaagaaaagaattggacccgacttcccataaatccggggaaaaggccatgaaaccaatttgttaaatttattcaacccttgccaaaatattggaaccctgatc

SEQ ID NO: 26188 - DNA, 596 bp, Zea mays
  Clone ID: MRT4577_123892C.1
attgggaccctcgaggccggccgggaaaccattcctccttctcgcgatccaatctcccggtcgcggccacactgagggagagcgagaacagacagacaccgatcgcgcgcgggagatgtcgatcgtgactcgccgttgggggccgcgagaccgtcggcgtcggatctcagccctataccttctccggagtcggtatcaccgttctccatcatcactgtccgatctcgtctgggcatgcatgacaatgtctctcactcactgtataacattctcatcgtcaggcgcctacttctcctgcaaagagctcttccatgaacactcattgtggccatcgtctggacatttgttgaaaataaagacgcagatgatatgaaacttcacgataccatcctcgctggagtgttgacttttcaaaagggtgatgaggagcctctttcctccgactactttgacatcgcaattattctaattgaccgtgtatgctaacttctaagccatcaaagatcgaggatttcttgaaacaggtgcagaatgtcggctgctcataactcactgctcttcacaagaatattggcgtcacttatcagcagccagcc

SEQ ID NO: 26189 - DNA, 287 bp, Zea mays
  Clone ID: MRT4577_123893C.1
cttcctgttctcaaaccaacctagccaattcgccgcagcctctcaccctcgcgagtcccgacctcccgcagccgccgcacagatggcacccaaggcggagaagaagccggtggccaataagcccgcgtgaggaggagcccgcgacagagaaggtggagaaggcttttttctgggaagaggtggtaggcctataaatgctttccggtttttattaccaaggagggcggcaagggcaagacggggaaaaagaaggctaagaattccgtggttgacctactagatctaca

SEQ ID NO: 26190 - DNA, 581 bp, Zea mays
  unsure (1)..(581): unsure at all n locations
  Clone ID: MRT4577_123894C.1
gttttgctgctctccgtcctttggctgggggggcgcngcntcaggcgaggcccccctcgcgtgtgaccgngatggcgctgccgnntcaggggaccgttgnttaccccagcttcaagctcgtcatcgtcggcgntggtggttccttggtcaactacctttgtgaataggcttgggggggtgggggagtttgnngangaaatttgaaccacccttggtgtggaagttcatccgttggatttcaccactnactgtggtnagatcaggttctactgctgggataccgcagggcangaagagtttggtggcctccgggatggttcctatatccatggcccgtgtgcgatcatcatgtttgatgtncccctcaggcttacttacaagagtgttccttcgtggcgtcgggatctgtgcagggtctggggtgtcatccccattgtcctctgcggttctccggttgatgtgcagaaccggccggtccccgcccngcgtgttactttcccccgggcgaagcatctgccaggctgtgacctttctgccctgagctcctccggctttggggaaacctttcctgtgccttgcca

SEQ ID NO: 26191 - DNA, 743 bp, Zea mays
  unsure (1)..(743): unsure at all n locations
  Clone ID: MRT4577_123895C.1
aattcggcacgaggcccggctaactcagtagccccagcaagggccaattcctggcatcctctccgatatctcgcagcacctgggacacatccgccacgccttcttcgaagatagtaattgcgatgtttccacaaccaccaagccactaaaatcaccacagaattgaactcatttccctgcggtttggggactcttctctctgcttgattccaccaatcctgaaaattgacctccctgggcattgggctaaggtgctgtaagttgattagagaaagaacttgaaaccagacctgtctaccaaacgcacaggccaccaacaaatgctgaactgtttcctctttctgatcacataacaggcaaagttcaagatgctcaagtcctcttctagcaagccagtccacagtccagcacctattgaggctcgcaagccaaatgaaaaacttacatttcggagggccccaggttttccaaacccttttagccggtttaaaggctactgaccctacgaagaacctttcatatgctgacttggaagagtagcacccggaagcagaaggggtccaaagatgcacgtcttgtacacccggagccaaattgaactcatttangatgacctagagctgtagaaattccatctacgtttgagcattactgcacctcttatatgtctgacaccaacaaccattggtcatagtgtcctgtactgtttgtatctgctgaaccttactggggatgagcttgat

SEQ ID NO: 26192 - DNA, 251 bp, Zea mays
  Clone ID: MRT4577_123896C.1
aaaaagtgcatataggagaattagttcggatacagagcggatagaaagaaagaaagaagtgattgacttaaggatgcctcagaggtataagattgggtatgagaaaagcgtagggcacctccttgaacaatttaagagttggggcacattacttggtgcagtacatcgtacttgacaacccaataggagcggcaatggaagttctacagggtttggtggacaccccgttggcccgaggcctagctttgtgt

SEQ ID NO: 26193 - DNA, 644 bp, Zea mays
  Clone ID: MRT4577_123897C.1
ctctctcccccctactacgctggctgctgccgctgcaggctgcacgcaccctaaagcagcgagcctttccacctctcctcctctccctgccaccccacccacacaccaccgccaccaccccgcctcggcctcggctgcggcgccctgtgtctccgcctctccggaggggcagcagccgccgccgccgccgccatgtccgggctgtacggccagcaggggttctccccttccaggaacctatccccccagattagaagcaacccagatgtcgatagccagtacttggccgagctgctcgccgagcaccagaagctggggcctttcatgcaggtgctgcccatatgcagcaagctgctgagccaagagattatgcgggtgtcaaactctgcccataaccctggattcagtgatttcgatagacatcgattcagaagtcctagtccaatgtcttcaccaaatccaagatccaatctctctggcaatgggttcagtccttggaatggactacaccaagagagattaggctttcctcaaggaaacagtatggattggcaaggagcgccaccaagccctagctctcatgtcatgaagaagattctacgcttggaggtcccagttgattcttatccgagtttcaattttgt

SEQ ID NO: 26194 - DNA, 491 bp, Zea mays
  Clone ID: MRT4577_123898C.1
ccccccccccccccccccgcgcggcgtggcgcctcgccgagctctgcgtggcggcgctgtctggccaccacggtcacccgcacccgggggcgccgcccagcgcggcgcacccgccgtggaccggcgtccacccctgctccgccgcgcgtccggtccccgtcgcgcggatgaagcgcgcggcagcgcaggcctagctagcttgccgcgatcgacgacaggcagagttggttaccgctgctacgccgcctacgcgtgacgccgtgacgcctgaagtgaagagacttgcttcgctcgtgtcgatctcggcatgtagcagcgaatcatgtaggacagggggcgctctcgctgtggtgcccagtgcgcaatggcatattgcacactccagtgaccgtacttaaatcttattgtacttgtgtctgctgctactgataactaatgaaacattgctatcaaatatgaccgtctaaaaaaaaaaaaaaaaaaacaaaaac

SEQ ID NO: 26195 - DNA, 572 bp, Zea mays
  Clone ID: MRT4577_123899C.1
actattaggggggctgctgctcctgctggtgccgccgctccagttactgccgggtccacccactcgtcctctaccctgcagatgcaaagaggccacgctgaggtaagtctacgttcatctccatagatattctattacttgttttacaaacacctccaccttttcttatctatttgactgtttgtaattattcactatttaataaagtaattaaataggcagtttttaacttaaagcatacagatttacccagaaaaagtttaggtaaaaaaggtgaacagcaaaatagaattagtcatcataaagaagttacatttacccctgttggcatttggattgcagttcattttctatttcttaaattggacaacaggagatcatgtatctataacaaaatataaagagccattagtttaatgtccaatgtaacctagagggggaagatgttgtcttttgaattgagtcgggatcagaacttcagaaatctctcacgttttctcgatgtcaataagagtgagctgtactaatgccatctactttaaacctaccattgaaattttgaatagagctag

SEQ ID NO: 26196 - DNA, 776 bp, Zea mays
  unsure (1)..(776): unsure at all n locations
  Clone ID: MRT4577_12389C.1
cggcggctgttaaagcagatttgatgcacacggcatgcaaatcctgcaggctgttgcttctcagcagggccaaaagctgtgcctttggcctagcagtagctaccactagtaccaggagatcttcccgtcccaacatcttcgacagaggaatcagctgtgggagctcgtgaggcagagggcgggcagagacaagatggagaaggaacacatcaagatggccatgctgaggcaagagcaaacattcaggcagcaggttcacgagctgcaccgcgtgtaccaggttcagaagcagctgatgacgcagacgcagattacccagcaccaccagcaacggtgtggtagctcaggcaagacggaggaggaggaggacttcaacctggagctgacgctggcaacaggggctggaaggacgcggcaggagaagccatccacttcagactccgaagcgaccatgtcgtcgtcgacatctgcagaatcagagcaagctcagaggttcatgcccagttccaatgtaacaaacctaaggttccagggcgagagcaataggcatgatgatcatcaggtcatgcagtctgcttggcgctatcaatgtttaagtctcaagatggcgtgaagggattaattagacagggttggcatgggagtgccctaaacaaaagcaagtgcattgctgcatgtatgtatgtgaaaaacaaaaaaaaaaaaagtccctaaacgagctcaaaaaagaaggaaatgataggcaaactanaatggaccagacgagaagaaaagat

SEQ ID NO: 26197 - DNA, 303 bp, Zea mays
  unsure (1)..(303): unsure at all n locations
  Clone ID: MRT4577_1238C.1
tgtctcgcncatttcgccgctgggcgctggctcacaccactggctttctcaagttttcaagccccgctgcatcttagccagtttgagatgagcagagcgatcaatcaaatcatctcagagtgctacagactagtgatggatcttgattctaaattcttcaagaggtaggatgctaggggtagcatgttgcttgcttactcccatgtcacagcaagcagatcgcagttgttcctgtggatgctacaagcaaacactttggatgcatgctactntgctatgcattttgtagcagaggataaagtt

SEQ ID NO: 26198 - DNA, 305 bp, Zea mays
  Clone ID: MRT4577_123900C.1
tcggtgtttagaccattagctttatctactgcagagcgcataagaacccgggcgacaccatagggtgtgctcgttttcctcgctttcctggcttttgttgtgagcgtcatctctgcttactagcgtgttttttgcttactttcttcttcttcttttatttttctttgttttttgtttgttttttttcctttcttctgtttttcatttttcttttttttttctctggtttatatttttttttattgatctatttgttttttttctcttttttctttctttttttcgtatttacttctatttgcttt

SEQ ID NO: 26199 - DNA, 1786 bp, Zea mays
  Clone ID: MRT4577_123901C.1
cacaaacatacgcaccctctcgaccggttcgactcgggaacttccagcatcctatcagataccgaaatctccaactcccgcatcgcatcgaaccttcggcctgcaagcgaattcgtcctcccctctcctaccggcgcgaattcaaccgcccgcaaagccctaggccgatgcgtccgatccggctacccgagccgccgggtgtcgacggcatggagacgcccgagatcttctctggcagcggcactggtggcgccgccgtcgttcgccgcgccgtcctcataggcaacggctcccccggcgcagaaaaccagtgtctcggcctcgcccgcgccctcggccttgccgacaacctcacattctaccgtgtcacgaggccgagaggagggatcaatgagtggctgcactttctccccatttccatgcacaagtttatagaccaaatactcaggcagttcttccggaacacaaggttcgcaatagtggttcaggggaggaagccgcgtgtgctgaatggtgcatcagttgggttgtctgcagttctggaagcaaacgtcaagaagattgttactgtagcacgcgatacgtatgagaaggaaggtccgacgttagtcgttgcttgtggctgggacaccatatcatattcaagcttgataaggaaagtagcttcagataatgtgttcgtcatccagatccaacacccacgatctcgccttgataggtttgatttagtggtgactcctcgccatgattactatgctttaaccgctagtggacaacaagaagttccacacctgttccgcagatggattactccacaggaaccacccaggagtaatgtggtacttactgttggtgcactacaccaggctgattctgctgcgctacggcttgctgctatagcctggcatgatgaactcgcccctttgcctaagccgttgctaattgtcagcattgggggccccaccaggaattgtaaatatggtgtagatcttgccaggcagctcataacttctctgtataatgtgctagatagctgtgggagtgtcagaatctcattctctccgagaacaccatggaagggttgctgatactatatttaaagaatttgctggacatcccaaggtctatatttggaatggtgaagaacctaaccctcacatgggacatcttgcatgggctgatgcttttgtcataacagcagactcgataagtatgttaagtgaggcaggtagcacagggaaacctgtttatgttattgggaccgaacactgtaaatggaagttttcggcttttcacaagactctacgggagcgaggggttgttcgcccgttcactggattggaagatatttcaaatagctggagctaccctcccctaaatgacgccattgaagtagctactcgtgttcgtgaagtgattgcagaacgagggtggacagtgggatgatgtgatcataagtagctctctgttattctgtctaactttggtccagatatgatatatacggtaaactatagagtttggttagcatcactgtggattcagtttgtgtcgtttggaaaaaaaaaggagagaataacatagccatggaatggcctgtacaaaaggtgaccctctctttcatggtacacccccaagccaaaattttgagtaactgcacagctccgggagatttttttggctactggcaacatgttgcctgatgtaaatttaagctgctagaaggaattggagtaaatagagttgataatgagaaaatttgaagctgatgcaacgtttcgggttt

SEQ ID NO: 26200 - DNA, 1147 bp, Zea mays
  Clone ID: MRT4577_123902C.1
attgggacctcgagccggccgggaaacatcggtgcggtgcggtgcggccatggttggccttggccttggcgactccaacacacttgcccaaccatgcacacgcgcatggtctgccccctctgccctttccccttgcttgtatagttagttgccaattgccatcgccaagccaaccacctcctctcctcgctcctccaaccaaacaagccaccccccacgaaacccgcaatcccagccgaagccggacgatgaagagggagggatggcagcacggcgccgtccggggcagccgcagcaaggtgctgaggacggccgccggcgacgacaactccgacgccgacgcggtcgtggcggcggcgagcggcggcggcgaggaagccgacgaacgcgtcccggagcacgggcaagtgccggcgggcccggtgcgcgggctgccacgcgcacccggtctccaaggcgcgcgacaaggccaagggcgcgcgcaagctgcgcgcctgcgacgtcgcgctcaaccaccgcctcgtgtcctggcgcgtcgtcgaccagggccccgggtacagcggcgcgtccgcctcctccctgctggcgtacctggccggtggcagcagctggcacgaggaggaggaggacgacgacgagggcggagcggcgcccgacggccggctctctgacctctacgacctcttcgtcggccgcgggcaagaggaggacggcgtggatgctgtaggagagattcaggcagttgaagagcaggggctgctggatgccaaggatggcgaggaggaggaggtggaggacgacggcgacgacatggggttctgcatggttggcaccaccatcgcgctggagttctccgacggcgaggaggactggatcgtggtcgaggagatctgattcccatctcgtcgtcctcggtttggcaaattgggaatcgagatcaatctcgtcgattccaatttgcgaataagacatcctgcccatcctctgtcggtgctgtggtgtgtatgtatatactactcctgctatgttctgtgtgcatatggtaatctgatcgtggtcatggattattacatgattcaaaaaaaaacatgaatgaatttctcatctgtgaatgaatgaataataaagttgacaattggattcttcc

SEQ ID NO: 26201 - DNA, 1193 bp, Zea mays
  Clone ID: MRT4577_123903C.1
actcttgcttgcttgcccacacttctacctccaatacttgtaccccaagtcccacccaaccgagaaccgaccaaccaaaccaccggtgcggtgcggccatggttggccttggcgactccaacacacttgcccaaccatccacacgcgcatggtctgatggtcctgccctttccccttgcttgtatagttagttgccaattgccatcgccaactacctcctctcctcgctcctccaaccaaacaagccaccccccacgaaacccgcaatcccagccgaagccggacgatgaagagggacggatggcagcacggcgccgtccggggcagccgcagcaaggtgctgaggacggccgccggcgacgacaactccgacgccgacgcggtcgtggaaacggcggcggcggcggcgaggaagccgacgaacgcgtcccggagcacgggcaagtgccggcgggcccggtgcgcgggctgccacgcgcacccggtctccaaggcgcgcgacaaggccaagggcgcgcgcaagctgcgcgcctgcgacgtcgcgctcaaccaccgcctcgtgtcctggcgcgtcgtcgaccagggccccgggtacagcggcgcgtccgcctcctccctgctggcgtacctggccggtggcagcagctggcacgaggaggaggaggacgacgacgagggcggagcggcgcccgacggcgggctctctgacctctacgacctcttcgtcggccgccaagccgacggccgcgggcaagaggaggatggcgtggatggtgtaggagagattcaggcagttgaagagcaggggctgctggatgccaaggatggcgaggaggaggaggtggaggacgacggcgacgacatggggttctgcatggttggcaccaccatcgcgctggagttctccgacggcgaggaggactggatcgtggtggaggagatctgattcccatctcgtcgtcctcggtttggcaaattgggaatcgagatcaatctcgtcgattccaatttgcgaataagacatcctgcccatcctctgtcggtgctgtggtgtgtatgtatatactactcctgctatgttctgtgtgcatatggtaatctgatcgtggtcatggattatacatgattcaaaaaaacatgaatgaatttctcatctgtgatgaatgaatataaagttgacaattggattcttc

SEQ ID NO: 26202 - DNA, 602 bp, Zea mays
  Clone ID: MRT4577_123904C.1
ggccgcttttttttttttttttttccgaagcaacgaccaggctgctgatcgatagatagacaatagactgatagacaagaaagaagagtgatctttggctttgtacaaccacgcatcatggagattcaactcgactctccactccttttgcatgtcttgctaaacacacacacacacacacacacacacccctactaggggcacaaaagaaaaagaacaaagcgaccacacatcattccacgcatgcacaaagctttcctctctctctccccctcgttccaagcaagcagcttcatctttctcctcgccatgtctctggtttgctgctagctgctgctccattgttggcagacaatgctaggggagaaggtacataatactcaacaccacacgcccacacccatgcagggacgccttggagaagaaataagaccccaaaagaacaaaagaatttgctggcgcatgcacgcacgcacagcacaaggctgcgatagacgtctcatcatcagtcgttcttggccgagccgagccctctcgcttctgaccccttcatgatcctcagcctcgtacgtctttcccggccggcctcgaggtacccaatg

SEQ ID NO: 26203 - DNA, 437 bp, Zea mays
  Clone ID: MRT4577_123905C.1
ctggggttgcacccacattgaagacagattatctgatagaagggaatgacgtggaaaccacaatggacagatctactaaccagcttcagttcagcggacgacctacagacgtaaagatctactgaacacgagcattaaccatcacagctgtttatgcgccggcccctctatgccttattgggggacttgacggccttcttgggcgacttggtctccgagggcgccgccttgtcagcggactttttgggcaggagcaccaggatgatggtggggaggactccggcgtgggcgatggtgacaccggacagcaggttgctgagctcctggtctgtgcggatggaaaggagcacctggctcgagatgaggcgggttttcttgtggcccttggaagagctggcggccagctccagcaccttggcggtcaggtacttgaggac

SEQ ID NO: 26204 - DNA, 539 bp, Zea mays
  Clone ID: MRT4577_123906C.1
tagacaatagactgatagacaagaaagaagagtgatctttggctttgtacaaccacgcatcatggagattcaactcgactctccactccttttgcatgtcttgctaaacacacacacacacgcacacccctactaggggcacaaaagaaaaagaacaaagcgaccacacatcattccacgcatgcacaaagctttcctctctctctctctccccctccttccaagcaagcagcttcatctttctcctcgccatgtctctggtttgctgctagctgctgctccattgttggcacagacaatgctcggacgcgtggggcataatacttaacaccacacgcccacacccatgcagggaccccttggagaagaaataagaccccaaaagaacaaaagaatttgctggcgcatgcacccacgcacaggacaagcatgcgatagacgcctcatcaatcatcatcagttgttcttggccgagccgagccctctcgcttctgaccccttcatgatcctcagcctcttgcaggtgctgatgaacatgc

SEQ ID NO: 26205 - DNA, 1566 bp, Zea mays
  Clone ID: MRT4577_123907C.1
ggccgctcttttttttttttttttggaacaattcctcccctgcaatttcaacactcgcaattacagaagcaacgaccaggctgctgatcgatagatagacaatagactgatagacaagaaagaagagtgatctttggctttgtacaaccacgcatcatggagattcaactcgactctccactccttttgcatgtcttgctaaacacacacacacacacccctacaaggggcacaaaagaaaaagaacaaagcgaccacacatcattccacgcatgcacaaagcttccctctctctctctctctctctctctctctctctctctccttccaagcaagcagcttcatctttcgcctcgccatgtctctggtttgctgctagctgctgctccattgttggcacagacaatgctaggggagaaggtacataatactcaacaccacacgcccacacccatgcagggacgccttggagaagaaataagaccccaaaagaacaaaagaatttgctggcgcatgcacgcacgcacagcacaagcatgcgatagacgcctcatcatcagttgttcttggccgagccgagccctctcgcttcagaccctttcatgatcctcagcctcttgcaggtgctgatgaacatgccgaagggcacgtcgccgacgagcatgaggtcgccgtccttgtcctcgtaggtgacggcgaagtcggaggggttgacggcgggcgcgtcggcggcgccggcgccggagaagcagaggaacatggcctccagcgcctcccgcagctcgcggtagcccttgtacatctttaggtccaccttcctgaggtagggggcgccgtccatgctcaccttcacgaacagcccgccggcggccggggcctcctccgccagcgctgccgccggcttgttcttggccgccgcctgctgctggaagcagctcttcctgtacgacctcaccggcggccatcccaccagctgagccttggcggccggcggcggcgcggcatcggtgtcggtctcgcagtcgcgcttcttgggcgcatcctcgggcccgctgctggcgacgacgtcgcgcttcttgcctctgggcgtcgacggcggcggcggcggcgccttgttctgggactcctcggcctcctcctcctccgtgcccggcaggccaagcctgagctccgtcgccctgaggctgtcaacgtcgtcgtcggccttgaatccgtagcccgctgccgatgctgcggcgacctccattggcgtgtcttcttgcttcttccgcacggcccgcgtgggcaataaaggcggtggttgcagcaaccggcgtcgagaggccgacgagctgcgctgtgctctgtcttggtccttgctggtgatgcccttggcgcggtcccggccggcagattcagattatggtcggaatgtatcttgtaccacagagaaattttatccgtgctcgtcggtgtagaataaaaacggcacccttgcacatattgtacattacatcgaaacacatagctttgttttctacaaaattgaaaactcaaaagtttcagaagtggatgccagtagttccc

SEQ ID NO: 26206 - DNA, 1384 bp, Zea mays
  unsure (1)..(1384): unsure at all n locations
  Clone ID: MRT4577_123908C.1
ctagttcctggatcgtgttattcggatagataactcaactcaccagggaggaaaacaattcctcccctgcaatttcancactcgcaattacagaagcaacgaccaggctgctgatcgatagatagacaatagactgatagacaagaaagaagagtgatctttggctttgtacaaccacgcatcatggagattcaactcgactctccactccttttgcatgtcttgctaaacacacacacacacacgacccctactaggggcacaagaaaaagaacaaagcgaccacacatcattccacgcatgcacaaagctttcctctctctctctctctctccctccctccttccaagcaagcagcttcatctttctcctcgccatgtctctggtttgctgctagctgctgctccattgttggcacagacaatgctaggggagaaggtacataatactcaacaccacacgcccacacccatgcagggacgccttggagaagaaataagaccccaaaagaacaaaagaatttgctggcgcatgcacgcacgcacagcacaagcatgcgatagacgtttcatcatcagttgttcttgaccgagccgagccctctcgcctcgggccccttcatgatcctcagcctcttgcaggtgctgatgaacatgccgaagggcacgtcgccgacgagcatgaggtcgccgtccttgtcctcgtaggtgacggcgaagtcggaggggttgacggcgggcgcgtcggcggcgccggcgccggagaagcagaggaacatggcctccagcgcctcccgcagctcgcggtagcccttgtacatctttaggtccaccttcctgaggtagggggcgccgtccatgctcaccttcacgaacagcccgccggcggccggggcctcctccgccagcgctgccgccggcttgttcttggccgccgcctgctgctggaagcagctcttcctgtacgacctcaccggcggccatcccaccagctgagccttggcggccggcggcggcgcggcatcggtgtcggtctcgcagtcgcgcttcttgggcgcatcctcgggcccgctgctggcgacgacgtcgcgcttcttgcctctgggcgtcgacggcggcggcggcggcgccttgttctgggactcctcggcctcctcctcctccgtgcccggcaggccaagcctgagctccgtcgccctgaggctgtcaacgtcgtcgtcggccttgaatccgtagcccgctgccgatgctgcggcgacctccattggcgtgtcttcttgcttcttccgcacggcccgcgtgggcaataaaggcggtggttgcagcaaccggcgtcgagaggccgacgagctgcgctgtgctctgtcttggtccttgctgggaag

SEQ ID NO: 26207 - DNA, 1356 bp, Zea mays
  Clone ID: MRT4577_123909C.1
agcaaagggcttttttttttttttttttttttgaagcaacgaccaggctgctgatcgatagatagacaatagactgatagacaagaaagaagagtgatctttggctttgtacaaccacgcatcatggagattcaactcgactctccactccttttgcatgtcttgctaaacacacacacacacacccctacaaggggcacaaaagaaaaagaacaaagcgaccacacatcattccacgcatgcacaaagcttccctctctctctctctctctctctctctctctctctctctctctccttccaagcaagcagcttcatctttcgcctcgccatgtctctggtttgctgctagctgctgctccattgttggcacagacaatgctaggggagaaggtacataatactcaacaccacacgcccacacccatgcagggacgccttggagaagaaataagaccccaaaagaacaaaagaatttgctggcgcatgcacgcacgcacagcacaagcatgcgatagacgcctcatcatcagttgttcttggccgagccgagccctctcgcttcagaccctttcatgatcctcagcctcttgcaggtgctgatgaacatgccgaagggcacgtcgccgacgagcatgaggtcgccgtccttgtcctcgtaggtgacggcgaagtcggaggggttgacggcgggcgcgtcggcggcgccggagaagcagaggaacatggcctccagcgcctcccgcagctcgcggtagcccttgtacatcttgaggtccaccttcctgaggtagggggcgccgtccatgctcaccttcacgaacaacccgccggcggccggggcctcctccgccagggctgccgccggcttgttcttggccgccgcctgctgctggaagcagctcttcctgtacgacctcaccggcggccatcccaccagctgagccttggcggccggcggcggcgcggcgtcggcgtcggcgtcggtctcgcagtcgcgcttcttgggcgcgtcctcgggcccgctgctggcgacgacgtcgcgcttcttgcctctgggcgtggacggcggcggcggtgccgccttgtgctggggctcctcggcctcctccttctcctccgtgcccggcaggccaagcctgagctccgtcgccctgaggctgtcaacgtcgtcgtcggccttgaatccgtagctcgctgccgatgctgcggcgacctccattggcgtgtcttcttgcttcttccgcacggcccgcgtgggcaataaaggcggtggttgcagcaaccggcgtcgagaggccgacgagctgcgctgtgctctgtcttggtccttgctggtggtgcccttggcgctgt

SEQ ID NO: 26208 - DNA, 765 bp, Zea mays
  Clone ID: MRT4577_12390C.1
aatttcattttcccgaaaaatatctaaatgattaccaatcaaatcaaccatatcccttgttagcatgtcaactagattcatctctttcaccctgcctgataattcaccaagagcatgaagtactaagccacgtatcagttctggtgcctctctgtcgggagtaatatctgagtaccacaagtctaaaacaaagtctcgtaaaattttctcaatgaaactttcaaaagcagcctcaacagaaggtgaaccaactttccttctccatctggagactggtggtacagtcgaaaggcgatgatcatttgcagacaactgtctctttgaggcttgagacaaatgtgtctgcttacgtacagggtgttccctccaacggaactccactttgaaggagagatatcgcagaaatgcaagtataaggattgacatgggcacatttgtccacattgatttacttgtatgcgtgaggaagtaggagacggcgaagatgcagagcgcccaccagacggtgcgcagctttgcctcctcgatcagatcgtcgacgctctccatcctcttccgcatctcggcctgcgcgcgcgccacggcgcggcccggcccgtgggaggcggcgagggatccggtgggaccgattaacggatgcggaatccccgtaacgagctccgccttcgccggagaagaaggccgtgccgggcggtgccggcggcgactcgcctccacggcgatttttatcccacgcgtccgcccgagcgtccgcccccgcgtccg

SEQ ID NO: 26209 - DNA, 198 bp, Zea mays
  Clone ID: MRT4577_123910C.1
ccgcccactcctccgcccactcatacaaagacacctgcgctctaattaacacattcactcaactgtcccttccactaaacctacaacaactccttcaccatgggcaggtgtcctcatcacatccatcatcactcgtgggggcgtccccaccgcccaattctactacatcccatcttcctccctcacctgcttcacccc

SEQ ID NO: 26210 - DNA, 632 bp, Zea mays
  Clone ID: MRT4577_123911C.1
cgtgcccttcggcatgttcatcagcacctgcaagaggctgaggatcatgaaagggtctgaagcgagagggctcggctcggccaagaacaactgatgatgaggcgtctatcgcatgcttgtgctgtgcgtgcgtgcatgcgccagcaaattcttttgttcttttggggtcttatttcttctccaaggcgtccctgcatgggtgtgggcgtgtggtgttgagtattatgtaccttctcccctagcattgtctgccaacaatggagcagcagctagcagcaaaccagagacatggcgaggcgaaatatgaagctgcttgcttggaaggagggagagagagagagagagaggaaagctttgtgcatgcgtggaatgatgtgtggtcgctttgttctttttcttttgtgcccctagtaggggtgtgtgtgcgtgtgtgtttagcaagacatgcaaaaggagtggagagtcgagttgaatctccatgatgcgtggttgtacaaagccaaagatcactcttctttcttgtctatcagtctattgtctatctatcgatcagcagcctggtcgttgcttctgtaattgcgattgttgaaattgcaggggaggaattgttttcctccctggtgagttgagtt

SEQ ID NO: 26211 - DNA, 209 bp, Zea mays
  Clone ID: MRT4577_123912C.1
acaaaacaagtacacgggcaattttttttgaaaccaccaaacagagggtgttaaaccggtccggtggggcagataaaaaattttcctacccaagggtcaacaacggggacaaccttttttaaaaattgattacacccctttgaaaaaaaagaaaaaaagtttattggttgcacttgtcgttaattacggggaaccattttgtagggggt

SEQ ID NO: 26212 - DNA, 306 bp, Zea mays
  Clone ID: MRT4577_123913C.1
cgcagagttttgatcggtcgttttgtttacctgacctgccaacttccccatgctgctatttttttttgtgaccgagccatctcaataattacagattttagtgcacaagatgtatatgttcaaaaagttggatgtagttgcaagcaaaaaaaaaaaaaaaaaaaaaaaaaaaaaaaaaaaaaaaaaaaaaaaaaaaaaaaaaaaaaaaaaaaaaaaaaaaaaaaaaaaaaaaaaaaaaaaaaaaaaaaaaaaaaaaataaaaaaaaatataaataataataaataaaaattcggggggcccttttt

SEQ ID NO: 26213 - DNA, 264 bp, Zea mays
  Clone ID: MRT4577_123914C.1
tctacacgcgctagtagccagaggatgcggaggagcattactggaaagtcgcgctcgacaccgggcgcagacataagcgtacaaacgatcgtgtagagatccatcggaaggaggatctgatcggcctgcttgtgcgcgtcgacggccaccaccaggactgagcattaggcgtgggaggcgagctctccgaccgatacatgatgcgagaaaaggaggtgacctactcactccggacgcagtagctacggttgaaatccgccaact

SEQ ID NO: 26214 - DNA, 288 bp, Zea mays
  unsure (1)..(288): unsure at all n locations
  Clone ID: MRT4577_123915C.1
cgtccgcnnccacgcgtccgcccacgccgtccgctntgcttctacgagggggatatagnanaggangnaacagnnctcgtccgagnaccatgnaagnagccagcccaccaccnttggtgcctgatgccctggtgcctccaggcccgcttcttggtcatggggcgtctntcgcccgcttttggcctaaagaaaaatgcccctnnggttgagagcaagggccatggcgacatcaaccccggggcagcttcaagtgcctgcacccaactgncaacttcctcctttctccgg

SEQ ID NO: 26215 - DNA, 762 bp, Zea mays
  Clone ID: MRT4577_123916C.1
cgggctggacatttaggttttcatgctgcacagaaatacatacaaatccgatgtgtccactattttgtgttgggtttatgtataatattattttcatgggctacatgttttcacttcaatgcattgtgattgtattgcgatgaggtatgtagatccatgcttttagggttcatcaacactgtgtttcatggggtatatgcacaagtttgttttagatagttcaacattaatttgtaggccgtggtaactaatagaacactgtgtttcatgtagccatggaatcggagaacgaaaagctccgaaaagcactggctactttcctcagagttgttcaaaagcgtagttgtgacatcgttgatgtcgtcaatgcaaccttccagcctttcaactcaccattgttggatgaaatgaaccgagcattagttgagattgacgacctcgccacggatcttgaagacatagcagtgcaaacccagtgggaggtcaacaatatggatcactgtgaagtaaacgaaattccgccacaagaggaggcagtagaggagattctgatagaagatggttcagaagacgggcttctcatagaagaagagtcaccaattaactatgacgaaattgtcggctacgacgatggtcgtgactactcaatcgatgacacatatccctactagtatgtaggttggtctttaataatagtattagtatgtatggaagctgcgtctgtatgacgaaaacttgaaatggtggcacggtttgtatgac

SEQ ID NO: 26216 - DNA, 692 bp, Zea mays
  unsure (1)..(692): unsure at all n locations
  Clone ID: MRT4577_123917C.1
cattgggtacctcgaagccggccggggttgatctctgaactggttgtagacgcaaggcgtgaacactacatgacgtttctgcgctcgatctacctacggatacctgatagagtataaagcgtagctcgnctcgacttgaaaccccaattctcgagggtacaacaccctttcacacctcatcatctccactatcaccttctctgcatgttattagaggcttagctagaggagctgagaccgtcacgagcttgaccgactaatacccaaacctcacaccatcatgacaatgatggcgacacaagtcgaccctcgctatatgacccctccgcttgaagacagtggaacccctaacatcattacatataactgtgaccgctgacgtcgaagcacgcgacctacacctacagttctaccgaaataacatgataggtgaccgcggcaccttgcacaatacagtcgcactatgagattcagtaggagaacacacactgtgacatctcctaggtaatacaggatatcaatacctagacgggcctctgtaatctgacgccttgaactcgatagcaaagctgtataattttttcttaatatgccaagaatatgagctcgaacaatgctgatccgagtgatgcatgacctccaaggtgtatactatatcttggagaactatatcctctgctgacacgatgact

SEQ ID NO: 26217 - DNA, 356 bp, Zea mays
  Clone ID: MRT4577_123918C.1
catcactcctctacaacaaaactatacaggcccccccggtatcaaaataccaaacatcacccatggagaatgatgagacgcctcaaaccagataggaacgccacgcacaaccataagggacccgagcccggaaattctatcacattcacaaactgaagcggtcattcacaccaaacaaccttaaacacctcttatggcctgactatttgaatgaatccggaacacctacgggcttaaaaaaaggcgccgcgatacagaacttgagcatattgtacataagacaagaccgctctggatgaaggaaaactcgaccttagcatttgggcaaaaacagcctacccaccctgctttggggg

SEQ ID NO: 26218 - DNA, 1898 bp, Zea mays
  Clone ID: MRT4577_123919C.1
ccggccggaatcatctccacgcttagttgtaccgtaaaatgaaatgctgcattgtttaggatttttttactcatcgttttatcattctagataacgtgacaattttgaaaacgctccagtgaaacaagccgactgaccgaaccgttgaattgcaatttccgctagaaagccgacgagacaatttcttccgttcgtttcagatcgggcggtggtcctgaccaaggcgctgccggccactggcctctcgcaaccggcgaccgcatctcgaagtagagggtgctggccgccgctctcggaagcgctctggaaggacacggccatggcgatgcgggccgctgcgcgtcaagccatactctctccaccgcttgggccccgcagtcctcgccccttcctctgtggttgttccttgtctatcgctcctcggttggagccgtgccgagcggcgagctccaccaccgcgccggccgccggaaagcatctccctccattgttcagcgtcgcgccgatgatggactggacggacaaccactatcggacgctcgcgcggcttatctcgcggcatgcctggctttatactgagatggtcgtcgccgagaccatcgtgcatcagaaggataacctggataggtttctagcatttccggaggaacaacatcctattgtgctgcagattggtggaagtaaccttgaaaatttagcaaaagcaacagaactggcaaatgattattcatatgatgagatcaacctaaactgtggctgtccaagcggcaaagttgctggtcatggttgctttggtgctcgcttaatgtttgatccagagtttgtaggagatgccatgtcaactatcgcagctaattgtgatgtcccagttagtgttaaatgcagaattggtgttgacgatcgtgattcttatgaagaactatgtgaatttgtagataaagttatctcaaaatctccaaccaggcatttcattattcatgctcggaaggcattgcttagtggtctcagtcccgcagagaatcggaagattcctccattgaaatatgagtactattttgctttgttgcgggacttcccagaaataaaatttactctaaatggtggcataaccaatgttagtcaagttagtgcatccatgagacaaggtgcacacggagttatggttggccgggctgcttataacaaatttgctggactttccagtccatggaacatgctaggacatgtggatggggaaatctatggcaagcaaacaagatacatttctcgtcgccagatacttgagaactaccaagcttatggtgattcaataattgaccagtatggccccagcaggccaaatgtgagacaacttgtcaagccactgttaaacttattccactcagaacctggcaacagcctatggaaacgcaaagctgactctgcattgcgtcattgcaagacagtgaaaactttcttggaggagactcttgacgcaatatcggacagcgttcttgacaagccagtaaacagggaaccatccagtgacgaagaatattttgctagtgtcgattctctgttgccaccaaaatacacgacaccgatgcatgaaagacttgtagccgcatccacttgaacagcgtgtcgggaagcggattgcctgcggtactgcagggtgtagttgggtcactgcgcgtgggccctgtcgcacggggcagtgcccacgcaggggggggctgtgaaaatgatctatgtaattgttgtaacacatatacgtcgccacgtcggggtatatcaatagctgtagacataaccattttgactttgcggtaaaatccttgctcatgcttgcatggaacatgtacccatttttttcatcaggatttttagccgtgaaaaaaaaaaaaaaaaaagcggcc

SEQ ID NO: 26219 - DNA, 283 bp, Zea mays
  Clone ID: MRT4577_12391C.1
ggcccccgacatttatttatttccctccggagggggaggggacccccaaaaaaacatgcaaaaaaacaagaaaagcttctttatgggggggtccccccctttttaaaaaaggggggccgcccggagaaacatggagagacccacccgctggccccttggggaaaaattaaggggatcttccccccccatttttcggggagaaaaccccgccccccttccttgggggggcccttttcccgagacacgggaacccattttttgcagggggggcccccctttggga

SEQ ID NO: 26220 - DNA, 1171 bp, Zea mays
  Clone ID: MRT4577_123920C.1
ggaacttacaatggtgttttaccacttcttatgttgatgaactgctgtcaattcagaagataagtgctgagactatgttgtatagtgtatgggatgctaactcaaggatgtgtgactctatggttataaaaaggaactatgtacaacagctaaggcaagaggtcaaattgggaattgtcttgaaggagcaaatggattaccttgatcactgggcagcgctgcaaacagagcattcttcttctttatccagcgcaactgaagctcttaaagcaagcacattgcgtcttccagtttctggaggggctaaggctaatgtacttactgttaagaatgctgtcagttcagcagttgacattatgcaagcgatggggtcatccatttgccatttgctatcaaagttacaggcttcacactctctggttacagaactttcagctgttgctgctaaggaaagtaccttactcaatgagtacagagaactcttggcaacagcagcagcactacaggtccaagagtcgagcctaaggacacagctcatacaagaaacagagtgaacaggttaaggtcctgtatttctaactaggaagatagaagtaaacaccattcgttagtttcagtgactgctgcatatgtgtacctttgatgtcgttttgtttttcctttgctcttccttttcccccccacttattagctagctcatatttctttacatttctactccccccccccccccctgttcttttctgttcgaacaacttacatggaagataagggaagcaacatggaaatggaatcatggatttactccatgacaaagctgccaatgtggtcttttattgcatcctagaccaatgagccaaaaactgaaagctttgttgtaagctgtaaatctgagcagttatgtgtccttcagtgtaatgcctttggatgtatctttcttagatcgccatcactttagaattagaggctccagctaacagaatacttactattagtgctggtccaagatccaagcaaggggagaccagaaacctctaaccgacactacaacatgacaggtacccgataccgacttcgtcgctaacacttgtaagtactatatgtcctgccaggagaataccatgttctgttcttctcccacttaactctgatggaaacatgttttctttcc

SEQ ID NO: 26221 - DNA, 550 bp, Zea mays
  Clone ID: MRT4577_123921C.1
cattgggaccctcgaggccggccgagacaccttcgctgacatcagaatgtatcctagtcgacgtcgctgacgttccccagtgcccacaatgacgccatgcatatcccacatgatgactacctacattgataccttaaatggaagtgtgcgcctgaccacttctgtagatggaacgggtgccaatctgagattcaacggaattgcacacatcaccaatgcaggatcatatgctgatctatgacaaccaaaaatcgcagctgccacggcgacgagaacatatgcaatagagaccgcccatcctattgtgtcttcctcttccctgaggtcagctctatgtacttctgatagaggttaacgcaaaatcactatatatcaacctacctcgcacatgcaatgaagtttcctcatcctgagactagggaggctatagagagagagacagaacgttcctggtgatgcacacacgcaaggcaaaatcctcgagcgcagatgagttcttccccatatgatgttaactgatatagaacatcactacgtgatgtattacgtt

SEQ ID NO: 26222 - DNA, 851 bp, Zea mays
  unsure (1)..(851): unsure at all n locations
  Clone ID: MRT4577_123922C.1
cgggntaagttgaatggcccatgagcgtaggccatgcttccagtggagtcacagaatggaaatcctcaaattcttcggagcaaggtctgggtatgccaccaattccacctagccaaaaccagttttcttctcgtgggcggatgggtgtccgatccagatatgttgacacattcaataaatcaggtgcttctggagcggtgccatcatataacaaaccagctgctccatccgtgacaccaccagctggtgccaagttcttcataccgactgcagcacctgttgctgcagatcagatgatgccacaccaagcagcagagatacacagtgaaaccatgcaacaggatgagagggcagcctcaccgcctgctggaacatcattctcttcaaccccaccacccacacaattttcatcgcccccaccacacacgcaattctcgtcaccaatgcaatcaacaatccatcggcaatctagtatggcgaacatctccaccccttaccagagttccggggtatcatcattaagcagcgacacctcattctcaaaatcacgagccgcatcctggagtggaacatactctgagcagttcagtgcttttgcgggcacaagatcacctgatggacagacggtgcgctcaccactcatgcctggcaaaccatcacacagtcgttccaacagcaactcatcagtgcagctcaatggattgacagaggatcttcatgaggtcgagctctaattggcggctgctcagcatgactgtcgtcttttatccacaaaagacagccatagcaacccctgataaaccccttcccaagcgggtgacagaaaaaaggtgcccacgaaatgctgatca

SEQ ID NO: 26223 - DNA, 381 bp, Zea mays
  Clone ID: MRT4577_123923C.1
agcagtggtaacaacgcagagtacttttttttttttttttttttttttttttaaaacccctttaaagagagataaaaaggggtggggagacgcgaacacattttttttttatagaaaaagtgctctataaataaacacaaaaaagcgctatttttttttttggggcacacacataaaaatgccccggggaaacccctcttccccctctcccagtttttgtgacagggggatgggctcttttttttatccccaccgccacaaaaactcttcgggggatgggggcttcccctagttttacactctagagtagcgctggggttttctctcttcccgtgtctattccacatatatgggggtgttgtctcccccgcgctctgtggg

SEQ ID NO: 26224 - DNA, 219 bp, Zea mays
  Clone ID: MRT4577_123924C.1
ctatgtgtacctccaggcgagcggccggggatcacgtaaacatcaaggatagtcctctcatcatctagtgtccgattacgatcaccatcggcgccaccgccctccacggatcccctttcagacttgaacacaccgatgattaagcgccttttccccctccttcagaaagatgccagagatagagatccagaaagcccctgctgactcccgtttacctac

SEQ ID NO: 26225 - DNA, 375 bp, Zea mays
  Clone ID: MRT4577_123925C.1
aaaccatctgtgcacaagacagtgccagaagttgctgtgacctgcaaggatactcaaccccatgtgcatgaccatggtgcctactatgacgaacatcgggtggactcttccagaaccacggaccaacattgccagccacctgaccaaccgctgtggcgactattaccatcatacccccctagttactggctattataattgggaaaactttttatatttaaccaattatccgtactgggaaccgtggcttattagcaccacattatctactgcggtttaaccaactatctgtggcaaaccaaacttggttgttgtgcaacaacaggtgctgcctttctaccgcagtttgcgggtaaccccggacccttttacaac

SEQ ID NO: 26226 - DNA, 399 bp, Zea mays
  Clone ID: MRT4577_123926C.1
tttatacacatggtggagctcaactagacatttgacgaccactaccactatgtgcccaccaacttaactgactcacactttccgattacaataccgagacctggacagtgtgactctacttattacagagcacgagcttctagcacctagagactgttttttcaagcagaggatgacacttaatgaatgacacacatgtacacaggggagaccctaacaaaccgtgatgaaattcttgaatttgaacattacaagggccacaaactcgcttatgaactaaaggacaacctccccgaccggtccctacttcaaaatccgatactctggatgcatgatttacttgggcacaaagaggccggtgtatacaaacggcaaattgaggacccaaaatgagtagtg

SEQ ID NO: 26227 - DNA, 237 bp, Zea mays
  unsure (1)..(237): unsure at all n locations
  Clone ID: MRT4577_123927C.1
tgcccaagangaccgctgagaaggcggcggccaaggnggccaagtcncccaaganggccgccaantcccccaanaanggcatagcggggcgggcgcctttaccgctgtgatgttgaatgctcntgttcantagatctttacgtctgtngtgncgtcnttgttattngaactggttantagatctgtgcattgtggttganacgtgattcccngatttcanaaatcnaatttncaatt

SEQ ID NO: 26228 - DNA, 218 bp, Zea mays
  Clone ID: MRT4577_123929C.1
acatgctcaaatctttaccccctagccatacatttaggagtctggtatacaagttgtcgatcatctcagtctctgagcactggttgctggagtgattggctcatcttgcccacgtcacagcgggtggcacctacctcgatgagagacatgacagtgatggaagcttccccttctctgttttatcgtatttattcgtgattttaaatgtgatctttctt

SEQ ID NO: 26229 - DNA, 310 bp, Zea mays
  Clone ID: MRT4577_12392C.1
tgatgacctccctgagcagacattctacatggttggtggcattgacgcacctcagccgcggcggggtctttaaagaggcgcggggtacctccactattattgcacaatggcttacaaacatttcctgtctcccgaaacatgccgatggatttcaatacccaactatacaatcctacatgggacaagaggccatccaagcatgcatcgtacgggcattagcattaacccttctacaaccatatgctctattggaacatccatccttaatgcatctgtatctccaaagaatcggggtataaccacctccacc

SEQ ID NO: 26230 - DNA, 146 bp, Zea mays
  Clone ID: MRT4577_123930C.1
tgcagctctgcaagctacagaggccaccacgagtacacgaagccacgccctccgagagaaagagagagagaaaaccatagcacggtaatgcccccggaccccacagcagctagagccagctccgccgtgagcgcggcatcagcagc

SEQ ID NO: 26231 - DNA, 446 bp, Zea mays
  unsure (1)..(446): unsure at all n locations
  Clone ID: MRT4577_123931C.1
cggacgcgtgggtttcgatcaagtacatatttccggtcatgttaatgaatttctaagaatcgcagttctgcttatagctgcatcgtgctnaaaaaaaaaaaaaaaaaaaaaaaaaaaaaaaaaaaaaaaaaaaaaaaaaaaaaaaaaaaaaaaaaaaaaaaaaaaaaaaaaaaaaaaaacgaaaacaaaacaaacaaaaaaaaaaaaaaaaaaaaaaaaaaggggcgccccccttttaaaaaaaccaaagttaacttacccacccttgcaaattaaaaatttttttaaagggccaccaaaatcaaattaacgggccgccgtttaaaaaccggggaactgaaaaaaacctgggcttcccaaataaaatccccttgaaaaaaaaccccttttcacaagggggggaaaaaacaaaaaagccccccccaaacccctttccaaaaagttgc

SEQ ID NO: 26232 - DNA, 449 bp, Zea mays
  Clone ID: MRT4577_123932C.1
cccacgcgtccgctttcccctctccacctcgcaagcttgctcacttttgtctctgtagtcctcagctacggcgtgcggtctgggactctggggacatcgttgccgttcccgggctcggcagccgcaatgcttgcgcaggtgctcctcgtgcacctcctcctcctcctccccgccacgtactcagccgaccaccaccgccattaccggggcagaaggtcgctgcacgagccgctgttccctctggagagcacgcccgcgctgccgccgccaccgcccgcgccgtttttcccgttcttgccaggcgccgcggcgccaccgacgccggaggttggctcggcctccgccccggcggacaccggtgcggctgacgcgtcatcgtcctcctcgtcgccgcaccccacggggccggccaacatttcgttcttggccgggctgcccgtctcccgcgc

SEQ ID NO: 26233 - DNA, 167 bp, Zea mays
  Clone ID: MRT4577_123933C.1
gttgcccgtggctccctgggagtgtcttcaacccgtgatagcagtagggctgcggcctagcacttgtttgggtccttaatgcccccagccggtgaggctatgggctgaaataaaaaatgctacgcttacgagacggtgaagcggttcttccgttgtgcgaccgggcg

SEQ ID NO: 26234 - DNA, 160 bp, Zea mays
  Clone ID: MRT4577_123934C.1
gggaaacaaatggttaaagactcgagctgagcgcgagtaaattactagtaatatacagaaaccatatcaatgtacaagcaactaactattaacataataatgttggctgggctcatctcagtcctaaacattgaccttgtgagggaaccttttcctttct

SEQ ID NO: 26235 - DNA, 854 bp, Zea mays
  unsure (1)..(854): unsure at all n locations
  Clone ID: MRT4577_123935C.1
ctcgaggccggccgggatgcttctgaagacgcagcgtgaaggatgtcacctcatgattgcgacgccaggacgactatacgacatcctgtctgacgagtactctcgcattgctgcaccaaatctgaatgcgctggtcttggatgaggcagatcgcctgatggacgatggtttccaaaaggagattgatgacatcaagacgcttcttcccgaccccgcagaggtcgagcgccaaaatctcatgttctctgctacgattccccgcgatgtcgttaacctggttcgccagacgatgcgtcccggcttccattttgccaagtgtgtcagtgaagatgaggagcccacacacgcgcgcattcctcaaaagatggtcatggtgactggctttgagaacaacattcccgctctctacgaactggttctccagcagcaccagaaggctcaggccagtggtggtcgcccattcaaggccattatctacttcaacagtaccgccgaagtcacgctcgcgtcatcagtattctacaagctcagcggcggcttcaagcgcaacagccctctgtctggcctccgtgggtttgaaatccactccaagctctctcaagggcagcgaacaagggccgctgacgacttccgcttcgctaaatctggcattctcttctcttctgacgtaaccgcacgntggtatggantttcccagaagtcacgcacgttattcaagtgggtctccctcgcgaacgcgagtcgtacatttcatcgtctaggtcgtaccggccgtgctggaaaggagggcgagggatggctcatcctgactccttttgagaagcagaaagccgacgccgtctccgtgacctgcc

SEQ ID NO: 26236 - DNA, 752 bp, Zea mays
  unsure (1)..(752): unsure at all n locations
  Clone ID: MRT4577_123936C.1
cgtgccctcgccgatcagcgatcgaaaacctctcctttcctctcctctcgtcatggtgctgtagctgaccgaaggcattcttgggagtacactagcgacttaccgagccgagcaagcgctagctctccatgtccatggccgatgcaaaggacgacgcggcaatggcggaggcccagcccctgggacggtggccggtgctgtcctacggcgtcggccacatgctgaacgacatcacgtcggcctgctggttcacgtacctgctcctcttcttgcagcagatcggccttgctcccagatcgacaggtttggccgcttcaagctatggcacatcggagggtcggtcctcgtcggcttctccttctcctcggtctttggtggctgcctgctgtgcaccatcctggggacggaatcgtacctcgtgaggaccgtgggctacagcttcttcgcggcggtgttcaatgttggctgggcggccacacaggtctcccacatgtccatggtgaactgcatgacactgaatccgacaagccgtgtagccttagcaagctgcagaaacgcatccactatggtcgcaaatcttggtttgtatgggattgcgttagctgtctttggcgctataaaggcgaaagaatactcagacattgttactcagtaccgatggatcgcgtacctgtccattttcatcggatgctgcctccctggtgnntcttcatgctggaaacaagagcctactttgaagtctgaacctaact

SEQ ID NO: 26237 - DNA, 232 bp, Zea mays
  Clone ID: MRT4577_123937C.1
cgcccgtccatggccgacgtggtgcgcgtgctccaggagaagacctccgccgctggatcgagagtcgaccgcaagcaagatggtgtcctaagttagatgccgatggagtagagtgtaaatatgtccttgatggtgctataattgtgttgagggtagttagccacaagaattggcgcagtgagatgaggttttagaatcactagatctctgatagaaaattttgtcatgccat

SEQ ID NO: 26238 - DNA, 826 bp, Zea mays
  Clone ID: MRT4577_123938C.1
cattgggtacctcgggccgggccggggtcctgcccccgtgccctcgccgatcagcgatcaaaaaccgctcctttcctctcctctcgtcatggtgctgtagctgaccgaaggcattcttgggagtacactagcgacttaccgagccgagcaagcgctagctctccatgtccatggccgatgcaaaggacgacgcggcaatggcggaggcccagcccctgggacggtggccggtgctgtcctacggcgtcggccacatgctgaacgacatcacgtcggcctgctggttcacgtacctgctcctcttcttgcagcagatcggccttgctcccagggccgccgccgttgtgatgctctcgggccaggtcgcggacgggctgatgacgatcctcgcaggcgagatgatcgacaggtttggccgcttcaagctatggcacatcggagggtcggtcctcgtcggcttctccttctcctcggtctttggtggctgcctgctgtgcaccatcctggggacggaatcgtacctcgtgaggaccgtgggctacagcttcttcgcggcggtgttcaacgttggctgggcggccacacaggtctcccacatgtccatggtgaactgcatgacactgaatccgacaagccgtgtagccttagcaagctgcagaaacgcatccactatggtcgcaaatcttggtttgtatgggattgcgttagctgtctttggcgctataaaggcgaaagaatactcagacattgttactcagtaccgatggatcgcgtacctgtccattttcatcggatgctgccttcctggtgggctttcatgctggaa

SEQ ID NO: 26239 - DNA, 283 bp, Zea mays
  Clone ID: MRT4577_123939C.1
ggttttttttttttaaaatctatatatttttttgtacattcaattttcacatttttcaagatgtaattagtaatgtaatctgtgcatgtattaatctaattaagaggtatttttgctgtccaacaattggtaagtacctattagtgcacccatttatgaacttcttatttaaagtgttattgaacctgcacaagacgccttcttatagacctgctatagatcggcaagtttcttccaataaatgacttgttgtgtacacactatatcaaaaataggtgtattc

SEQ ID NO: 26240 - DNA, 980 bp, Zea mays
  unsure (1)..(980): unsure at all n locations
  Clone ID: MRT4577_12393C.1
ccccgcggtgggcggccgcccttttctttccttttttttactaaatcggcatcgacatatattataactaacaaatcacattattatttttaaggaaattgaaaaaaaaagacagatcaaactcttgttctacggtgagatagccttgagtctagagtctttatctagaagaagagtaaacattttttttgttttccgaaaaggaaaaaaagaaagaataaacccaacccntcatggcttcgtcgtagcgtgcatttgtactctttatctaggcgagaacgaaacagactcttttgtttgcgaagaaaatgaaaaaaaagaaccaataattagagtctaatgctattgtaaattcgtactcgtagtcctgtacaggtcgtaggcgaagaaattcttatacatcaagcactgacgtcggaggctccttccttggcgccaccggcaccgaggcggctggaggaactggacgccagcaacggggccgatcgcggcgtgtcctgggccgtggccgctgcgtggcgtgggcacggacctcggcgagccgaagctgatctggcgcgcgaaggccacgacggccttcgcccacctcttgatctggcccttgagcctcccggcatccacgttcttcaaaggcccacgcccgatgctgaactccagccccgaggaggagcggtcgtaccgccgcgccgccgccttctgcttcctgctcctgctaccgacgctgccgcccgcggccaagtcgcccttctccctcgccacggcgccgtctccgttctcacgtccctcgttgccgcgccgcgccggcagcgacttcgacttgctgcccaccgacatggacgacgtcgtacgtcgccgcgccctggctgttttctatctgcgcggcgggggaacttggccggtttcgtcagtcccagtttttccgtagcttctgagaattggttcgtccaggcggccggactcgcggggggagggacccaatg

SEQ ID NO: 26241 - DNA, 303 bp, Zea mays
  Clone ID: MRT4577_123940C.1
aaaaaaaatatgccatcccaattcatatagcctccaaatctacaaccccgtgactccaaaaaaacaacccttttataactccccttaatttaaataacattccctttttttaacatcccctaatctgaaaaatcccaggcttttcccaacttactcactttgaaacacactccattttccccacttctctccttttcaaaaatcccccttttctacctttttaaaaattactatcaacccaaaatgtaaactgttcccccccttatcgccccctattaaccccaacggaccttcctttttccc

SEQ ID NO: 26242 - DNA, 853 bp, Zea mays
  Clone ID: MRT4577_123941C.1
ggctagaggttgaaatatgttgctatattacagtacaacagctgctgcaattattggcgataaacaccaatcgcccgaaaacaagcaggcagataagttggccaggattcaggcaaatagtaatcaccatcaaatcaagtaaaagcgcaaggtgaattgaaaatcaaaaagggaatagcacgattggaagcctggaaggtgaactgaaaactttgaccacgcagatagcggatagggaaagcagaccgtgctccattgacaccacacacatcctcatgtgttcctcgtctcaggccaatagcaaggtctggctggacaatgagaacaaaagcagcatggtgctgcaggccgttatcagtggagcatggacgagcaaagggagcgagcggcatcgcccaggccgttgtcagcggttagcgagcggctgcgacaagctagcgagcggttgcgacgagcaaagcagcacgccgggatccgcagagcagagcagcatcgcccacgcggctgtgatccacgcccggcaaggttcacaacattgcgcaaaacaaagcagagcatagcatcacagttcacagcagcgcgcggaggcaaggcgcacaacagcgtgcggtggcgcggcgtgcagagcagccgcgcgagcaaagctagtagcgccgcacagaatcgcagagaaggaagtggggagggttaccggcgtcgacgagcgagcaggccggccgccacagctccgcggataacagacgatggtcgccacggatagcagaggacgggcgtcggccgccacagcaccgcgaaaccctagccgccgctcccttccttcagcgacagaggacgggcccggccggcctcgagg

SEQ ID NO: 26243 - DNA, 218 bp, Zea mays
  Clone ID: MRT4577_123942C.1
tccgccaacccgtccgagggggggcggccctttgttcaaaccaggggttggttttaaccaggagggggagcgcttaagttgggacttccccgccccgtccaaaagcagggccgtttggtggccatgggtctgcaggaggagttcagaggagccccccaagaaggccaaaaccttgcctgccaccacgacgaacaagagcaagctggtcctttacggcc

SEQ ID NO: 26244 - DNA, 416 bp, Zea mays
  Clone ID: MRT4577_123943C.1
cggacgcgtgggttgcttttcccctataccgaccctcataaagacaaaccaaaccacgagagcaacctattacaaacctaccagaagggaaacgtggcagcagaagctaatggagaagaacccaaggcaagctggcccagacatttagccatgcaccattctgttaccttgcgagtctgataataaacttgctgctgacctgctgtgctcacagtagattctaaactggactaattattgtggggttttaatgagaagcctaagtttggaaatccttaagcagtgatgttgaaaaaaaaaatgaagccctgaacagtttaaaggtaacaatcctgtttctagaaagagaaagctgatggcaaaggcacattccaagtgacccgaatccaggtgcccccatcctgcaataggcagtc

SEQ ID NO: 26245 - DNA, 838 bp, Zea mays
  unsure (1)..(838): unsure at all n locations
  Clone ID: MRT4577_123944C.1
gtgcgctcgcgcggcatcacacagattcccgcgtcccgccgtcggcgactcggcgtcctgctgattgcgtcgcgaggagtgctcgtagccgccctcctctctcagattcagtcgcccatggcgaggaatccaggccgcaccgtcttcatcgattgctggtcatgacaaaccgtcttcaaatgacaataagtcggtactgctcaatcatgtaccctcttcaaatggcaataacccagtaatgcctaagctcaaccctataccgttgccaaaaccgactcaaatcatgcgttgtagtgatatgcctgtgtctcatatcccagcatatccggtggtaaacgggaggattggaggttatggtttttcttccactccttatcctaatggtttccacccgcaagctttaccgggtggaccagtacacagccatggcaaggtttagcaacagtacgtatgcttacaataggcaggaatttggttctgttctgaacattgcgcagagaggtcctgttatgaatgcctttgcccatgaggctgcgaatcagccaatcatgtatgttgagaacgtaggtgcagaagaacgtagtatgttaagagtaggcaggttccacataggttcttgacacctcaatacctcggtaacgtctaggtaggttgtagtacctcctagtcttgcccaagcttgtaatatggttatcaatcctctagatcttcagtagaacattgcattattcttgaagccaaaaaaaagtcttcttgtgttctccattgtccattgtcccaaccctgaaggcagcaggtgttacttatanaaagacagtgaagtacactattatgttcg

SEQ ID NO: 26246 - DNA, 883 bp, Zea mays
  unsure (1)..(883): unsure at all n locations
  Clone ID: MRT4577_123945C.1
cctcgaggccggccggggccctcgcgcggcatcacacagattcccgcgtcccgccgtcggcgactcggcgtcctgctgattgcgtcgcgaggagtgctcgtagccgccctcctctctcagattcagtcgtcgcccatggcgaggaatccaggccgcaccgtcttcatcggcaacttggatgaaaaagtatctgaaagagtcttgtatgagattcttattcaggcaggccatgtagtaggcctacatgtacctagtaataaggagagtaacagtcgcaaaggttatgcttttgctgagtatgaaaccgaggatatcgcgcaatacgctgttaggcttttctcgggacttgttcggatcaatggtaaaacgctcaagttcgtgattgctggtcatggcaaaccgtcttcaaatgacaataagtcggtactgctcaatcctgtaccctcttcaaatgccaataacccagtaatgcctaagctcaaccctataccgttgccaaaaccgactcaaatcatgcgttgtagtgatatgcctgtgcctcatatcccagcatatccggtggtaaacgggaggattggaggttatggtttttcttccactccttatcctaatggtttccacccgcaagctttaccgggtggaccagtacacagccatggcaaggtttagcaacagtacgtatgcttacaataggcaggaatttggttctgttctgaacattgcgcagagaggtcctgttatgaatgcctttgcccatgaggctgcgaaacagccaatcatgtacccatcctangtgcagaagaatgtagtatgttgagagtaggcaggttccacataggttcttgacaccctcatatctcggtaacgtctaggtaggttgtag

SEQ ID NO: 26247 - DNA, 383 bp, Zea mays
  Clone ID: MRT4577_123946C.1
gctctaatgctgctgtgctgggcctgcggatcagatgccggacaagcgccggctatcgaggtcggagctgcagaccagcgccatctccatcctagtgacacgccatcctgttcttcgccctcgccgccatcttactggtcgccgacgcggcgcacactgctacctcggctcctaagcggcggagcggggcgccggaccttctctctctcgccgcgcgcgccatagggctcttctttgatgtcctctctctatatatatagtgtgcatgaacgaatgatatcatataacaatgcacgtaccgaagcccatgcattagcccttatatctgtctgccttctgatccaaggaaataaaagatagatacaaaaaaaagcgatccggag

SEQ ID NO: 26248 - DNA, 255 bp, Zea mays
  Clone ID: MRT4577_123947C.1
tcgtgtttcgatacaaccctctatagtgagtcgtattagactgtccacgccgattccacgatacgttcgcgagttcaggccaacatcgtcagctcctggcactcgttgcgatactgtaggtcgtcacccgtaaggtctgactgataggattccagatggatgggtccagtaggcagcctcaatgccggtgcactcgacagccgtcaagagtgctccatctacaggatcggccgtggtaactgcatcgaaaggagc

SEQ ID NO: 26249 - DNA, 492 bp, Zea mays
  Clone ID: MRT4577_123948C.1
ttttttttttttttttttttttttttttttttttttttttttttttttttttttttttttttttttttttttttttaaagggaaataattttttggatggggggcttatacctttaaaagactttaaaaaactttccatgggatgcattctttatttttttagggcatgcttttttaaaaaaagaaaaaatgaacttaaatttttcaaaaggcttttttggcccaagagaaaataaaaaaagggccttttattttttagaggaaacattttatttaaaaggccaaattaaaattgcaaacacaggaaaacctttaaaaggaaagcctttggattccgatgatgttttttttatccaaaagggttttaaaagttaaatggttgtcttaaaaacccctttatttttttcgcccttttttttattgaaatattaaacaacttttggccaaattaaaaaaataaatctcccatgagggtgaaaaaaattttttttt

SEQ ID NO: 26250 - DNA, 301 bp, Zea mays
  Clone ID: MRT4577_123949C.1
ctattgttaagctcgcctcctgcacgcgccccggacattatcgggtgcgacccactcgtccgggctctttgcctacacagcctgcagcccagctcacgaggaccaagaggagaataagttgcatagccggccatttgcatccacactccaacaggtgggtcccttttttgctaacaacgctcgttgatttggataggtgccttatcttctcacgtcttagctacaagcatacttgggagcgcctgttgtaagacaggaccagctaccgggcgagacggtttttgaatcggaccctgaccag

SEQ ID NO: 26251 - DNA, 2082 bp, Zea mays
  Clone ID: MRT4577_12394C.1
atggccaccgaagagggagcagagccttcggcgcctgtcgctgaagatggaggagcgccatctgcttccgcacctgcgccatcactaccgccttcagcccttgctacctctgtgcaggtgccgaacgcagctgacatggcgaaggcagctgcggcggcgagggcactccagaccagggcggagatcctttcgacaagccaactgctggtgccccaagccactccgtcacagccagcagcggccccaactacgctcgctgctgtgcaagtccaagtcaaccctgaccccgagacacaaaccgaagccgacatggaaggcatacgacagaacatgacacgactccaagacatgcttcgccaaatgcaaggacagcaacaagcgtacgaggcggcaaggcggtccaaggcgcagctccaagctttccttcagcagctcagccaaccccacaacatttcaagtacagccccttcggccctcccggaggggaatacaagtcaagatgcgcctagttggttgccttcaaatcaaccagccaatagcatttactcatgggagcaattgcgcgatgtctttgtccttaactttcgatgtacatatgaggagccgaagatgcagcaacatctgctcggcattcgccagaggctgggggagtcgataagggagtacatgcgtcgcttctcgcaagctcgatgccaagttcaagacataaccgaggcgtctgtcataaacgccgcttcggctagtctgctcgagagcgaactcacaagaaaaatcgccaacaaggagctacagacacttgaacacctacttcacatcattgacgggttcgtaaggggcgaggaggattccaagcgacggcaagctatgcaagctgagtatgataaggcttccgtcgccgctgctcaagcccaagcgcaagttcaaattgccgaaccacctcctctcactgttcgccagccccagccggcgatacaaggacaaccgtcaaggcaaggtcaagcccctatgacctggaggaagttcagaaccgaccgtgcgggcaaggctgtgatgactgtcgaagaagtgcaagccctccgcaaggagttcgacgctcaggaagcaagcaaccatcagcagcctgcccgcaagaaggcccgaaaagacctctactgcgccttccacagacgctcttcgcacaccacggagcaatgccgaaacattcggcaacgtggtaacgagcaagattcaaggccacagcagggagcagcagtcgaagcacctcgcgaagtagctcaagaacaagcacccccggccgaacaacgccaagatgcacaacgcagagtaatccaagtgattacaagggccgacccgccaatccaactgtcgaagcgacaaaagaagatgcagctgcgaacgatccacaatataacttcagcaggcgaagggtctccgcaatatctgaaccagcaaatctcttttgggccagaagacgccgaaggagtaatgttcccgcaccaagatcctctggcttcggcggagaagcagttcaagttaatgatagccttcggctcgggggaaaatagacgcgaagagcaagtattgttcgacgttgtcgacatcccgtacagctataacgccatcttcggccgtgcaaccttgaacaagttcgaagccatttcccatcacaattatctcaagctcaagatgcccggcccgaaaggagtgatcgtggtcaaggggcttcagctttcgcctgcttcaaaatgcgttttggccataatcaagagagcagtacgcaatgttgaggccgaaccgcatgaccgggcgaaacatgcgtcaaagcccgcacctcacggcaagatagtcaagatgcagattgatgatgccgaccccacaaaactcgtatcactagggggcgacatgggcgaagaagaagctaagaacatcctagaggtacttaaaaagaacattgatatcttcgcctggggccccgatgaagtaggaggtgtttcggcagatctcatcatgcatcacctggcagtcaagccggacgccaagccaaggaaacagaagctatgcaagatgtccgctgatcgctag

SEQ ID NO: 26252 - DNA, 525 bp, Zea mays
  Clone ID: MRT4577_123950C.1
ggtccaatatatggcataaggaggctcttaatttgaacttaccatgacacacacacaagcataagcggtgcactaggcttacttaaccagctgtactggcatgaactggccatgtgcccaatctgaatcacatatgaccgtacataagcaccaggcacgcacataatcaccaaagaaacgagtagctaccgagcattaaaaaacttccggtgtttagatgacaagacgaccaaattaatggggaacaacagatgcacttacatgtgccaacattgatggctgcattaagaacaggaaatgcgttaatggtgactctttcaattctctgctatacgctgctaacaattagtaattaacctatgtatcatataagtgtaccacggacagggcatcgaacgagacagcaaccatcactggggtattgcaaatacagggtgtgcacattccataccttactttagggatataaaaaacagtaagctgctttatgattccaacagcatgtaccatcacaagatcttctga

SEQ ID NO: 26253 - DNA, 240 bp, Zea mays
  Clone ID: MRT4577_123951C.1
gctacctgaccggcgagttcctctgcgactacagctgggacaccgtgttgctgtacgtttaccctgagactttggcctagaaccgcgagctggaggtgatccactgcctctgggccctgctgttcgcgctcaggggcaactttgcggagatgctcgcccactacggcgtccagttcggaaacgccgcgtggttcaaagacgggttccagatcttcatctaggacggacttgactacctaa

SEQ ID NO: 26254 - DNA, 608 bp, Zea mays
  unsure (1)..(608): unsure at all n locations
  Clone ID: MRT4577_123952C.1
ttttttttttttttttttctttttttttttgaagatgacaagagaacaacggccgtcttctccatcgtagctaaaatccaagaactgctgctcgctactgacctaagtagctagcttacatttctagctaaaactctaaaaaaaggaaggcaaggagaggagtacccccaaaaaaaaaaggctagcaagcaatacggggctgagaaagagaggaggagatccatgatgcaatgcgatcagtggtggtgtacctagctagcacacagtgcaggcgccggcgcgaagcgaatggccggcggtcggtcatggcttcttgccgagggtgggcttgttgttgtgcatccacaccttgagcacggggcgcttgacgcaaacctcctcgcaaaactgctgcacggcggcctcgncgtgcttctggatgcgccaccccagccgctccgcgaacgccagcatccggtccttctgctcctgcgtgaacttggtgcggaaccgcttcttgccggaccccgagccgccggacgagccccccgacgggccgccgcccgggcccagcgacatgcccatcatgggcgccaccaccatggggccgatcagcccggacacgtcgt

SEQ ID NO: 26255 - DNA, 400 bp, Zea mays
  Clone ID: MRT4577_123953C.1
ggatctcctatctggcgacgagctcctgataaaccaacatctcaacgccggcgtattggagggtgttctgtgggacgtagaggcaaagttgctcacgcgaggtgctgttgatgtggacataggtgccaattcatacgtcgagggtggtgaggacgaaagcgttgatgacacagctgcgaacgtggttgatattgttgacacatttcgtgtacaggagcaacctccttttgacaagaaatcatttgcgtcttacatcaaaaaatacatgaagaatctcactgctgtgttgcagccagagaaagcggatgagttcataaagggtgtcgagggtgctaccaagtttcttcttagcaagctgcatgacctccaaatttttgatggtgagtccatgaaggatgat

SEQ ID NO: 26256 - DNA, 894 bp, Zea mays
  Clone ID: MRT4577_123954C.1
tccgccctagctgcgctcctcgtcttcaccccagcgcgtctgcttcctgctcagatttcgtccgtgccaagctccatccctggtcgtgccttgcctgccgccgcccagccgttatcttccacctcccagctcctccaagccatggccgcccctctctgctcgctcggcttccagctccatggcctagctcccgtcttcctgcgcgtcgtcgttcccctcgcagctcgtggaggccgacctcggcagcgcccccatcgctgtggagctctcccggccgtctccagccccacgcccacggcagctcgcctccacaccgcgctcctctgttagccgtgacctcgccttggttcccatggcgctcggccgcccatctccctggtgctcggactcgaccgccgcgcagcaggccgcggagacgaacgcgtgcagactgcagtggcgtgcgcgacgggactggccgtcctagctcctcgtcctcccctcgactctctccctgccggagctccttctccagtcgccatcaaccatgatcgaccttgttgcgtcaagagatggagaagaaaggagttaggtgaagaaggaagcaaagcccaatgcaatgctcgctgcgtgttcggtagaattccttgagccaaaagtcattgccgtttgagcgaatgtcgagtcaattttggtcgtagtgcacccggtaattattttcaaattctttgttactgcctgtgctattccgtgacgtcgttaaggaagaaagcgaagctgtgtggtgtttgatggcctgttcgaaccaaaaagcgtggacgatctcggggatttaaatcaaattggtcatggtaagctgaattgttgtttatgctagttggattgaggagtagatcgggcatatctattagtcgc

SEQ ID NO: 26257 - DNA, 190 bp, Zea mays
  Clone ID: MRT4577_123955C.1
ccggtcgactcacgcgtccgagagagccgagatgatcaccctacgattacaaatgatcagccagagccccggaagcgagctaggcaaaacccaaagggccaggagcccacagcggatacgagcaatatcaacaaagagacatagaaaaagtaaagcgatgaaccccagccaagagaggcgaaagaaggaa

SEQ ID NO: 26258 - DNA, 302 bp, Zea mays
  Clone ID: MRT4577_123956C.1
acggtaaatgactctagtttgtaatattattacttactctttattaatattcgaagcattgtgactaaaaaaaaaaaaaaatataaaaaaaaataaaaaaaaaaagaaaaaagacgactactaaaaaaagcaataaaccgggggctgcaaacaggggccaatacaaggatcgaatggtggcctaggcaaaaatattgggcgagaactggcggtagaagcagagagctgctaaagggagcctggattttacgaacggatgcgggtaacgtcagtcactcaaaaactgtttaacccgtgcgtgc

SEQ ID NO: 26259 - DNA, 309 bp, Zea mays
  Clone ID: MRT4577_123957C.1
tccaactcagcttggaatcacaatttagcgtgggtgattccaaactcgacctgggtggttaatcgctttaccaaccatccgtgagtacaataactacttgcaagacagtatccggatagggaggatggcgtcggcgaagtaagaacagccggcggcgctgtgccaagctgtgctcagctcaaagaaatagccagtctcggtctccagttctcgtctccagtcaagatttccacgtcgtccatggcgctcgtcgtgatgtgtgggcagccgtgcagcggtaaaacagcagccgccgcttgcattgctgtg

SEQ ID NO: 26260 - DNA, 395 bp, Zea mays
  Clone ID: MRT4577_123958C.1
cccacgcgtccgcccacgcgtccggcgagcggccgtcctttttttttttttttttttttttttagaaacaaggcctgggtgcataatggttatccaatccgagagcgtcactgcctttatcagtgcatcagcccaaaggaatacagaagttattttaggatccatcttcataggctctggtggaaatcaatggttcttgaaccaagttcaaaaacccatgactaccaagtatgatcttatatggaggtaaggatctgagagacatgaaccaagttcatactgcacggttcttaataaacagaattaactttttaaccaacacggcttgtgaaccatatacaggtttttttcctttactgatccatttttttttcaagcctgatggttttgcatta

SEQ ID NO: 26261 - DNA, 437 bp, Zea mays
  Clone ID: MRT4577_123959C.1
aaagctggcacccgtgaggcaccggtccataattccctcgacccacccgtcctgctgttatcacgccttaaccacaattcaattgggagagtttttttagtcctggagcgggctaatcatactcgtccccactaaagtctcccccgacgacctagcctcccgcgccggctcagcatcaacatgagcaagaccagaacgaccatgactgcgctgatggtgctagtaaccgcggcgacaagagatggggccagaaagacaaccgcttctgccatcatgggcactgcggcagacgtagtgaggcagttctacgacggggtgaacctgctggacctggctactgttgagccggtcatctcggaaggctgcgtgtacgaagaccttgtgttccctcaccccttcatagggcgggagggggtggtccacttctttcttggagt

SEQ ID NO: 26262 - DNA, 551 bp, Zea mays
  unsure (1)..(551): unsure at all n locations
  Clone ID: MRT4577_12395C.1
ggaattcccgggtcgacccatcgcgtccggtaactaaattatatatcaatagaatatatatataattttaagtcaaatccaaaagttattttaattagcttgaaataaagtattttaaatacctgtttccaccattttaaaattaatcctactcattttctaattaacaaataaaatactatggaaatgattctttctatagatagatattcctttaatgacgcttatttctaataaaattgagtttttattaatgaaaaatattattttgagaaggttttaataatgattatataagttgccttttaaaatagntaaaaaaaattaaaattcatttatatattacatctttttcttttaaagcatatctgatattttgaagttgntttcaagtaaagaattaacatgaatttgaaaactctagatttaacagataccatgtatttaataaaagaggctntgcagataagtnntataattaattcaaactctatcatggnattataaataatacttatttnctattacaaatataaatagaaccaaatata

SEQ ID NO: 26263 - DNA, 442 bp, Zea mays
  unsure (1)..(442): unsure at all n locations
  Clone ID: MRT4577_123960C.1
aaacaggggggggagggagagccccaaggcgggggaccacaccgacgcccggagggcggcgngggcccacgcgcaccacggaacacacgcgggcgacgacaaggcgacccaccncacaaccagaagagggggggggggcggaacacgatttttcttcgatattattcttgngagttccaccccaaaacgaatcaacactccttgccccccgtgcaccgacgaaaccagcgacagcagcacagagacgaacggcgtggtatcctcctgcctcagctgctccctacctgggggtgctctctaccgtttcgagtacgcaggcaacccggcgctcttccttcccaaagcgcgaggagggacgtgccccctccctcccctcgaccctcacgacacggtggctcgccgcgccagataccccctcagcaaccgctccacccgccacacc

SEQ ID NO: 26264 - DNA, 415 bp, Zea mays
  Clone ID: MRT4577_123961C.1
cgaagagcacggtgacatcgctcgcgccggcgtccacggtcggcggctccgccctcgcgctgcactacgcgaacatcgtcatcgtcgtcgagaagctgctccggtacccgcacctcgtgggcgaggaggcgcgggacgagctgtaccagatgctgccgcggagcctgaagctggcgctgaggaagagcctgagagcccgcgcgaggagcacggcgatctacgacgcgttcctggcgcacgactggcgggagacgctcgagaagacgacgctggcgtggctcgcccccatggcccacaacacggtccggtggcaggccgagcggagcttcgagttcgaacagcagcagcagcgggtcgtgtcggagcggagcgtgctgctgctgcaaacgctgtacttcgccgaccgggagaagac

SEQ ID NO: 26265 - DNA, 619 bp, Zea mays
  unsure (1)..(619): unsure at all n locations
  Clone ID: MRT4577_123962C.1
ccggccgggtctcaggacgatcgaagattctcgatctacaggcgccgccgtaccgcgagcagggggagggagcgacggacggtgttgcgctgcatgcgtgtgggccctgcacacgtggcggccgggcgaatattcacccggcttagcgtgtttgaaggacacgacacgactggtggaggtggtggtggttactgtcagaagaaagaggccgttcttgtcccggtggtcggtctcgcgtctcgacgtacgtacgtgctctgctctggcgatccgtcgaacagacaggacggccgggcgccggggccaaggccaacaaagcacgcgagatttcttcctcccccaggcccagccaccctccttttggcgccgggcgcttctgagcaggacgtctacggtggctggcaaactcccaggcgtgcgcgtgacgtcttgtttggtcggagcagcctgcaacagcgcacgcagtacacagccggtccaagaggctcggccgggctcactcctgtcatgttgacatgtagctaggcacgtgcacacgtacttgtgaccgctacacaggncggtatgcatgccactcgctgtacgcgtccacaagaatcgagcccgggttttgtggttc

SEQ ID NO: 26266 - DNA, 459 bp, Zea mays
  Clone ID: MRT4577_123963C.1
ggccaaccagaaataagaagttacatttccagattcaaaaaaaaaaaaaaaaaaaaaaaaaaaaaaaaaaaaaaaaaaaaaaaaaaaaaaaaaaaaaaaaaaaaaaaaaattaaaaaaaaaaaaaaaaaaaaaaaaaaaaggtttgaccttgccgggggggccgttaaaaggggcaaattttgaaaatttcaataaaattgggggccgttgaacattgctttaaaggggccaaattccccttataggggggggtttaaaaattaatgggccggggtttaaaaacgtgggaatgggaaaaaccttggggtaaccaaattaaatggcttggaaaaaaatccccttttgccaagttggggaaaaaccaaaaaggcccgaaccaatggcctttccaaaaatttgccaaccctaaaggggaaatgaaccccccttgtacggggcatttaagcgggggggggggg

SEQ ID NO: 26267 - DNA, 203 bp, Zea mays
  unsure (1)..(203): unsure at all n locations
  Clone ID: MRT4577_123964C.1
attattattcaanncccaaatgttttctaaaaaattatctcggccaaaaacacanaccaacctactcaacaagacctccatcctatataaactacattacccttcatcaacatcaatcacaattttcaacccaacccacaccaaaacataacaccccacagactcatacatatccctgttcattccccacctgacccccaaaa

SEQ ID NO: 26268 - DNA, 252 bp, Zea mays
  Clone ID: MRT4577_123965C.1
acggtctcatgttcgctcaccggtgcggtgggcacgccatgttcgcaatcttcacgatgatcctcaagccgcataagaggatcgccgccttactacgaaagcttggcatggtcaagtattggttcgacaccacaaaggtttacacgatctagatgctcaactcatgccagaacatgcgaaagctactgctggtgagatgcatgattatcaggccacatataacccactctatgcacagagcattgatggccc

SEQ ID NO: 26269 - DNA, 222 bp, Zea mays
  Clone ID: MRT4577_123966C.1
ggcattggtggatttgggagttgtcagatactcatatgatgttttttcaaatccaatacgggggtgtccatcgctggagccggctgggggggccttgtaaagattttgtacctgggaaccccaaaaaaattgccaagactttattaccaatcgtggtgccccatttggtccttaaaaaaaaaaaaaaacaaaataaataatataaaattataaaaatactta

SEQ ID NO: 26270 - DNA, 783 bp, Zea mays
  Clone ID: MRT4577_123967C.1
atgagggggagcatggtaagtcgaaaaattgatcttgaggagaagcgggtatatgtgcccactccaatgtttcatgaaccaatttttgaattacctattccagttgcacgaacaatgcaagacaatgtagtgacaacacctgttgttagttctcctgtggcgacaatgaatggacatgaggaacttgtccttcaggatcctatagaaaatgatgccacaagttttacaaaaatagaagggattgattacaatgagacattttctccagtctcatgtaaggactccttcaaaattataatggcattagtggcacactatgatttagagttacatcagatggatgtaaagacgacattcctcaatggggatttggaacaaattgtatacatggcacaaccgaaaggttttgttgtgaaagaaaaagaaggcatgggatgtcgtctaaagaaatccatttatggtttaaaacaagcttcaagacagtggtacttcaagtttgatagaacaataaagaattttgggtttaaagagaatgttgaggacaactgtgtatatgcaaagtttaagaatgcaaagtacatcttcctagtcctatatgtggatgatatcttacttgcttgtagtgatgtcagtctactgctggagacaaagaagtttttgtcctcaaaatttgacatgaaagatcttggtgaagcgtattttgttttgggcatagaggttcaccgagatagaacaaaaggggtattgggctgtcccaaaagttatacatacaaaagattttaa

SEQ ID NO: 26271 - DNA, 1116 bp, Zea mays
  unsure (1)..(1116): unsure at all n locations
  Clone ID: MRT4577_123968C.1
aaaggaacaatattgtgatgcatttctaacagcacactttgaggtccctggagaaatgttctctttggcaatggaagcaaaacaaagaggaatgggagttgttggatccactcagaatatcttggatttcattaaggatcatgtgatgggagctctggacaaaaatgtagatgaacaccttcagtttgtgttaggaacagaatcagggatgatcacttcaattgttgctgctgttcaggaattacttcatttttattcttctcaagagagagcaaacatcaaagtagaaattgtgtttccggtatcttcggatgcaatttctaagacatcgaatggttctcatcatgttggttcttcaatggctactgatttggataatcttactattgttcctggtgtgagttctggcgaaggctgctccattcatggtggttgtgcctcgtgtccctacatgaagatgaatacccggccggggctaattaaaatttgccatcagcttcctgataaaaacaacaaattatctgtataccaagctaacagaattaatgtcaggacacctctcggaaaatcagttgcagaggttgggtgtgagcctattctgcatatgcggcatttccagaaaacaaggaggttacccaacaagcttgttcaccaggttgtccatggtaatggtgacaaacccttgcaatagctgttcatcaatacttgtatttattttatcaaggcggctggatgatggagtatatctcaagtgaatgccatgtttagctggcataccgaagaaatctccgggacaagattatttgccctgtacggtagacatctggacttgccctgtacgttagacatgttgacatctgcatgcgaattaatgttgaacaaatggggttggtctaattgtaaaaaataattattctgaataaatcttaattgctttgagcgaaaaaaaaaaaaaaaaaactgaaaaaaaaataataaaaataaaaaaaaaaaaaaaaaaaaaaaaagagagaaaggagcccaaggaaaaaaccgaaaaaaaccacgaaaaaacaaaaaaaaaaaaaaaaaaaacgcgggggggggggcgcccncccaaaaaccccctgtgggggg

SEQ ID NO: 26272 - DNA, 291 bp, Zea mays
  Clone ID: MRT4577_123969C.1
ctgagcactcgtcgcaactcaccacgacgttcgcaatcctcctcttgcgccatctattgcgagccccatttgatcgattcatgttggcgctcacggccgagaataagcccgctgagtagaagcggtcggaggagatggccgagatgtatcaaagggtggagaagagcgtgccgagcatggagggtggcgataagaagggactgaagtaggcgatgactagcgtcgagacgtacaagatcttcatctgcgaggtgctcaagcaggtgcacccggacattggcatctcgtcca

SEQ ID NO: 26273 - DNA, 443 bp, Zea mays
  unsure (1)..(443): unsure at all n locations
  Clone ID: MRT4577_12396C.1
ctctctataaaataagaacggtttcaaccgaattcagttttgcagtgcacttgatattcttacagctcccaggcctgcagaaagcaattaagcggcctcacgtgcggcatgcatctaaagctggaactttattaggggggtcaacaccggggcacctacattaattatataccaccccccacccctggagctgcatgcaaccacaagcgtgctcaattgccgcaaaccttggcggggggcatggggacgcatatggccgtatacttcttcttcccctcgggggtcccattcttggggcccaccatggaggcgccggcgccccccatggctgtcacggcccccggagcatcccccagcatgacggctcgggctctctcctgggcggaccttgcctntgatgctgttaccgtgggggtctcttggtagcggaagaccttggctga

SEQ ID NO: 26274 - DNA, 1982 bp, Zea mays
  Clone ID: MRT4577_123970C.1
ccacgcgtccgcaaggtttcaggccttgtgaatacccttaaagagaaaaaaattggggttgttgcacacttttatatggatcctgaggtgcaaggcatactcactgctgcaaagaagcagtggccccacatccaaatatctgattccttgattatggcagatagtgctgttaaaatggctgaagcaggatgcgactatattacagttctaggtgttgacttcatgtcagaaaatgttcgggcagtacttgatcaagcaggatttaataaggttgtcgtttatagaatgtccagtgaacagattggctgttcattagcagatgctgcttcaagttgtgaatatactcattttttgagggaagcttcgagatgttatccgtctttgcatgttatttacattaatacttcgctggaaacaaaagctcatgctcatgaacttgttcctacaataacttgcacctcttctaatgttgttccaactatattacaggcatttgcccaaataccaaatcttaatgtctggtatggtcctgattcatatatgggtgcaaacatagcagatttattccagagaatggctacaatgtcagatgaagaaattgcaaaaattcatccagaccacaacagaaaatctttgagttcattactgccacgcctacactattaccagggtggtaactgtatggtacatgacatgtttggccatgaggttgtggggaaaataaaggaacaatattgtgatgcatttctaacagcacactttgaggtccctggagaaatgttctctttggcaatggaagcaaaacggagagcaatgggagttgttggatccactcagaatatcagttgtttcattagggatcatgtgatgggagctcttgcggcaaatccagatgaccaggaggttacccaacaagcttgttcaccaggttgtccatggtaatggtgacaaacccttgcaatagctgttcatcaatacttgtatttattttatcaaggcggctggatgagggagtatgtttccagtatcttccatgttaatttctcataccgaagaaatttctcatcatgttggttcttcaatggctactagactgaatagccttactattgttcctggtgtgagttctggcgcatgctgctccattcatggtggttgtgcctcgtgtccctacatgaagatgaataccctggggtcgctacttaaagtttgccatcagcttcctgataaaaacaacaaattatctgtataccaagctaacagaattaatgttaggactcctctcggaaaatcagttgcagaggttgggtgtgagcctattctgcatatgcggcatttccagaaaacaaggaggttacccgacaagcttgttcaccaggttgtaaatggtaatggtgacaaacccttgcaatagctgttcatcaatacttgtatttattttataaaggtggtatggaggatgaatatatctcaagtgaatgccatgttgagctggcataccgttaaggtttaggtgcggatttgccctgtacggtccccttgtggacctgccctggagatcccgggtgttgacatctgcaggctgttggatgcttgactattttgatggtcctcaaaggtcctcgatacgaagacattgtttgaaaacgataacaacgaatgccgaagctacaactgaaggataacagcttcaacttaggatagcaacgaaggtcaagcataatgccgagccgaagaagaaaagactagttgatccctggtgatttatgttacgattatgtgtatatgttaaggtcataaatgtattgttatccgggctgcgtcccgtgcctataaattggtgaatagtaccacgtaccgtttacgttggattgtaatcattctcgcatcagcaccttcaaacaagtcgaaggtatcaatgtaatataaatcctattaatattcatatgtttatcatgaaataaatataggcttttgacttc

SEQ ID NO: 26275 - DNA, 104 bp, Zea mays
  Clone ID: MRT4577_123971C.1
ctgtctccttcaaagatgaccaagttctatatggaacattcgatgctttggataggtgaataatgttctatgttgttgaacaaatataacaaatagaggtcgca

SEQ ID NO: 26276 - DNA, 486 bp, Zea mays
  unsure (1)..(486): unsure at all n locations
  Clone ID: MRT4577_123972C.1
actaggtcaccaacccaaacttacacacgcaatgggtgctaaataatgtacagtacatgttcttagagtggcgggtgtctcgatacatgggtacacaaaccaatttccgggggttacctaggagcacaaacgtaacgaacaaccctagtctatggtgcctaaactgagagtgatggactgtgatgtaacgttcacatatgagtcagattcttacggacactaagacgtatccatactgatgttatgcgtcttttatttattgaagtgatagagatatatcttcttgtcgtcaaatataacattcctactcagataatatgttccaaggctctatgactgaaaatacaatttactggtgagatgttgagaccgaactaantggtcatctgcactacccttactgaagaatgactgggttgatagtaccatggggcagcagagcgtaatgtgaggctcgaatatcgtaaggtgcccaacacctttata

SEQ ID NO: 26277 - DNA, 862 bp, Zea mays
  unsure (1)..(862): unsure at all n locations
  Clone ID: MRT4577_123973C.1
cctcgaggccggccggtcatcgcttcgcttctcccagcttccctgcgctagcgtacgtcttcctccctgctgcagctcggcctccagctcacccgtggtggcgcatgctctctcccctgcctgctcgagttcctctgcccagtccccagctcggccgctcgctccttctctagtgctcgcccctgtgcgctccactgctcccacggctgagcgtcgcggctctccctgcgcgcagccgcgcttcctgccgagcgcctccagctcccgcgccgcagccctggtttcttctcgcccggatgcgtgtcggccgctaggccttcttcctcctccgtgcacgcgctctgctccttccccatggcgctctctctccctctcttcctcagctcgctctcgtgcttccctctctccctggacgcacgcgcagtgttccgtcgtccctcgccgtgccgagttcgcctctgcgcgcagctccccatgctccatggtcgactcccagcgacttggtccgagcttccagcgctccatctccctccagctccctgctcggcgcccagcctccttgccgcagacgcgggccgccgcgctgctaggctgctctctttgctcagtctcgatctctcgcgtgcggcttcctgcttgccagcacgccctctcagatcgctcagccttaatccccgtcgcgtcgcgctcctccctctgntcctgctgcgctgtcggcagctagttgcctggttcgtgtcgtgtgtgcctaggcgctgcccccgttggtcgcctcggtgtgaaatcgccgtcgcgtccagaatttggcatgtctcccacgncgtcatcccaagagcgcattagacttaccgtgtatgatgtt

SEQ ID NO: 26278 - DNA, 305 bp, Zea mays
  Clone ID: MRT4577_123974C.1
gccggccgggttcgaaactatgcttctaaaaaaaaactctcaacacagctgtcgttgaacacgcaatatctgaagatgatttaactcatcctgctttatatcgattcaaaataaatagtccaccttgttataattatcatccaaaaccatcaaagcctacacctgtgatcgtagaaacaaagattgactatgacctttatccttccattatgcgtgacatgaaaaatcatgaataataaaatatacttcatcttttattttaaaaaaaaaaaaaaaagtaaaaaaaaaaaaaaaaaaggccccta

SEQ ID NO: 26279 - DNA, 1610 bp, Zea mays
  Clone ID: MRT4577_123975C.1
atgggagcagagcagcgtttgaaaaaggatcttagagtgtctagggttgggccaggcgggtctcttaaccccttcttttttctgcccatcggagttatttcccaaggacttgccatggtaagggggagaagggggaagaagcacacttgaagagcgcagtacaacggggagttgtatgctgcgttcgggaaggatgaatcgctcccgaaaaggagtctattgattctctcccaattggttggatcgtaggggcgatgatttacttcacgggcgaggtctctggttcaagtccaggatggcccagctgcgccagggaaaagaatagaagaagcatctgactctttcatgcatactccacttggctcgggggggatatagctcagttggtagagctccgctcttgcaattgggtcgttgcgattacgggttggctgtctaattgtccaggcggtaatgatagtatcttgtacctgaaccggtggctcactttttctaagtaatggggaagaggactgaaacatgccactgaaagactctactgagacaaaaagatgggctgtcaaaaaggtagaggaggtaggatgggcagttggtcagatctagtatggatcgtacatggacgatagttggagtcggcggctctcctaggcttccctcatctgggatccctggggaagaggatcaagttggcccttgcgaatagcttgatgcactatctcccttcaaccctttgagcgaaatgtggcaaaaggaaggaaaatccatggaccgaccccattgtctccaccccgtaggaactacgagatcaccccaaggacgccttcggcgtccaggggtcacggaccgaccatagatcctgttcaataagtggaacacattagccgtccgctctccggttgggcagtaagggtcggagaagggcaatcactcgttcttaaaaccagcattcttaagttaagatcaaagagtcgggcggaaaaaggggagagctccccgttcctggttctcctgtagctggattccccggaaccacaagaatccttagaatgggattccaactcagcaccttttgttttgggattttgagaagagttgctctttggagagcacagtacgatgaaagttgtaagctgtgttcgggggggagttattgcctatcgttgtcctctatggtagaacccgtcggggaggcctgagaggcggtggtttaccctgtggcggatgtcagcggttcgagtccgctaaaatccagcccgtgaacttagcggatactatgatacgccccgaaggttgccaattcgtcagttcgatctatgatttcgcattcatggacgttgataagatccttccatttagtagccccttaggatggcaaagccttaacgttaatggcaaggctcaaaagaggaaagccttccggtggacacctaggcccccagagacgaggaagggggtaccacgccccgaaatgctttggggagttgaaaataagcatagacccggagattcccaaataggtcccccttttgaaccccctgctgaacccatgagcaggcaagagaccccctggcgaactgacacatcttagtacccagaggaaaaaaccaaaa

SEQ ID NO: 26280 - DNA, 239 bp, Zea mays
  Clone ID: MRT4577_123976C.1
tgtgacgctggtcccactgttacgctgggcttctataatacgcgatcccgcttccactctgctaccaccgggcacgccgccggtacaccgcgcattccatactcattagtgcctattctgctgacccctcgccatctccggcgggcgaatcgacaccatggccgccgcacgccctggtccgctccgacggtgccaacttcgtcgtccgtccccgccccctctaccgtgtcgtctgcgtc

SEQ ID NO: 26281 - DNA, 515 bp, Zea mays
  Clone ID: MRT4577_123977C.1
atttctaaaaaaaaaaaaacaaaaacaaaaaaaaaaaaaaaaaaaaaaaaaaaaaaaaaaaaaaaaaaaaaaaaacttaaccctgacaaaacgttcaaatggacagggccctgggcctgcccatggcgcggcccttgccgggcgccctcccctcgcatggggccccccccccgcccttccctttgggccggcccctttcccgctccactgccgccttttttcccacctgccttgccatgtaccatgcccttgccctttcccaaatccccgcggggtgacaaccccatctcttccccccgccttctcccttcccagccccgcccctttccgcccttcctcccctcccgcagccggcccgttaaatggactccccctccctgggcctttccttcacgcgcggtgggggggcttgttacgcgccgcccgccctttggcttgccaggtccctccccctcgttcccttccctttcctccctccctttctcgttcgcttggtttttttttcccgtcttttt

SEQ ID NO: 26282 - DNA, 436 bp, Zea mays
  Clone ID: MRT4577_123978C.1
aaaaaaaggggcattgttttccaaaaataggaggccgcacgaataagggggcagggtttccaaaaccccccgggggtcagataaaaaaaataagggaaggttgtccccgggaagacgataaaaatccgcaacaacgttctccatcaccggggaagaggtacaacgggcctacaaaaaatgtccctacaaaaacagggggggggagggggcaaagaaaaaccccgggggcccgggcatggttccgctccaaaaaaacccgaggggggaaaaagggtacccggcctttcacccgccgggggaggggttgtttttgggggtgttcctaaagggccaaaacccggcggggtccaccatgtttatgaaaaccggggaaaacaatgcaaaccagggggaaccgcttccagttccggggggacggggccaccaccccggcctt

SEQ ID NO: 26283 - DNA, 264 bp, Zea mays
  Clone ID: MRT4577_123979C.1
cccaaggacttaaccggatctaaggcgaccaatggaaccttaaaatgaaacaaactccaaggaaaaaaaaatgataccccccgggaggggcctccaaccaaaaacggaaacccgcctaatggggggaaaaaaaattctggcactccacaggcaggaaaatattccacgacctcggacctttatacaaaaaaaccccctaggccaagggcttgttaagcatagaccccttggttaccaaaaaaggcctgaatttcgaggggaaaa

SEQ ID NO: 26284 - DNA, 425 bp, Zea mays
  Clone ID: MRT4577_12397C.1
cattgggtacctcgaggccggccgggctcgcgagtccatatccttgctatctactcgtggcgactgaggttgctaccctcccggcggcacaacattcgagggcgacccatgacaaaactcttgtgaaccaagcctcctgccccatcttgagcctcctacaaagcatagcccgcttccacatctggatactcgagatgaacgacctcatgattgagggtcgctctatgcggaatgtatgaatacctcagcgtgggcctccaagacgataacatgacctacttccctaattagccgaagtgagctctggatacatggactgcctctgggtgaccacatgacgtcgataatgagctgcgtgcaatcgtctactccgacctctggaaagatgtctggggcccaccccatggatacgtgtcacgatgtac

SEQ ID NO: 26285 - DNA, 436 bp, Zea mays
  Clone ID: MRT4577_123980C.1
ttgggtacctcgaggccggccgatgacgtcctgcttggtgtcataccatctgttctatcgggattgccaccgtattacctttggccagagattctgatattctgccctattagtatggaagaatacgagatgctcccgctccgcttgtggataccattatcacctcgagcacgagcaggcctaaaacaagaacggcaatgcagtttctcttctgaaattcatctcaatgatggagatcgttttcgaatgggaaggagattcccctgaaaggccaactgatgatatcgcttgtggaacgaaagatatcaacccaacgcaagctgctcctactgattgcccagtgctgtgcctcttaacattaactgagagcgttgctcattactgagcctgcatttcttgaagttgaatgcgaagcttgcatgttgtactgcgatat

SEQ ID NO: 26286 - DNA, 304 bp, Zea mays
  Clone ID: MRT4577_123981C.1
aattttcttttcaactttgacctttaagatgtcttgcttccagtggatcaatgttcactacttctggtttttgtcaagattgcaacctaattctggattgcagcactataaggctatgactactgcaattttagaataggaggtggggatgaggaagctaatggagatagacttagacatgttcggttttctaggattggagctcagaaatgattcctactcggattatttctctaatttatataaatttttatgagcgggaacgaatcctggcctggacaagcgaacgggccagtgttcattt

SEQ ID NO: 26287 - DNA, 378 bp, Zea mays
  Clone ID: MRT4577_123982C.1
gcttggttttttttttttttttttttttttttttttgttttttttttttttttttaaaaaggacaagcttttaataaacagatgcaaaatttggtttcgggggccttctagaagagtatacataatgtcctcgtctaaaacaatatacatagggggcgggggggaaactgtatgatgtacccccttgggtacaaacttgtgaggggtacccaatttttttgaacttttacaaatttacagcagcatttatttttcataagttcctcccatctcatttaataataaaaagttaaatgtcaagaaattgcactggtcaacttatttcaatatattattaatgggacgctttattccaaagctgacgattgggttgggatt

SEQ ID NO: 26288 - DNA, 398 bp, Zea mays
  Clone ID: MRT4577_123983C.1
gcgtccgcggacacatgggcggacgcttgggcggacgcgtgaacacaaatgactgaacaccagccgtattgtcccgactcctgacccctaccgatcctcgcctgctgcatccatggcgacgggggcggcgctctccaccgccgccaatcccagggggggctaccggtcccgcgcttcgctgggcaatcccgtgaacgggcttggcctcagcatgggccgcgagcgcccccagctgagcattgtgtgccagacggcgagcaccatctccgcccaccgcctctctcacatggacaatccgaagctgatgaacctcctccttctccttttcatctcctttcccaccgtccgcattgtcctcccccatggcgccttcttcctccctgccggctcccggaacc

SEQ ID NO: 26289 - DNA, 296 bp, Zea mays
  Clone ID: MRT4577_123984C.1
cccgttataaaacaccataaagagagcgagtgttctaccgttccgaccaagaaacaaagagcgaacttcatcggcgagaggggagagcataaactacaggcataggaccatgtacagatatctcgggaataaaagcgaccacaccacgtgctaccagatccttgtgatgcccaaatatgcactaaagaaccacctattgatgacctaagcaacctcactattgtagaaacacatctcacaagccgattatccctaaacgctaacgattcatgagaaggattctttcatctagatag

SEQ ID NO: 26290 - DNA, 343 bp, Zea mays
  Clone ID: MRT4577_123985C.1
taaaattctttatatcatttattttattgtttggaaaaacattatgtcttcaactacaattaaaaataacttatcaataataattactatgaagaataattttttgctttctttaagcacattttcaaatatcaactcatcctcaaaaacacgaggcccaagaaaaaacattaccatgaaaataaaaaattcaatatagagaatagacatattgtgttccaaggcaatctatattaatgaccctaacacgcctcaagaaatcgtacttctccttgcaccttttattcatttatatgtaaaaaacatcccttcatccctaactatttatttgacacttcaaccc

SEQ ID NO: 26291 - DNA, 846 bp, Zea mays
  Clone ID: MRT4577_123986C.1
actgatctccccacctcttccccccgccaagagcagcagcgaactgtgaattctagctctgtagcagctcaagatcgggcttgctagaaaaagccattttgagtctcttcccaaccatacaggctacagcaacaccatggcggcatcagtagcctgcgccttcttcttcgacgccgagccggtgggcgagccgggcatgccggcgctggacgcgtgcgcgctctgcgccaagccgctggcacgcgacagcgacgtcttcatgtacaggggggacacgccctactgcagcaaggagtgccggcacgagcagatgcacctcgacgccgtctccgccaggcaggccgcccggaggctgcagcggttctcgtcgggagcagagtccgggcgtgcacgccagggggtgtccgtctcgagctaaccggcgagagtgccaagcgacatacgtgcctgacgaagaaaggttattatgcttgagccagcatgatctccgtgcaccaagccgctggtgtccgtggttagctgatcgagcagcgcgcgaggtcgaggagacttgccatgcttgaagaagcaaggggcgggtcgcaggagtcgctcacggcaggccggcgctgcatgtgccgcctgtcaagtgatttgggcataaacgcagcggaaaaggggctggattggatctgaagaaagtcaagcaaacaagattccccgcggtttaactttgaggcggtcatgtctgcccctcagtttttttctttctgcgttattgtcacttctgtacaagctcatttgcaatagcactctcgctcggtaaactttcaagcgaatcgacatacaacatgccttgtgcaaaaa

SEQ ID NO: 26292 - DNA, 443 bp, Zea mays
  Clone ID: MRT4577_123987C.1
caagggaaaataagttaaactaaggaaagatggccccccttgggggggggggggaaccataacaacaaaggctaatgggttcaacaaataattcgcacccaaaactaaaacttaaaaattaattaaaacacagaagggggccccccccacaaacaaaagaaacccgggggcaaacgtccctgaccccgaaaaaaaacacagttgggggctggaaccctaaaatccccggaacagaaaaaccggggggaagcaactgtttaaccttgggggccttggcggcgtcgggaacccaaagggggaaaaggtccctggagcaccccaccttaaacttgacggggtccttggcccgtttgatccgaaccaaccgggcgtccttccgccgggaaaaaaaaaaaaagcccttgatcccggggatctgcttcggcagtgggggaaccccgggc

SEQ ID NO: 26293 - DNA, 476 bp, Zea mays
  Clone ID: MRT4577_123988C.1
ttggacaccagcggcatcgtctggtccgtgggcgggcacaggcccgcggggagcggcgcggtggcctgccctgcatccggcgtttcaggcttcatcacgtccaccggcggcgggggggagcctcctcctagggacgcgaccctgggccggcacctggcgcggcgactggtgcaggtgggcgtgagcgacgtgttcgccgtgccgggggacttcaacctgacgctgctggaccacctgatcgcggagcccggcctccgcgtggtcggctgctgcaacgagctcaacgccgggtacgccgccgacgggtacgcgcgcgcgcggggcgtaagcgcctgcgttgtcaccttcaccgtgggcgggctcagcgtgcttaacgccatcgccggcgcctacagcgagaacctgcccgtattgtgcgtggtgggcgggcccaacttcaaacgactacggtaccaaccacgttctgcaccacacca

SEQ ID NO: 26294 - DNA, 505 bp, Zea mays
  unsure (1)..(505): unsure at all n locations
  Clone ID: MRT4577_123989C.1
caggtcgcatgcacgatttggctatggctagcatgctcggatgggcttgtacacacggattgacacgatgcactcgaatacacaggctggaacacagcattactcnccaatctagcactgtgggtgtactagtcgatncacttgatgtgattgcctggacagctatataggtacatctagtaccacccatgtagtcaatcatatgacacattggatagtagagcctgctacattaatgcaatacatacagaatacgacttggactaacttacatcttggcaatgggctacatatggagaaacctacaccttacctgcccgactgactattacacctagagtattcattatagctaacacttcccctataatgttatggatcaatacataactattggagatgtttattgcatcataatgtaccagattgtaaataagatggaaccaccagctggaatcctataatgatattgaccttaatatgatgtattacatatgacctgcta

SEQ ID NO: 26295 - DNA, 167 bp, Zea mays
  Clone ID: MRT4577_12398C.1
gtgaagcaacttggagggggacaattgcagatttttcgggctacaccaggcccagagtacaacaaaaacttcctcaagccgaacacaatgcgcatgaggaattgcacatctacacacgtcctccggtacgaaaacaccaaacagcagggtatgctagcagaccgccc

SEQ ID NO: 26296 - DNA, 841 bp, Zea mays
  unsure (1)..(841): unsure at all n locations
  Clone ID: MRT4577_123990C.1
cattgggtacctcgaggccggccgggnacatcactccatcaaaagttaccatccattcctcntgaccactaaagcnncttcctcgttggagcaccaaacaaacacacaaacctaccaacaacactttaaccgccatgtcggaacaacaaactcccgcgaagaagacgcctaagaagctcggcggtaagaaggagcaaaagcagcaacccacccccgaccaaaccgacgaggccgagggcgagggcggagctgacgctgaggctgaagcagagggcggtgcccaagcagatggcgaggaggagcccgagccccaacaggagcgccagcagtctcgccgccgccagagccgtggtcgaggacgcaaaggcggttcacaggacagcgacgctgagtctgtcgcccgctcggatgtgagcgcatcaggcggacgtcgccaacgccagaagcagaagaagggaaagcagggtggtggtggaggactcgaagacatcaccgaaggtgttcccggcggtgacttggtcaacggcgccggcgacatggtccagaacacagcgggcgatgccgtcaacaaggttggcgacaccgctggccaggcgctgggtggacttaccggcggcaagaagggtggtgaagaggaggagggcggcggagagcagcttcgtctcaggctggagttgaacttggacattgagattcagctcaaggccaagattcacggtgacctgacactgggtctgctcaactagagtgttggacgaggtttcacgagacgttttgacgacggngagtaccagaggcaatgctctttttcttttgctatatggcaagatcgcgatagcta

SEQ ID NO: 26297 - DNA, 471 bp, Zea mays
  Clone ID: MRT4577_123991C.1
tcacccatccccataactattgctctccatcgtcatctttcccatgactacaaccctgttcccgtacgctactgctacagggcaacatatcggccagcccactcacccccatggactgccgactgctgatacctggcgtacggctcctgcgcggccgcctacgcatgatgctcgcgcagctccccactgtgggcctagcacatgtgctccccaggaggttcacgccttcttctgggaggacattaaacaccgcacaaattccctttgttgtgacccatccaaatgtgtatgagccatgtgatcattacttcgccatcgttgatgcagtactctcacaaatcgctgattctagacactgcagccaccgccatgaatggaggtaagctctcgccattcatcatgtcctccacctcggctgaaatcatcctcagggagccccgctctggaacccattaccgacgaactgacatc

SEQ ID NO: 26298 - DNA, 276 bp, Zea mays
  Clone ID: MRT4577_123992C.1
ggtgcagaggtctatgactgcaactacatgttaaatccaaatatttttactttgcctaaataaatactagaataggggggtggatttaaattgacaacaaggatcatgatcatatcaccatacacacactataactataaaacagggatactacgctattagctctctttaaatgcatttcatggaagcaaggtatatgatcagattattgtataccagagaacactcaagactcccaaatgaccgtctgccgaggtgagctccgaatgcctgccc

SEQ ID NO: 26299 - DNA, 155 bp, Zea mays
  Clone ID: MRT4577_123993C.1
gcgcgatcgtgatcggtcagtatgccgttacggagctcggattcgctcgagatcgtcagttcatccgtggtcttgtttctaggtccagagatagaggtatgcgtgctgtagaggcaactgtgggtgctgctccggctgcaagtgcggtaacggct

SEQ ID NO: 26300 - DNA, 844 bp, Zea mays
  Clone ID: MRT4577_123994C.1
ccggccgggacactactgctcacgatcctagctagccacctccctcgattcacaagtcacagggacagcagctggttagcttctgagatttctcaaaaccactctattagcaactagtgctctagcctctttcaagctttctacgacccatggaaggcatcatcccgttcattttcaaggtcatagcgcagtacaaagaagaagggcaggctgcctccttcggtggcatggcctccgacggttctgtcgaaccctccccgccggtgtcgtcgtcgtacgtgctcctgcctagtgactccgacgggcgccaccgcgacgagaggaacgacgacggccggccggtctgcccgacgtcgtccctggactccggggccgtcaccacctgcaccgcgagaccgtctccgctccggtgctcgtcgacgctgcgccggcgagcctaggatggtgaattttgcaggtttggcaacaccaaccggtgcatcggaagataaaaccaagtggtatatactctgggaaagttgctttttatgcctcgctagtcgctaatgaggcaggagtctcaaaggaggcttcgcatgttaaacatcaaggggttttgtagagtgaaaaataaacagcaaccaatatatagccggcatgtgcgcaacagcggtctgaggcatgtaatatacatcatggttgtaggaactgcgttgtaattctatatgattgtcggcaatgactaatataaaaaacagtttcgttagacctagattcaatcgtatgtgcaatcgtggtttgttagagacttttttttataaaactataagctggtgtgaaaaaaaaaaaaaaaaaatttgcggcc

SEQ ID NO: 26301 - DNA, 420 bp, Zea mays
  Clone ID: MRT4577_123995C.1
ctccgaaaaaatttaaaaaaaaaaaaaaaaagggggagggggaaaaaaaaaaaaaaaaaaagggcaaaacaatataaaaaaatcaaaacttacgaacacttacatacaggggccatcccttttgggggtcccctctaaagccactaccctgcccgccgcttacctacgttttttttggtaaaacctgggggcacccgacctaatttgcattgccgtagattcccctttccccggctgggaaaaccctgaagagccccaccccattcccctttctcaacattggccctccctgattggcggtcggaacgaaccgtcctccccaattttaatcgccactctttgggaatgtgaccctcaccatgaccggtccccttttcaccgccctattaccccctccttaccttgtgttcccttcctttt

SEQ ID NO: 26302 - DNA, 634 bp, Zea mays
  Clone ID: MRT4577_123996C.1
attgggtacctcgaggccggccgggttggggtacactcccagtcactctgcaaccagcatgtagtttcatttcagacaagcgtagccactagcggctcaggaggcatgccaacatacctggattgttccactgggatggatgccagcgtggggatgctgaccacaccttcagtggttgtttccactggttcatccaatatgccagcagattccgggcagagcctcaaatatggagggccactggctgcggattggacacagctcgagcttgaaattctgagagatggcatggagaaatatgttcatgaacaaggcatcatgaagtatataaagatagcagcatcgttaccgaacaagacagtaagagatgtcgcaatgaggtgccagtgggtagggaagaaagtaaatacaagacgaaggaaaccccaagaacaccatactgggagaaatacaaaagaaagaaaggataaatttgtagagcctgcgccgcggggaacaaatcatcctcttcaaacagcctctgagatagatcgcccagtgctgcatctgctggaggaaaataataggcttcttaatcaaatcgaaaacaatattctcagatttcagccttataacaacattccatctcttccat

SEQ ID NO: 26303 - DNA, 2414 bp, Zea mays
  Clone ID: MRT4577_123997C.1
attgttcggaggccatcgccgctggtgggcggtggcttccccttcccctgtattagcagcgaggaggcagcagctgaagctctcgtctctgcctctccggacctccggtgaactccaacagagaccacctcctccatccgtcggtcatccatctgtgattccttttgcgtgtgcaagttgttaaatcggcacacggcctccgcttttggagtggagaggggcatatacggtttactggtgcgcccggggccgccgcttttcccgctggcctctccccggccgtcccattggagcgcgcaaagctgggcggcaccatttaaagaagcaaactgcactccaccattagcagcaccaaggcaccaccaccattccaccaagcacgccgccacgccacacgatctaacgcacaggcaggtgaggaccagaccggccggaccttgccttctccgttgggggtctctgcttgctgcggcgcgagagcagagattagatcggatttggggctgggttcttggagcagtaggcaccaaacttgtctggttgggggagctgagcttccttctacgctggaagatccaaaatctgttctcgaaaatttactgcgcctacagatggcagatgatcctaatatgaatttcagggaattctcccagtcactctgcaaccaggatgtagtttcctttcagacaagcgtagccactagcggttcaggagacatgccaacatatctggattgttccactgggatggatgccggtgtggggatgctgcccacaccttcggtggttgtttccactggttcatctaatatgccagcagattcagggcagaacctcaaatatggtgggccgctggctgcagattggacacaggttgagcttgaaattctgaaagatggcatggagaaatatgttcatgaacaaggcatcatgaagtacataaagatagcagcatcgttaccgaacaagacagtaagagatgtcgcaatgaggtgccagtgggtagggaagaaagtccatacaagacgaaggaagccccaaggacgccatactgggagaaatacaaaagaaagaaaggataaatttgtagagtctgcactgtggggagcaaatcatcctcttcgaacaggtatgagagcctcttcatttgtgctgcataatgttcaaaacaatatgtttctatgtggaggttggtaggtcacttgactacttgagtatcaggtctaattgtttgcttccatgtatcttctttgtttcttgttatatgccgttaactgtctcgtgcaattatcaaatattatgatctggcatttggtttttgcatttgagaggataaatactgctgccaatactggagtgactgaactatttcactttatattgactccattgctaagtttatcgcagtttctagtgtcaagtaacagaaagggataaaaaaaagtcgacacttcggatgtttactgttcaagaacatgaatgagaagagctttggcctctgagatagatcgtccagtgcagcatctactggaggaaaacaattggcttcttaatcaaatcgaaacaaatattcagaaatttcagcctcataacaacattgttctcttccatcgggcaagaaggagcatcaatgatcttctacagatcacgacccaactgtttggactttttaggacaaagatgcctccactaagcgtgtcagtggatgaaaatcttgctagcttcgtgcttcctggcattacaacggatcaagctcttggaagcaacctttgaaggaggagccaagaggatcactgccaagtgccaacacgtttcagtttaggcagactttgggactttattgctagatggacgggacggagcatgtggagaactactgcacaccaggtggatggagatcaatagggtcgccattcaccaagggcccctgctttctctatctgaaagctaaaggagaggtgactgaaaccgttcagccgtcctgccctgcaactagccttaaacattggtggctaaacatcgagggtcttaggaactgcagttttttggccttgctgcacttgtaaataactaggattcttttttggtttctccttcagacggtagggtgggtaaatagatgcagcggaggaagctcccgagaagggactcgctacataacaagtaggaacctttttgcctgtcgctacttgttgcgcgtcctgctcctgcatgtgaacgtaatccgtggcatctgccactctggcaacgaaacagagaagagaaactgccgaataggtggcatgccacttatggaggcccccaaccggggttggtttttaattttttatactaaaggcttgttgtttttcacttgaaggtcctgtttgccttgcttgattatttattggacaagtttttagtgctgagtggttg

SEQ ID NO: 26304 - DNA, 1057 bp, Zea mays
  Clone ID: MRT4577_123998C.1
aaaccatagtggcaattcttgttcggaggccatcgccgctggtgggcggtggcttccccttcccctgtattagcagcgaggaggcagcagctgaagctctcgtctctgcctctccggacctccggtgaactccaacagagaccacctcctccatccgtcggtcatccatctgtgattccttttgcgtgtgcaagttgttaaatcggcacacggcctccgcttttggagtggagaggggcatatacggtttactggtgcgcccggggccgccgcttttcccgctggcctctccccggccgtcccattggagcgcgcaaagctgggcggcaccatttaaagaagcaaactgcactccaccattagaattcagcaccaaggcaccaccaccaagcgcaccgccacgccacacgatctataacgcgcaggcaggcgaggatcagaccggccggggcttgccttctccgttggggttgccttctccgcggcgcgagaacagatatattggatcggatttgtgccgggttcttggagcagtaggcaccaaactcgtccaggttgggcaaaaatgcagtgtaaccagtagctaacggagctctctcatcttgtactgtggcatttcttaagttgtctgggagctgaatctccaaggctggaagatccaacatctgttctcgaaaatttactgtacctgcagatggcagacgatcctaacatgaattttggggcattctcccagtcactctgcaaccagcatgtagtttcatttcagacaagcgtagccactagcggctcaggaggcatgccaacatacctggattgttccactgggatggatgccagcgtggggatgctgaccacaccttcagtggttgtttccactggttcatccaatatgccagcagattccgggcagagcctcaaatatggagggccactggctgcggattggacacagctcgagcttgaaattctgagagatggcatggagaaatatgttcatgaacaaggcatcatgaagtatataaagatagcagcatcggtaccgaacaagacagta

SEQ ID NO: 26305 - DNA, 1107 bp, Zea mays
  Clone ID: MRT4577_123999C.1
ccacgcgtccggtggtccgttccattgggattgggtgggtctggggacctaggcagaccagatggccgggctattcaccgagcaggctgctgtgtacgccgcagcacggccggcgtacccgaaggatctgtttgccaagctctcggcgctcactgctcaccaccgccgcgcttgggacgtcggtactggcaatggccaggcagccatcggtgtcgcggagcactacgacagcgtggtggccacggacgtgtccgcggaacagctgcggcacgccacgccacaccccaaggtccggtacctgcacacccgcgacgccacgccgggggaggaggacctcgtcgccatgctgggcggcggcgaggccagcgtggacctcatcacggtggcacaggccgtgcactggttcgacctcccggcgttctacggcgccgcgcgccgcgtcctgcggaggcccggcggggtgatcgcggtctggggctacaactaccgcgtgagccccgtggaggacatgatggcgcgtttcttcagcaccacgctgccctactgggacccccgagctcggtattgcactgacggataccgggacctgccgttccccttcgaggacatcgggctcgggaaggaaggagagccggcgagcctcgacgtggagcacgagatgtcgttcgagggcctgattggcatgctgaggtcctggtcggcggtgacgacggcgaagcagcagggcgtggacctgctgggggcccgcgtcgtgaaagagctggaggaagggtggggtggggcggagctggtgcggaaggtcacatacaaggccttcctcctggcaggcaccccggggcccatggctgatgagtaatcaatgaggacctgtttggaaatatagttttctcgttctacagtatttcaatactatagtatgtcgtatgttataacataaaactgtagttttagcaaaactaaagtaaaatcaaagtagttcttcatacatagcactgtttggtagcatatagtttttggcttatataaataaggaagataagtttaaattcaaatagctacaacttatgatgggctgcatcatcggtaagacaagtttaaattcaaaac

SEQ ID NO: 26306 - DNA, 376 bp, Zea mays
  Clone ID: MRT4577_12399C.1
ccaaaaacccggccctatgggtcggggggaaagtttttttatccaaaaaccccacccaaaaggggccccccccaaaaagggggggggaaaaaaaaacaaatttccatgccccaaaggggaaaaacccgctcaaggctttcccgggtcttaacaaaaactaggggggggcaaaccccccaggggggttttggggcccgtttttaggggaaaaaaaccttccctaggaaaaaagctactaagggggttaaaccccacaaaacgcctaatgcttccattttccaggggcaattccccccaaaaaagtagggccaaaccacgggccaaaaaaggggtgaaccccccaacccctttttaaggcctcttttttcatggggcg

SEQ ID NO: 26307 - DNA, 330 bp, Zea mays
  unsure (1)..(330): unsure at all n locations
  Clone ID: MRT4577_1239C.1
cccaggcgagcgcgcaggccgccgggtacggctacccgcccccgcagcaggccgggtacgggtacggctacccgccgccgcaggccgccgggtacggttaccagcagcaggccgtgaggccgcagaagaagaagaacaacttcngnnagggcgcctgccgccgggctgcncgaaggcgccgacggnggcctcctgatcggcgacacgatctcggactcggcggcgtacgacgccggttacgacgccgggntcgacgacggcgggggctccgatttctagcgcgctccggggcacgggggggtgacgccacgccgcgccacagagacggag

SEQ ID NO: 26308 - DNA, 210 bp, Zea mays
  Clone ID: MRT4577_123C.1
gctggggaatacttcctttgccccgcggggggtgattttttaaaattgaattggaattcgccccgaacacccaccttatggggggcaaaggggacttttgggggaagaccaaagccggttaggggggaggacccttaaaccgcccccccccggggggggaggggggcaccggggcccaagttggttccattaggacggtttgggggggag

SEQ ID NO: 26309 - DNA, 3048 bp, Zea mays
  Clone ID: MRT4577_124000C.1
ccaggttggagaaaaatggtttgttaccattagctaactgacctctctcatcttgtactgtggcatttcttaagttgtctgggagctgaatctccaaggctggaagatccaacatctgttctcgaaaatttactgtacctgcagatggcagacgatcctaacatgaattttggggcattctcccattcactctgcaaccagcatgtagtttcatttcatacaagcgtagccactagctgctcatgaggcatgccaacatacctggattgttccactgggatgaatggctacctcgaggctggccgggcaccttcattggttgttttcactggttcatctatatgccagcagattccgggcagagcctcaaatatggagggccactggctgcggattggacacaggtcgagcttgaaattctgagagatggcatggagaaatatgttcatgaacaaggcatcatgaagtatataaagatagcagcatcgttaccgaacaagacagtaagagatgtcgcaatgaggtgccagtgggtagggaagaaagtaaatacaagacgaaggaaaccccaagaacaccatactgggagaaatacaaaagaaagaaaggataaatttgtagagcctgcgctgtggggaacaaatcatcctcttcaaacaggcatgacagcctcttcatttgtgccgcataatggccaaaacgctatgtttatatctggagcctcagagatagatcgtccagtgctgcatctgctggaggaaaataataggcttcttaatcaaatcgaaacaaatattcagagatttcagcctcataacaacatcgatctcttccatcgggcaagaaggaacattaatgatcttgtacaaatcacgacccaactgcctgggctgaggaccaagatgcctccacttactgtggcaatagatgaaaatcttgctagcttcgtgcttcctggcattacaatggatcaagttcttggaagcaacgatttgaaggaggagccaagaggatggtagatccactgccagcatgtttcagtttaggcagactttgggactttattggtagatggatggaccatatggagaactactgcttcattttgcacaccaagtggcggtgaatagggtcaccgttcaccaaggaccccctgctttctgactttctctatctgaaagcgaaaggagaggtggatgaaaccgttcagctgccctgcagctacccttagacgttggcggctacacagcgagggttttaggaactgcagtttttgtggccttgctgcacctgtaaaaaactgtgattctttctggtttccccttcagacagtagggtaaatagatgtagcggaggaagctcacaagaactagctaaatagttctctctagaagggaaaaaaaatgtcgctacatagcaagaagaaggatcctttttgccctgtcgccatttgctgctagttcttccttcatgtgaacgtgatcaaagttcctagttctctcttatccgtgctccgcctttgtatccaagaattggaaatatagatttctgagtatcctacgtgatcttggagaaaatctcatcgagagcggagacgatgttgccgtagtgctcctgcacctggagcgcgtccttgtctctggcggcgtaatccaggctggtgacgctgttgaagaggtcggagtagagcctgcggagctcagggcgctgccccgtgggcctcgcctgtatgatggcgtacaggtcctgcttgaggttggacgcgctggagcgcagcgccgcctgcagctcccgccacgccccggcgtcgatgaagcgcttcacccccagcaggttgcgcgcgtgggtccgcaccacggcctcggcctcctcgctggacttctccggcagcatgagctgcaggtcgaacgtgccggcggcgctactcgccacgggcggcagtagctgggacgccaggattattgcccccgccgtcgctgctagcctcctccggctgctgctgctgatggtggtggctgcccttgacctctgcgactgttgcttgctggtgctgttgctgctcggtggtttgggggacgacgtagtttccgcaagcgacaacaggctcgcggacagcgcctgtacagcgagccgcgatgccattgcggaggcggagctcgtgcaccggctgtggttcggccctcccggccggcctcgagggattcaatctggtttccccttcagacagtagggtaaatagatgtagcggaggaagctcacaagaactagctaaatagttcgattagttcctaatcgaaaaaaaaaaaaaaaaaaaaaaaaaaaaatcttgaagaaaatctcatcgagagcggagacgatgttgccgtagtgctcctgcacctggagcgcgtccttgtctctggcggcgaaatccagctgcggtcaagagcagaacacacgatgagcgttgagcaagcgcactatgccattgcccacgggcaacggaacgataagacaccgagccgcacgcttacgctggtgacgctgttgaagaggtcggagtagagcctgcggagctcagagcgctgccccgtgggcctcgcctgtatgatggcgtacaggtcctgcttgaggttggacgcattggagcgcagcgccgcctgcagctcccgccacgccccggcgtcgatgaagcgcttcacccccagcaggttgcgcgcgtggatccgcaccacggcctcggcctcctcgctggacttctccggcagcatgagctgcaggtcgaacgtgccggcggcgctactcgccacgggcggcagtagctgggacgccaggattatcgcccccgccgtcgctgctagcctcctccggctgctgctgctgctgctggctgcccttggcctctgcgactgttgcttcggtggtttgggggacgtagtttccgcaagcgacaacaggctcgcggacagcgcctgtacagcgagccgcgatgccattgcggaggcggagctcgtgcaccggctgtggttctcgccttctcgatggatggacggacggggtcccggccgg

SEQ ID NO: 26310 - DNA, 588 bp, Zea mays
  Clone ID: MRT4577_124001C.1
agttagagccctttcactttttgagataaaataaaaatgatgtatctagaaaaaaaaattaaaaggtcttataatttaaagcagattaaatacaaattaaaaatcaaaattataccagcaaaactgcaaaaggatgctagccatttattctcccagattgtcatggcgggcccaattatcagaacaagagaaaaatatggcattttcctgtaccaatgccaaccaactttcgagtacacaagcatcgagccatcaccctggtaaccgctgaaatagcacatcacatgtgtgacctcaacgaagcttgctgagatgagcttggtgcactctgcaaagaatatggcatcattaatttaaacaaactgattactgatagcttgaagttgtgtattcttagcagcggatgttgaaccaatgttctactggatgctctgtcgattactttaccctaaacggttaccgccaccactaacaccaaatcaaaagtccaactacctgagaatgaggaggcttcgtgtttgcaaaccaaaagtaaatagtgcagtagaccaccacaataaagattcccatcatgagcccaagagtttt

SEQ ID NO: 26311 - DNA, 281 bp, Zea mays
  Clone ID: MRT4577_124002C.1
agtacgtcgacagacttaatcctaggctgcccgcagcctgttgcgatgatgctccaacttagacattgtaacgcgatagctcctctccaggatggtcagggagttactagactcacgatacagcctatccacattgtcatgagatccaacgagtgctcgttttcctcactgcacgcaagaacatcactaagcattgaagcaagcagagcaagaagcaggagcagccaaggaagtttacctacatgtgccatcttctcggagtcgagtgtgcattcagagag

SEQ ID NO: 26312 - DNA, 587 bp, Zea mays
  Clone ID: MRT4577_124003C.1
aactctccattacatacttccccacccatccaccaaaggcgcagagaggggagaagaagaagaagaagaagcggagggggaggaagatgccttgcctgaacgtgtcgacgaacgtgaacctggagggggtggacacctccgccgtcctcgccgacgcctccagcaccgtcgcaaccatcatcggcaagccggaggcctatgtgatggttgttctcaagggttcagtgcccatggcatttggaggtacccaggagcctgcagcctacggcgagctggtttccatcggagggctgaacgctgatgtgaacaagaagctgagcgccggcattgcttccatcctggagtcaaagctgtccatccccaagtcccgcttctacctcaagttccacgattcaaagcgctcagactttggatggaatggatccaccttttagacgcatcatatggcatggagccttgcatgaactccagagttcctaatattctgtccattgcctatttaaggagaaactgctgcagtaagacatcgtgtcagtttaatggccagtgtttatgagtgccggagtacttgtgtgatctagttggtt

SEQ ID NO: 26313 - DNA, 469 bp, Zea mays
  unsure (1)..(469): unsure at all n locations
  Clone ID: MRT4577_124004C.1
naaaaaannntttnntnnaaaaaaaaaaaaaaaaaaaaaaaaaaaaaaaaaaaaaaaaagataagagaaaaaaaaaaaaaagggggggggatancaaaaaaaaaaattaaaaaaaaaaaaaaaaaaaaaaaaaggggccccccctttaaaaaacaaaattttacttcccctaaactccaacttaaaactttttttttagggtccccaaaataaaattttttgcccgcttttttaaaacctatgaattggaaaaaccttgcctttcccaaaattaaacccttttaaaaaaatccccttttccccacttgtgttaataataaaaagcccccaacctatccccttcccaaacatttccccatcctttatggaaaattgtaccccccttttatcgcccttttaaccccgggtgttttggtgttttccccaattttaccctttaatttttaaatcgccatatcccccttttttt

SEQ ID NO: 26314 - DNA, 357 bp, Zea mays
  Clone ID: MRT4577_124005C.1
ggacgcttggacgtcgtcctcctccattcggacgtcgggggggacaccgtctctatagtttttccccagacgtcaccagctgcttccacaccacgacatctctgttccattagtccaccctggacgttgccattgtcaagccatcgtcttcgaccttgctgtgcaggccgttgtgctgtctctgccggtctgctcgtcgtggcatggtcgtggaacctcctcagcgtcgtgcgcgtactccctctgcaccgagcacccactacaactcaccggtgctgaatctgctctcgcctggacgtcgtcgtctctgacttcagcagcagtagccccccgatctccacatcacgtgtgcgatcc

SEQ ID NO: 26315 - DNA, 387 bp, Zea mays
  Clone ID: MRT4577_124006C.1
gcgcccacgcgtccgacgcgtcaggtgcaccgagcacccgctgaattgaacacctcgactaccatggacatggaggcgcaggcggcaaaggcgagaaccgaggacccgcgacgtcctcccagcgacggcggggccgcaggagcgaagtgcgtggagggtggaggcgacggtgccagccggagcacggcgaagcgggaggccgagaaagcggctgccgtggaggcggagggcgccaagccgctgccgctgccgtacgaacgggtgccgcagccgcgcgacgtgtacaacgagcagctggagcggatgtgaatgcatgttttctgctcggcagtctcgatgaaccccaatcgacccaatgatcgatcgagcgatcctgctacaggccct

SEQ ID NO: 26316 - DNA, 478 bp, Zea mays
  Clone ID: MRT4577_124007C.1
gccggccgggccggaaaaagcgagagagctaagctaagccgagctaagaagcacagcaagtctcaccagactagcggctagcgcgagaatggccaaggacatcgaggccgcggcggcgcacgagggcaaggactactcggacccgcccccggcgccgctggtggacgcggaggagctgaccaagctgggatcgtctgcctccttcagccgctagatcgatggcctcccgccggacaaggacagccggaggcgtgaactgtagatataccagaggctggacaaggacagcgtgtcgtcgttggttgcctctagccatgcgtcgttatatatgcatgccttatgatcagtttgtatttccactgcattttgcttgctttaattttccttccaagctagtgtgattgttgtgctgtacttatccgtgtacgacgagtcgacgactgggtaaaacgaaaaaaaaaaaaaaaaaaggccccta

SEQ ID NO: 26317 - DNA, 996 bp, Zea mays
  Clone ID: MRT4577_124008C.1
atcccctttgcaagtatagtctctctgctaagcgaagcgaagcttcaagctagtctcggcggctctagaagacgatgggcaaggacgacgtgatcgagagcggcgctggcggcggcgagttcgctgccaaggactacacggaccctcccccggcgccgctgatcgacgcggcggagctggggtcctggtcgctgtaccgcgccgtgatcgccgagttcatcgccacgctgctgttcctgtacatcacggtggccaccgtgatcgggtacaagcaccagacggacgcgtcggcgtcgggcgccgacgcggcgtgcggcggcgtgggcgtgctgggcatcgcctgggccttcggcggcatgatcttcgtcctcgtctactgcaccgccggcatctcggggggccacatcaaccccgccgtcaccttcggcctcttcctggccaccatccccgtcaccggcaccggcatcaacccggccaggagcctgggcgccgccgtcatctacaacaaggacaagccctgggacgaccactggatcttctgggtgggccctctcgtgggcgctgccatcgcggccttctaccaccagtacatcctccgggctggcgccatcaaggccctcggctccttcaggagcaacgcgtgatgagcggggcttggctgtggagcaatggcgggcgacctacgggcggggggccgtgagcgaggagaatgccatcattcatcgatcgacttgggtgccggtggttggttcgggtcgccttttttttgtttcagcagctgctgcgttgcgcgcgtgcgtgagatttggtttggtttcgttcccctgcaatgtaatcatgtcgtgactctcaagggattattccgctctgctcttatggtctctgttttctatttaatgattgttattaccatgtagcagtaaccatcgtcatcagtgagaaccttgttgcttctgtccaaaaaaaaaaaaaaaaagcggccgccaccgcggtgga

SEQ ID NO: 26318 - DNA, 918 bp, Zea mays
  Clone ID: MRT4577_124009C.1
gaagacgatgggcaaggacgacgtgatcgagagcggcgctggcggcggcgagttcgctgccaaggactacacggaccctcccccggcgccgctgatcgacgcggcggagctggggtcctggtcgctgtaccgcgccgtgatcgccgagttcatcgccaactcgctcgcctccggctactcccgcggcaccggcctcggcgccgagatcatcggcaccttcgtgctcgtctacaccgtcttctccgccaccgaccccaagcgcaacgcccgcgactcccacgtcccggttctggctcccctccccatcggcttcgccgtgttcatggtgcacctggccaccatccccgtcaccggcaccggcatcaacccggccaggagcctgggcgccgccgtcatctacaacaaggacaagccctgggacgaccactggatcttctgggtgggccctctcgtgggcgctgccatcgcggccttctaccaccagtacatcctccgggctggcgccatcaaggccctcggctccttcaggagcaacgcgtgatgagcggggcttggctgtggagcaatggcgggcgacctacgggcggggggccgtgagcgaggagaatgccatcattcatcgatcgacttgggtgccggtggttggttcgggtcgccttttttttgtttcagcagctgctgcgttgcgcgcgtgcgtgagatttggtttggtttcgttcccctgcaatgtaatcatgtcgtgactctcaagggattattccgctctgctcttatggtctctgttttctatttaatgattgttattaccatgtagcagtaaccatcgtcatcagtgagaaccttgttgcttctgtctaaatcaaccgagacgtgtggagtggatgtggatcgaacattcagcacttgtgacatctctct

SEQ ID NO: 26319 - DNA, 317 bp, Zea mays
  unsure (1)..(317): unsure at all n locations
  Clone ID: MRT4577_12400C.1
cccacgcgtccgcccacgcgtccgctcatgatgcacaacgggacctactgcgctgaaattgctcacaacgtgtccactaagaagcgcacggagatcgtggagcgtgctgcgcagttcgacattgcggtcacgaacaagcttgctaggctccgcagccagtaggacgagtagtctgatttcttgacttaacgacgaactggatgctgccattcctttctgtnggaaactacattgctngtgtcttgttaagtactgaaaaccagagtcactcctaacctttttgcaatcagtagctactaaaatgtggcaaanaaaaa

SEQ ID NO: 26320 - DNA, 202 bp, Zea mays
  Clone ID: MRT4577_124011C.1
agtgagtcgtattaagtgacgctagccgttctaaactcgcatctcaggatcataattagatgcaagttctcctccatcaagtctctaggacagcttcacgagggcggggccagcctcaccggagtcatcaccatcgctggctcctgcgcatccgtctccggttcgccgaagagctactacatgtcgttgtcggagtcgcaca

SEQ ID NO: 26321 - DNA, 524 bp, Zea mays
  Clone ID: MRT4577_124013C.1
gggccggggttctttcttccaatccaccatctctctcttctccgcgcccagcgaatcccaaaccctacggccgccgtggcggacccggcgccaatgccggcatgttcatcgcgtttacgcgctctacttctggtcgcgtgctctcagcaaccgacgaggtatcgcatgccatcccgctcgctctgcgacaatggtgccaagaccaccatactctatagactgctgatgtcagagggcgtctccacgatccccacaaatgtcttctccgtggagaccgagcattacaacaacgtcaagctccaactatgggatctggatgtccaaagaagaatcaggacatactggagacgttactgtccagagactcaaggtatcatatatggagatgatacacgcgagacagaatacgctcgtaacagcgagagaataattccatgacaatccttgaatagcatgaactaaaaggagcagccggccttgtgaaagcaattaagcagggtcatccaaggagaactcgcatgatg

SEQ ID NO: 26322 - DNA, 1298 bp, Zea mays
  Clone ID: MRT4577_124014C.1
ctcgaggccggccgggccggggttcaaaagcgagagagctaagctaagccgagctaagaagcacagcaagtctcaccagactagcggctagcgcgagaatggccaagcgacatcgaggccgcggcgcacgagggcaaggactactcggacccgcctccggcgccgctggtggacgcggaggagctgaccaagtggtcgctgtaccgcgcggtgatcgccgagttcgtggccacgctgctcttcctctacatcacggtggccacggtgatcgggtacaagcaccagacggacgcggcggcgtcgggccccgacgcggcgtgcgggggcgtcggcgtgctcggcatcgcctgggccttcggcggcatgatcttcatcctcgtctactgcaccgcgggggtgtcgggagggcacatcaacccggccgtcaccttcggcctcttcctggcgcgcaaggtctcgctggtgcgcgcgctgctatacatcgtcgcgcagtgcctcggcgccatctgcggcgtcgggctcgtcaagggcttccagagcgccttctacgtgcgctacggcggcggcgccaacgagctcagcgccggctactccaagggcaccggcctcgccgcggagatcatcggcaccttcgtgctcgtctacaccgtcttctccgccaccgaccccaagcgcaacgcccgtgactctcatgtccccgtgcttgcccctctccccatcgggttcgcggtgttcatggtccacctggccacgatccccatcaccggcaccggcatcaacccggccaggagcttgggcgctgctgtcatctacaccaaggacaagccctgggacgaccacgtacgtaaacgcctgtgtggtttacaggacaaccagccagcactcgtgatgtacaattaggatctcatcgtttaaaccctttcgcagtggattttttgggtgggccctctcgtgggcgctgccatcgcggccttctaccaccagtacatcctccgggctggcgccatcaaggccctcggctccttcaggagcaacgcgtgatgagcggggcttggctgtggagcaatggcgggcgacctacgggcgggggaagtcgtgagcgaggagaatgacatcatcgatcgacttgggtgccggtggttggttcgggtcgccttttttgtttcagcagctgctgcgttgcgcgcgtgcgtgagatttggtttggtttcgttcccctgcaatgtaatcatgtcgtgactctcaagggattattccgctctaaaaaaaaaaaaaaaaaaaaaaaaaaaaaaaaaaaa

SEQ ID NO: 26323 - DNA, 1408 bp, Zea mays
  Clone ID: MRT4577_124016C.1
acctcacgcactcatccattcgaccattccttaacatccttgttgcaagcggcgccagctttgctcgcgctctctcgcagctgctacgctaaagcaagcctagtctctagaggaggaggcggagggggaggccatgggcaaggacgacgtggtcgagagcggcgcgggcggcggcggggagttcgccgccaaggactacacggacccgccgccggcgccgctggtggacgctgcggagctgggttcgtggtcgctgtaccgcgcggtgatcgcggagttcatcgcgacgctgctgttcctgtacgtgacggtggcgacggtgatcgggtacaagcaccagacggacgcgtcggcgtcgggggccacggccgacgcggcgtgcggcggcgtgggcgtgctgggcatcgcgtgggccttcggcggcatgatcttcgtgctggtctactgcaccgccggcatctcggggggccacatcaacccggccgtcaccttcggcctcttcctggcgcgcaaggtgtcgctggtgcgcgcgctgctgtacatggtggcgcagtgcctgggcgccgtctgcggcgtcggcctcgtcaaggcgttccagagcgcctacttcgaccggtacggcggcggcgccaactcgctcgcgtcaggttactccccgcggcgccgggctcggcgccgagatcgtcggcaccttcgtcctcgtgtacaccgtcttctccgccaccgaccccaagcgcaacgcccgcgactcccacgtcccggttctggctcccctccccatcggcttcgccgtgttcatggtccacctggccaccatcccagtcaccggcaccggcatcaacccggccaggagcctgggcgccgccgtcgtctacaacaaggacaagccatgggatgaccactggattttctgggtgggcccgctcctgggcgctgccatcgcggccttctaccaccagtacatcctccgggcgggcgccatcaaggctctcggctccttcaggagcaacgcgtgatgagcagaccaaacgaagggcttcgctggactgcgtgctggagcaacggcgatcgatcgatctagcgggagaaaaggagaatagtcgggcgggcgggcgcccaagtaagaaaaataagtttgtgggatttgggtctcgttaattaccccggccctgtaatcatcaatcaccatgtgtgcagtgtgcgtataatatctgctgtcaagggatcgattattcctctctctctctctctctgctctcgtagctccttctgatttatcgttattatgtagcgacaacaacgaccacgaccaccatcatcatcagtgagaaacctcttgcctctgtctaactcaaccgacatatatggttcagcttttttctgaccagcttttctgaaaaaaaaaaaa

SEQ ID NO: 26324 - DNA, 1686 bp, Zea mays
  unsure (1)..(1686): unsure at all n locations
  Clone ID: MRT4577_124017C.1
cattgggtacctcgaggccggccgggatctttgcgcttggggcaatgacgcagcttatgaggtcataccgaggcgcgtcaattgctggttgaaaactatttccaaaccccctctttggcccactgggccactgagaatttctggaagggctccttttcctcggagaaggtaaagccctaccccacctcacgcactcatccattcggccattccttaacatccttgttgcaagcggcgccagcttgctcgcgctctctcgcagctgctacgctaaagcaagtctagtctctagaggaggaggcggagggggaggccatgggcaaggacgacgtggtccagagcggcgcgggcggcggggagttcgccgccaaggactacacggacccgccgccggcgccgctggtggacgcggcggagctgggttcgtggtcgctgtaccgcgcggtgatcgcggagttcatcgcgacgctgctgttcctgtacgtgacggtggcgacggtgatcgggtacaagcaccagacggacgcgtctgcgtctgcgtcgggggccggggcggacgcggcgtgcggcggcgtgggcgtgctgggcatcgcgtgggccttcggcggcatgatcttcgtgctggtctactgcaccgccggcatctcggggggccacatcaacccggccgtcaccttcggcctcttcctggcgcgcaaggtgtcgctggtgcgcgcgctgctgtacatggtggcgcagtgcctcggcgccgtctgcggcgtcggcctcgtcaaggcgttccagagcgcctacttcgaccggtacggcggcggcgccaactcgctcgcgtccggctactcccgcggcgcggggctcggcgccgagatcgtcggcaccttcgtgctcgtgtacaccgtcttctccgccaccgaccccaagcgcaacgcccgcgactcccacgtcccggttctggctcccctccccatcggcttcgccgtgttcatggtccacctggccaccatccccgtcaccggcaccggcatcaacccggccaggagcctgggcgccgccgtcgtctacaacaaggacaagccatgggatgaccactggattttctgggtgggcccgctcctgggcgctgccatcgcggccttctaccaccagtacatcctccgggcgggcgccatcaaggctctcggctccttcaggagcaacgcgtgatgagcagagctaaagaaaggccttcgctggactgcgtgctggagcaacggcgatcgatcgatctagcgtggggagaggcggataggcgggcgcgcgagggaggagaataagtttgtgccggtggcccggtctcgtcggtcgcttttgttccagcatgcagctgcgtcgcgttcgtgtgcgtgcgtgggggtctccttaatttccccggcccctgtaatcatcaatcaccatgtgtgcgtataatatctgctgccaagggatcgattattcccccccccccctctctctctctctctgctcttgtagctccttctgttttatcgttattatgtagcgacaacaacgacgacgaccaccatcatcagtgagaaacctcttgcctctgtctaactcaaccgacatgtggagtcttcatcatctgctgttctcttcttgctcgttcgtacgttgtntctgacctctctgtgtgtattgtattgattgcat

SEQ ID NO: 26325 - DNA, 554 bp, Zea mays
  Clone ID: MRT4577_124018C.1
cttatcgacttctatgaggaaagctggcgcgcccgcagagctccggtcctgtatagccggcgcgacccacgcgttcgtaacaagcaaattataaagtgggatacaggagctacaattcgagctaccatggcggccaagaaatttttccttcttatgctccctgctctttctggatgtgggggtaacgcaacaatttttccttaatggttactaacttgtatagctttccttctttccccatacctttcatcaatgataggttaagtatgtgaaaacccagcttttgaaccctataagctccaacaagcaatcgcaggagcaacattcctttatcacccttggttaaacaatccccaaccctatgtttggtgcacccattggttcaaaccatcagggcacaaccacctggtgccaaccgtgcctgcttgaattaaccaaggtgctcctggtaaccttttttccttattttaaggacgacaatttgcttcattgaaccaactggctaacttgaaaccagccgcttaattgactggaaaaatttttacaatcagtca

SEQ ID NO: 26326 - DNA, 211 bp, Zea mays
  Clone ID: MRT4577_124019C.1
ttccacggctcgacccactctttcgctgacacatactccgtctctcctgctccttgtgcaacattatacatcggggatcctagagactgacatctagttcgcatgaaatacgaatgctcctgaacaaacattcctattgctacctgagctaacgcaacacttttgacttatacacatagtttctgaccctgcctttgtaatccttagaata

SEQ ID NO: 26327 - DNA, 197 bp, Zea mays
  Clone ID: MRT4577_12401C.1
ctcctccccaaaccccacgcggtgtacgggcgcaacagaacccagcctcctcctctagggtttgcggccgccgtcgggggcggaaaaccggcggctacggcggcgatggcgggccacgggcaggaccgcaagacgatcgatctggaggatgggtgggcgttcatgcagcggggcatcaccaagctcatcaacatcct

SEQ ID NO: 26328 - DNA, 216 bp, Zea mays
  Clone ID: MRT4577_124020C.1
gagaatataaccacgccaactgctgaccctcctctacaatccgtcaatgccagactctcaaggccaacacgaacctaccggctgggagcagctacaccctcgaagagaaccaggccgcggtcattaaaacacgtttttttaaacccgttggccattacaccaataaccgccccaagacaaataactggaagggctgcgggccaatgaccaaaggat

SEQ ID NO: 26329 - DNA, 447 bp, Zea mays
  Clone ID: MRT4577_124021C.1
attcggctcgagcctgtccccggtttttgcttctcgccaaccatgcctttcctgtgtggtgtggctgctgcatatgcgacaggaaaagcaccacgccggtcaaggtttcaactgtgcaatgctagatgctccgataccatgaactccttaccgggcgcataaccatgctaagatatatcagggttatgataaatttgtgatggctgattgctgccaaaggaggtggctgctctcatctcactactctatatcccacgagtgaaagcaatttgtaaaagatctagagccactctatatcccacgaacgaaagcccctgtaaaaagttctagaactcttgtgataattcctgaatactgccattgataataatacatctaatactgtctttgccaaaaaaaaaaaaaaagggcggcctgcaactattgaactagtcaccccgagaatta

SEQ ID NO: 26330 - DNA, 1605 bp, Zea mays
  Clone ID: MRT4577_124022C.1
gcgccgccgggcatttcggcgtcttcgccaacacacagacgagatcatgctcacttgaaggttcagtgaagttgaagaacctgtttggttactgtgagacctgggatgcatcaggtgctcttgaattagataagacagcagaactaagtgctggagttcaaatgcctaggatcggagcaataccaactcccctgatggctagaatatcgtttctgtctggcgactggttaaagtcctcactcaaagaacacctgatgggcgtttctgttggcttgctctctaccatgaaccacaacattgcttacaatttgacatggagaaaatttactgatccaacacgcatgacatccaattccgtacaagaggaattaggacatagccttttgtcctctattaagtacgcgtacaaggttgaccaaagggactcaagtataagacctacacgagggtacgcttttatgtcgacttctcaagttggaggccttgcaccagagagcaaatattcacgatttcttaggcaggaatttgatcttcgagtggctttgcccctgggtgtgctgaatggtgctctcaatgccggagtggctgcgggagtcatccatccattggaaaggggatccacaggatctgtctcaccacttgtagaaaggtttaacttgggtggtaataggcctctcgtgtgccgcttgggtggatcatcttcactgttaggcttcaaaacaagaggactgcgggcaacagaatccagaacacatgaccttgataattctgacagtggcacttcgccgaatggtgacgtagcagtgacagccttcgccgacctctcatttgatctgcctctgaagccgctcagagagctgggaattcatggccacgcttttgtttgtgctggaaatctcggtaaactaacggagtgtgatctagggaagttccctgttaccgacttcctacagacgttcagaagttctgcaggattcggcgtagttgtgccgaccagactgttccgcatagagatgaattattgctgcatcctaaaacagcttgatcatgacagggcgaagacaggcgtacagtttaacttctcgtcgtcctagtttctaagatgaatattcctattttttcccctcctcctcactgttgtcttttcatggaggagcctgtcaagaacttctacatttatgtagaaaaagaaagccgatgacgctgaagtgataaattacgtataaaaaaaaaaccggagttctttagagtttcatggtccactgtctgagtttgaatgacagccagaaactgggccttgcattggggatcttgtatgttgactatttgctcctctccagtctccaccatacctatatgggagtgatgaagctttgcttaggcagactggtgatccatccccatctaatgtccgtcttgttcttgtatgagctgcagcatcagccattttcatgtctaagtagatattcttgtaacttgagaattattaaggagggaataagtaaggtttttatagaatttttttttattaataaaaaaactacagagtgcgtttgtaacgtacagtgcgagagtaaaagaaatccaaacagcacattcaatcgg

SEQ ID NO: 26331 - DNA, 679 bp, Zea mays
  Clone ID: MRT4577_124023C.1
ttgggggaccctccgggctggccggattaaacaattactagttttggttttctctattgtcttacattctatcatttttcgtatgttcaaagaaaatgttattaatcttcttttctggtattttctaatcataccgcacctaattaggtttttatttgtgtttttcaattgtcctggctcctgagacatgaacttattgtatctatgtttttcataaagtagataataatgccttttcttttatgtacattctggaatgcactcctaatcaaccagaagcatgttgtactgatttgaaatgcaacgaggaataatgaatgtttattgtgacactaagaattgccaaagaatgtagttaaatacttaaatttgtttgcatatgcagaaaacatgttatggaccacctgggatagtgcaacagatggtagtagtagccatagattgggttagatttggaacttaaaatgtacaaacaagttgcacttaggagatttaggttttgtgctgccacatacagggctttcgataggggggagaatgctcacttatatgttatataagcatatattctaatcatccaaacctctatgtgaaagcaattgcttggggtcgttttgggagcttaaggtgaaaggaaatcattgtgcaatgaaacagcagggttttgtaaacctaaaaa

SEQ ID NO: 26332 - DNA, 298 bp, Zea mays
  Clone ID: MRT4577_124024C.1
cggctcgagccccatcccagaggagtttctcaggaccttggctggaggcacaggaggcccagctcctttcccagccttggcaatgccagctgtaccagggggagaggcttcttggagcagcagtgtacttcacagagctgtctagcccaggtgcccaacgctctgggagagccccaggtgccctcccagcaggccacctcctgctgtttctcatccttggtgtcctttctctgctccttttggtgactggagcctttggctttcacctttggagaagacaggtgagccagggacatgg

SEQ ID NO: 26333 - DNA, 301 bp, Zea mays
  Clone ID: MRT4577_124025C.1
gcccccccccccttacccccgcaggaaatccaaagcaaccacggcgaaacaccccaccatgcccggccgcaggcaggccaccaaggcacaggccaaggccgccgccaagagcaaccgcacggcgctgcgtgccaacacccagagcatcaacaaccaccacgatgcccagagacccccacaaggaccgccaacaagcgcatctccgggatcatctacaacaagaccccccacgagctcaacaccttccacgaaaacgccatcagaaacggcgtaacctacacccagcacgcccgccaccaca

SEQ ID NO: 26334 - DNA, 286 bp, Zea mays
  Clone ID: MRT4577_124026C.1
gaactatctatattatatcattatcaatgttatgctaaataaaaaaaaacaagaagggaaaaaaaaaccaaaatcaatactatcagaaacaacaatattataacattcaaccaactgtctacactctaccctgctgcttattcgcactaacatctactaccattcagccagttagctactgcactactctcaatatcaacaacttgctgcattcaaccaattgaccgcactgaacccggctgcttatatgcaacagcatatactactaacatctattcagctagct

SEQ ID NO: 26335 - DNA, 209 bp, Zea mays
  Clone ID: MRT4577_124027C.1
tcttacttctccttccccacaagcaccaaaaacctaatctcaggtcccatattctcgagccggcttgccaaatagggcatctggaaggcaaccacaagcgcaaactatgtccatacttagcatgaacctggcgacccaaaggcacccgccatcctcatttattctttgcttacacaagcaccatccatccatgataagcagggggaaaa

SEQ ID NO: 26336 - DNA, 433 bp, Zea mays
  Clone ID: MRT4577_124028C.1
aatatggcagccgacttaaaatgcatacaaccaccagacggccttggggcactatcacagttttgcactacataaatctcatattagaataccagttcaatttactgcctactttgggtagattgcaaaggatctaatattgggtgcatggcacatggacactaaaagtggcacatttgctgtcaaacaagatgcttgttgaacaaaatttagatgagctttgacgcaactcttggttgaaccattgccaccgcatgccgcagaactgtgttcttgatacctgacaccgatgcccatttatggagtactcgagcctaaaggcgatatctccagggttactcttatcgggtatgactgtcatggatccactaagactttccccctgacagatagttataacatactccaggtagacaacagctagcttccagtg

SEQ ID NO: 26337 - DNA, 636 bp, Zea mays
  Clone ID: MRT4577_124029C.1
aaaagcaccaaagaccttcggtgactgttgatgatttacatcttcccgagcgagctcctgcttgacctcttcccccttcagaccacctccatgttcttgtcgtaccttggcacatctcatcgcaacctcgctgtcatgtgtgaactcgacattcaaatgccaactggcttcgatcccttccctgaggtcaatgatgggtactctggagcagaaccaggcacaaaggactacgtatcgcgagtgcatcgagcaacgcaatgttcgcaagagactgactaccgaccagagagtgaacaaggagatcagctacagcaagatcctcaaagatctcgagaaagagtgctgctgaaatggtacagtggaccaggacccagaacttggacaggtcattcaggtccaggaagatcagaggaagaacgtctcgaatttcctcgtgcagtgcggtattgagaataaggagcacatccagattcatggattctgaggaaccgccgtgaccatagcaaaccaaccctgcatgaagggccagcttattatatataatatctgaggtggagcatatctatctggctgagtactacaaggaagcccagtaggacgcctgcacgatcgctctattacacataacagatataa

SEQ ID NO: 26338 - DNA, 328 bp, Zea mays
  Clone ID: MRT4577_12402C.1
ctctacgcgcaaactcctcgtgatcttgtggttatcatcaattgcatcttcacatccatcacaatgctttcccgatcattgtgggcgcgccaggttgcgccgctccggcgtcaggttgttgctgctcctttcgcagctcgtcgctcagtgaccaccgacgccgcatcagcgcatgccgagaacattcctgaggcagatgacaagcccttcacagtcagactttccgacgagagcttcgagacctacgagcttgatccacctcgctacactctggagactacaagaagagctgaacagatgtactatgacatgtgcatcggcgaatgaa

SEQ ID NO: 26339 - DNA, 338 bp, Zea mays
  Clone ID: MRT4577_124030C.1
attcccttctcgacccacacctcccatcgcacgtcccttgacaaaaccaccattctttcacctaatacaaaatccaattctatgttcggcttataaaccatgatgcgcatgtctcacactcaaatgaattcactcaaaggcaccaccactcatccagcctactgctcaattacactcatcactaccaaacttaccaaatccacacatatcaaccatagacaaactaatacatctatcttgattatatacctactgatccatttcctttcataattcacttatccatctactctcgataattaccataacaaacaagacctcatactcctaactatcta

SEQ ID NO: 26340 - DNA, 592 bp, Zea mays
  Clone ID: MRT4577_124031C.1
gcccccccccccaaaaaaaggggttaacattttttttttggtttccccccccctccagggggaaaaaaaaaggggcaaagcatgaatgtcattgttttttttccatttccatccccctgccttggcccattaaaaaacccccaaacttattggtttttttctagctccatcccaaggcaaacccctaagtgcctccccggaataccccacaaagggaaccccaaaaaaatccccaaaaagatttttttaaaggggaaaaaaaaaaaaataaaggggagctcccctcaaaatttcgacccccccccttttaaggacttcttttccctccccccatacttatcctgggagggggaggcttaaaaaaacccatttccaatgccaaaaccctttttggccactttggcaaccccgggggaaaaacccccctcccccaccaagttttgaaaagtcttttttacccaactgttaaacttttttgagggttcgaaaagccccccccccaaggaaactccgggccttggaattttaccccccccgtttggtcctttgccccggcctatttttttaaggatgctttacacccctggggggg

SEQ ID NO: 26341 - DNA, 298 bp, Zea mays
  Clone ID: MRT4577_124032C.1
attccttgaggagggccgaggagggctcacctagcaggtgggcgtcttcggtgaccacggtaaccgacgtctccaaggcgacagcgcggcggatgaggggcacagccgacagggccaactcaccggggcgctatatataataagcaaaacagaggtcattacctatctccgacgagcgactctcaccgttacgcagatcacccatgggtggcctcttatgctgcacaaaaccgtgtatctttgactggacaagaacccgccttaacttgccgagatcacactctgggccgtattatta

SEQ ID NO: 26342 - DNA, 154 bp, Zea mays
  unsure (1)..(154): unsure at all n locations
  Clone ID: MRT4577_124033C.1
cgctcgaggcgggctgggcggggtcatgcaaagaggtgactcnntnnatggaacgaacaggaggagaaatgcgatgtggtgctcctcttgcctggcgtccgcctgcgcgggctgcgcctgcttcctctgctcgtcggtggtgccgctcgtctgt

SEQ ID NO: 26343 - DNA, 241 bp, Zea mays
  Clone ID: MRT4577_124034C.1
taaccaatcaaattttcatgtttgatctccacattcatatcccaactgcggtcaaacccttcgctggtgccactgctttttactctactatcccaaaactttcaaactactatttacatttcctcattcaacaccttatatttcaaaaaaacttaactaccttccatccattaaaaaattaattcacctacagcattatcctaaaatatctcaccaaatatttctccttcaaaaaaacata

SEQ ID NO: 26344 - DNA, 428 bp, Zea mays
  Clone ID: MRT4577_124035C.1
gatgtcattaaaaatgctcataacatgctattacattacatagatacctttctatacacaagttctagtaacagataccttatgtagtttttataacacttaaacacgcttactccaatgaaatttaccctctggtcaaataaccagaaaatgaaataaaactcatctcaacttgaaaaaagacgtcttcttttgaaattgaagctcccatcagctattagctgagcaaaaacactaaagaaccaaccaccattagcgctccaacaaccatgagaactgacttatatctatccaataaaaacacttctctgtgttttgtattagttttcctcagcaatcctttcgatatattcataggtttcaattttttcatcctttctcttggactctggtcatcttccaatatattacctatgcttgtgttccca

SEQ ID NO: 26345 - DNA, 423 bp, Zea mays
  unsure (1)..(423): unsure at all n locations
  Clone ID: MRT4577_124036C.1
ttttttttttttttttttttttttttttttggtttttttttttttttttttttttttttttttttttttttttttttttttggaacccaatccggacaaaaaattagtcccagaaaataaatgccccgtnatgtaaactttacagcaccttgggggacaagggaaatttgccaacccaatttgggaagtaaaacagggttttacataaggcccttttttttttaaacccacaaaaacgggggttgccgaaaaaaatttatttttgccaaaaaaaaacaacgggcctaaaggacaatggcctgaacaaggggtacttggcaccaacatttcttttctgtataagggaaacctttcccctggggtaacccaaggcggtagggaaaacccggggggaaaaaataaagcttcttccctggggggaat

SEQ ID NO: 26346 - DNA, 447 bp, Zea mays
  Clone ID: MRT4577_124037C.1
agaaatggcgatgtccccgacgacgacgacgctcctcctcgccgccgcggctctcctcgtggcctcctgcagcgcgtgggaggccaacatccgcatgccgacctcgctggaccaggccgtggtggcgccgctgatccacgcgctgcggccgctgctgggctccggcaagcactccggagtggcgtgcgacagctgggtgctgggcgtggaggcgcacaacgtgcgggactggaagacggtgcccgccagctgcgagggctacgtcggccactacatgctcggcagccacttccgccgcgactccaaggtcgtcgtcgaccaggcgctcgcctacgtcgactccctcaagctcgccggcaacggcaaggaggtgtgggtcttcgacatcgacgagaccaccctctccaacctcccctactacgccaagcacggcttcggagctacacc

SEQ ID NO: 26347 - DNA, 560 bp, Zea mays
  unsure (1)..(560): unsure at all n locations
  Clone ID: MRT4577_124038C.1
gccgacacctgagtctctaccatgccgcctgacatggcacatnactcacacgccacaggagaaggcgttcaaagctgccgacccttatgacaggcacccttcatatctggacgcttactctagaagaaacttcccgccgactgttgggccaatgctacctactcccacatcctagccatacatggtgggtaggtcataaaccaacaccagatgacaaggactatactgtacacttgggcggcatgcaacggaagggcagatcacgtgagacgaatcatcacgcattcaatgaaaaagaaacaaggtccatgaagcttgagttcttcatggcagaatccgtacctcaaggcgcacactgcgggatgactggtggggggatacaaaccacaccactgtcgtgccacactcggggctactcagaatatgaactttgattgatacctaatactacgtacctccaagcttgttggggctcatgacccatgttgggtaggcaatcttattgcttagagactacctgaggagcacgttaatcttgacctaaaagaacaatcttaaaa

SEQ ID NO: 26348 - DNA, 500 bp, Zea mays
  Clone ID: MRT4577_124039C.1
ccggccgggaaatgatcctctccatttgtcctgatccgggctcttgcgttgtcgcagccagagagacgcttcgatcatcatatgatgagagagcacgctcgcatcaacgtacactacgatgcgagtcatagcagcaatcataggacctgtattctgtagtgctcctctacgcggtaccagtgctgacttattaagatagcgcagaaagtaggcctatggacgtggacgcctcgtgcgcgccatcacatcctggcccttcttaatgcctttacctggtgtgggcacggctctcccatgcatggtgactggtggcagaacctgtcgctctttggctcgtgcgccggcggcgagctctaggaagatgccgtgcgcgccacctgcgtgaggcaagggccaagagacaaaatgatgacgtgtcggcctaatggtgggctctggtcgtggcaaccaatatgcgcaatagcatccttgtggagcgttgcgcacctacgcacgcatat

SEQ ID NO: 26349 - DNA, 351 bp, Zea mays
  Clone ID: MRT4577_12403C.1
atgattactacggagactgtcgcgactgctcacggtagagttgataatggtgatagaggcacgtaagacgatgcaacaaataatgcagagcctcgaaaggcaggtggtcaatgttgagacgtccctaccttggctcatttgcatgaacatgatttccgtaagttctgccctgatctagaacatgaagagactgatcatgttcttgcagaggcattctcaatatatccatgcattaatatggccaaggatatacgggacaataggaccggttaaactaaaggatatagatttatttgtacagctgaagaaggtgatcatacttgtgacttagaagttacgaataggctatat

SEQ ID NO: 26350 - DNA, 751 bp, Zea mays
  Clone ID: MRT4577_124040C.1
aaaatataatgttttgtgatttccatttattgtaaattagattgacggcaatataaatatttggatagtacatgtacattttttggcctcctttattgcatttccttacaaagtatttaaaatacaaccctacaatgagttagtttgagatttatttatagaataaatatagcagcagcaacaaaagtgtttgatataatgccatggggaagttgagttgtacatactaaggtttaacacgaagatgaaatctaattatacaacattcaatcactgttaagcttgaatatagtacaatgtaaatttgcaattcatttaataaactgatcaagactaattacaatgctttcatatttatagtatcggtgaacaataccaatcaatccaaaagcttcatatttagacaatgaacgagatgcagaacaagattgagcaaaagtcatttttagaaatgaaattagtcgacccatttgatgacatgagcaaacgtttcgaatgcaccatgattgtaacaagaattgctgacaatgagccctggttctatcaaggatgcacaaaatgcaatacatcaacaaaatatgaaggaaaaacatacatttgtaaacaaggccacgcctcctctcagatggtccacaggtataaaatatctctatatgccactgatggcacatgtgagctagaattcgtgctctttgatgagagagctacatcacttattgcgaaaaccgcagagaaattactgagacacagc

SEQ ID NO: 26351 - DNA, 160 bp, Zea mays
  Clone ID: MRT4577_124041C.1
aactctaacaggttgcagcttcataggctatacatgtaccgtgcaacaagcatataatcattgtacacaaaagctcattaagctgcttaggcttaaacatgaaaggttcgaaatttgtttacgtcaacaagcatttatattaagcgtggcctgcgcatag

SEQ ID NO: 26352 - DNA, 734 bp, Zea mays
  Clone ID: MRT4577_124042C.1
aaaatcttaatgtgttgggttttcgtttatttatagaatatatttatagcaacagcaacaaatgtgttagatataatgccatggggggactgagttgtacaaattccggtttaatatgaagaagaaatctaattataaaacattcaatcactgttaagcttgaatatattctaatataataaatatatctatcatactttatatatgaatatactcattttatagtacagtctaaatttgcaattcatttaataaaccgctgaagactaattacaatgttttcatatttatagtatcagtgaacaataccaaccaatccaaaaacttcatattcagacaatgaacgagatgcagatcaagattgagcaaaagtcatttttagaaatgaaattagtcgacccatttgatgacatggtaagatacactacaataataaaatgtatatttaaaattattgttacaaaacttatatagttacttaacaattgttacatttacagagcaaacgtttcgaatgcaccatgattgtaacaagaattgctgacaatgagccctggttctatcaaggatgcacaaaatgcaatacatcaacaaaatatgaaggaaaaacatacatttgtaaacaaggccacatctcctctcagatggtccacaggtaaactctctgtacaatcatttttataccggacgcgtgggcggacgcgtgggcgtacgtgtgggtcgagccgggaatt

SEQ ID NO: 26353 - DNA, 1335 bp, Zea mays
  Clone ID: MRT4577_124043C.1
caaggttaaaaacaatatctcagaaactgcagaagttgcacaggcagaggatacctctcctatggatatcaatagtcaatccaaccagaagcaagaatcatgtggaccgaatggatccaaagatcgtatactaagatcaacttctcgttcatcatcttccagagaaaaaactatggagaaatcatgcagttcagcacacaagggcaaaagaaccttatggggccgtacttcagcaagaaaagacctgtcaacagaggagattgaatgctgcagcgatgatgaggcccttgttgagaaacttgagagtaacaagattgatctccaatcaaaaattgcaaaggaggccaaagaaaatgcaatcctatggtcaagtctagaaaaacggaaagaagaactacatgagcgtcgtttagcacttgaaaaagaagttgaaaatttgagggaccagctgaagagggtgatgaatttgcgaagggggcaggtgtcctcgccttcaacaatagacagcaaggtcaggggccagcagctgtgctgtgaatcatgcaaccaacgtctcctaaatacagacaggcttagcggacctgaaagctcatcagtggaagcgtcaccgactgttgggagtgatcctgcatttgacatgggtgatatcgagcaatcaaggaagcaagccgcacagcattcgccttcttcaagagacaagccaagtcacgaggcggtcgggggcatcacccagagggctcctcaaagagggcattcgattgccagggagggccaagatgggtcgtcgtcgttgtcatcctctaattcgaagtggaatcttgcgcagaaacaatattcaaatagcccattgataagagggcttcatgtatccagcagactagaggatttcggtggaagcatatcaccagcagcgtcatcggcattagccaagctgacgaaccggctcaacttcctgaaagaacggagggcgctgctggcaagcgagatgcagagcttggatttgggtcggcccccaacagtgaagtccccaacaccaaaaggccatgaaagcaagaatagttgatgttagtctgttcctgtcgtgctcttctgaatgctagatagccttatgattaaaaccagcagtgtagtttgtgtgcatcccgttctcatccatgtagtgctgtctgtacatgtttccacaaaattctgctgcttcaaacttgcagatacatatagatacagattgaacgtgtcaaaaaaaaaaaaaaaaaaaaaaaaaaaaaaaaaaaaaaaaaaaaaaaaaaaaaaaaaaaaaaaaaaaaaaaaaaaactcgagagggggcgccgtgtacc

SEQ ID NO: 26354 - DNA, 190 bp, Zea mays
  Clone ID: MRT4577_124044C.1
caataactacgactgcacgcgcacgcaagctcaaactccgaatccaggaagtttgttttttaactctactcccactaagcgcgcccttgaaggctgttgggtcgtcccacaaaacacgcccttggccaccgcccccactctactcaccaaagccctgtcttctccgacccttcgtcttcccaagcactaa

SEQ ID NO: 26355 - DNA, 545 bp, Zea mays
  Clone ID: MRT4577_124045C.1
ggccaaaatcctttaaattttttgtgggacatagagaaagaaccacgatgaatttcaactcggactccttgacatattaaaggacgactgtttagttttatagctaaggacatcacaatatatctaaccttagtcactcgaattaaactaaacttatacaaaaaagctagtcatcctataacaccttacacaacaaaccaaacagtctatcccctaaaggctcgtttaggaccagatgtaatgaaggggactcaaggagccaaaatcccttactatttgaatagtaaggtctgtttgattagaaatggattgagaaggattagagaggaattcacctaaaaccgaacaagccctaaagatatattcggttttactccaatctatatggattgagggagtttcaatctctagtacatcaaatctcctccaatctatatcaatctcttccaatacctatgaattgaaaataaccgaacaagctctaaaggattttggccctaaaggattttgggcctctcagtcccctccattactctcaaacaagc

SEQ ID NO: 26356 - DNA, 588 bp, Zea mays
  Clone ID: MRT4577_124046C.1
cccctacgcccgggtggcatcattacgccggccttatgcgaggtaatgtgagcccttgcgcggctgccaaggcacggggcaaggtgcgaccagaggacgtggccgaggcggcgaggctggcggctgccgggcagtcgtttgaggtggtgtactaccctcgcgcgagcacgcccgagttctgcgttcgcgccgccgcggtccgcgcggcgatgagggtgcagtggtccccagggatgcggttcaagatggcgttcgagaccgaggactcctccaggatcagctggttcatgggcaccgtcgccggcgtccaggtcaccgaccccatccgctggccgcagtcgccgtggcgccttcttcaggtgacctgggacgagccggaccttctgcagaacgtgaagcgggtgagcccatggctggtcgagctggtgtcaagcatgccggccatccacctcgcctccttctcgccgccgcggaagaagccccgcatcccagcgtaccccgagttccccttcgaagggcagctccttaacccggcgttcccgcccagcccactgccacacggccagcaacaccaccacaatttcctta

SEQ ID NO: 26357 - DNA, 364 bp, Zea mays
  Clone ID: MRT4577_124047C.1
aaaaaagaaaagtggtgcaggatggtttgaatctttgtgcatgattaatgctgaggcagtaatatgggaaaagcttatccatgttctgccgcgcgcaccccgccccgcatccgccccgcacatcccgcccgcatcccgccgtcgtgccgcgctccttccatcctccgccctcatcccaccgccctccttccattttgagctttgacggtgcggatccccaacgctcccttccatcctcgcggatcccccaccctcgaatcccacgctccctcccgcgcttcctccatgctcccttccatcccacgggcccgatccgattcagcttctgtctcactcatctcgcccggcctccatggaaagatct

SEQ ID NO: 26358 - DNA, 1225 bp, Zea mays
  Clone ID: MRT4577_124048C.1
ccggccgggaccttcctctcctctctcctccccgctgccttttaagcgacgcgcccacctcccaccgcaccctctctctctctctctctctctctgatcggtcgtccttcctccacccgtctgccccctcctccgcgccgcgcctgttcatggccaggaagaggacggcggcgcgccatcagcaccaggaaccaccgccaaaccctaaccctaacctccgccgccgggccgcggccagcgacccggcctcggacgagccgccgccgtcgtcgaagcgcatgctggcctttcacttcctccgcgcgctggccaggatccacagcaccaccccggcgccgcgccgcccgcgcaccatccgccgcgcggcctactcgtccatggcgcgcgctgccagcccacgccgggcctggacgcaggcgctgctccgccaggctcgcgcgcgcagggcggctgccaggtcctccaggggagccgtcctgctgcggagacgcgtcgcctccgccgcggcgtctcctccgccgccgctgctccgcgccagcgccggggagtcgacgtcggcgccgacgccgctggctccggcggccgtggcggcccggggcccgcctccgaggcaggccggggaaccggccagggccgacgcgctccgccggctcgtccccggcggcgcggagatggagtacggcagcctcctcgacgagaccggcgactacgtgcgctccctccgcgcgcaggtgcagctcatgcagagcctcgtcgacctcttctccgcccaatgatcgatcgtccaacaaccgaaccagtaattaattaataccgcatggtttattaattcttgttctagcttgcaccgtccatcgttcgccgcgccgccgcctttcgtatctatatcatcgcatatctcttcttcgtgccacatatgagatggatgagtgattaagataggagattattgataagagattgttattgctggtacatatatatgttagttggtaagataagattattagtaggtgtatgtataggttgggaacacacatgcatggaagatggtaccacacacaccaagctgcaattggagggagaggagattattattgaggtaattaattgtaacatatatatagagagaattgaagcatggagtcacatacatacatatacataagctattagtgcagtgcttgctgttgggtcagatgattgggtatgcatatatatttgt

SEQ ID NO: 26359 - DNA, 1260 bp, Zea mays
  Clone ID: MRT4577_124049C.1
gcgctctctctcaccttcatccgtcttctctctcctcccgcctgccttttaagcgacgcgcccacctcccaccgtaccctctgatcgaccacccttcccccgtctctccctcctccgcgccgcgcccgttgatggccggcgggaagaggacgacggcgcgccatcaacaccaccacccaccaccgccgccgcctaaccctagccctaacggccgccgcggggtcgccgacccgccgccggcctcggacgactcgccgtcgtcgaagcgcatgctggccttccacttcctccgcgcgctggcacggatccacagcaccacgccggcgccgcgccgcccgcgcaccatccgccgcgcggcctactcgtccatggcgcgggccgccagcccgcgccgggcctggacgcaggcgctgctgctccgccgggcgcgctcgcgcggggtggccgtcgtcggctcgtccaggcgcgcggtcctgctgcggaggcgcgtctccgcctcggcgcctccaccgatgctccgcgccagcgccggggcggtcggcggcggcgccgccggtccagggcccgcctccgaggcaggccggggagccggccagggccgacgcgctccggcggatcgtccccggcggcgccggcatggagtactgcagcctactcgacgagaccgccgactacgtgctgcacctccgcgcgcaggtgcagctcatgcagagcctcgtcgacctcttctcccgcccaacccaaccagtaattaattaataccgcatggttaattgattcttgttcttgcaccgtccatcgttcgccgcgccgccgcctttcgtatctagatcatcgcatatctcttcttcgtgccacatatgagatggatgagtgattaagataggagattattgagaagagattgttattgctggtacatatatatatttagctggtaagataagattattagtaggtgtatgtataggttgggaacatacatgcatggaagatggtaccacacacaccaagctgcattggagggagaggagattattattgaggtaattaattgtaacatatatagagagagaattgaagcatggagccacatacatacatacataagctattagtgcagtgcttgctgttgggtcagatgattgggtatgcatatatatttgtaaaaaattgtggagccatgtcatgtatcttttgtacctagctactagctacacatgtaggtagctgtgtgatacacacacttctcattccgtc

SEQ ID NO: 26360 - DNA, 432 bp, Zea mays
  Clone ID: MRT4577_12404C.1
gggcgattgggttcatcaagggcggccgggaaacctattcttactgcgatcatttctgcatccccctcccgccgcatcgcctcaccgccgccgtatttgatgcgtcgcgtgatccgcttgcagcgtataggttgcggcgtccttgttcgagtctcacaccgaccaccggaagggccccgcccgattccgctccctcgacttcggctagcgcaatggctacctcaaggtcgtcctcaccgacgtcgtccacgaccccgggcgaggcgcgccgctcgccaaggtcactttccgccacccattctggtccaagcaccaaaacgtgctctttgtcgcaggcgatcgcttgtacacggcccagttcgcctactgcgatcgccgcgcctccctcgtcaccgaaaacgtgctgcccctccgcgggatccctgagggtgc

SEQ ID NO: 26361 - DNA, 428 bp, Zea mays
  Clone ID: MRT4577_124050C.1
accactcgtggctcaccggggcgacagttcttgatggccctctcgtggaggatgagtaccgtggtacctgagcgagggtgacctgaaaacggcagctcttttggtcatgctgtacttccacatgctgtgccactgcaggagcctgtgcatcaagaccaaggccgcacaaactgatcatggctgctcacaagcatcaaatggtgaagagcatgctgtggcatgactgcgaaggaaaaggggcactcctatgcaccatgtgtaaacgaccgggggaaaatgctggagactatctggaaggcctgctaacagctggatctgtacgctcggagagccaaggcaagcgcgtgctcccatgagggaacggtaaaggggctggcgttgtgtgtggatctaataacactatttgtgaaactgggcactaggcatcg

SEQ ID NO: 26362 - DNA, 392 bp, Zea mays
  Clone ID: MRT4577_124051C.1
aggaaaaaacgttatttttaaaaacttacacacaagggttgacaacaaccgtttcccgagagattgaaacagcgattcgtaatttttggtaccacgtggggcgggtccccaaaagttccatgcattagatggacacctaccccgttgccattttctcccttttttgggggagcgtgttccccaccattttgcaacacttgcatggggggcttacttttggaaccccaccgcgcccatgcgcgtgtccattcttaagccccttcacgtgggcgttgattttgccccccaccaatacggagttaatgacttcttcgtccggggggtacaccgcaagcaccttataaaccaccccgacgggtgttcttaagatcgaccatcgggtacaggaaccc

SEQ ID NO: 26363 - DNA, 339 bp, Zea mays
  unsure (1)..(339): unsure at all n locations
  Clone ID: MRT4577_124052C.1
agctgatccttaagcggccccctttttttttttttttttttttttttttttttnggggaaaaggccaaatttttacaaattatattcccccaaaaaaccgtgcacataaacatatatcccattcaagggtttaaaagacattaggttcaatacaaacctacccttttttacaactgaaaacacaattcttaattctaaaaaaacaactatcacctttataccgttaataccattgctctggcatcctttcaacaccctctaacatttccatcccatgaaaaactgctttttagcctaccacataacaagctttattcctttctatcctccctggcttca

SEQ ID NO: 26364 - DNA, 458 bp, Zea mays
  unsure (1)..(458): unsure at all n locations
  Clone ID: MRT4577_124053C.1
aggccacacancgggaaacaanaacggaagcacccccnccaagacaanagcgccgaacgggccagggcaggacaaaaancaggaccggaannggcaacgcaacanaaaacacacaagcgagcgcngacgagngaggggggggggccccncncncgggccnnccgccccgcaagggcccggaccaaggaagggnacaggcaacnggaagcnccaggcgaaaacaanacccaacaacgccnggcaaagaagggcggccncacggggggnaaaggacagccccccangggngacggcagagnggccgccngagccgcnccnggncgaaggcacgcccgaacaggccaanngancgngcaagcacaaagagcccanngagaaaaccgancgccacaancccancgancnccgggggggggaacagnccacngccagaaagaagacccaagaaaagggacccg

SEQ ID NO: 26365 - DNA, 425 bp, Zea mays
  Clone ID: MRT4577_124054C.1
attgctaacagaattattgctgcagtattttcttgtaacataataaaagaggtagcaaccaaagggaacgacacaggagtactaaaacatatttgagagggagacagaactgtaactctgagacagaagagaacgggatgatgacactatatatagattaaataacttggccgaaagaagcatggtcacagacatcatgttgtccagacgtcatcgatatggtcataagcgaaaccaatatgctaggtcggatctgctgaagcttcaccgggttgaaagaccacaccattaccctcatgcgaagcggcgtactcttcacgagagtgtaatcgtcgtcaaggaagtcggcaccatagccgcagacttcgccatcgacgtcgtagctagcgtcgtcaacgtcactggtaagggactgattctggtta

SEQ ID NO: 26366 - DNA, 119 bp, Zea mays
  Clone ID: MRT4577_124055C.1
aaaaagtattagttttacaaactatatggctttacacctgtactctgtacacaatcagtcctattcataacactattaataaatgtgcattctctatattcgtgttactatgtcattct

SEQ ID NO: 26367 - DNA, 248 bp, Zea mays
  Clone ID: MRT4577_124056C.1
ttgagcatgcatcggtggattgggcgagcctgctcgagagagcaagcttacgtgcggcagccatgtatacaataagattaggatcgcgcagccagagtgcacccaatagaggactgataagcggcgtgagtaagaaactggggttgccagataatggcgcgtatgcatacccctttcggagcacagaatttagccctgagaccactcagtcgtcctttcttacatgtgccagtgctgatattttaagg

SEQ ID NO: 26368 - DNA, 668 bp, Zea mays
  Clone ID: MRT4577_124057C.1
cggacgcgtggggcgccaacaacctacccagcccattcgacccgctcgacaagctccaggagaagttcaggaacttcaacctggacgacaccgacctcgtcgccctccaaggagcacacacttttggtaaagtacagtgtcaattcacacaagagaactgcacagctgggcagccagaggaaacactagaaaacctagaccaggtcacccccaacgtgtttgacaacaagtattacggtaacctcctgcatggcgccgcacagctaccgtccgaccaggtcatgctgtcggcggaccctgtcgcggagatgacgaccgctcccattgttcatcggtttgcaggcaaccaagaagacttctttagaaactttgccgcatctatggttaagatgggcaacataagcccgctaactaggaacgatggagagatacgcaaattttgccgaaggattaatagcgaaggctattgaaaacttctttttcaatttgatcgatttggattccttaatttttctgtgaccaattgtgaagtatgtgtaaaaattcattcgatctttcagttttttttcttctcattctttgtttttcttatgaggttttcctcattgtttgtaaaatgttccgcttttatctttctagaagtaaagcaaatgtgaaaatgttttacc

SEQ ID NO: 26369 - DNA, 338 bp, Zea mays
  Clone ID: MRT4577_124058C.1
attcggctcgagcgcaccccgccacctttttcttctgcgctcccaattctcttttttgccttccccttgaccgcgggaggattttcttcatctgctgtccgcatattcgacgtatctagtaccaatcagaggacagctatttgttgcacagaggagaaaggtaacgtccaaccgccgcgaacagcgcatgtaaactgagcccgacgaggcgcgctgcaccacagtggaagggagctgcacccgagcacctatccgtggggtggccccgccctcacacgagacggactttcaccacctgaaccaagagccggctatggaacctgctgagccgagccggg

SEQ ID NO: 26370 - DNA, 772 bp, Zea mays
  Clone ID: MRT4577_124059C.1
ccaatggcgaggatatgttttaccttgagcaagaacctgggcacctgggcgaccatgaaggtgctgctccggtagcagatagcagattcggtgttattgtgcaggagcagggtgttattgtgcatgagcagggtgaggccgtgggtactctcccaaatgggaacaatggaattggcaatgagatgaatgtggagtgtaaaatggtggtgccgtgcagcaacgagcatcgaatggcgaatgctgtcctagatgtgtttgaggaatgcctgagggaggcaaagagtaatggggttatcaatggtggcaatgtggacgggagtggtgaggaaagcgagctctccaagcggtggagagcgcagaggatggatgagcttgatgtcttaagccggaggctgaggttgctggttgagtatgctgcggcggctgggcagtgaagcagagattttggtggttttggtgatggtcctgccacccttttccccttttgtatagaagctaggttcctgtgctatgctttggaatgtattcctcagctggacccttgcctttagaaagcctactatatttgcctatgtacccctcgtgtttaataactcgagcagcataataatctatggtgttagcgctgttatttgcatgggttcctgctgtttgatatagatgatagccttgttaatgtagcttcaggctttcaaatttcctctttttcaattagaagctgttgtacttgtaacttgtaagctgtgagagagtaatattatgtttccttgtt

SEQ ID NO: 26371 - DNA, 143 bp, Zea mays
  Clone ID: MRT4577_12405C.1
tctaccatgcttacctctctcttatccagaaccacatccacaacaagggcgggtcccttaaccccaactgggggcatattaatcaccagaaactgaaacgaattcaatctatctcaacgaacctaactctattacaacttcaa

SEQ ID NO: 26372 - DNA, 478 bp, Zea mays
  unsure (1)..(478): unsure at all n locations
  Clone ID: MRT4577_124060C.1
gggttgacccacgcganattaactcgcaggcgaaaaagacangaacagggtttattttttatgctcatccaggatggttttgagttgcataggtaagatttcttttatgagggctttttaccaacataaccaataagggcacataacctggatcatttttctttttacatatttgatctgtcttctccgtgctggttaagcacaacaattggatatcaatctcaaaactacaagcactatagtcgttagttaaagtaaaattttgtcagtgggaatatattattatgaaacaacaacttcaatttggtatatatttaactgaaacagtaagtgtgtttaactctaataaaccaacttgggtcctgatatgtatatggatgcgtggcgttttttgaactgatatcatcatcttggcagttttcttcaggggtttcttggttcgtttgggttctatttgacatgaagaataaacttgttt

SEQ ID NO: 26373 - DNA, 333 bp, Zea mays
  Clone ID: MRT4577_124061C.1
gggggtgggggtttttttggttgtgtgttggttttttaaaaaaaataatagggtttggaccatgcaggtaagtgccaattgttcacccttttgatccacaacgggatgggggaagcatgggctccctttccaaatttttacaaaatggcgtgcgaatttttgggataattttgatgatttttatgaaggggcgtctgggtgttttttaggaagcgcggcttggaattgggggaatttggatggtttcattagggggcctttccaagattggggtcattgacatatttatttggaagggtttattcccgggttgtttttgggtttcaaggaaca

SEQ ID NO: 26374 - DNA, 2419 bp, Zea mays
  Clone ID: MRT4577_124062C.1
ttcaatctgaagcaaaacccacgcgtccggttgaagagcgggactcttaagcagtagtgagatgcggcggtggtggtcgccggcgttggcggctgtggagccgcggtccgtgcagctcctgctcctgggcgtcgctctcgtcgcagcttctttctacgccggcaccctcttcggctcctccgcgtcccctgcgctcgtactgcccccttcgcgcccccgatcgcccgattccttcagggccaaagttacagatgttccagtgtttaccaacagagtttctcgtacgtaccgggcaaaatcagtgacagttccagatcacggagttgatgtgtgtcctttggaatacaatgagtatgtcccctgccatgatggagcctatataagcagcttgaagagcctggatacatctaggcatgaggatcttgaaagtatttgtcctccatgggagaagcggttgttttgtttggtgccccctccaaatgactacaagataccaataagatggccaacaagccgagactacgtatggcgtagtaatgtcaaccattcacatcttgctgaggtcaaaggaggacagaactgggtgcatgagaagggcaaactttggtggtttcctggaggtggcactcacttcaaacatggtgcatcagaatacatagagaggctaggaaatatgacgacaaatagtactggtgatcttcgttctgccggagtagttcaagttttggatgttggatgtggtgttgctagcttttctgcatatcttcttccgctagacattcgaaccatgtcatttgctccaaaagatggccatgagaatcaaatccagtttgctttagaacgtgggattggtgcaatgatctctgtgttggccacaaaacaattaccttatcctgaaaattcatttgaaatggttcactgttcaagatgtcgtgttgattggcatgaaaatgatggaatattactcaaagaggtagaccgtcttttgcgacctaatgggtattttgtatactctgctccaccagcttatagaaaagataaggactttcctgttatttgggagaagctagttaatattacaacaacaatgtgttggaagcttattgctaagcatgttcaaacagctatttgggttaaacctgaagatgagtcctgcagacagaaaaatgttgatatgaatctactgagtatttgtgaatccaatgacaacatttcaccatcatggaaaattccgttaatgaattgtgtgaagctcaacaaggacaaatccaatattcagaaattgccttccagatctgatcgcctatcattttattccaagagtttggagataataggagttgcaccagagaggtttgagaagaataaccagttctggaagaaccaggttcacaagtattggtcatttcttcatgttgaaaagactagcattcgaaacgtcatggacatgaatgctaattatggtggatttgctgcagcactaagcagtgaccctgtctggattatgaatatagtaccctataccatgatgaacacattgcctgttatctatgaccgtgggttactcggttcttaccatgactggtgtgagccattctcaacatatcctagatcctatgacttgttgcatgctttccacctcttttctcattataaacgccgcaaggaagattgtttgttggaggatatcatgttagaaatggatcgcatcattcgaccacagggttttatcattattagagacgagaatgacactctctcaagaatcatcaatctagcaccgaagttcctttgggatgttaccacgcacatgttggaaaatgaggaaagcgggacagatcaagttctgttttgcaggaagaaattctgggctattgtttgagttatacttgggtggaaattgggaagctgccatattttatcctacttttggttgccctttgtatcagtgacagagcagagcgtaaggagagctgtttggcatgatagatgttccaatgaaacataatatttcattgcacgttctctgcagttgacagtagtgcattgttgagaaggcatatggtacggtggtgcggttgacagggttatccagaaactagctcggataatttttgcttttgagctgtactatttgtctacgaaggacatgggtgagccggtaaggtgtagtcttactgacagtgtttgtagtttctctcataatgaatagccgttaattcttttgttatcttattcactaatggctaattaggtttaggttctcaagttctcaacaatatgttggtagtgctgtttctgttgttccatctggggagcatctgtagtactataaaccttatgtaaggtactgtttccagccaatgccgaggtgcatttgttacattattcgtttttttctttttgttacacgttaaaa

SEQ ID NO: 26375 - DNA, 270 bp, Zea mays
  Clone ID: MRT4577_124063C.1
acttcctctcaccagcagaccgcgccgccgcagcgccaccgctctccggatcatcggccgtccacctcctcctcctcctcgccctgtcacaggccgtccctgctgaggtgccgtccacttcctctccctgccgccgtagctcgcacaacacccatctcgagctcttccttcttgccacaccgtcggctacatcggctcgcgctgagaagggacgacgcaatggacctcctcgagaagatgatgccgctggtatgacgtggtgtctcggta

SEQ ID NO: 26376 - DNA, 298 bp, Zea mays
  Clone ID: MRT4577_124064C.1
agcgcttgaaacccaactgcgttttataggtggacaaccaaaattgttatagataacggtttataaggtacgttggcactgttctgttacaatacacatcaacaacgcacttaatgaatcggcgatttctggttacctgcacctaaaggacatacattataaccaccttgaacctacagcctgcatggaggcgcaaacacaatggctaattcatttacgaaataatcaataactgcaagccttttacacgagctggcataacccatgttttgacttgcataccacatctatatcacaa

SEQ ID NO: 26377 - DNA, 567 bp, Zea mays
  Clone ID: MRT4577_124065C.1
aaacaaattgacttaaattactatatattcttcaatttatattcatttttgagattccacattataataatttgaaagagaaatacacagacatatatatttaataataatataataaaaaataatataaatgagtatcaatcaatatttcatacaccagatcagagttgaatcaatgtaatcttgtgtttatgtagagatcatcaatcttctagattggtccgccgacatcgcctctcgaagtaggccatcctttgcaccactaggggtcaacctagaccctggccatcgcatctcgataattagcgtacctgatgcccctgctgctccctccccagtcgcagtagtttaccacgagcttctgcagttgtctaatgatgattttaatttttgcaatgtgggaaagccggcttttcgaaaaagccgcttcctggttcacctttggtttgacttttgtgttttagcgagcaaaagccaaacaaaacacatccttataagtacactatatcagatccgaatacagatatattaagttagggttcaggtgctcaattttgcagaccatga

SEQ ID NO: 26378 - DNA, 359 bp, Zea mays
  Clone ID: MRT4577_124066C.1
ggaagggtacacagtgaacccaagcttggatttcttgccgaagtggacccatccaccagggtactgtcaaccgactccttcctcaagcacactgatgtggctatactgctggacaatgatgccatctacgacatctgccgacgatcccttgacattgagcgcccaacctacaccaacctcaacaggctagtgatccaggtcatctgataccttactgcctgcctgaggatcgatggtgctctgaacgtggatgttaacgagttccagaccaacctggtaccctacccgaggatccacttcatgctttcttcgaacgctccaatcatgtctgctgaaaaggcctaccacaagcagctttt

SEQ ID NO: 26379 - DNA, 216 bp, Zea mays
  Clone ID: MRT4577_124067C.1
tttcttttgccgcgcggggcccgagtgaatatgcgtgatagatggagaacgagagaaccggcacgagcatacgtgcatcaacaacgacgggggaaggcagagggagccggagaaagatcctaccgggagatgcagacacgaccacgcgtgcggtgacactcctcacaggagcagggctctgaccgactgatgaccgtgcgggagagtcagtcgact

SEQ ID NO: 26380 - DNA, 169 bp, Zea mays
  Clone ID: MRT4577_124068C.1
atgacttgaactctacatggtttacgcgggataaacatagaacctgaatcatgtgctgcagtgccgcacattcgaaaatgtaacccctactacaaaaaaaaatacatatcctatactaaaactattaacctagagtaaaattatagccaaacaaccttaaaagggcggc

SEQ ID NO: 26381 - DNA, 388 bp, Zea mays
  Clone ID: MRT4577_124069C.1
ttcatttgcgtacacggcctccctcttcctgtcacttttacagcgagattgcggcagtgagtgggagacaaggtgaaatggttgaagggagcgcacgtatccatgcggcgccggcggccggcataggtggacgataacatgtcggcttggctggttgtcaagaacaccctcaagatcatgcctcttcaagctcccgtccgtacgcccttatgatgtccgctttcgcatgaaggcagcggtgatttgcagcatctatctgcactacctaagggagatgcgcctcccgcacttggtgcatatagaaccgatggcgatcgggcacgactgcgccggcgttgtctacgaggtctgcgccagctagacacacctgtccgtgggcgatcctttg

SEQ ID NO: 26382 - DNA, 436 bp, Zea mays
  Clone ID: MRT4577_12406C.1
ggcttggaacctttgggctgatttatgtgcttgtaatttcataggacttaataggtaactgtagtcggtactccattcccactatttccggcttcttaataactactagtttcaccatagtagccattcccggcgtacccaccggtataaaatactagggtataataatcataataatccgcgtcagtaaattccgtcgttcatctctagtaatagtagccctccttacctaattaatcagtcgtaccgaatctcgtcctccacccgtaataataataatcattacctagttagtcactcgtcgttcatttttagtaaccctccttacctaattaatcgatagtaccgaatctcttcgtccacccatagtagtaataatcatcattacctagttagtcagtcggcgcgagtttcgtcattcctccgatataattat

SEQ ID NO: 26383 - DNA, 282 bp, Zea mays
  unsure (1)..(282): unsure at all n locations
  Clone ID: MRT4577_124070C.1
angnnanaaggaaggctctttctactaacatcccgaagggagaagacgaagcggagggggatgagcggcttgacgaccaccttgggggagcaaaagagggaaaagcgcagtggacagaaaaacggggaccaaaaccagggcccccaggaaccgggggggcagaaaccggagggggcggccgcgggagaaaaatgtgaaaaagcaagaccagggggggaaccccaaagggacgcgaaggggggggaggggtccagggggccaagctgaagccggggaaaacca

SEQ ID NO: 26384 - DNA, 271 bp, Zea mays
  Clone ID: MRT4577_124071C.1
cattagctttatctactccagagcttagaagaacccgatcgacaccatgagggggttgcttactttcctaactctcctggctctcgctgctagcgccacctacacgcatacaagctaagatttctgctttaatatcaccgtctatccatgaattactaccgcctttacatatgatttcttcacattttcatctatcctttgttgtaaatttaaccatttattgcttcatctttcatattttattattattttttattaataattacattta

SEQ ID NO: 26385 - DNA, 307 bp, Zea mays
  Clone ID: MRT4577_124072C.1
ggcaaggacagaaaacggggcattgaccaaaaagggttgttcaaaaaaacaaaaaattttttttggggggccaaaaaaaaacacctttttttggctccaaaacaaattattcattacccccaggggtgggattttttaccccggggtttaacagggggagggggaataataataggccccaaatttataattggggagcgatggggccataataaaagacggctttttggacaaacataatatgggggggggggcttcaaaatttaaaaaccacactgtaatggacccgggtcttttgtttttgggg

SEQ ID NO: 26386 - DNA, 399 bp, Zea mays
  Clone ID: MRT4577_124073C.1
aaaaaaaaacggggggggattttttaagggggcattatggtatcacccctaacgggcaaggggcaaccccccggggaataattttaagggaaacaggggggggcccaaaaaaaaccgccccccgcttggcccaaaaaaaaaacggggggggtgcctgggggactgtttccaaccccccttcctatccttaaaaacggggggggggggggattccccactggacccggcccatgggggggggggacccaaagcaaacattggggcaagggggccaaaagccggcccgccttccatggaagggacggggggtttttttcattattcagcttactatggggggaggaacgggggattttaaagggaccacccctttgggcctttttaacaaaacaaaggggc
